United States Patent Application Publication US 2015/0307562 A1 - sequence listing, part 2

SEQ ID NO: 6401 - protein, 863 aa, Escherichia coli
MHIRKHRLAGFFVRLVVACAFAAQAPLSSAELYFNPRFLADDPQAVADLSRFENGQELPPGTYRVDIYLNNGYMATRDVTFNTGDSEQGIVPCLTRAQLASMGLNTASVSGMNLLADDACVPLTSMIHDATAHLDVGQQRLNLTIPQAFMSNRARGYIPPELWDPGINAGLLNYNFSGNSVQNRIGGNSHYAYLNLQSGLNIGAWRLRDNTTWSYNSSDSSSGSKNKWQHINTWLERDIIPLRSRLTLGDGYTQGDIFDGINFRGAQLASDDNMLPDSQRGFAPVIHGIARGTAQVTIKQNGYDIYNSTVPPGPFTINDIYAAGNSGDLQVTIKEADGSTQIFTVPYSSVPLLQREGHTRYSITAGEYRSGNAQQEKPRFFQSTLLHGLPAGWTIYGGTQLADRYRAFNFGIGKNMGALGALSVDMTQANSTLPDDSQHDGQSVRFLYNKSLNESGTNIQLVGYRYSTSGYFNFADTTYSRMNGYNIETQDGVIQVKPKFTDYYNLAYNKRGKLQLTVTQQLGRTSTLYLSGSHQTYWGTSNVDEQFQAGLNTAFEDINWTLSYSLTKNAWQKGRDQMLALNVNIPFSHWLRSDSKSQWRHASASYSMSHDLNGRMTNLAGVYGTLLEDNNLSYSVQTGYAGGGDGNSGSTGYATLNYRGGYGNANIGYSHSDDIKQLYYGVSGGVLAHANGVTLGQPLNETVVLVKAPGAKDAKVENQTGVRTDWRGYAVLPYATEYRENRVALDTNTLADNVDLDNAVANVVPTRGAIVRAEFKARVGIKLLMTLTHNNKPLPFGAMVTSESSQSSGIVADNGQVYLSGMPLAGKVQVKWGEEENAHCVANYQLPPESQQQLLTQLSAECR

SEQ ID NO: 6402 - protein, 747 aa, Escherichia coli; identical to SEQ ID NO: 2072

SEQ ID NO: 6403 - protein, 869 aa, Escherichia coli; identical to SEQ ID NO: 4351

SEQ ID NO: 6404 - protein, 331 aa, Escherichia coli; identical to SEQ ID NO: 2700

SEQ ID NO: 6405 - protein, 678 aa, Escherichia coli; identical to SEQ ID NO: 3881

SEQ ID NO: 6406 - protein, 203 aa, Escherichia coli; identical to SEQ ID NO: 2201

SEQ ID NO: 6407 - protein, 407 aa, Escherichia coli
MTERELSIIRALGEEFSTVLADLQRTFEGKMASQAQAFEEKLTSLSAVLQKHVTVDEVRPVLQAMVDDAVGAIPVPRDGRDYDPDVLQQAVNDAVANIPQPADGKSLTPDDVRPMLEQMVKEAVSHIPVPRDGRDYDPEVLQKAVNDAVANIPQPADGKSLTPDDVRPMLEQMVKEAVSHIPVPRDGRDYDPDVLQKAVNDAVANIPQPADGKSLTPDDVRPMLEQMVKEAVSHIHVPRDGRDYDPDVLQKAVLDAVSALPAPQDGRDATALEILPAIDDQKSFPRGTYATHQGGLWRAYEKTHGMRGWECLVDGVADIDVSMTGERLFSVVVRQSSGQRTEKTFSLPVMLYRGVFRAGETYHPGDTVTWGGSLWHCNSMTEDKPGEAHSSAWTLAAKRGRDAGGGK

SEQ ID NO: 6408 - protein, 170 aa, Escherichia coli; identical to SEQ ID NO: 2565

SEQ ID NO: 6409 - protein, 505 aa, Escherichia coli
MKKQISGNFDLTEPYALIERLSAQMGLIWYDDGKAIYIYDSSEMRNALINLRKVSTNEFNNFLKKSGLYNSRYEIKGDGNGTFYVSGPPVYVDLVVNAAKLMEQNSDGIEIGRNKVGIIHLVNTFVNDRTYELRGEKIVIPGMAKVLSTLLNNNIKQSTGVNVLSEISSRQQLKNVSRMPPFPGAEEDDDLQVEKIISTAGAPETDDIQIIAYPDTNSLLVKGTVSQVDFIEKLVATLDIPKRHIELSLWIIDIDKTDLEQLGADWSGTIKIGSSLSASFNNSGSISTLDGTQFIATIQALAQKRRAAVVARPVVLTQENIPAIFDNNRTFYTKLVGERTAELDEVTYGTMISVLPRFAARNQIELLLNIEDGNEINSDKTNVDDLPQVGRTLISTIARVPQGKSLLIGGYTRDTNTYESRKIPILGSIPFIGKLFGYEGTNANNIVRVFLIEPREIDERMMNNANEAAVDARAITQQMAKNKEINDELLQKWIKTYLNREVVGG

SEQ ID NO: 6410 - protein, 730 aa, Escherichia coli
DERQCADLSVIPQATEEFLFEAQKLVLSIPQVAIRSPLRGVASDLIWEDGISTFLLNWQVEAGHSEFQHYEKTTSDNFWASLEPGINIGPWRIRNLTTLNKSSGQVGKWESSYIRAERGLNNIKSRLTLGEDYTPADIFASVPFRGVMLGTDENMIPYNQRGFAPVIRGIARTQARIEIRQNGYLIQSQTVAAGPFALTDLPITGSGGEFQVTIFESDGAIQSFNVPFTTPAIALREGYLKYNISAGQYRSSDESVEKAYLWQATAMYGLPRALTVFGGVQTAEHYQAAALGVGLSLGNMGAASLDTIYSRGQQKGYDFDTGNSWRIRYDKSFKLTDTSFSAASYQYSNEGYHELSDILDTYRSGANFVFNDTDRKRRRITININQSLGPWGFIGLSGGRDEYKGGDRQDYIGASYSMSWKDISFSVNWTRNRNVGDYFSNRTFNEDTVGMWMSIPLKHWLGKNDNDVNATAQIQHSTRQNTRYEMGLNGRAFDQKLYWDIREQIVPGSKYDADTSRLNMRWSGSYGELVGMYSYNSHTRQMNAGMSGSIAMHSEGITFGQRFGDTMALIAAPGVRGASVGGWPGVSTDSRGYALVSYITPYQENIITLDPTTFPENAEVLQTDTRVVPTKGAVVRAKFKTRVGNRAVVRLARADGTPLPFGTVVTLEGKTEVSNSTGVVDDKGMVYLSGLSEAGKLKAQWGMNSHCYANYRLPVKKGPAGLYLTSAVCI

SEQ ID NO: 6411 - protein, 721 aa, Escherichia coli
MDEIPALAEKDDDSVINSLEQIIPGTAAEFDFNHQRLNLSIPQIALYRDARGYVSPSRWDDGIPTLFTNYSFTGSDNRYRQGNRSQRQYLNMQNGANFGPWRLRNYSTWTRNDQASSWNTISSYLQRDIKALKSQLLLGESATSGSIFSSYTFTGVQLASDDNMLPNSQRGFAPTVRGIANSSAIVTIRQNGYVIYQSNVPAGAFEINDLYPSSNSGDLEVTIEESDGTQRRFIQPYSSLPMMQRPGHLKYSATAGRYRADANSDSKEPEFAEATAIYGLNNTFTLYGGLLGSEDYYALGIGIGGTLGALGALSMDINRADTQFDNQHSFHGYQWRTQYIKDIPETNTNIAVSYYRYTNDGYFSFDEANTRNWDYNSRQKSEIQFNISQTIFDGVSLYASGSQQDYWGNNEKNRNISVGVSGQQWGIGYSLNYQYSRYTDENNDRALSLNLSIPLERWLPRSRVSYQMTSQKDRPTQHEMRLDGSLLDDGRLSYSLEQSLDDDNNHNSSLNASYRSPYGTFSAGYSYGNDSSQYNYGVTGGVVIHPHGVTLSQYLGNAFALIDANGASGVRIQNYPGIATDPFGYAVVPYLTTYQENRLSVDTTQLPDNVDLEQTTQFVVPNRGAMVAARFNANIGYRVLVTVSDRNGKPLPFGALASNDETGQQSIVDEGGILYLSRISSKSQSWTVRWGNQADQQCQFAFSTPDSEPTTSVLQGTAQCH

SEQ ID NO: 6412 - protein, 165 aa, Escherichia coli; identical to SEQ ID NO: 5130

SEQ ID NO: 6413 - protein, 368 aa, Escherichia coli; identical to SEQ ID NO: 2371

SEQ ID NO: 6414 - protein, 266 aa, Escherichia coli; identical to SEQ ID NO: 1894

SEQ ID NO: 6415 - protein, 732 aa, Escherichia coli; identical to SEQ ID NO: 3068

SEQ ID NO: 6416 - protein, 249 aa, Escherichia coli; identical to SEQ ID NO: 2793

SEQ ID NO: 6417 - protein, 485 aa, Escherichia coli
MTVKISGVLKDGTGKPVQNCTIVLKARRTSSTVVVNTVASENPDEAGRYSMDVEHGQYSVTLLVEGFPPSHAGTITVYEDSRPGTLNDFLGAMTEDDARPEALRRFELMVEEVVRNAEEAKKNAGEAETSARNAGISASQAEESAANADTSAGDASESARQAAESAASAKQSEEASSSSASAAAQKASESLQSATDAELSKKTAESAAGNAARDATTATEKARESAESAQSAEQSRIAAEEAVNRIPTVVGPPGPKGEPGPAGPQGPKGDKGERGDTGPAGATGERGPAGDAGPAGPQGPKGDRGETGLTGAAGPAGPQGPKGDTGAAGPAGPQGPKGDTGAAGPAGPQGPKGDAGVAGPAGPQGPKGDTGAAGPAGPQGPKGDAGVAGPAGPQGPSGSPDSGLFGVGSFVLAAYYQTYYSGDRAPGSTVAGSSLSACCLSNGTPLVASGNVGETRLPGTWRACGPMLWTSSPGIRQAGLFQRIS

SEQ ID NO: 6418 - protein, 446 aa, Escherichia coli; identical to SEQ ID NO: 2176

SEQ ID NO: 6419 - protein, 879 aa, Escherichia coli
MPDHSLFRLRVLPCCVALAMSGSYVNAWAENEIQFDSRFLELKGDTKIDLKRFSSQGYVEPGKYNLQVQLNKQPLTEEYDIYWYASENDASKTYACLTPELVAQFGLKEDVAKNLQWIHDGKCLKPGQLEGIDIKADLSQSALVISLPQAYLEYTDINWDPPSRWDDGISGLIADYSITAQTRHEENGGDDSNEISGNGTVGVNLGAWRLRADWQTDYLHSKSNDDDVINGDDTQKNWEWSRYYAWRALPSLKAKLGLGEDYLNSDIFDGFNYVGGSISTDDQMLPPNLRGYAPDISGVAHTTAKVTVSQLGRVIYETQVPAGPFRIQDLGDSVSGTLHIRIEEQNGQVQEYDINTASMPFLTRPGQVRYKLMMGRPQEWGHHVEGGFFSGGEASWGIANGWSLYGGALADEHYQSAALGVGRDLSVFGAVAFDITHSHTRLDKETAYGKGSLDGNSFRLSYSKDFDELNSRVTFAGYRFSEENFMTMSEYLDASDSEMVRTGNDKEMYTATYNQNFRDAGVSVYLNYTRHTYWDRDEQTNYNVMLSHYFNLGSIRNMSISMTGYRYEYDNQADKGVYISLSMPWGDSSTISYNGNYGSGSDSSQVGYFSRVDDATHYQLNVGTSDNHSSVDGYYSHDGSLAQVDLSANYHEGQYTSAGISLQGGATLTAQGGALHRTQNMGGTRLLIDADGVAGVPVEGNGAAVYTNMFGKAVVADVNNYYRNQAYIDLNNLPENAEATQSVVQATLTEGAIGYRKFSVSSGQKAMAVLRLQDGSYPPFGAEVKNDSAQNVGLVDDDGNVYLAGVKPGEHMIVSWGGVAHCDIHLPDPLPADLFNGLLLPCQQTGAISPSMPHEIKPVIQEQTQQVMPTEAPVSVSAN

SEQ ID NO: 6420 - protein, 208 aa, Escherichia coli; identical to SEQ ID NO: 1949

SEQ ID NO: 6421 - protein, 75 aa, Escherichia coli; identical to SEQ ID NO: 4451

SEQ ID NO: 6422 - protein, 161 aa, Escherichia coli; identical to SEQ ID NO: 2582

SEQ ID NO: 6423 - protein, 879 aa, Escherichia coli; identical to SEQ ID NO: 5138

SEQ ID NO: 6424 - protein, 880 aa, Escherichia coli
MPDHSLFRLRILPWCIALAMSGSYSSVWAEDDIQFDSRFLELKGDTKIDLKRFSSQGYVEPGKYNLQVQLNKQPLAEEYDIYWYAGEDDASKSYACLTPELVAQFGLKEDVAKNLQWSHDAKCLKSGQLEGMEIKADLSQSALVISLPQAYLEYTYPDWDPPSRWDDGISGIVADYSINAQTRHEENGGDDSNEISGNGTVGVNLGPWRMRADWQTNYQHTRSNDDDEFSGDETQKKWEWSRYYAWRALPSLKAKLALGEDYLRSDIFDGFNYVGGSVSTDDQMLPPNLRGYAPDISGVAHTTAKVTVSQMGRVIYETQVPAGPFRIQDLGDSVSGTLHIRIEEQNGQVQEYDISTASMPYLTRPGQVRYKIMMGRPQEWGHHVEGEFFSGAEASWGIANGWSLYGGALGDENYQSAALGVGRDLSTFGAVAFDVTHSHTKLDKDTAYGKGSLDGNSFRVSYSKDFDQLNSRVTFAGYRFSEENFMTMSEYLDASDSGMVRTGNDKEMYTATYNQNFRDAGVSVYLNYTRHTYWDREEQTNYNIMLSHYFNMGSIRNVSISMTGYRYEYDNQADKGMYISLSMPWGDNSTVSYNGNYGSGTDSSQVGYFSRVDDATHYQLNVGTSDKHTSVDGYYSHDGSLAQVDLSANYHEGQYTSAGLSLQGGATLTAHGGALHRTQNMGGTRLLIDADGVADVPVEGNGAAVYTNMFGKAVVSDVNNYYRNQAYIDLNKLPENAEATQSVVQATLTEGAIGYRKFAVISGQKAMAVLRLQDGSHPPFGAEVKNDNEQTVGLVDDDGNVYLAGVKPGEHMSVFWSGVAHCDINLPDPLPADLFNGLLLPCQHKGNVAPVVPDDIKPVIQEQTQQVTPTNPPVSVSANQ

SEQ ID NO: 6425 - protein, 686 aa, Escherichia coli
MIVEGSATAPDDGENDYSVTSTSAGTKMQMTQRDIPQSVTIVSQQRMEDQQLQTLGEVMENTLGISKSQADSDRALYYSRGFQIDNYMVDGIPTYFESRWNLGDALSDMALFERVEVVRGATGLMTGTGNPSAAINMVRKHATSREFKGDVSAEYGSWNKERYVADLQSPLTEDGKIRARIVGGYQNNDSWLDRYNSEKTFFSGIVDADLGDLTTLSAGYEYQRIDVNSPTWGGLPRWNTDGSSNSYDRARSTAPDWAYNDKEINKVFMTLKQRFADTWQATLNATHSEVEFDSKMMYVDAYVNKADGMLVGPYSNYGPGFDYVGGTGWNSGKRKVDALDLFADGSYELFGRQHNLMFGGSYSKQNNRYFSSWANIFPDEIGSFYNFNGNFPQTDWSPQSLAQDDTTHMKSLYAATRVTLADPLHLILGARYTNWRVDTLTYSMEKNHTTPYAGLVFDINDNWSTYASYTSIFQPQNDRDSSGKYLAPITGNNYELGLKSDWMNSRLTTTLAIFRIEQDNVAQSTGTPIPGSNGETAYKAVDGTVSKGVEFELNGAITDNWQLTFGATRYIAEDNEGNAVNPNLPRTTVKMFTSYRLPVMPELTVGGGVNWQNRVYTDTVTPYGTFRAEQGSYALVDLFTRYQVTKNFSLQGNVNNLFDKTYDTNVEGSIVYGAPRNFSITGTYQF

SEQ ID NO: 6426 - protein, 518 aa, Escherichia coli
MKKLKINYLFIGILALLLAVALWPSIPWFGKADNRIAAIQARGELRVSTIHTPQTYNEINGKPFGLDYELAKQFADYLGVKLKVTVRQNISQLFDDLDNGNADLLAAGLVYNSERVKNYQPGPTYYSVSQQLVYKVGQYRPRTLGNLTAEQLTVAPGHVVVNDLQTLKETKFPELSWKVDDKKGSAELMEDVIEGKLDYTIADSVAISLFLRVHPELAVALDITDEQPVTWFSPLDGDNTLSAALLDFFNEMNEDGTLARIEEKYLGHGDDFDYVDTRTFLRAVDAVLPQLKPLFEKYAEEIDWRLLAAIAYQESHWDAQATSPTGVRGMMMLTKNTAQSLGITDRTDAEQSISGGVRYLQDMMSKVPESVPENERIWFALAAYNMGYAHMQDARALTAKTKGNPDSWADVKQRLPLLSQKPYYSKLTYGYARGHEAYAYVENIRKYQISLVGYLQEKEKQATEAAMQLAQDYPAVSPTELGKEKFPFLSFLSQSSSNYLTHSPSLLFSRKGSEEKQN

SEQ ID NO: 6427 - protein, 517 aa, Escherichia coli; identical to SEQ ID NO: 2462

SEQ ID NO: 6428 - protein, 746 aa, Escherichia coli
MNKKIHSLALLVNLGIYGVAQAQEPTDTPVSHDDTIVVTAAEQNLQAPGVSTITADEIRKNPVARDVSEIIRTMPGVNLTGNSTSGQRGNNRQIDIRGMGPENTLILIDGKPVSSRNSVRQGWRGERDTRGDTSWVPPEMIERIEVLRGPAAARYGNGAAGGVVNIITKKGSGEWHGSWDAYFNAPEHKEEGATKRTNFSLTGPLGDEFSFRLYGNLDKTQADAWDINQGHQSARAGTYATTLPAGREGVINKDINGVVRWDFAPLQSLELEAGYSRQGNLYAGDTQNTNSDSYTRSKYGDETNRLYRQNYALTWNGGWDNGVTTSNWVQYEHTRNSRIPEGLAGGTEGKFNEKATQDFVDIDLDDVMLHSEVNLPIDFLVNQTLTLGTEWNQQRMKDLSSNTQALTGTNTGGAIDGVSTTDRSPYSKAEIFSLFAENNMELTDSTIVTPGLRFDHHSIVGNNWSPALNISQGLGDDFTLKMGIARAYKAPSLYQTNPNYILYSKGQGCYASAGGCYLQGNDDLKAETSINKEIGLEFKRDGWLAGVTWFRNDYRNKIEAGYVAVGQNAVGTDLYQWDNVPKAVVEGLEGSLNVPVSETVMWTNNITYMLKSENKTTGDRLSIIPEYTLNSTLSWQAREDLSMQTTFTWYGKQQPKKYNYKGQPAVGPETKEISPYSIVGLGATWDVTKNVSLTGGVDNLFDKRLWRAGNAQTTGDLAGANYIAGAGAYTYNEPGRTWYMSVNTHF

SEQ ID NO: 6429 - protein, 207 aa, Escherichia coli; identical to SEQ ID NO: 2211

SEQ ID NO: 6430 - protein, 760 aa, Escherichia coli; identical to SEQ ID NO: 2080

SEQ ID NO: 6431 - protein, 478 aa, Escherichia coli; identical to SEQ ID NO: 2404

SEQ ID NO: 6432 - protein, 359 aa, Escherichia coli; identical to SEQ ID NO: 2329

SEQ ID NO: 6433 - protein, 430 aa, Escherichia coli; identical to SEQ ID NO: 2617

SEQ ID NO: 6434 - protein, 224 aa, Escherichia coli; identical to SEQ ID NO: 3115

SEQ ID NO: 6435 - protein, 478 aa, Escherichia coli; identical to SEQ ID NO: 2405

SEQ ID NO: 6436 - protein, 111 aa, Escherichia coli; identical to SEQ ID NO: 5097

SEQ ID NO: 6437 - protein, 539 aa, Escherichia coli; identical to SEQ ID NO: 3050

SEQ ID NO: 6438 - protein, 203 aa, Escherichia coli; identical to SEQ ID NO: 2015

SEQ ID NO: 6439 - protein, 678 aa, Escherichia coli; identical to SEQ ID NO: 2902

SEQ ID NO: 6440 - protein, 656 aa, Escherichia coli
MRLKKHYLCTALSLAFTQQAVAAQESDSLTVWSSPVSSTTTTVLDQPTMKALDKQNVAQALSVVPGVVLQKSGSRNEEQVKVRGFDSRQVPVYFDGVPIYVPYDGNLDLARILTNNLGAVEVSKGYSSLLQGPNQMGGAINITTQKPTKPLEASLGYRQGWSRSQDNAYDMHASFAASSELGYLQVSGSQLKQDFLGLPHGVNNDIAGKHGKMINSSADDKRGIVKLGFTPRENDEYTLTYIKQDGEKDNPPYSGNSGQKSRYWQWPEYDKESFYYQGTTQLNDRFTLKSRLYRDTFENTLMMYNSLADLKNKKGSYSHYSDYSDGAGLQLAADVRENDLLSFAVNWKDDVHREKGAPHAAYDRYEDRTWSLASEYQWAAADNVDVVAGISYDWRDSVEAKKHEKDGSITHYDDNNQSAFNWQVMGKYHFVNEDTLALSYYDRKRFPTLKERYTTSKPAYNQIAIVNPQLKPERARGVDLTWNGAFTHDWGFEVSVYYNRVSDAILSHNIDADTIQNQNSGTVDYSGLDAGIKGKISNILDVGLSYALIHADAKRKDIGKITDLPTQTMTAWMTLKPWEPLSVTLSEEARSSSYSNSDGSQKAAGFAVTHIRADYTLGHGFSVNASVNNLFDTQYAYSEGFIEEGRNFWAGVEYTF

SEQ ID NO: 6441 - protein, 366 aa, Escherichia coli; identical to SEQ ID NO: 3520

SEQ ID NO: 6442 - protein, 614 aa, Escherichia coli; identical to SEQ ID NO: 4469

SEQ ID NO: 6443 - protein, 659 aa, Escherichia coli; identical to SEQ ID NO: 2942

SEQ ID NO: 6444 - protein, 228 aa, Escherichia coli; identical to SEQ ID NO: 5492

SEQ ID NO: 6445 - protein, 231 aa, Escherichia coli; identical to SEQ ID NO: 2868

SEQ ID NO: 6446 - protein, 351 aa, Escherichia coli; identical to SEQ ID NO: 2872

SEQ ID NO: 6447 - protein, 203 aa, Escherichia coli; identical to SEQ ID NO: 2009

SEQ ID NO: 6448 - protein, 412 aa, Escherichia coli; identical to SEQ ID NO: 2908

SEQ ID NO: 6449 - protein, 243 aa, Escherichia coli; identical to SEQ ID NO: 4409

SEQ ID NO: 6450 - protein, 241 aa, Escherichia coli; identical to SEQ ID NO: 3582

SEQ ID NO: 6451 - protein, 828 aa, Escherichia coli; identical to SEQ ID NO: 2381

SEQ ID NO: 6452 - protein, 432 aa, Escherichia coli; identical to SEQ ID NO: 2026

SEQ ID NO: 6453 - protein, 760 aa, Escherichia coli; identical to SEQ ID NO: 2078

SEQ ID NO: 6454 - protein, 213 aa, Escherichia coli; identical to SEQ ID NO: 2232

SEQ ID NO: 6455 - protein, 746 aa, Escherichia coli; identical to SEQ ID NO: 2949

SEQ ID NO: 6456 - protein, 700 aa, Escherichia coli; identical to SEQ ID NO: 2926

SEQ ID NO: 6457 - protein, 118 aa, Escherichia coli [sequence omitted]

SEQ ID NO: 6458 - protein, 784 aa, Escherichia coli; identical to SEQ ID NO: 5933

SEQ ID NO: 6459 - protein, 250 aa, Escherichia coli; identical to SEQ ID NO: 3048

SEQ ID NO: 6460 - protein, 331 aa, Escherichia coli
MKKPVVIGLAVVVLAAVVAGGYWWYQSRQDNGLTLYGNVDIRTVNLSFRVGGRVESLAVDEGDAIKAGQVLGELDHKPYEIALMQAKAGVSVAQAQYDLILAGYRDEEIAQAAAAVKQAQAAYDYAQNFYNRQQGLWKSRTISANDLENARSSRDQAQATLKSAQDKLRQYRSGNREQDIAQTKASLEQAQAQLAQAELNLQDSTLIAPSDGTLLTRAVEPGTVLNEGGTVFTVSLTRPVWVRAYVDERNLDQAQPGRKVLLYTDGRPDKPYHGQIGFVSPTAEFTPKTVETPDLRTDLVYRLRIVVTDADDALRQGMPVTVQFGNEAGHE

SEQ ID NO: 6461 - protein, 203 aa, Escherichia coli; identical to SEQ ID NO: 2201

SEQ ID NO: 6462 - protein, 128 aa, Escherichia coli; identical to SEQ ID NO: 5861

SEQ ID NO: 6463 - protein, 191 aa, Escherichia coli; identical to SEQ ID NO: 2727

SEQ ID NO: 6464 - protein, 686 aa, Escherichia coli; identical to SEQ ID NO: 3129

SEQ ID NO: 6465 - protein, 646 aa, Escherichia coli
MRLATPRINLSESLTSVPGLQVQNRQNYAQDLQLSIRGFGSRSTYGIRGIRLYVDGIPATMPDGQGQTSNIDLSSVQNVEVLRGPFSALYGNASGGVMNVTTQTGQQPPTIEASSYYGSFGSWRYGLKATGATGDGTQPGDVDYTVSTTRFTTHGYRDHSGAQKNLANAKLGVRIDEASKLSLIFNSVDIKADDPGGLTKAEWKANPQQAPRAEQYDTRKTIKQTQAGLRYERSLSAQDDMSVMMYAGERETTQYQSIPMAPQLNPSHAGGVITLQRHYQGIDSRWTHRGELGVPVTFTTGLNYENMSENRKGYNNFRLNSGMPEYGQKGELRRDERNLMWNIDPYLQTQWQLSEKLSLDAGVRYSSVWFDSNDHYVTPGNGDDSGDASYHKWLPAGSLKYAMTDAWNIYLAAGRGFETPTINELSYRADGQSGMNLGLKPSTNDTIEIGSKTRIGDGLLSLALFQTDTDDEIVVDSSSGGRTTYKNAGKTRRQGAELAWDQRFAGDFRVNASWTWLDATYRSNVCNEQDCNGNRMPGIARNMGFASIGYVPEDGWYAGTEARYMGDIMADDENTAKAPSYTLVGLFTGYKYNYHNLTVDLFGRVDNLFDKEYVGSVIVNESNGRYYEPSPGRNYGVGMNIAWRFE

SEQ ID NO: 6466 - protein, 312 aa, Escherichia coli
MDEIPALAEKDDDSVINSLEQIIPGTAAEFDFNHQRLNLSIPQIALYRDARGYVSPSRWDDGIPTLFTNYSFTGSDNRYRQGNRSQRQYLNMQNGANFGPWRLRNYSTWTRNDQTSSWNTISSYLQRDIKALKSQLLLGESATSGSIFSSYTFTGVQLASDDNMLPNSQRGFAPTVRGIANSSAIVTIRQNGYVIYQSNVPAGAFEINDLYPSSNSGDLEVTIEESDGTQRRFIQPYSSLPMMQRPGHLKYSATAGRYRADANSDSKEPEFAEATAIYGLNNTFTLYSGLLGSEDYYALGIGIGGTLGRLAP

SEQ ID NO: 6467 - protein, 903 aa, Escherichia coli
MKLNIFTKSMIGMGLVCSALPALAMEAWNNQQGGNKYQVIFDGKIYENAWWVSSTNCPGKAKANDATNPWRLKRTATAAEISQFGNTLSCEKSGSSSSSNSNTPASNTPANGGSATPAQGTVPSNSSVVAWNKQQGGQTWYVVFNGAVYKNAWWVASSNCPGDAKSNDASNPWRYVRAATATEISETSNPQSCTSAPQPSPDVKPAPDVKPAPDVKPAPDVQPAPADKSNDNYAVVAWKGQEGSSTWYVIYNGGIYKNAWWVGAANCPGDAKENDASNPWRYVRAATATEISQYGNPGSCSVKPDNNGGAVTPVDPTPETPVTPTPDNNEPSTPADSGNDYSLQTWSGQEGSEIYHVIFNGNVYKNAWWVGSKDCPRGTSAENSNNPWRLVRTATAAELSQYGNPTTCEIDNGGVIVADGFQASKAYSADSIVDYNDAHYKTSVDQDAWGFVPGGDNPWKKYEPAKAWSASTVYVKGDRVVVDGQAYEALFWTQSDNPALVANQNATGSNSRPWKPLGKAQSYSNEELNNAPQFNPETLYASDTLIRFNGVNYISQSKVQKVSPSDSNPWRVFVDWTGTKERVGTPKKAWPKHVYAPYVDFTLNTIPDLAALAKNHNVNHFTLAFVVSKDANTCLPTWGTAYGMQNYAQYSKIKALREAGGDVMLSIGGANNAPLAASCKNVDDLMQHYYDIVDNLNLKVLDFDIEGTWVADQASIERRNLAVKKVQDKWKSEGKDIAIWYTLPILPTGLTPEGMNVLSDAKAKGVELAGVNVMTMDYGNAICQSANTEGQNIHGKCATSAIANLHSQLKGLHPNKSDAEIDAMMGTTPMVGVNDVQGEVFYLSDARLVMQDAQKRNLGMVGIWSIARDLPGGTNLSPEFHGLTKEQAPKYAFSEIFAPFTKQ

SEQ ID NO: 6468 - protein, 113 aa, Escherichia coli
MEKDQKNENTLQLAIISRIKMFYRPTNLAMAPEEAPAMLRFRRSGSKLTLINPTPYFITVTNMKAGNSNLPNTMVPPKGEVSVDITHAATGDISFQTINDYGALTPRIKATMQ

SEQ ID NO: 6469 - protein, 118 aa, Escherichia coli [sequence omitted]

SEQ ID NO: 6470 - protein, 208 aa, Escherichia coli; identical to SEQ ID NO: 1949

SEQ ID NO: 6471 - protein, 45 aa, Escherichia coli
MLTSRPEIRFYATYIKALENELDGFTFEDNKDDQFAVGAQAEIWW

SEQ ID NO: 6472 - protein, 673 aa, Escherichia coli; identical to SEQ ID NO: 2919

SEQ ID NO: 6473 - protein, 170 aa, Escherichia coli [sequence omitted]

SEQ ID NO: 6474 - protein, 339 aa, Escherichia coli
MQFHINSPDINNEKAVLLARDETLGNCLNLTEIIPQTSVRYDVNEQRLDIDVPQAWVMKNYQNYVDPSLWENGINAAMLSYNLNGYHSETPGRRNDSIYAAFNGGMNLGAWRLRASGNYNWMTDSGSNYDFKNRYIQRDIASLRSQLILGESYTTGETFDSVSIRGIRLYSDSRMLPPTLASFAPIIHGVANTNAKVTITQGGYKIYETTVPPGAFVIDDLSPSGYGSDLIVTVEESDGSKRTFSQPFSSVVQMLRPGVGRWDISGGQVLKDDIQDEPNLFQASYYYGLNNYLTGYTGIQITDNNYTAGLLGLGLNTSVGAFSFDVTHSNVRIPDGFVE

SEQ ID NO: 6475 - protein, 826 aa, Escherichia coli
MLRMTPLASAIVALLLGIEAYAAEETFDTHFMIGGMKDQQVANIRLDDNQPLPGQYDIDIYVNKQWRGKYEIIVKDNPQETCLSIEVIKRLGINSDNFASGKQCLTFEQLVQGGSYTWDIGVFRLDFSVPQAWVEELESGYVPPENWERGINAFYTSYYVSQYYSDYKASGNSKSTYVRFNSGLNLLGWQLHSDASFSKTNNNPGVWKSNTLYLERGFAQLLGTLRVGDMYTSSDIFDSVRFSGVRLFRDMQMLPNSKQNFTPRVQGIAQSNALVTIEQNGFVVYQKEVPPGPFAITDLQLAGGGADLDVSVKEADGSVTTYLVPYAAVPNMLQPGVSKYDFAAGRSHIEGASKQSDFVQAGYQYGFNNLLTLYGGSMVANNYYAFTLGTGWNTRIGAISVDATKSHSKQDNGDVFDGQSYQIAYNKFVSQTSTRFGLAAWRYSSRDYRTFNDHVWANNKDNYRRDENDIYDIADYYQNDFGRKNSFSANMSQSLPEGWGSVSLSTLWRDYWGRSGSSKDYQLSYSNNLRRISYTLAASQAYDENHHEEKRFNIFISIPFDWGDDVSTPRRQIYMSNSTTFDDQGFASNNTGLSGTVGSRDQFNYGVNLSHQHQGNETTAGANLTWNAPVATVNGSYSQSSTYRQAGASVSGGIVAWSGGVNLANRLSETFAVMNAPGIKDAYVNGQKYRTTNRNGVVVYDGMTPYRENHLMLDVSQSDSEAELRGNRKIAAPYRGAVVLVNFDTDQRKPWFIKALRADGQPLMFGYEVNDIHGHNIGVVGQGSQLFIRTNEVPPSVNVAIDKQQGLSCTITFGKEIDESRNYICQ

SEQ ID NO: 6476 - protein, 224 aa, Escherichia coli; identical to SEQ ID NO: 3035

SEQ ID NO: 6477 - protein, 266 aa, Escherichia coli; identical to SEQ ID NO: 1894

SEQ ID NO: 6478 - protein, 161 aa, Escherichia coli; identical to SEQ ID NO: 2582

SEQ ID NO: 6479 - protein, 162 aa, Escherichia coli; identical to SEQ ID NO: 1965

SEQ ID NO: 6480 - protein, 200 aa, Escherichia coli; identical to SEQ ID NO: 1784

SEQ ID NO: 6481 - protein, 368 aa, Escherichia coli; identical to SEQ ID NO: 4616

SEQ ID NO: 6482 - protein, 241 aa, Escherichia coli; identical to SEQ ID NO: 2922

SEQ ID NO: 6483 - protein, 518 aa, Escherichia coli; identical to SEQ ID NO: 2349

SEQ ID NO: 6484 - protein, 839 aa, Escherichia coli
MTTITTAQIKSTLQSAKQSAANKLHSAGQSTKDALKKAAEQTRNAGNRLILLIPKDYKGQGSSLNDLVRTADELGIEVQYDEKNGTAITKQVFGTAEKLIGLTERGVTIFAPQLDKLLQKYQKAGNILGGGAENIGDNLGKAGGILSTFQNFLGTALSSMKIDELIKKQKSGGNVSSSEMAEASIELINQLVDTVASLNNNVNSFSQQLNTLGSVLSNTKHLNGVGNKLQNLPNLDNIGAGLDTVSGILSAISASFILSNADADTRTKAAAGVELTTKVLGNVGKGISQYIIAQRAAQGLSTSAAAAGLIASAVTLAISPLSFLSIADKFKRANKIEEYSQRFKKLGYDGDSLLAAFHKETGAIDASLTTISTVLASVSSGISAAATTSLVGAPVSALVGAVTGIISGILEASKQAMFEHVASKMADVIAEWEKKHGKNYFENGYDARHAAFLEDNFKILSQYNKEYSVERSVLITQQHWDTLIGELAGVTRNGDKTLSGKSYIDYYEEGKRLEKKPDEFQKQVFDPLKGNIDLSDSKSSTLLKFVTPLLTPGEEIRERRQSGKYEYITELLVKGVDKWTVKGVQDKGAVYDYSNLIQHASVGNNQYREIRIESHLGDGDDKVFLSAGSANIYAGKGHDVVYYDKTDTGYLTIDGTKATEAGNYTVTRVLGGDVKVLQEVVKEQEVSVGKRTEKTQYRSYEFTHINGKNLTETDNLYSVEELIGTTRADKFFGSKFTDIFHGADGDDLIEGNDGNDRLYGDKGNDTLIGGNGDDQLYGGDGNDKLIGGAGNNYLNGGDGDDELQVQGNSLAKNVLFGGKGNDKLYGSEGADLLDGGGGG

SEQ ID NO: 6485 - protein, 881 aa, Escherichia coli
MPDHSLFRLRILPWCIALAMSGSYSSVWAEDDIQFDSRFLELKGDTKIDLKRFSSQGYVEPGKYNLQVQLNKQPLAEEYDIYWYAGEDDASKSYACLTPELVAQFGLKEDVAKNLQWSHDAKCLKSGQLEGMEIKADLSQSALVISLPQAYLEYTYPDWDPPSRWDDGISGIVADYSINAQTRHEENGGDDSNEISGNGTVGVNLGPWRMRADWQTNYQHTRSNDDDEEFSGDDTQKKWEWSRYYAWRALPSLKAKLALGEDYLNSDIFDGFNYVGGSVSTDDQMLPPNLRGYAPDISGVAHTTAKVTVSQMGRVIYETQVPAGPFRIQDLGDSVSGTLHIRIEEQNGQVQEYDISTASMPYLTRPGQVRYKIMMGRPQEWGHHVEGEFFSGAEASWGIANGWSLYGGALGDENYQSAALGVGRDLSTFGAVAFDVTHSHTKLDKDTAYGKGSLDGNSFRVSYSKDFDQLNSRVTFAGYRFSEENFMTMSEYLDASDSGMVRTGNDKEMYTATYNQNFRDAGVSVYLNYTRHTYWDREEQTNYNIMLSHYFNMGSIRNMSVSLTGYRYEYDNRADKGMYISLSMPWGDNSTVSYNGNYGSGTDSSQVGYFSRVDDATHYQLNVGTSDKHTSVDGYYSHDGSLAQVDLSANYHEGQYTSAGLSLQGGATLTAHGGALHRTQNMGGTRLLIDADGVADVPVEGNGAAVYTNMFGKAVVSDVNNYYRNQAYIDLNKLPENAEATQSVVQATLTEGAIGYRKFAVISGQKAMAVLRLQDGSHPPFGAEVKNDNEQTVGLVDDDGNVYLAGVKPGEHMSVFWSGVAHCDINLPDPLPADLFNGLLLPCQHKGNVAPVVPDDIKPVIQEQTQQVTPTNPPVSVSANQ

SEQ ID NO: 6486 - protein, 367 aa, Escherichia coli; identical to SEQ ID NO: 4285

SEQ ID NO: 6487 - protein, 230 aa, Escherichia coli; identical to SEQ ID NO: 3019

SEQ ID NO: 6488 - protein, 746 aa, Escherichia coli; identical to SEQ ID NO: 4389

SEQ ID NO: 6489 - protein, 430 aa, Escherichia coli; identical to SEQ ID NO: 2617

SEQ ID NO: 6490 - protein, 678 aa, Escherichia coli
MVPSTFSRLKAARCLPVVLAALIFAGCGTHTPDQSTAYMQGTAQADSAFYLQQMQQSSDDTRINWQLLAIRALVKEGKTGQAVELFNQLPQELNDSQRREKTLLAVEIKLAQKDFAGAQNLLAKITPADLEQNQQARYWQAKIDASQGRPSIDLLRALIAQELLLGAKEKQQNIDATWQALSSMTQEQANTLVINADENILQGWLDLQRVWFDNRNDPDMMKAGIADWQKRYPNNPGAKMLPTQLVNVKAFKPASTNKIALLLPLNGQAAVFGRTIQQGFEAAKNIGTQPVAAQVAAAPAADVAEQPQPQTVDGVASPAQASVSDLTGEQPAAQPVPVSAPATSTAAVSAPANPSAELKIYDTSSQPLSQILSQVQQDGASIVVGPLLKNNVEELLKSNTPLNVLALNQPENIENRVNICYFALSPEDEARDAARHIRDQGKQAPLVLIPRSSLGDRVANAFAQEWQKLGGGTVLQQKFGSTSELRAGVNGGSGIALTGSPITPRATTDSGMTTNNPTLQTTPTDDQFTNNGGRVDAVYIVATPGEIAFIKPMIAMRNGSQSGATLYASSRSAQGTAGPDFRLEMEGLQYSEIPMLAGGNLPLMQQALSAVNNDYSLARMYAMGVDAWSLANHFSQMRQVQGFEINGNTGSLTANPDCVINRKLSWLQYQQGQVVPAS

SEQ ID NO: 6491 - protein, 193 aa, Escherichia coli; identical to SEQ ID NO: 2246

SEQ ID NO: 6492 - protein, 562 aa, Escherichia coli
MLPPDLRGYAPQITGVAQTNAKVTVSQNNRIIYQENVPPGPFAITNLFNTLQGQLDVKVEEEDGQVTQWQVASNSIPYLTRKGQIRYTTAMGKPTSVGGDSLQQPFFWTGEFSWGWLNNVSLYGSSVLTNRDYQSLAAGVGFNLNSLGSLSFDVTRSDAQLHNQDKETGYSYRANYSKRFESTGSQLTFAGYRFSDKNFVTMNEYINDTNHYTNYQNEKESYIVTFNQYLESLRLNTYVSLARNTYWDASSNVNYSLSLSRDFDIGPLKNVSTSLTFSRINWEEDNQDQLYLNISIPWGTSRTLSYGMQRNQDNKISHTASWYDSSDRNNSWSVSASGDNDEFKDMKASLRASYQHNTENGRLYLSGTSQRDSYYSLNASWNGSFTATRHGAAFHDYSGSADSRFMIDADGAEDIPLNNKRAVTNRYGIGVIPSVSSYITTSLSVDTRNLPENVDIENSVITTTLTEGAIGYAKLDTRKGYQIMGVIRLADGSHPPLGISVKDKTSHKELGLVADGGFVYLNGIQDDSKLTLRWGDKSCFIQPPNSSNLTTGTVILPCISQN

SEQ ID NO: 6493 - protein, 351 aa, Escherichia coli; identical to SEQ ID NO: 2872

SEQ ID NO: 6494 - protein, 565 aa, Escherichia coli
MKSPAPSRPQKMALIPACIFLCFAALSVQAEETPVTPQPPDILLGPLFNDVQNAKLFPDQKTFADAVPNSDPLMILADYRMQQNQSGFDLRHFVNVNFTLPKEGEKYVPPEGQSLREHIDGLWPVLTRSTENTEKWDSLLPLPEPYVVPGGRFREVYYWDSYFTMLGLAESGHWDKVADMVANFAHEIDTYGHIPNGNRSYYLSRSQPPFFALMVELLAQHEGDAALKQYLPQMQKEYAYWMDGVENLQAGQQEKRVVKLQDGTLLNRYWDDRDTPRPESWVEDIATAKSNPNRPATEIYRDLRSAAASGWDFSSRWMDNPHQLNTLRTTSIVPVDLNSLMFKMEKILARASKAAGDNAMANQYETLANARQKGIEKYMWNDQQGWYADYDLKSYKVRNQLTAAALFPLYVNAAAKDRANKMATATKTHLLQPGGLNTTSVKSGQQWDAPNGWAPLQWVATEGLQNYGQKEVAMDISWHFLTNVQHTYDREKKLVEKYDVSTTGTGGGGGEYPLQDGFGWTNGVTLKMLDLICPKEQPCDNVPATRPTVKSATTQPSTKEAQPTP

SEQ ID NO: 6495 - protein, 774 aa, Escherichia coli
MTPLRVFRKTTPLVNTIRLSLLPLAGLSFSAFAAQVNIAPGSLDKALNQYAAHSGFTLSVDASLTRGKQSNGLHGDYDVESGLQQLLDGSGLQVKPLGNNSWTLEPAPAPKEDALTVVGDWLGDARENDVFEHAGARDVIRREDFAKTGATTMREVLNRIPGVSAPENNGTGSHDLAMNFGIRGLNPRLASRSTVLMDGIPVPFAPYGQPQLSLAPVSLGNMDAIDVVRGGGAVRYGPQSVGGVVNFVTRAIPQDFGIEAGVEGQLSPTSSQNNPKETHNLMVGGTADNGFGTALLYSGTRGSDWREHSATRIDDLMLKSKYAPDEVHTFNSLLQYYDGEADMPGGLSRADYDADRWQSTRPYDRFWGRRKLASLGYQFQPDSQHKFNIQGFYTQTLRSGYLEQGKRITLSPRNYWVRGIEPRYSQIFMIGPSAHEVGVGYRYLNESTHEMRYYTATSSGQLPSGSSPYDRDTRSGTEAHAWYLDDKIDIGNWTITPGMRFEHIASYQNNAITGTHEEVSYNAPLPALNVLYHLTDSWNLYANTEGSFGTVQYSQIGKAVQSGNVEPEKARTWELGTRYDDGALTAEMGLFLINFNNQYDSNQTNDTVTARGKTRHTGLETQARYDLGTLTPTLDNVSIYASYAYVNAEIREKGDTYGNLVPFSPKHKGTLGVDYKPGNWTFNLNSDFQSSQFADNANTVKESADGSTGRIPGFMLWGARVAYDFGPQMADLNLAFGVKNIFDQDYFIRSYDDNNKGIYAGQPRTLYMQGSLKF

SEQ ID NO: 6496 - protein, 243 aa, Escherichia coli; identical to SEQ ID NO: 3483

SEQ ID NO: 6497 - protein, 274 aa, Escherichia coli
MNKTAIALLALLASSASLAATPWQKITQPVPGSAQSIGSFSNGCIVGADTLPIQSEHYQVMRTDQRRYFGHPDLVMFIQRLSSQVSNLGMGTVLIGDMGMPAGGRFNGGHASHQTGLDVDIFLQLPKTRWTSAQLLRPQALDLVSRDGKHVVSTLWKPEIFSLIKLAAQDKDVTRIFVNPAIKQQLCLDAGTDRDWLRKVRPWFQHRAHMHVRLRCPADSLECEDQPLPPPGDGCGAELQSWFAPPKPGTTKPEKKTPPPLPPSCQALLDEHVI

SEQ ID NO: 6498 - protein, 237 aa, Escherichia coli
MRKITQAISAVCLLFALNSSAVALASSPSPLNPGTNVARLAEQAPIHWVSVAQIENSLAGRPPMAVGFDIDDTVLFSSPGFWRGKKTFSPESEDYLKNPVFWEKMNNGWDEFSIPKEVARQLIDMHVRRGDAIFFVTGRSPTKTETVSKTLADNFHIPVTNMNPVIFAGDKPGQNTKSQWLQDKNIRIFYGDSDNDITAARDVDARGIRILRASNSTYKPLPQAGAFGEEVIVNSEY

SEQ ID NO: 6499 - protein, 446 aa, Escherichia coli; identical to SEQ ID NO: 2176

SEQ ID NO: 6500 - protein, 816 aa, Escherichia coli
MNIYRLSFVSCLVVAMPCALAVEFNLNVLDKSMRDRIDISLLKEKGVIAPGEYFVSVAVNNNQISNGQKINWHKNDDKTIPCINDLLVDKFGLKPEVRQSLPLINQCVDFSSRPEMLFNFDQANQQLNITIPQAWLAWHSENWTPPSTWKEGVAGVLMDYNLFASSYRPQDGSSSTNLNAYGTTGINAGAWRLRSDYQLNQTDSDDNHEQSGGISRTYLFRPLPQLGSKLTLGETDFSSNIFDGFSYTGAALASDERMLPWELRGYAPQISGIAQTNATVTISQSGRVIYQKKVPPGPFIIDDLNQSVQGTLDVKVTEEDGRVNNFQVSAASTPFLTRQGQVRYKLAAGQPRPSMSHQTENETFFSNEVSWGMLSNTSLYGGLLLSGDDYHSAAMGIGQNMLWLGALSFDVTWASSHFDTQQDERGLSYRFNYSKQVDATNSTISLAAYRFSDRHFHSYANYLDHKYNDSDAQDEKQTISLSVGQPITPLNLNLYANLLHQTWWNADASTTANITAGFNVDIGDWRDISISTSFNTTHYEDKDRDNQIYLSISLPFGNGGRVGYDMQNSSHSTTHRMSWNDTLDERNSWGMSAGLQSDRPDNGAQVSGNYQHLSSAGEWDISGTYAANDYSSVSSSWSGSFTATQYGAAFHRRSSTNEPRLMVSTDGVADIPVQGNLDYTNHFGIAVVPLISSYQPSTVAVNMNDLPDGVTVAENVIKETWIEGAIGYKSLASRSGKDVNVIIRNASGQFPPLGADIRQDDSGISVGMVGEEGHAWLSGVAENQKFTVVWGDSQHCSLHLPEHMEDTANRLILPCH

SEQ ID NO: 6501 - protein, 249 aa, Escherichia coli; identical to SEQ ID NO: 3492

SEQ ID NO: 6502 - protein, 246 aa, Escherichia coli; identical to SEQ ID NO: 3021

SEQ ID NO: 6503 - protein, 232 aa, Escherichia coli; identical to SEQ ID NO: 2087

SEQ ID NO: 6504 - protein, 551 aa, Escherichia coli; identical to SEQ ID NO: 2446

SEQ ID NO: 6505 - protein, 341 aa, Escherichia coli
MPLTAINQFLTVGGEWRHDKLSDAVNLTGGTSSKTSASQYALFVEDEWRIFEPLALTTGVRMDDHETYGEHWSPRAYLVYNATDTVTVKGGWATAFKAPSLLQLSPDWTSNSCRGACKIVGSPDLKPETSESWELGLYYMGEEGWLEGVESSVTVFRNDVKDRISISRTSDVNAAPGYQNFVGFETGANGRRIPVFSYYNVNKARIQGVETELKIPFNDEWKLSFNYTYNDGRDVSNGENKPLSDLPFHTANGTLDWKPLALEDWSFYVSGHYTGQKRADSATAKTPGGYTIWNTGAAWQVTKDVKLRAGVLNLGDKDLSRDDYSYNEDGRRYFMAVDYRF

SEQ ID NO: 6506 - protein, 760 aa, Escherichia coli
MENNRNFPARQFHSLTFFAGLCIGITPVAQALAAEGQTNADDTLVVEASTPSLYAPQQSADPKFSRPVADTTRTMTVISEQVIKDQGATNLTDALKNVPGVGAFFAGENGNSTTGDAIYMRGADTSNSIYIDGIRDIGSVSRDTFNTEQVEVIKGPSGTDYGRSAPTGSINMISKQPRNDSGIDASASIGSAWFRRGTLDVNQVIGDTTAVRLNVMGEKTHDAGRDKVKNERYGVAPSIAFGLGTANRLYLNYLHVTQHNTPDGGIPTIGLPGYSAPSAGTAALNHSGKVDTHNFYGTDSDYDDSTTDTATMRFEHDINDNTTIRNTTRWSRVKQDYLMTAIMGGASNITQPTSDVNSWTWSRTANTKDVSNKILTNQTNLTSTFYTGSIGHDVSTGVEFTRETQTNYGVNPVTLPAVNIYHPDSSIHPGGLTRNGANANGQTDTFAIYAFDTLQITRDFELNGGIRLDNYHTEYDSATACGGSGRGAITCPTGVAKGSPVTTVDTAKSGNLMNWKAGALYHLTENGNVYINYAVSQQPPGGNNFALAQSGSGNSANRTDFKPQKANTSEIGTKWQVLDKRLLLTAALFRTDIENEVEQNDDGTYSQYGKKRVEGYEISVAGNITPAWQVIGGYTQQKATIKNGKDVAQDGSSSLPYTPEHAFTLWSQYQATDDISVGAGARYIGSMHKGSDGAVGTPAFTEGYWVADAKLGYRVNRNLDFQLNVYNLFDTDYVASINKSGYRYHPGEPRTFLLTANMHF

SEQ ID NO: 6507 - protein, 591 aa, Escherichia coli
MPSFIGGLVVFVSAAFNAQAETWFDPAFFKDDPSMVADLSRFEKGQKITPGVYRVDIVLNQTIVDTRNVNFVEITPEKGIAACLTTESLDAMGVNTDAFPAFKQLDKQACVPLAEIIPDASVTFNVNKLRLEISVPQIAIKSNARGYVPPERWDEGINALLLGYSFSGANSIHSSADSDSGDSYFLNLNSGVNLGPWRLRNNSTWSRSSGQTAEWKNLSSYLQRAVIPLKGELTVCDDYTAGDFFDSVSFRGVQLASDDNMLPDSLKGFAPVVRGIAKSNAQITIKQNGYTIYQTYVSPGAFEISDLYSTSSSGDLLVEIKEADGSVNSYSVPFSSVPLLQRQGRIKYAVTLAKYRTNSNEQQESKFAQATLQWGGPWGTTWYGGGQYAEYYRAAMFGLGFNLGDFGAISFDATQAKSTLADQSEHKGQSYRFLYAKTLNQLGTNFQLMGYRYSTSGFYTLSDTMYKHMDGYEFNDGDDEDTPMWSRYYNLFYTKRGKLQVNISQQLGEYGSFYLSGSQQTYWHTDQQDRLLQFGYNTQIKDLSLGVSWNYSKSRGQPDADQVFALNFSLPLNLLLPRSNDSYTRKKITPG

SEQ ID NO: 6508 - protein, 224 aa, Escherichia coli; identical to SEQ ID NO: 3165

SEQ ID NO: 6509 - protein, 856 aa, Escherichia coli
MAGFFVRLFVACAFAAQAPLSSAELYFNPRFLADDPQAVADLSRFENGQELPPGTYRVDIYLNNGYMATRDVTFNTGDSEQGIVPCLTRAQLASMGLNTASVSGMNLLADDACVPLTSMIHDATAHLDVGQQRLNLTIPQAFMSNRARGYIPPELWDPGINAGLLNYNFSGNSVQNRIGGNSHYAYLNLQSGLNIGAWRLRDNTTWSYNSSDSSSGSKNKWQHINTWLERDIIPLRSRLTLGDGYTQGDIFDGINFRGAQLASDDNMLPDSQRGFAPVIHGIARGTAQVTIKQNGYDIYNSTVPPGPFTINDIYAAGNSGDLQVTIKEADGSTQIFTVPYSSVPLLQREGHTRYSITAGEYRSGNAQQEKPRFFQSTLLHGLPAGWTIYGGTQLADRYRAFNFGIGKNMGALGALSVDMTQANSTLPDDSQHDGQSVRFLYNKSLNESGTNIQLVGYRYSTSGYFNFADTTYSRMNGYNIETQDGVIQVKPKFTDYYNLAYNKRGKLQLTVTQQLGRTLTLYLSGSHQTYWGTSNVDEQFQAGLNTAFEDINWTLSYSLTKNAWQKGRDQMLALNVNIPFSHWLRSDSKSQWRHASASYSMSHDLNGRMTNLVGVYGTLLEDNNLSYSVQTGYAGGGDGNSGSTGYATLNYRGGYGNANIGYSHSDDIKQLYYGVSGGVLAHANGVTLGQPLNDTVVLVKAPGAKDAKVENQTGVRTDWRGYAVLPYATEYRENRVALDTNTLADNVDLDNAVANVVPTRGAIVRAEFKARVGIKLLMTLTHNNKPLPFGAMVTSESSQSSGIVADNGQVYLSGMPLAGKVQVKWGEEENAHCVANYQLPPESQQQLLTQLSAECR

SEQ ID NO: 6510 - protein, 820 aa, Escherichia coli; identical to SEQ ID NO: 5921

SEQ ID NO: 6511 - protein, 218 aa, Escherichia coli
MPRGHNEYFDRGTQMNINLYDHARGTQTGFVRYDDGYVSTSLSLRSAHLAGQSILSGYSTYYIYVIATAPNMFNVNDVLGVYSPHPYEQEVSALGGIPYSQIYGWYRVNFGVIDERLHRNREYRDRYYRNLNIAPAEDGYRLAGFPPDHQAWREEPWIHHAPQGCGNSSRTITGDTCNEETQNLSTIYLREYQSKVKRQIFSDYQSEVDIYNRIRDEL

SEQ ID NO: 6512 - protein, 207 aa, Escherichia coli; identical to SEQ ID NO: 5917

SEQ ID NO: 6513 - protein, 871 aa, Escherichia coli
MHQVLIMPRFARLTIALGLATAVFPVDAEYYFNPRFLSNDLAESVDLSAFTKGREAPPGTYRVDIYLNDEFMTSRDITFIADDNNAELIPCLSTDLLVSLGIKKSALLDNKEHSAEKHVPDNSACTPLQDRLADASTEFDVGQQHLSLSVPQIYVGRMARGYVSPDLWEEGINAGLLNYSFNGNSINNRSNHNAGKSNYAYLNLQSGINIGSWRLRDNSTWSYNSGSSNSSDSNKWQHINTSAERDIIPLRSRLTVGDSYTDGDIFDSVNFRGLKINSTEAMLPDSQHGFAPVIHGIARGTAQVSVKQNGYDVYQTTVPPGPFTIDDINSATNGGDLQVTIKEADGSIQTLYVPYSSVPVLQRAGYTRYALAMGEYRSGNNLQSSPKFIQGSLMHGLEGNWTPYGGMQIAEDYQAFNLGIGKDLGLFGAFSFDITQANTTLADGTRHSGQSVKSVYSKSFYQTGTNIQVAGYRYSTQGFYNLSDSAYSRMSGYTVKPPTGDTNEQTQFIDYFNLFYSKRGQEQISISQQLGNYGTTFFSASRQSYWNTSRSDQQISFGLNVPFGDITTSLNYSYSNNIWQNDRDHLLAFTLNVPFSHWMRTDSQSAFRNSNASYSMSNDLKGGMTNLSGVYGTLLPDNNLNYSVQVGNTHGGNTSSGTSGYSSLNYRGAYGNTNVGYSRNGDSSQIYYGMSGGIIAHADGITFGQPLGDTMVLVKAPGADNVKIENQTGIHTDWRGYAILPFATEYRENRVALNANSLADNVELDETVVTVIPTHGAIARATFNAQIGGKVLMTLKYGNKSVPFGAIVTHGENKNGSIVAENGQVYLTGLPQSGKLQVSWGNDKNSNCIVDYKLPEASPGTLLNQQTAICR

SEQ ID NO: 6514 - protein, 703 aa, Escherichia coli
MSVYAQAAVEPKEDTITVTAAPAPQESAWGPAATIAAKHSATATKTDTPIEKTPQSISVVTNEEMQMHQFQSVKEALGYTPGVTVSSRGASNTYDFVIIRGFSSVGLNQNNYLDGLKLQGNFYNDAVIDPYMLERVELMRGPTSVLYGKSNPGGIISMVSKRPTTEPLKEIQFKMGTDNLFQTGFDFSDALDDNGEFSYRLTGLARSTNEQQKNSESQRYTIAPSFSWRPDDKTNFTFLSYFQNEPETGYYGWLPKEGTVEPLPNGKRLPTDFNEGASNNTYSRNQKMVGYSFEHGFNDTFTVRQNLRFSEMKTSQKSVYGTGIANDGHTLNRGTVVDNERLQNFSVDTQLESKFATGEVEHTLLTGVDFMRMRNDINASFGSAPSIDLYNKYHPEYFAFGNAEPYQMNESKQTGIYVQDQAEWNKWVFTLGGRYDWSKQATTVRENSYTPTEGYIERNDHQFTWRGGVNYLFDNGISPYFSYSQSFEPSAFDLWSNPRVSYKPSKGEQYEAGVKYVPNDMPVVVTGAVYQLTKTNNLTADPTNPLAQVPAGEIRARGVELEAKAALNANINLTASYTYTDAEYTKDTNLKGKTPEQVPEHMASLWGDYTFNEGPLSGLTLGTGGRFIGSSYGDPANTFKVGSAAVMDAVVKYDLARFGMAGSSLAVNVNNLLDREYVASCFQTYGCFWGAERQVVATATFRF

SEQ ID NO: 6515 - protein, 119 aa, Escherichia coli; identical to SEQ ID NO: 2526

SEQ ID NO: 6516 - protein, 432 aa, Escherichia coli; identical to SEQ ID NO: 2026

SEQ ID NO: 6517 - protein, 243 aa, Escherichia coli
MSRKSCLIRLFKTTVSCKLFTAIILSVFLGQPALTYAGVVIGGTRVVYLSNNADKSISVFSKEEKIPYLIQGWVDPFNKEDKSKAPFTVIPPVSRLEPSQEKILRIIHTKGVSLPDDRESVFWLNIKNIPPSASNKATNSLEIAVKTRIKLFWRPANIRLIPEDAAPKVKWRREGRNLIAENPNPIHISVMDVIVDGHDVPLNMIRPFETLTLPLPANSAGGQMTWRFINDYGAVSDPIKMTL

SEQ ID NO: 6518 - protein, 360 aa, Escherichia coli; identical to SEQ ID NO: 3062

SEQ ID NO: 6519 - protein, 199 aa, Escherichia coli
MIYDASRKEAALPVANKGAETPYLLQSWVDNIDGTSRAPFIITPPLFRLEAGDDSSLRIIKTADNLPENKESLFYINVRAIPAKKKSDNVNANELTLVFKTRIKMFYRPAHLKGRVNDAWKSLEFKRSDHSLNIYNPTEYYVVFAGLAVDKTDLTSKIEYIAPGEHKQLPLPASGGKNVKWAAINDYGGSSGTETRPLQ

SEQ ID NO: 6520 - protein, 386 aa, Escherichia coli
MVDDVPVAQVLQALAEQEKLNLVVSPDVSGTVSLHLTDVPWKQALQTVVKSAGLITRQEDNILSVHSIAWQNNNIARQEAEQARAQANLPLENRSITLQYADAGELAKAGEKLLSAKGSMTVDKRTNRLLLRDNKTALSALEQWVAQMDLPVGQVELSAHIVTINEKSLRELGVKWTLADAQHAGGVGQVTTLGSDLCVATATTHVGFNIGRINGRLLDLELSALEQKQQLDIIASPRLLASHLQPASIKQGSEIPYQVSSGESGATSVEFKEAVLGMEVTPTVLQKGRIRLKLHISQNVPGQVLQQADGEVLAIDKQEIETQVEVKSGETLALGGIFTRKNKSGQDSVPLLGDIPWFGQLFRHDGKEDERRELVVFITPRLVSSE

SEQ ID NO: 6521 - protein, 111 aa, Escherichia coli; identical to SEQ ID NO: 3096

SEQ ID NO: 6522 - protein, 478 aa, Escherichia coli; identical to SEQ ID NO: 5942

SEQ ID NO: 6523 - protein, 213 aa, Escherichia coli; identical to SEQ ID NO: 2232

SEQ ID NO: 6524 - protein, 654 aa, Escherichia coli
MDCVMKGLNKITCCLLAALLMPCAGHAENEQYGANFNNADIRQFVEIVGQHLGKTILIDPSVQGTISVRSNDTFSQQEYYQFFLSILDLYGYSVITLDNGFLKVVRSANVKTSPGMIADSSRPGVGDELVTRIVPLENVPARDLAPLLRQMMDAGSVGNVVHYEPSNVLILTGRASTINKLIEVIKRVDVIGTEKQQIIHLEYASAEDLAEILNQLISESHGKSQMPALLSAKIVADKRTNSLIISGPEKARQRITSLLKSLDVEESEEGNTRVYYLKYAKATNLVEVLTGVSEKLKDEKGNARKPSSSGAMDNVAITADEQTNSLVITADQSVQEKLATVIARLDIRRAQVLVEAIIVEVQDGNGLNLGVQWANKNVGAQQFTNTGLPIFNAAQGVADYKKNGGITSANPAWDMFSAYNGMAAGFFNGDWGVLLTALASNNKNDILATPSIVTLDNKLASFNVGQDVPVLSGSQTTSGDNVFNTVERKTVGTKLKVTPQVNEGDAVLLEIEQEVSSVDSSSNSTLGPTFNTRTIQNAVLVKTGETVVLGGLLDDFSKEQVSKVPLLGDIPLVGQLFRYTSTERAKRNLMVFIRPTIIRDDDVYHSLSKEKYTRYRQEQQQRIDGKSKALVGSEDLPVLDENTFNSHAPAPSSR

SEQ ID NO: 6525 - protein, 361 aa, Escherichia coli; identical to SEQ ID NO: 3061

SEQ ID NO: 6526 - protein, 203 aa, Escherichia coli; identical to SEQ ID NO: 2009

SEQ ID NO: 6527 - protein, 729 aa, Escherichia coli
MLSTQFNRDNQYQAITKPSLLAGCIALALLPSAAFAAPATEETVIVEGSATAPDDGENDYSVTSTSAGTKMQMTQRDIPQSVTIVSQQRMEDQQLQTLGEVMENTLGISKSQADSDRALYYSRGFQIDNYMVDGIPTYFESRWNLGDALSDMALFERVEVVRGATGLMTGTGNPSAAINMVRKHATSREFKGDVSAEYGSWNKERYVADLQSPLTEDGKIRARIVGGYQNNDSWLDRYNSEKTFFSGIVDADLGDLTTLSAGYEYQRIDVNSPTWGGLPRWNTDGSSNSYDRARSTAPDWAYNDKEINKVFMTLKQRFADTWQATLNATHSEVEFDSKMMYVDAYVNKADGMLVGPYSNYGPGFDYVGGTGWNSGKRKVDALDLFADGIYELFGRQHNLMFGGSYSKQNNCYFSSWANIFPDEIGSFYNFNGNFPQTDWSPQSLAQDDTTHMKSLYAATRVTLADPLHLILGARYTNWRVDTLTYSMEKNHTTPYAGLVFDINDNWSTYASYTSIFQPQNDRDSSGKYLAPITGNNYELGLKSDWMNSRLTTTLAIFRIEQDNVAQSTGTPIPGSNGETAYKAVDGTVSKGVEFELNGAITDNWQLTFGATRYIAEDNEGNAVNPNLPRTTVKMFTSYRLPVMPELTVGGGVNWQNRVYTDTVTPYGTFRAEQGSYALVDLFTRYQVTKNFSLQGNVNNLFDKTYDTNVEGSIVYGAPRNFSITGTYQF

SEQ ID NO: 6528 - protein, 359 aa, Escherichia coli; identical to SEQ ID NO: 2329

SEQ ID NO: 6529 - protein, 370 aa, Escherichia coli
MKKITVALSAVAASVLMAMSAQAAEIYNKDGNKLDLYGKVNAEHYFSSSASDDGDKTYARMGFKGETQINDQLTGFGQWEYEFKGNRTETEGSDKDKTRLAFAGLRFGDYGSLDYGRNYGVAYDVGAWTDVLPEFGGDTWTQTDVFMTQRATGVATYRNNDFFGLVDGLNFALQYQGKNDSAAKVNNWKGRDVVESNGDGFGLSATYDYEGFGIGATYAKSDRTDGQVSYANASSLNASGKTAEVWATGLKYDANNIYLAATYSETQNMTVFGDDFIANKAKNFEAVAQYQFDFGLRPSIAYLHSRGENIGAFGNQDLVEYIDVGATYYFNKNMSAFVDYKINLIDESEFTKASEVATDNIVAVGMTYQF

SEQ ID NO: 6530 - protein, 207 aa, Escherichia coli; identical to SEQ ID NO: 2211

SEQ ID NO: 6531 - protein, 861 aa, Escherichia coli
MSGSYSSVWAEDDIQFDSRFLELKGDTKIDLKRFSSQGYVEPGKYNLQVQLNKQPLAEEYDIYWYAGEDDASKSYACLTPELVAQFGLKEDVAKNLQWSHDAKCLKSGQLEGMEIKADLSQSALVISLPQAYLEYTYPDWDPPSRWDDGISGIVADYSINAQTRHEENGGDDSNEISGNGTVGVNLGPWRMRADWQTNYQHTRSNDDDEFSGDETQKKWEWSRYYAWRALPSLKAKLALGEDYLRSDIFDGFNYVGGSVSTDDQMLPPNLRGYAPDISGVAHTTAKVTVSQMGRVIYETQVPAGPFRIQDLGDSVSGTLHIRIEEQNGQVQEYDISTASMPYLTRPGQVRYKIMMGRPQEWGHHVEGEFFSGAEASWGIANGWSLYGGALGDENYQSAALGVGRDLSTFGAVAFDVTHSHTKLDKDTAYGKGSLDGNSFRVSYSKDFDQLNSRVTFAGYRFSEENFMTMSEYLDASDSGMVRTGNDKEMYTATYNQNFRDAGVSVYLNYTRHTYWDREEQTNYNIMLSHYFNMGSIRNVSISMTGYRYEYDNQADKGMYISLSMPWGDNSTVSYNGNYGSGTDSSQVGYFSRVDDATHYQLNVGTSDKHTSVDGYYSHDGSLAQVDLSVNYHEGQYTSAGLSLQGGATLTAHGGALHRTQNMGGTRLLIDADGVADVPVEGNGAAVYTNMFGKAVVSDVNNYYRNQAYIDLNRLPENAEATQSVVQATLTEGAIGYRKFAVISGQKAMAVLRLSDGSHPPFGAEVKNDNEQTVGLVDDDGNVYLAGVKPGEHMSVFWSGVAHCDINLPDPLPADLFNGLLLPCQHKGNVAPITSPAVKPAIQEQTQRVTPTEPPTSISVNQ

SEQ ID NO: 6532 - protein, 813 aa, Escherichia coli; identical to SEQ ID NO: 4612

SEQ ID NO: 6533 - protein, 897 aa, Escherichia coli
MKLNIFTKSMIGMGLVCSALPALAMEAWNNQQGGNKYQVIFDGKIYENAWWVSSTNCPGKAKVNDATNPWRLKRTATAAEISQYGNTLSCEKSGSSSSSNSNTPASNTPANGGSATPAQGTVPSNSSVVAWNKQQGGQTWYVVFNGAVYKNAWWVASSNCPGDAKGNDASNPWRYVRAATATEISETSNPQSCTSAPQPAPDVKPAPDVKPAPDVQPAPADKSNDNYAVVAWKGQEGSSTWYVIYNGGIYKNAWWVGAANCPGDAKENDARNPWRYVRAATATEISQYGNPGSCSVKPDNNGGAVTPVDPTPETPVTPTPDNSEPSTPADSVNDYSLQAWSGQEGSEIYHVIFNGNVYKNAWWVGSKDCPRGTSAENSNNPWRLERTATAAELSQYGNPTTCEIDNGGVIVADGFQASKAYSADSIVDYNDAHYKTSVDQDAWGFVPGGDNPWKKYEPAKAWSASTVYVKGDRVVVDGQAYEALFWTQSDNPALVANQNATGSNSRPWKPLGKAQSYSNEELNNAPQFNPETLYASDTLIRFNGVNYISQSKVQKVSPSDSNPWRVFVDWTGTKERVGTPKKAWPKHVYAPYVDFTLNTIPDLAALAKNHNVNHFTLAFVVSKDANTCLPTWGTAYGMQNYAQYSKIKALREAGGDVMLSIGGANNAPLAASCKNVDDLMQHYYDIVDNLNLKVLDFDIEGTWVADQASIERRNLAVKKVQDKWKSEGKDIAIWYTLPILPTGLTPEGMNVLSDAKAKGVELAGVNVMTMDYGNAICQSANTEGQNIHGKCATSAIANLHSQLKGLHPNKSDAEIDAMMGTTPMVGVNDVQGEVFYLSDARLVMQDAQKRNLGMVGIWSIARDLPGGTNLSPEFHGLTKEQAPKYAFSEIFAPFTKQ

SEQ ID NO: 6534 - protein, 663 aa, Escherichia coli
MDTVNIYRLSFVSCLVVAMPCALAVEFNLNVLDKSMRDRIDISLLKEKGVIAPGEYFVSVAVNNNQISNGQKINWHKNDDKTIPCINDLLVDKFGLKPEVRQSLPLINQCVDFSSRPEMLFNFDQANQQLNISIPQAWLVWHSENWAPPSTWKEGVAGVLMDYNLFASNYRPQDGSNSTNLNAYGTTGINAGSWRLRSDYQLNNTDSEDSHEQSGGISRTYLFRPLPQLGSKLTLGETDFSSNIFDGFSYTGAALASDDRMLPWELRGYAPQISGIAQTNATVTISQSGRVIYQKKVPPGPFIIDDLNQSVQGTLDVKVTEEDGRVNNFQVSAASTPFLTRQGQVRYKLAAGQPRPSMSHQTENETFFSNEVSWGMLSNTSLYGGLLLSGDDYHSAAMGIGQNMLWLGALSFDVTWASSHFDTQQDERGLSYRFNYSKQVDATNSTISLAAYRFSDRHFHSYANYLDHKYNDSDAQDEKQTISLSVGQPITPLNLNLYANLLHQTWWNADASTTANITAGFNVDIGDWRDISISTSFNTTHYEDKDRDNQIYLSISLPFGNGGRVGYDMQNSSHSTTHRMSWNDTLDERNSWGMSAGLQSDRPDNGAQVSGNYQHLSSAGEWDILVPMPPMITVPSAAAGAVLSPQPNMVQRFIAAAPPMNHA

SEQ ID NO: 6535 - protein, 883 aa, Escherichia coli
MTAFRAAFKAYRMHQVLILPRFARLTFALGLATAVFPVDAEYYFNPRFLSNDLAESVDLSAFTKGREAPPGTYRVDIYLNDEFMASRDITFIADDNNADLIPCLSTDLLVSLGIKKSALLDNKEHSAEKHVPDNSACTPLQDRLADASSEFDVGQQHLSLSVPQIYVGRMARGYVSPDLWEEGINAGLLNYSFNGNSINNRSNHNAGKSNYAYLNLQSGINIGSWRLRDNSTWSYNSGSSNSSDSNKWQHINTSAERDIIPLRSRLTVGDSYTDGDIFDSVNFRGLKINSTEAMLPDSQHGFAPVIHGIARGTAQVSVKQNGYDVYQTTVPPGPFTIDDINSAANGGDLQVTIKEADGSIQTLYVPYSSVPVLQRAGYTRYALAMGEYRSGNNLQSTPKFVQASLMHGLKGNWTPYGGMQIAEDYQAFNLGIGKDLGLFGAFSFDITQANTTLADDTRHSGQSVKSVYSKSFYQTGTNIQVAGYRYSTQGFYNLSDSAYSRMSGYTVKPPTGDTSEQTLFIDYFNLFYSKRGQEQISISQQLGNYGTTFFSASRQSYWNTSRSDQQISFGLNVPFGDITTSLNYSYSNNIWQNDRDHLLAFTLNVPFSHWMRTDSQSAFHNSNASYSMSNDLKGGMTNLSGVYGTLLPDNNLNYSVQVGNTHGSNTSSGTSGYSSLNYRGAYGNTNVGYSRSGDSSQIYYGMSGGIIAHADGITFGQPLGDTMVLVKAPGADNVKIENQTGIHTDWRGYAILPFATEYRENRVALNANSLADNVELDETVVTVIPTHGAIARATFNVQIGGKVLMTLKYGNKSVPFGAIVTHGENKNGSIVAENGQVYLTGLPQSGKLQVSWGNDKNSNCIVEYKLPEVSPGTLLNQQTAICR

SEQ ID NO: 6536 - protein, 846 aa, Escherichia coli
MKLNIFTKSMIGMGLVCSALPALAMEAWNNQQGGNKYQVIFDGKIYENAWWVSSTNCPGKAKANDATNPWRLKRTATAAEISQFGNTLSCEKSGSSSSSTSNTPASNTPANGGSATPAQGTVPSNSSVVAWNKQQGGQTWYVVFNGAVYKNAWWVASSNCPGDAKGNDASNPWRYVRAATAMEISETSNPQSCTSAPQPAPDVKPAPDVKPAPDVQPAPADKSNDNYAVVAWKGQEGSSTWYVIYNGGIYKNAWWVGAANCPGDAKENDASNPWRYVRAATATEITQYGNPGSCSVKPDNNGGAVTPVDPTPETPETPVTPTPDNNEPSTPADSSNDYSLQAWSGQEGSEIYHVIFNGNVYQNAWWVGSEDCPRGTSVENSNNPWRLVRTATAAEMSQYGNPTTCEIDNGGVIIADGFQASKAYSANSIVDYNDAHYKTSVDQDAWGFVPGGDNPWKKYEPAKAWSASTVYVKGDRVVVDGQAYEALFWTQSDNPALVANQNATGSNSRPWKPLGKTQSYSNEELNNAPQFNPETLYASDTLIRFNGENYISQSKVQKVSPSDSNPWRVFVDWTGTKERVGTPKKAWPKHVYAPYVDFTLNTIPDLAALAKNHNVNHFTLAFVVSKDANTCLPTWGTAYGMQNYAQYSKIKALREAGGDVMLSIGGANNAPLAASCKNVDALMQHYYDIVDNLNLRVLDFDIEGTWVADQASIERRNLAVKKVQDKWKSEGKDIAIWYTLPILPTGLTPEGMNVLSDAKAKGVELAGVNVMTMDYGNAICQSANTEGQNIHGKCATSAIANLHAQLKGLYGNKSDAEIDAMMGTTPMVGVNDVQGEVFYLSDARLV

SEQ ID NO: 6537 - protein, 840 aa, Escherichia coli
MNNKNTFSRDKLSHAIKNALSGVVCSLLFVLPVHAVEFNVDMIDAEDRENIDISRFEKKGYIPPGRYLVRVQINKNMLPQTLILEWVKADNESGSLLCLTKENLTNFGLNTEFIESLQNIAGSECLDLSQRQELTTRLDKATMILSLSVPQAWLKYQATNWTPPEFWDTGIAGFILDYNVYASQYAPHHGDSTQNVSSYGTLGFNLGAWRLRSDYQYNQNFADGRSVNRDSEFARTYLFRPIPSWSSKFTMGQYDLSSNLYDTFHFTGASLESDESMLPPDLQGYAPQITGIAQTNAKVTVAQNGRVLYQTTVAPGPFTISDLGQSFQGQLDVTVEEEDGRTSTFQVGSASIPYLTRKGQVRYKTSLGKPTSVGHNDINNPFFWTAEASWGWLNNVSLYGGGMFTADDYQAITTGIGFNLNQFGSLSFDVTGADASLQQQNSGNLRGYSYRFNYAKHFESTGSQITFAGYRFSDKDYVSMSEYLSSRNGDESIDNEKESYVISLNQYFETLELNSYLNVTRNTYWDSTSNTNYSVSVSKNFDIGDFKGISASLAVSRIRWDDDEENQYYFSFSLPLQQNRNISYSMQRTGSSNTSQMISWYDSSDRNNIWNISASATDDNIRDGEPTLRGSYQHYSPWGRLNINGSVQPNQYNSVTAGWYGSLTATRHGVALHDYSYGDNARMMVDTDGISGIEINSNRTVTNGLGIAVIPSLSNYTTSMLRVNNNDLPEGVDVENSVIRTTLTQGAIGYAKLNATTGYQIVGVIRQENGRFPPLGVNVTDKATGKDVGLVAEDGFVYLSGIQENSTLHLTWGDNTCEVTPPNQSNISESAIILPCKTVK

SEQ ID NO: 6538 - protein, 869 aa, Escherichia coli; identical to SEQ ID NO: 3738

SEQ ID NO: 6539 - protein, 746 aa, Escherichia coli; identical to SEQ ID NO: 3031

SEQ ID NO: 6540 - protein, 368 aa, Escherichia coli; identical to SEQ ID NO: 2371

SEQ ID NO: 6541 - protein, 415 aa, Escherichia coli
MYIYKTNEISRSIITPTYLDIDSLLKYLSDTISVNKNSCNVRKITTFNSIEVRGVPECIKYITSLSESLDKEAQSKAKNKDVVKVFKLNYASATDITYKYRDQNVVVPGVVSILKTMASNGSLPSTGKGAVERSGNLFDNSVTISADPRLNAVVVKDREITMDIYQQLISELDIEQRQIEISVSIIDVDANDLQQLGVNWSGTLNAGQGTIAFNSSTAQANISSSVISNASNFMIRVNALQQNSKAKILSQPSIITLNNMQAILDKNVTFYTKVSGEKVASLESITSGTLLRVTPRILDDSSNSLTGKRRERVRLLLDIQDGNQSTNQSNAQDASSTLPEVQNSEMTTEATLSAGESLLLGGFIQDKESSSKDGIPLLSDIPVIGSLFSSTVKQKHSVVRLFLIKATPIKSASSE

SEQ ID NO: 6542 - protein, 243 aa, Escherichia coli; identical to SEQ ID NO: 3483

SEQ ID NO: 6543 - protein, 518 aa, Escherichia coli; identical to SEQ ID NO: 2349

SEQ ID NO: 6544 - protein, 331 aa, Escherichia coli; identical to SEQ ID NO: 2700

SEQ ID NO: 6545 - protein, 760 aa, Escherichia coli
MENNRNFPARQFHSLTFFAGLCIGITPVAQALAAEGQTNADDTLVVEASTPSLYAPQQSADPKFSRPVADTTRTMTVISEQVIKDQGATNLTDALKNVPGVGAFFAGENGNSTTGDAIYMRGADTSNSIYIDGIRDIGSVSRDTFNTEQVEVIKGPSGTDYGRSAPTGSINMISKQPRNDSGIDASASIGSAWFRRGTLDVNQVIGDTTAVRLNVMGEKTHDAGRDKVKNERYGVAPSIAFGLGTANRLYLNYLHVTQHNTPDGGIPTIGLPGYSAPSAGTAALNHSGKVDTHNFYGTDSDYDDSTTDTATMRFEHDINDNTTIRNTTRWSRVKQDYLMTAIMGGASNITQPTSDVNSWTWSRTANTKDVSNKILTNQTNLTSTFYTGSIGHDVSTGVEFTRETQTNYGVNPVTLPAVNIYHPDSSIHPGGLTRNGVNANGQTDTFAIYAFDTLQITRDFELNGGIRLDNYHTEYDSATACGGSGRGAITCPTGVAKGSPVTTVDTAKSGNLVNWKAGALYHLTENGNVYINYAVSQQPPGGNNFALAQSGSGNSVNRTDFKPQKANTSEIGTKWQVLDKRLLLTAALFRTDIENEVEQNDDGTYSQYGKKRVEGYEISVAGNITPAWQVIGGYTQQKATIKNGKDVAQDGSSSLPYTPEHAFTLWSQYQATDDISVGAGARYIGSMHKGSDGAVGTPAFTEGYWVADAKLGYRVNRNLDFQLNVYNLFDTDYVASINKSGYRYHPGEPRTFLLTANMHF

SEQ ID NO: 6546 - protein, 361 aa, Escherichia coli; identical to SEQ ID NO: 3061

SEQ ID NO: 6547 - protein, 591 aa, Escherichia coli; identical to SEQ ID NO: 3668

SEQ ID NO: 6548 - protein, 226 aa, Escherichia coli; identical to SEQ ID NO: 3085

SEQ ID NO: 6549 - protein, 432 aa, Escherichia coli; identical to SEQ ID NO: 2026

SEQ ID NO: 6550 - protein, 191 aa, Escherichia coli; identical to SEQ ID NO: 2727

SEQ ID NO: 6551 - protein, 729 aa, Escherichia coli; identical to SEQ ID NO: 3778

SEQ ID NO: 6552 - protein, 213 aa, Escherichia coli; identical to SEQ ID NO: 2232

SEQ ID NO: 6553 - protein, 203 aa, Escherichia coli
MKLRWFAFLIVLLAGCSSKHDYTNPPWNAKVPVQRAMQWMPISQKAGAAWGVDPQLITAIIAIESGGNPNAVSKSNAIGLMQLKASTSGRDVYRRMGWSGEPTTSELKNPERNISMGAAYLNILETGPLAGIEDPKVLQYALVVSYANGASALLRTFSSDRKKAISKINDLDADEFLDHVARNHPAPQAPRYIYKLEQALDAM

SEQ ID NO: 6554 - protein, 119 aa, Escherichia coli; identical to SEQ ID NO: 2527

SEQ ID NO: 6555 - protein, 732 aa, Escherichia coli; identical to SEQ ID NO: 3068

SEQ ID NO: 6556 - protein, 107 aa, Escherichia coli
MSSIAWGAIIPDRTRIIMNESDKGEALKLTNQSKNLPYLAQTWIEDTKGNKSRDFIVTVPPMVRLNPSEQIQIRMISQEKIAQLPNDRETLFYFNVREIPPKTDKKM

SEQ ID NO: 6557 - protein, 998 aa, Escherichia coli
MTVNKIKNIFNNATLTTKSAFNTASSSVRSAGKKLILLIPDNYEAQGVGINELVKAADELGIEIHRTERDDTAIANQFFGAAEKVVGLTERGVAIFAPQLDKLLQKYQKVGSKIGRTAENVGNNLGKAGTVLSALQNFTGIALSGMALDELLRKQREGEDISQNDIAKSSIELINQLVDTVSSINSTVDSFSEQLNQLGSFLSSKPRLSSVGGKLQNLPDLGSLGDGLDVVSGILSAVSASFILGNSDAHTGTKAAAGIELTTQVLGNVGKAVSQYILAQRMAQGLSTTAASAGLITSAVMLAISPLSFLAAADKFERAKQLESYSERFKKLNYEGDALLAAFHKETGAIDAALTTINTVLSSVSAGVSAASSASLIGAPISMLVSALTGTISGILEASKQAMFEHVAEKFAARINEWEKEHGKNYFENGYDARHAAFLEDSLSLLADFSRQHAVERAVAITQQHWDEKIGELAGITRNADRSQSGKAYINYLENGGLLEAQPKEFTQQVFDPQKGTIDLSTGNVSSVLTFITPTFTPGEEVRERKQSGKYEYMTFLIVNGKDTWSVKGIKNHKGVYDYSKLIQFVEKDNKHYQARMISELGDKDDVVYSGAGSSEVFAGEGHDTVSYNKTDVGKLTIDATGASKPGEYIVSKNMYGDVKVLQEVVKEQEVSVGKRTEKIQYRDFEFRTGGIPYDVIDNLHSVEELIGGKHDDEFKGGKFNDIFHGADGNDYIEGNYGNDRLYGDDGDDYISGGQGDDQLFGGSGNDKLSGGDGNNYLTGGSGNDELQAHGAYNILSGGTGDDKLYGGGGIDLLDGGEGNDYLNGGFGNDIYVYRQNYGHHTIADEGGKGDRLHLSDISFDDIAFKRVGNDLIMNKAINGVLSFNESNDVNGITFKNWFAKDASGADNHLVEVITDKDGREIKVDKIPHNNNERSGYIKASNIASEKSMVNITSVANDINKIISSVSGFDSGDERLASLYNLSLHQNNTHSTTLTTTV

SEQ ID NO: 6558 - protein, 721 aa, Escherichia coli
MDEIPALAEKDDDSVINSLEQIIPGTAAEFDFNHQRLNLSIPQIALYRDARGYVSPSRWDDGIPTLFTNYSFTGSDNRYRQGNRSQRQYLNMQNGANFGPWRLRNYSTWTRNDQASSWNTISSYLQRDIKALKSQLLLGESATSGSIFSSYTFTGVQLASDDNMLPNSQRGFAPTVRGIANSSAIVTIRQNGYVIYQSNVPAGAFEINDLYPSSNSGDLEVTIEESDGTQRRFIQPYSSLPMMQRPGHLKYSATAGRYRADANSDSKEPEFAEATAIYGLNNTFTLYGGLLGSEDYYALGIGIGGTLGALGALSMDINRADTQFDNRHSFHGYQWRTQYIKDIPETNTNIAVSYYRYTNDGYFSFDEANTRNWDYNSRQKSEIQFNISQTIFDGVSLYASGSQQDYWGNNDKNRNISVGVSGQQWGIGYSLNYQYSRYTDQNNDRALSLNLSIPLERWLPRSRVSYQMTSQKDRPTQHEMRLDGSLLDDGRLSYSLEQSLDDDNNHNSSLNASYRSPYGTFSAGYSYGNDSSQYNYGVTGGVVIHPHGVTLSQYLGNAFALIDANGASGVRIQNYPGIATDPFGYAVVPYLTTYQENRLSVDTTQLPDNVDLEQTTQFVVPNRGAMVAARFNANIGYRVLVTVSDRNGKPLPFGALASNDETGQQSIVDEGGILYLSGISSKSQSWTVRWGNQADQQCQFAFSTPDSEPTTSVLQGTAQCH

SEQ ID NO: 6559 - protein, 236 aa, Escherichia coli; identical to SEQ ID NO: 3286

SEQ ID NO: 6560 - protein, 840 aa, Escherichia coli
MHLPLYHYRAHFSFSLLALTIASSLPAYGGKFNPKFLENVQGIDQHIDLSVYDSPVGQQIPGKYRVSVFVNEEKMASRTLDFSTASEAKRKASGESLMPCLSRVQLEEMGVRVDSFPALKMSPPEACVAFDEIIPQATSRFDFNTQTLHLSFPQAAMMMTARGTVDPSRWDEGIPALLLDYSFSGSNGRNEGTGSSSDSTSDSYYLNLRSGLNVGPWRLRNNSIWNRTDGKNQWDNVGTSLNRAIIPLKSQITLGDTATPGEIFDSVQMRGALLASDDEMLPDSQRGFAPVVRGIAKSNAEVSIEQNGYVIYRTFVQPGAFEINDLYATSGSGDLTVIIKEADGSEQRFIQPFSAVAIFQREGYLKYSLAAGEYRAGNYDSDKPHFGQFTAMYGLPWGMTAYGGALLSADYNALALGLGKNFGTIGAVSVDVTQAKSQLRNNEKEEGQSYRFLYSKSFEGGTDLRLLGYKYSTSGYYTFQEATDVRSDADSDYRRYHKRSQIQGNITQQLGDYGSVYFNMTQQDYWNVDGKENSLSAGYHGHIGRVNYSVAYTWTRSPEWEEDDRLWSFSVSIPLGGAWSSYRMTTDQNGKTSQQASVSGTLLEDRNLSYNVQQGYTSNGVGYSGSVNMGYMGGSGNIDVGYNYSKDNQQVNYGVRGGVIVHSEGITLSQPLGESLAIVSAPGARGGHVVNSSGVEVDWMGNAVVPYLTPYRETIVELRSDTLGQNVELQEAFQKVVPTRGAVVRSRFDTRVGYRVLMSLKQANGNAVPFGATAALIDESKPASSIVGEEGQLYISGMPEEGELQVSWGNEQAQRCRVPFRLPENKDNAAIVMVNAVCEK

SEQ ID NO: 6561 - protein, 208 aa, Escherichia coli; identical to SEQ ID NO: 1949

SEQ ID NO: 6562 - protein, 230 aa, Escherichia coli; identical to SEQ ID NO: 3348

SEQ ID NO: 6563 - protein, 747 aa, Escherichia coli; identical to SEQ ID NO: 2072

SEQ ID NO: 6564 - protein, 266 aa, Escherichia coli; identical to SEQ ID NO: 1894

SEQ ID NO: 6565 - protein, 641 aa, Escherichia coli; identical to SEQ ID NO: 3774

SEQ ID NO: 6566 - protein, 861 aa, Escherichia coli
FFFFFFFFFFLFFFFPVSPPPRPPLSSAELYFNPRFLADDPQAVADLSRFENGQELPPGTYRVDIYLNNGYMATRDVTFNTGDSEQGIVPCLTRAQLASMGLNTASVSGMNLLADDACVPLTSMIHDATAQLDVGQQRLNLTIPQAFMSNRARGYIPPELWDPGINAGLLNYNFSGNSVQNRIGGNSHYAYLNLQSGLNIGAWRLRDNTTWSYNSSDSSSGSKNKWQHINTWLERDIIPLRSRLTLGDGYTQGDIFDGINFRGAQLASDDNMLPDSQRGFAPVIHGIARGTAQVTIKQNGYDIYNSTVPPGPFTINDIYAAGNSGDLQVTIKEADGSTQIFTVPYSSVPLLQREGHTRYSITAGEYRSGNAQQEKPRFFQSTLLHGLPAGWTIYGGTQLADRYRAFNFGIGKNMGALGALSVDMTQANSTLPDDSQHDGQSVRFLYNKSLNESGTNIQLVGYRYSTSGYFNFADTTYSRMNGYNIETQDGVIQVKPKFTDYYNLAYNKRGKLQLTVTQQLGRTSTLYLSGSHQTYWGTSNVDEQFQAGLNTAFEDINWTLSYSLTKNAWQKGRDQMLALNVNIPFSHWLRSDSKSQWRHASASYSMSHDLNGRMTNLAGVYGTLLEDNNLSYSVQTGYAGGGDGNSGSTGYATLNYRGGYGNANIGYSHSDDIKQLYYGVSGGVLAHANGVTLGQPLNDTVVLVKAPGAKDAKVENQTGVRTDWRGYAVLPYATEYRENRVALDTNTLADNVDLDNAVANVVPTRGAIVRAEFKARVGIKLLMTLTHNNKPLPFGAMVTSESSQSSGIVADNGQVYLSGMPLAGKVQVKWGEEENAHCVANYQLPPESQQQLLTQLSAECR

SEQ ID NO: 6567 - protein, 882 aa, Escherichia coli
MPNHSNFRLRGIACYIALAISGGSVNAWADDSIQFDPRFLELKGDTKIDLGKFSKKGYVDAGKYNLRVFINKQPLSDEYDINWYVSENDPTKNYACLTPELVAALGLKEGIAKSLQWTHNDECLKPGQLDGMEVENDLSQSALLLTVPQAYLEYTSSDWDPPSRWDDGIPGLIADYSLNAQTRHQEQGGEDSHDISGNGTVGANLGAWRFRADWQSDYQHTRSNDDDDDSSNSTTSKNWDWSRYYAWRALPSLKAKLSLGEDYLNSDIFDGFNYIGSSVSTDDQMLPPNLRGYAPDVSGVAHSSAKVTISQMGRVLYETQVPAGPFRIQDIGDSVSGTLHVRVEEQNGQVQEYDVTTASMPFLTRQGQVRYKVMMGRPEDWNHKTEGGFFSGGEASWGVADGWSLYGGALADKHYQSAAMGVGRDLAQFGALAFDVTHSHVNLDHDSAYGKGKLDGNSFRVSYAKDFDELNSRVTFAGYRFSEKNFMTMSEYLDANQSDMARTGNDKEMYTITYNQNFAAAGVSIYLNYSHRTYWDRPEQTNYNLMFSHYFNMGSIRNMSISVTGYRYEYDDNADKGMYLSMSIPWSDSSTVTYNGSYGSGSDSSQVGYFKRVDDATHYQVNVGTSEQHGSVDGYLSHDGSLAKVDLSANYHEGEYRSAGIALQGGATLTAHGGALHRTQNMGGTRLLIDADGIANVPVESNGAPVYTNMFGKAVVADINNYYRNQAYIDLNNLPEDAEATQSVVQATLTEGAIGYRKFKVISGQKAMAVLRLRDGSYPPFGAEVKNDEQQQVGIVDDEGNVYLAGVNADEHMMVFWEGSAQCEIVLPKPLPADLFSGLLLPCEQKGTAAPDSSAPEIKPVIQDQTRQVTPTEAPTSISATQ

SEQ ID NO: 6568 - protein, 231 aa, Escherichia coli; identical to SEQ ID NO: 3055

SEQ ID NO: 6569 - protein, 597 aa, Escherichia coli
MLPPNLRGYAPDISGVAHTTAKVTVSQMGRVIYETQVPAGPFRIQDLGDSVSGTLHIRIEEQNGQVQEYDISTASMPYLTRPGQVRYKIMMGRPQEWGHHVEGEFFSGAEASWGIANGWSLYGGALGDENYQSAALGVGRDLSTFGAVAFDVTHSHTKLDKDTAYGKGSLDGNSFRVSYSKDFDQLNSRVTFAGYRFSEENFMTMSEYLDASDSGMVRTGNDKEMYTATYNQNFRDAGVSVYLNYTRHTYWDREEQTNYNIMLSHYFNMGSIRNVSISMTGYRYEYDNQADKGMYISLSMPWGDNSTVSYNGNYGSGTDSSQVGYFSRVDDATHYQLNVGTSDKHTSVDGYYSHDGSLAQVDLSANYHEGQYTSAGLSLQGGATLTAHGGALHRTQNMGGTRLLIDADGVADVPVEGNGAAVYTNMFGKAVVSDVNNYYRNQAYIDLNRLPENAEATQSVVQATLTEGAIGYRKFAVISGQKAMAVLRLSDGSHPPFGAEVKNDNEQTVGLVDDDGNVYLAGVKPGEHMSVFWSGVAHCDINLPDPLPADLFNGLLLPCQHKGNVAPITSPAVKPAIQEQTQRVTPTEPPTSISVNQ

SEQ ID NO: 6570 - protein, 161 aa, Escherichia coli; identical to SEQ ID NO: 2582

SEQ ID NO: 6571 - protein, 613 aa, Escherichia coli
MFWRDITLSVWRKKTTGLKTKKRLLPLVLAAALCSSPVWAEEATFTANFKDTDLKSFIETVGANLNKTIIMGPGVQGKVSIRTMTPLNERQYYQLFLNLLEAQGYAVVPMENDVLKVVKSSAAKVEPLPLVGEGSDNYAGDEMVTKVVPVRNVSVRELAPILRQMIDSAGSGNVVNYDPSNVIMLTGRASVVERLTEVIQRVDHAGNRTEEVIPLDNASASEIARVLESLTKNSGENQPATLKSQIVADERTNSVIVSGDPATRDKMRRLIRRLDSEMERSGNSQVFYLKYSKAEDLVDVLKQVSGTLTAAKEEAEGTVGSGREIVSIAASKHSNALIVTAPQDIMQSLQSVIEQLDIRRAQVHVEALIVEVAEGSNINFGVQWASKDAGLMQFANGTQIPIGTLGAAISQAKPQKGSTVISENGATTINPDTNGDLSTLAQLLSGFSGTAVGVVKGDWMALVQAVKNDSSSNVLSTPSITTLDNQEAFFMVGQDVPVLTGSTVGSNNSNPFNTVERKKVGIMLKVTPQINEGNAVQMVIEQEVSKVEGQTSLDVVFGERKLKTTVLANDGELIVLGGLMDDQAGESVAKVPLLGDIPLIGNLFKSTADKKKT

SEQ ID NO: 6572 - protein, 370 aa, Escherichia coli
MKKITVALSAVAASVLMAMSAQAAEIYNKDGNKLDLYGKVNAEHYFSSSASDDGDKTYARLGFKGETQINDQLTGFGQWEYEFKGNRTESEGSDKDKTRLAFAGLRFADYGSIDYGRNYGVAYDIGAWTDVLPEFGGDTWTQTDVFMTQRATGVATYRNNDFFGLVDGLNFALQYQGKNDSAAKVNNWKGRDVVESNGDGFGLSATYDYEGFGVGATYAKSDRTDGQVSYAKKDPLNASGKTAEVWATGLKYDANNIYLAATYSETQNMTVFGDDFIANKAKNFEAVAQYQFDFGLRPSIAYLHSRGENIGAFGSQDLVEYIDLGATYYFNKNMSAFVDYKINLIDESEFTKRSEVATDNIVAVGMTYQF

SEQ ID NO: 6573 - protein, 302 aa, Escherichia coli
MTVKISGVLKDGTGKPVQNCTIVLKARRTSSTVVVNTVASENPDEAGRYSMDVEYGQYSVILLVEGFPPSHAGTITVYEDSQPGTLNDFLGAMSEDDVRPEALRRFELMVEEAARHAEEAKKNAGEAETSARNAGISASQAEESAANADTSAGDASESARQAAESAAAAKQSEEASSSSASAAAQKASESLQSATDAELSKKTAESAAGNAARDATTAAEKARESAESAQSAEQSRIAAEEAVNRIPTVVGPPGPKGEPGPAGPQGPKGDKGERGDTGPVGATGERGPAGDAGPAGPQGPKR

SEQ ID NO: 6574 - protein, 207 aa, Escherichia coli; identical to SEQ ID NO: 2211

SEQ ID NO: 6575 - protein, 363 aa, Escherichia coli; identical to SEQ ID NO: 3347

SEQ ID NO: 6576 - protein, 170 aa, Escherichia coli [sequence omitted]

SEQ ID NO: 6577 - protein, 224 aa, Escherichia coli; identical to SEQ ID NO: 3115

SEQ ID NO: 6578 - protein, 266 aa, Escherichia coli; identical to SEQ ID NO: 1894

SEQ ID NO: 6579 - protein, 203 aa, Escherichia coli; identical to SEQ ID NO: 2201

SEQ ID NO: 6580 - protein, 351 aa, Escherichia coli; identical to SEQ ID NO: 2519

SEQ ID NO: 6581 - protein, 368 aa, Escherichia coli
MNKTITALAILMASFAANASVLPETPVPFKSGTGAIDNDTVYIGLGSAGTAWYKLDTQAKNKSWTALAAFPGGPRDQATSAFIDGNLYVFGGIGKNSEGLTQVFNDVHKYNPKTNSWIKLMSHAPMGMAGHVTFVHNGKAYVTGGVNQNIFNGYFEDLNEAGKDSTAIDKINAHYFDKKAEDYFFNKFLLSFDPSTQQWSYAGESPWYGTAGAAVVNKGDKTWLINGEAKPGLRTDAVFELDFTGDNLKWNKLAPVASPDGVAGGFAGMSNDSLIFAGGAGFKGSRENYQNGKNYAHEGLKKSYSADIHLWHNGKWDKSGELSQGRAYGVSLPWNNSLLIIGGETAGGKAVMDSVLLSVRDNKVTVQN

SEQ ID NO: 6582 - protein, 832 aa, Escherichia coli
MYKKLKLTTISELIKNIYCSLSVIIIGCASAYAVEFNKDLIEAEDRENVNLSQFETDGQLPVGKYSLSTLINNKRTPIHLDLQWVLIDNLTAVCVTPEQLTLLGFTDEFIEKTQQTLIDGCYPIEKEKQITTYLDKGKMQLSISAPQAWLKYKDANWTPPELWDHGIAGAFLDYNLYASHYAPHQGDNSQNISSYGQAGVNLGAWRLRTDYQYDQSFNNGKSQANNLDFPRIYLFRPIPAINAKLTIGQYDTESSIFDSFHFSGVSLKSDENMLPPDLRGYAPQITGVAQTNAKVTVSQNNRIIYQENVPPGPFAITNLFNTLQGQLDVKVEEEDGQVTQWQVASNSIPYLTRKGQIRYTTAMGKPTSVGGDSLQQPFFWTGEFSWGWLNNVSLYGGSVLTNRDYQSLATGVGFNLNSLGSLSFDVTRSDAQLHNQNKETGYSYRANYSKRFESTGSQLTFAGYRFSDKNFVSMNEYINDTNHYTNYQNEKESYIVTFNQYLESLRLNTYVSLARNTYWDASSNVNYSLSLSRDFDIGPLKNVSTSLTFSRINWEDDNQDQLYLNISIPWGTSRTLSYGMQRNQDNNISHTASWYDSSDRNNSWSVSASGDNDEFKDMEASLRASYQHNTENGRLYLSGTSQRDSYYSLNASWNGSFTATRHGAAFHDYSGSADSRFMIDADGAEDIPLNNKRAVTNRYGIGVIPSVSSYITTSLSVDTRNLPENVDIENSVITTTLTEGAIGYAKLDTRKGYQIIGVIRLPDGSHPPLGISVKDETSHKELGLVADGGFVYLNGIQDDSKLTLRWGDKSCFIQPPKSSNLTTGTVILPCIS

SEQ ID NO: 6583 - protein, 162 aa, Escherichia coli; identical to SEQ ID NO: 1965

SEQ ID NO: 6584 - protein, 200 aa, Escherichia coli; identical to SEQ ID NO: 1784

SEQ ID NO: 6585 - protein, 784 aa, Escherichia coli; identical to SEQ ID NO: 3822

SEQ ID NO: 6586 - protein, 386 aa, Escherichia coli; identical to SEQ ID NO: 3094

SEQ ID NO: 6587 - protein, 232 aa, Escherichia coli; identical to SEQ ID NO: 2087

SEQ ID NO: 6588 - protein, 751 aa, Escherichia coli
TDVWKYRGKSSLADASTEFDVGQQHLSLSVPQIYVGRMARGYVSPDLWEEGINAGLLNYSFNGNSINNRSNHNAGKSNYAYLNLQSGINIGSWRLRDNSTWSYNSGSSNSSDSNKWQHINTSAERDIIPLRSRLTVGDSYTDGDIFDSVNFRGLKINSTEAMLPDSQHGFAPVIHGIARGTAQVSVKQNGYDVYQTTVPPGPFTIDDINSAANGGDLQVTIKEADGSIQTLYVPYSSVPVLQRAGYTRYALAMGEYRSGNNLQSSPKFIQGSLMHGLEGNWTPYGGMQIAEDYQAFNLGIGKDLGLFGAFSFDITQANTTLADGTHHSGQSVKSVYSKSFYQTGTNIQVAGYRYSTQGFYNLSDSAYSRMSGYTVKPPTGDTNEQTQFIDYFNLFYSKRGQEQISISQQLGNYGTTFFSASRQSYWNTSRSDQQISFGLNVPFGDITTSLNYSYSNNIWQNDRDHLLAFTLNVPFSHWMRTDSQSAFRNSNASYSMSNDLKGGMTNLSGVYGTLLPDNNLNYSVQVGNTHGGNTSSGTSGYSSLNYRGAYGNTNVGYSRSGDSSQIYYGMSGGIIAHADGITFGQPLGDTMVLVKAPGADNVKIENQTGIHTDWRGYAILPFATEYRENRVALNANSLADNVELDETVVTVIPTHGAIARATFNAQIGGKVLMTLKYGNKSVPFGAIVTHGENKNGSIVAENGQVYLTGLPQSGKLQVSWGKDKNSNCIVEYKLPEVSPGTLLNQQTAICR

SEQ ID NO: 6589 - protein, 678 aa, Escherichia coli; identical to SEQ ID NO: 3014

SEQ ID NO: 6590 - protein, 243 aa, Escherichia coli; identical to SEQ ID NO: 2910

SEQ ID NO: 6591 - protein, 266 aa, Escherichia coli
MAKSLFRALVALSFFAPLWLNAAPRVITLSPANTELAFAAGITPVGVSSYSDYPPQAQKIEQVSTWQGMNLERIVALKPDLVIAWRGGNAERQVDQLASLGIKVMWVDATSIEQIANALRQLAPWSPQPDKAEQAAQSLLDQYAQLKAQYADKPKKRVFLQFGINPPFTSGKESIQNQVLEVCGGENIFKDSRVPWPQVSREQVLALSPQAIVITGGPDQIPKIKQYWGEQLKIPVIPLTSDWFERASPRIILAAQQLCNALSQVD

SEQ ID NO: 6592 - protein, 869 aa, Escherichia coli
MKIPTTTDIPQRYTWCLAGICYSSLAILPSFLSYAESYFNPAFLLENGTSVADLSRFERGNHQPAGVYRVDLWRNDEFIGSQDIVFESTTENTGDKSGGLMPCFNQVLLERIGLNSSAFPELAQQQNNKCINLLKAVPDATINFDFAAMRLNITIPQITLLSSAHGYIPPEEWDEGIPALLLNYNFTGNRGNGNDSYFFSELSGINIGPWRLRNNGSWNYFRGNGYHSKQWNNIGTWVQRAIIPLKSELVMGDGNTGSDIFDGVGFRGVRLYSSDNMYPDSQQGFAPTVRGIARTAAQLTIRQNGFIIYQSYVSPGAFEITDLHPTSSNGDLDVTIDERDGNQQNYTIPYSTVPILQREGRFKFDLTAGDFRSGNSQQSSPFFFQGTALGGLPQEFTAYGGTQLSANYTAFLLGLGRNLGNWGAVSLDVTHARSQLADDSRHEGDSIRFLYAKSMNTFGTNFQLMGYRYSTQGFYTLDDVAYRRMEGYEYDYDYDGEHRDEPIIVNYHNLRFSRKDRLQLNISQSLNDFGSLYISGTHQKYWNTSDSDTWYQVGYTSSWVGISYSLSFSWNESVGIPDNERIVGLNVSVPFNVLTKRRYTRENALDRAYASFNANRNSNGQNSWLAGVGGTLLEGHNLSYHVSQGDTSNNGYTGSATANWQAAYGTLGVGYNYDRDQHDVNWQLSGGVVGHENGITLSQPLGDTNVLIKAPGAGGVRIENQTGILTDWRGYAVMPYATVYRYNRIALDTNTMGNSIDVEKNISSVVPTQGALVRANFDTRIGVRALITVTQGRKPVPFGSLVRENSTGITSMVGDDGQVYLSGAPLSGELLVQWGDGANSRCIAHYVLPKQSLQQAVTVISAVCTHPGS

SEQ ID NO: 6593 - protein, 851 aa, Escherichia coli
MPSFIGGLVVFVSAAFNAQAETWFDPAFFKDDPSMVADLSRFEKGQKITPGVYRVDIVLNQTIVDTRNVNFVEITPEKGIAACLTTESLDAMGVNTDAFPAFKQLDKQACVPLAEIIPDASVTFNVNKLRLEISVPQIAIKSNARGYVPPERWDEGINALLLGYSFSGANSIHSSADSDSGDSYFLNLNSGVNLGPWRLRNNSTWSRSSGQTAEWKNLSSYLQRAVIPLKGELTVGDDYTAGDFFDSVSFRGVQLASDDNMLPDSLKGFAPVVRGIAKSNAQITIKQNGYTIYQTYVSPGAFEISDLYSTSSSGDLLVEIKEADGSVNSYSVPFSSVPLLQRQGRIKYAVTLAKYRTNSNEQQESKFAQATLQWGGPWGTTWYGGGQYAEYYRAAMFGLGFNLGDFGAISFDATQAKSTLADQSEHKGQSYRFLYAKTLNQLGTNFQLMGYRYSTSGFYTLSDTMYKHMDGYEFNDGDDEDTPMWSRYYNLFYTKRGKLQVNISQQLGEYGSFYLSGSQQTYWHTDQQDRLLQFGYNTQIKDLSLGVSWNYSKSRGQPDADQVFALNFSLPLNLLLPRSNDSYTRKKNYAWMTSNTSIDNEGHITQNLGLTETLLDDGNLSYSVQQGYNSEGKTANGSASMDYKGAFADARVGYNYSDNGSQQQLNYALSGSLVAHSQGITLGQSLGETNVLIAAPGAENTRVANSTGLKTDWRGYTVVPYATSYRENRIALDAASLKRNVDLENAVVNVVPTKGALVLAEFNAHAGARVLMKTSKQGIPLRFGAIATLDGVQANSGIIDDDGSLYMAGLPAKGTISVRWGEAPDQICHINYELTEQQINSAITRMDAICR

SEQ ID NO: 6594 - protein, 831 aa, Escherichia coli
MQELPMLRMTPLASAIVALLLGIEAYAAEETFDTHFMIGGMKDQQVANIRLDDNQPLPGQYDIDIYVNKQWRGKYEIIVKDNPQETCLSREVIKRLSINSDNFASGKQCLTFEQLVQGGSYTWDIGVFRLDFSVPQAWVEELESGYVPPENWERGINAFYTSYSVSQYYSDYKASGNSKSTYVRFNSGLNLLGWQLHSDASFSKTNNNPGVWKSNTLYLERGFAQLLGTLRVGDMYTSSDIFDSVRFRGVRLFRDMQMLPNSKQNFTPRVQGIAQSNALVTIEQNGFVVYQKEVPPGPFAITDLQLAGGGADLDVSVKEADGSVTTYLVPYAAVPNMLQPGVSKYDFAAGRSHIEGASKHSDFVQAGYQYGFNNLLTLYGGSMVANNYYAFTLGTGWNTRIGAISVDATKSHSKQDNGDVFDGQSYQIAYNKFVSQTSTRFGLAAWRYSSRDYRTFNDHVWANNKDNYRRDENDVYDIADYYQNDFGRKNSFSANMSQSLPEGWGSVSLSTLWRDYWGRSGSSKDYQLSYSNNLRRISYTLAASQAYDENHHEEKRFNIFISIPFDWGDDVSTPRRQIYMSNSTTFDDQGFASNNTGLSGTVGSRDQFNYGVNLSYQHQGNETTAGANLTWNAPVATVNGSYSQSSTYRQAGASVSGGIVAWSGGVNLANRLSETFAVMNAPGIKDAYVNGQKYRTTNRNGVVIYDGMTPYRENHLMLDVSQSDSEAELRGNRKIAAPYRGAVVLVNFDTDQRKPWFIKALRADGQPLMFGYEVNDIHGHNIGVVGQGSQLFIRTNEVPPSVNVAIDKQQGLSCTITFGKEIDESRNYICQ

SEQ ID NO: 6595 - protein, 89 aa, Escherichia coli; identical to SEQ ID NO: 2833

SEQ ID NO: 6596 - protein, 865 aa, Escherichia coli
MTIKYTKNYHHLTRIATFCALLYCNSAFSAELVEYDHTFLMGQNASNIDLSRYSEGNPAIPGVYDVSVYVNDQPIINQSITFVAIEGKKNAQACITLKNLLQFHINSPDINNEKAVLLARDETLGNCLNLTEIIPQASVRYDVNDQRLDIDVPQAWVMKNYQNYVDPSLWENGINAAMLSYNLNGYHSETPGRKNESIYAAFNGGMNLGAWRLRASGNYNWMTDSGSNYDFKNRYVQRDIASLRSQLILGESYTTGETFDSVSIRGIRLYSDSRMLPPTLASFAPIIHGVANTNAKVTITQGGYKIYETTVPPGAFVIDDLSPSGYGSDLIVTIEESDGSKRTFSQPFSSVVQMLRPGVGRWDISGGQVLKDDIQDEPNLFQASYYYGLNNYLTGYTGIQITDNNYTAGLLGLGLNTSVGAFSFDVTHSNVRIPDDKTYQGQSYRVSWNKLFEETSTSLNIAAYRYSTQNYLGLNDALTLIDEVKHPEQDLEPKSMRNYSRMKNQVTVSINQPLKFEKKDYGSFYLSGSWSDYWASGQNRSNYSIGYSNSASWGSYSVSAQRTWNEDGDTDDSVYLSFTIPIEKLLGTEQRNSGFQSIDTQISSDFKGNNQLNVSSSGYSDNARVSYSVNTGYTMNKASKDLSYVGGYASYESPWGTLAGSISANSDNSRQVSLSTDGGFVLHSGGLTFSNDSFSDSDTLAVVQAPGAQGARINYGNSTIDRWGYGVTSALSPYHENRIALDINDLENDVELKSTSAVAVPRQGSVVFADFETVQGQSAIMNITRSDGKNIPFAADIYDEQGNVIGNVGQGGQAFVRGIEQQGNISIKWLEESKPVSCLAHYQQSSEAEKIAQSIILNGIRCQIQ

SEQ ID NO: 6597 - protein, 614 aa, Escherichia coli; identical to SEQ ID NO: 3736

SEQ ID NO: 6598 - protein, 161 aa, Escherichia coli; identical to SEQ ID NO: 2582

SEQ ID NO: 6599 - protein, 359 aa, Escherichia coli; identical to SEQ ID NO: 2329

SEQ ID NO: 6600 - protein, 856 aa, Escherichia coli
MAGFFVRLFVACAFAAQAPLSSAELYFNPRFLADDPQAVADLSRFENGQELPPGTYRVDIYLNNGYMATRDVTFNTGDSEQGIVPCLTRAQLASMGLNTASVSGMNLLADDACVPLTSMIHDATAHLDVGQQRLNLTIPQAFMSNRARGYIPPELWDPGINSGLLNYNFSGNSVQNRIGGNSHYAYLNLQSGLNIGAWRLRDNTTWSYNSSDRSSGSKNKWQYINTWLERDIIPLRSRLTLGDGYTQGDIFDGINFRGAQLASDDNMLPDSQRGFAPVIHGIARGTAQVTIKQNGYDIYNSTVPPGPFTINDIYAAGNSGDLQVTIKEADGSTQIFTVPYSSVPLLQREGHTRYSITAGEYRSGNAQQEKPRFFQSTLLHGLPAGWTIYGGTQLADRYRAFNFGIGKNMGALGALSADMTQANSTLPDDSQHDGQSVRFLYNKSLNESGTNIQLVGYRYSTSGYFNFADTTYSRMNGYNIETQDGVIQVKPKFTDYYNLAYNKRGKLQLTVTQQLGRTSTLYLSGSHQTYWGTSNVDEQFQAGLNTAFEDINWTLSYSLTKNAWQKGRDQMLALNVNIPFSHWLRSDSKSQWRHASASYSMSHDLNGRMNNLAGVYGTLLEDNNLSYSVQTGYAGGGDGNSGSTGYATLNYRGGYGNANIGYSHSDDIKQLYYGVSGGVLAHANGVTLGQPLNDTVVLVKAPGAKDAKVENQTGVRTDWRGYAVLPYATEYRENRVALDTNTLADNVDLDNAVANVVPTRGAIVRAEFKARVGIKLLMTLTHNNKPLPFGAMVTSESSQSSGIVADNGQVYLSGMPLAGKVQVKWGEEENAHCVANYQLPPESQQQLLTQLSAECR

SEQ ID NO: 6601 - protein, 831 aa, Escherichia coli
MQELPMLRMTPLASAIVALLIGIEAYAAEETFDTHFMIGGMKDQQVVNIRLEDNQPLPGQYDIDIYVNKQWRGKYEIIVKDNPQETCLSREMIKRLGINTDNFASGKQCLTFKQLIQGGSYTWDIGVFRLDFSVPQAWVEELESGYVPPENWERGINAFYTSYYVSQYYSDYKASGNSKSTYVRFNSGLNLQEWQLHSDASFSKTNNNPGVWKSNTLYLERGFAQLLGTLRVGDMYTSSDIFDSVRFSGVRLFRDMQMLPNSKQNFTPRVQGIAQSNALVTIEQNGFVVYQKEVPPGPFAITDLQLAGGGADLDVSVKEADGSVTTYLVPYAAVPNMLQPGVSKYDFAAGRSHIEGASKQSDFVQAGHQYGFNNLLTLYGGSMVANNYYAFTLGTGWNTRIGAISVDATKSHSKQDNGDVFDGQSYQIAYNKFVSQTSTRFGLAAWRYSSRDYRTFNDHVWANNKDNYRHDENDIYDIADYYQNDFGRKNSFSANMSQSLPEGWGSVSLSTLWRDYWGRSGSSKDYQLSYSNNLRRISYTLAASHAYDENHHEEKRFNIFISIPFDWGDDVTTPRRQIYMSNSTTFDDQGVASNNTGLSGTVGSRDQFNYGVNLSYQYQGNETTAGANLTWNAPVATVNGSYSQSSAYRQAGASVSGGIVAWSGGVNLANRLSETFAVMNAPGIKDAYVNGQKYRTTNRNGVVVYDGMTPYRENYLMLDVSQSDSEAELRGNRKIAAPYRGAVVLVNFDTDQRKPWFIKALRADGQPLTFGYEVNDIHGHNIGVVGQGSQLFIRTNEVPPSVNVAIDKQQGLSCTITFGKEIDESKNYICQ

SEQ ID NO: 6602 - protein, 430 aa, Escherichia coli; identical to SEQ ID NO: 2617

SEQ ID NO: 6603 - protein, 826 aa, Escherichia coli
MLRMTPLASAIVALLLGIEAYAAEETFDTHFMIGGMKDQQVANIRLDDNQPLPGQYDIDIYVNKQWRGKYEIIVKDNPQETCLSIEVIKRLGINSDNFASGKQCLTFEQLVQGGSYTWDIGVFRLDFSVPQAWVEELESGYVPPENWERGINAFYTSYYVSQYYSDYKASGNSKSTYVRFNSGLNLLGWQLHSDASFSKTNNNPGGWKSNTLYLERGFAQLLGTLRVGDMYTSSDIFDSVRFSGVRLFRDMQMLPNSKQNFTPRVQGIAQSNALVTIEQNGFVVYQKEVPPGPFAITDLQLAGGGADLDVSVKEADGSVTTYLVPYAAVPNMLQPGVSKYDFAAGRSHIEGASKQSDFVQAGYQYGFNNLLTLYGGSMVANNYYAFTLGTGWNTRIGAISVDATKSHSKQDNGDVFDGQSYQIAYNKFVSQTSTRFGLAAWRYSSRDYRTFNDHVWANNKDNYRRDENDVYDIADYYQNDFGRKNSFSANMSQSLPEGWGSVSLSTLWRDYWGRSGSSKDYQLSYSNNWRRISYILAASQAYDENHHEEKRFNIFISIPFDWGDDVTTPRRQIYMSNSTTFDDQGFASNNTGLSGTVGSRDQFNYGVNLSYQNQGNETTAGANLTWNAPVATVNGSYSQSSTYRQAGASVSGGIVAWSGGVNLANRLSETFAVMNAPGIKDAYVNGQKYRTTNRNGVVVYDGMTPYRENHLMLDVSQSDSEAELRGNRKIAAPYRGAVVLVNFDTDQRKPWFIKALRADGQPLMFGYEVNDIHGHNIGVVGQGSQLFIRTNEVPPSVNVAIDKQQGLSCTITFGKEIDESRNYICQ

SEQ ID NO: 6604 - protein, 219 aa, Escherichia coli; identical to SEQ ID NO: 3328

SEQ ID NO: 6605 - protein, 387 aa, Escherichia coli; identical to SEQ ID NO: 3908

SEQ ID NO: 6606 - protein, 825 aa, Escherichia coli
MGKDASNIDLSRYTEGNPTLPGIYDVSVYVNDQPIMSQSIAFAVIEGKKNAQACITQKNLLQFHISSPDKNSEKAILLKRDDDLGDCLNLAEMIPQSSIRYDVNDQRLDIDVPQAWIMKNYQNYVDPSLWENGINAAMLSYNLNGYHSESPGRTNDSIYAAFNGGINLGAWRLRASGNYNWMTNVHSDYDFQNRYLQRDLASLRSQLVIGESYTTGETFDSVSIRGIRLYSDSRMLPPVLASFAPIIHGVANTNAKVTVMQNGYKIYETTVPPGAFAIDDLSPSGYGSDLIVTIEEADGTKRTFSQPFSSVVQMLRPGVGRWDISAGQVLKDSIQDEPNLFQASYYYGLNNYLTGYTGIQLTDNNYTAGLLGLGMNTPVGAFSVDVTHSNVSIPDDKTYQGQSYRISWNKLFENTSTSLNIAAYRYSTQHYLGLNDALTLIDEVEHPEQELEPKSMRNYSRMKNQVTVSINQPLKFEKKDYGSFYLSGSWSDYWASGQNSTNYSIGYSNSASWGSYSISAQRSLNEDGQTDDSIYLSFTIPIENLLGTEHRSSGFQSIDTQLNSDFKGNNQLNISSSGYSDTNRISYSVNTGYMMNKSSDDLSYIGGYASYESPWGTLSGSASASSDNSRQFSLNTDGGFVLHSGGLTFSNDSFSDSDTLAVIQAPGAKGARINYGNSTVDRWGYGVTSALSPYHENRIALDINDLENDVELKSTSTVAVPRQGAVVFADFETVQGQSAIMNIVRSDGKNIPFAADIYDEQNNIIGNVGQGGQAFVRGIGQEGNIRITWIEEGKPVSCFAHYQQNTTSEKIAQSIILNGLRCQIQ

SEQ ID NO: 6607 - protein, 765 aa, Escherichia coli; identical to SEQ ID NO: 3739

SEQ ID NO: 6608 - protein, 565 aa, Escherichia coli; identical to SEQ ID NO: 2678

SEQ ID NO: 6609 - protein, 161 aa, Escherichia coli; identical to SEQ ID NO: 2582

SEQ ID NO: 6610 - protein, 669 aa, Escherichia coli; identical to SEQ ID NO: 3677

SEQ ID NO: 6611 - protein, 696 aa, Escherichia coli
MQLSISAPQAWLKYKDANWTPPELWDHGIAGAFLDYNLYASHYAPHQGDNSQNISSYGQAGVNLGAWRLRTDYQYDQSFNNGKSQANNLDFPRIYLFRPIPAINAKLTIGQYDTESSIFDSFHFSGVSLKSDENMLPPDLRGYAPQITGVAQTNAKVTVSQNNRIIYQENVPPGPFAITNLFNTLQGQLDVKVEEEDGQVTQWQVASNSIPYLTRKGQIRYTTAMGKPTSVGGDSLQQPFFWTGEFSWGWLNNVSLYGGSVLTNRDYQSLAAGVGFNLNSLGSLSFDVTRSDAQLHNQDKETGYSYRANYSKRFESTGSQLTFAGYRFSDKNFVTMNEYINDTNHYTNYQNEKESYIVTFNQYLESLRLNTYVSLARNTYWDASSNVNYSLSLSRDFDIGPLKNVSTSLTFSRINWEEDNQDQLYLNISIPWGTSRTLSYGMQRNQDNKISHTASWYDSSDRNNSWSVSASGDNDEFKDMKASLRASYQHNTENGRLYLSGTSQRDSYYSLNASWNGSFTATRHGAAFHDYSGSADSRFMIDADGAEDIPLNNKRAVTNRYGIGVIPSVSSYITTSLSVDTRNLPENVDIENSVITTTLTEGAIGYAKLDTRKGYQIMGVIRLADGSHPPLGISVKDKTSHKELGLVADGCFVYLNGIQDDSKLTLRWGDKSCFIQPPNSSNLTTGTVILPCISQN

SEQ ID NO: 6612 - protein, 224 aa, Escherichia coli; identical to SEQ ID NO: 3165

SEQ ID NO: 6613 - protein, 221 aa, Escherichia coli; identical to SEQ ID NO: 3743

SEQ ID NO: 6614 - protein, 193 aa, Escherichia coli
MRYLATLLLSLAVLITAGCGWHLRDTTQVPSTMKVMILDSGDPNGPLSRAVRNQLRLNGVELLDKETTRKDVPSLRLGKVSIAKDTASVFRNGQTAEYQMIMTVNATVLIPGRDIYPISAKVFRSFFDNPQMALAKDNEQDMIVKEMYDRAAEQLIRKLPSIRAADIRSDKEQTSTTTDTPATPARVSTTLGN

SEQ ID NO: 6615 - protein, 237 aa, Escherichia coli; identical to SEQ ID NO: 1814

SEQ ID NO: 6616 - protein, 816 aa, Escherichia coli; identical to SEQ ID NO: 2817

SEQ ID NO: 6617 - protein, 118 aa, Escherichia coli [sequence omitted]

SEQ ID NO: 6618 - protein, 230 aa, Escherichia coli; identical to SEQ ID NO: 3723

SEQ ID NO: 6619 - protein, 856 aa, Escherichia coli
MAGFFVRLFVACAFAAQTPLSSAELYFNPRFLADDPQAVADLSRFENGQELPPGTYRVDIYLNNGYMATRDVTFNTGDSEQGIVPCLTRAQLASMGLNTASVSGMNLLADDACVPLTSMIHDATAHLDVGQQRLNLTIPQAFMSNRARGYIPPELWDPGINAGLLNYNFSGNSVQNRIGGNSHYAYLNLQSGLNIGAWRLRDNTTWSYNRSDRSSGSKNKWQHINTWLERDIIPLRSRLTLGDGYTQGDIFDGINFRGAQLASDDNMLPDSQRGFAPVIHGIARGTAQVTIKQNGYDIYNSTVPPGPFTINDIYAAGNSGDLQVTIKEADGSTQIFTVPYSSVPLLQREGHTRYSITAGEYRSGNAQQEKPRFFQSTLLHGLPAGWTIYGGTQLADRYRAFNFGIGKNMGALGALSVDMTQANSTLPDDSQHDGQSVRFLYNKSLNESGTNIQLVGYRYSTSGYFNFADTTYSRMNGYNIETQDGVIQVKPKFTDYYNLAYNKRGKLQLTVTQQLGRTSTLYLSGSHQTYWGTSNVDEQFQAGLNTAFEDINWTLSYSLTKNAWQKGRDQMLALNVNIPFSHWLRSDSKSQWRHASASYSMSHDLNGRMTNLAGVYGTLLEDNNLSYSVQTGYAGGGDGNSGSTGYATLNYRGGYGNANIGYSHSDDIKQLYYGVSGGVLAHANGVTLGQPLNETVVLVKAPGAKDAKVENQTGVRTDWRGYAVLPYATEYRENRVALDTNTLADNVDLDNAVANVVPTRGAIVRAEFKARVGIKLLMTLTHNNKPLPFGAMVTSESSQSSGIVADNGQVYLSGMPLAGKVQVKWGEEENAHCVANYQLPPESQQQLLTQLSAECR

SEQ ID NO: 6620 - protein, 539 aa, Escherichia coli; identical to SEQ ID NO: 3050

SEQ ID NO: 6621 - protein, 218 aa, Escherichia coli
MFMAMMVAGRAEAGVALGATRVIYPAGQKQVQLAVTNNDENSTYLIQSWVENADGVKDGRFIVTPPLFAMKGKKENTLRILDATNNQLPQDRESLFWMNVKAIPSMDKSKLTENTLQLAIISRIKLYYRPAKLALPPDQAAEKLRFRRSANSLTLINPTPYYLTVTELNAGARVLENALVPPMGESTVKLPSDAGSNITYRTINDYGALTPKMTGVME

SEQ ID NO: 6622 - protein, 843 aa, Escherichia coli
MHWMHLPLDHYRAHFSFSLLALTIASALPAYGGKFNPKFLENVQGIDQHVDLSVYDSPVGQQIPGKYRVFVFVNEEKMASRTLDFSTASEAQRKASGESLMPCLSRVQLEEMGVRIDSFPALKILPPEACVAFDEIIPQATSRFDFNTQTLHLTFPQAAMMMTARGTVDPSRWDEGIPALLLDYSFSGSNGRNEGSGSSPDSTSDSYYLNLRSGLNVGPWRLRNNSIWNRTDGKNQWDNVGTSLNRAIIPLKSQITLGDTATPGEIFDSVQMRGTLLASDDEMLPDSQRGFAPVVRGIAKSNAEVSIEQNGYVIYRTFVQPGAFEINDLYATSGSGDLTVIIKESDGSEQRFIQPFSAVAIFQREGYLKYSLAAGEYRAGNYDSGKPRFGQFTAMYGLPWGMTAYGGALLSADYNALALGLGKNFGTIGAVSVDVTQAKSQLRNNEKDEGQSYRFLYSKSFEGGTDLRLLGYKYSTSGYYTFQEATDVRSDADSDYRRYHKRSQIQGNITQQLGDYGSVYFNMTQQDYWNVDGKENSLSAGYHGHIGRVNYSIAYTWTRSPEWDEDDRLWSFSLSIPLGGAWGSYRMTTDQNGKTSQQASVSGTLLEDRNLNYNVQQGYTSNGVGNSGSVNMGYMGGSGNIDVGYNYSKDNQQVNYGVRGGVIVHSEGITLSQPLGESLAIVSAPGAHGGHVVNSSGVEVDWMGNAVVPYLTPYRETIVELRSDTLGQNVELQEAFQKVVPTRGAIVRSRFDTRVGYRVLMSLKRANGNAVPFGATAALSDESKPASSIVGEEGQLYISGMPEEGELQVSWGHEQAQRCRVPFRLPEKKDNSGIVMVNAVCDK

SEQ ID NO: 6623 - protein, 229 aa, Escherichia coli
MANGNASIKGYNCNVSQGLVIIMPLPDFRFIRLLPLAALVLTACSVTTPKGPGKSPDSPQWRQHQQDVRNLNQYQTRGAFAYISDQQKVYARFFWQQTGQDRYRLLLTNPLGSTELELNAQPGNVQLVDNKGQRYTSDDAEEMIGKLTGMPIPLNSLRQWILGLPGDATDYKLDDQYRLSEITYSQNGKNWKVVYGGYDTKTQPAMPANMELTDGGQRIKLKMDNWIVK

SEQ ID NO: 6624 - protein, 111 aa, Escherichia coli; identical to SEQ ID NO: 3096

SEQ ID NO: 6625 - protein, 445 aa, Escherichia coli
MITLRKLPLAVAVAAGVMSAQAMAVDFHGYARSGIGWTGSGGEQQCFQTTGAQSKYRLGNECETYAELKLGQEVWKEGDKSFYFDTNVAYSVAQQNDWEATDPAFREANVQGKNLIEWLPGSTIWAGKRFYQRHDVHMIDFYYWDISGPGAGLENIDVGFGKLSLAATRSSEAGGSSSFASNNIYDYTNETANDVFDVRLAQMEINPGGTLELGVDYGRANLRDNYRLVDGASKDGWLFTAEHTQSVLKGFNKFVVQYATDSMTSQGKGLSQGSGVAFDNEKFAYNINNNGHMLRILDHGAISMGDNWDMMYVGMYQDINWDNDNGTKWWTVGIRPMYKWTPIMSTVMEIGYDNVESQRTGDKNNQYKITLAQQWQAGDSIWSRPAIRVFATYAKWDEKWGYDYNGDSKVNPNYGKAVPADFNGGSFGRGDSDEWTFGAQMEIWW

SEQ ID NO: 6626 - protein, 646 aa, Escherichia coli
MRLATPRINLSESLTGVPGLQVQNRQNYAQDLQLSIRGFGSRSTYGIRGIRLYVDGIPATMPDGQGQTSNIDLSSVQNVEVLRGPFSALYGNASGGVMNVTTQTGQQPPTIEASSYYGSFGSWRYGLKATGATGDGTQPGDVDYTVSTTRFTTHGYRDHSGAQKNLANAKLGVRIDEASKLSLIFNSVDIKADDPGGLTKAEWKANPQQAPRAEQYDTRKTIKQTQAGLRYERSLSAQDDMSVMMYAGERETTQYQSIPMAPQLNPSHAGGVITLQRHYQGIDSRWTHRGELGVPVTFTTGLNYENMSENRKGYNNFRLNSGMPEYGQKGELRRDERNLMWNIDPYLQTQWQLSEKLSLDAGVRYSSVWFDSNDHYVTPGNGDDSGDASYHKWLPAGSLKYAMTDAWNIYLAAGRGFETPTINELSYRADGQSGMNFGLKPSTNDTIEIGSKTRIGDGLLSLALFQTDTDDEIVVDSSSGGRTTYKNAGKTRRQGAELAWDQRFAGDFRVNASWTWLDATYRSNVCNEQDCNGNRMPGIARNMGFASIGYVPEDGWYAGTEARYMGDIMADDENTAKAPSYTLVGLFTGYKYNYHNLTVDLFGRVDNLFDKEYVGSVIVNESNGRYYEPSPGRNYGVGMNIAWRFE

SEQ ID NO: 6627 - protein, 250 aa, Escherichia coli; identical to SEQ ID NO: 3427

SEQ ID NO: 6628 - protein, 397 aa, Escherichia coli
MKIIITREYIMKRKVLAMLVPALLVAGAANAAEIYNKNGNKLDLYGKVDARHTFSDNPGDDGDETIIELGFKGETQITDQLTGYGQALTKTKASDTEGSDNTYVKLAFAGLKFGEMGSFDYGRNYGVIYDVEAWTDMLPVFGGDSYTWTDNFMAGRANGVATYRNSDFFGLVEGLNFALQYQGNNEGSNAGEDQEGTKNGHEDVRFQNGDGFGLSTSYDFDFGLSLGAAYSNSDRTNSQVALGGYHYNEYSKFAGGDTAEAWTFGAKYDANNVYLAMMYAETRNMTPYGNVGIANKTQNFEAVAQYQFDFGLRPSLAYVYSKGKDLGGNDYNNNGHQEYVDQDLVNYVEIGATYYFNKNFSTYVDYKINLLDKDDDFYDNNGIATDDVVGVGLVYQF

SEQ ID NO: 6629 - protein, 224 aa, Escherichia coli
MATVLLLLLFACHSCVANAAVALGATRVIYPANQKQVLLPVTNNDPASVYLIQSWIENAGDQKDTQFVITPPLFSMQGKKENTLRIINATNHQLPGDRESLFWVNVKAIPAMEKDQKNENTLQLAIISRIKMLYRPTNLAMAPEEAPAMLRFRRSGSKLTLINPTPYFITVTNMKAGNSNLPNTMVPPKGEVSVDITHAATGDISFQTINDYGALTPRIKATMQ

SEQ ID NO: 6630 - protein, 554 aa, Escherichia coli
MALIPACIFLCFAALSVQAEETPVTPQPPDILLGPLFNDVQNAKLFPDQKTFADAVPNSDPLMILADYRMQQNQSGFDLRHFVNVNFTLPKEGEKYVPPEGQSLREHIDGLWPVLTRSTENTEKWDSLLPLPEPYVVPGGRFREVYYWDSYFTMLGLAESGHWDKVADMVANFAHEIDTYGHIPNGNRSYYLSRSQPPFFALMVELLAQHEGDAALKQYLPQMQKEYAYWMDGVENLQAGQQEKRVVKLQDGTLLNRYWDDRDTPRPESWVEDIATAKSNPNRPATEIYRDLRSAAASGWDFSSRWMDNPQQLNTLRTTSIVPVDLNSLMFKMEKILARASKAAGDNAMANQYETLANARQKGIEKYLWNDQQGWYADYDLKSHKVRNQLTAAALFPLYVNAAAKDRANKMATATKTHLLQPGGLNTTSVKSGQQWDAPNGWAPLQWVATEGLQNYGQKEVAMDISWHFLTNVQHTYDREKKLEEKYDVSTTGTGGGGGEYPLQDGFGWTNGVTLKMLDLICPKEQPCDNVPATRPTVKSATTQPSTKEAQPTP

SEQ ID NO: 6631 - protein, 362 aa, Escherichia coli; identical to SEQ ID NO: 5812

SEQ ID NO: 6632 - protein, 614 aa, Escherichia coli; identical to SEQ ID NO: 1888

SEQ ID NO: 6633 - protein, 230 aa, Escherichia coli; identical to SEQ ID NO: 2580

SEQ ID NO: 6634 - protein, 250 aa, Escherichia coli; identical to SEQ ID NO: 3427

SEQ ID NO: 6635 - protein, 122 aa, Escherichia coli; identical to SEQ ID NO: 2915

SEQ ID NO: 6636 - protein, 367 aa, Escherichia coli
MKVKVLSLLVPALLVAGAANAAEVYNKDGNKLDLYGKVDGLHYFSDDKSVDGDQTYMRLGFKGETQVTDQLTGYGQWEYQIQGNSAENENNSWTRVAFAGLKFQDVGSFDYGRNYGVVYDVTSWTDVLPEFGGDTYGSDNFMQQRGNGFATYRNTDFFGLVDGLNFAVQYQGKNGSVSGEGMTNNGRGALRQNGDGVGGSITYDYEGFGIGGAISSSKRTDDQNSPLYIGNGDRAETYTGGLKYDANNIYLAAQYTQTYNATRVGSLGWANKAQNFEAVAQYQFDFGLRPSVAYLQSKGKNLGTIAGRNYDDEDILKYVDVGATYYFNKNMSTYVDYKINLLDDNQFTRDAGINTDNIVALGLVYQF

SEQ ID NO: 6637 - protein, 517 aa, Escherichia coli; identical to SEQ ID NO: 2462

SEQ ID NO: 6638 - protein, 729 aa, Escherichia coli; identical to SEQ ID NO: 3979

SEQ ID NO: 6639 - protein, 241 aa, Escherichia coli; identical to SEQ ID NO: 2863

SEQ ID NO: 6640 - protein, 386 aa, Escherichia coli; identical to SEQ ID NO: 5575

SEQ ID NO: 6641 - protein, 250 aa, Escherichia coli; identical to SEQ ID NO: 3811

SEQ ID NO: 6642 - protein, 629 aa, Escherichia coli
MTVTATGNARSSFEAPMMVSVIDTSAPENQTATSATDLLRHVPGITLDGTGRTNGQDVNMRGYDHRGVLVLVDGVRQGTDTGHLNGTFLDPALIKRVEIVRGPSALLYGSGALGGVISYDTVDAKDLLQEGQSSGFRVFGTGGTGDHSLGLGASAFGRTENLDGIVAWSSRDRGDLRQSNGETAPNDESINNMLAKGTWQIDSAQSLSGLVRYYNNDAREPKNPQTVEASDSSNPMVDRSTIQRDAQLSYKLAPQGNDWLNADAKVYWSEVRINAQNTGSSGEYREQITKGARLENRSTLFADSFASHLLTYGGEYYRQEQHPGGATTGFPQAKIDFSSGWLQDEITLRDLPITLLGGTRYDSYRGSSDGYKDVDADKWSSRAGMTINPTNWLMLFGSYAQAFRAPTMGEMYNDSKHFSIGRFYTNYWVPNPNLRPETNETQEYGFGLRFDDLMLSNDALEFKASYFDTKAKDYISTTVDFAAATTMSYNVPNAKIWGWDVMTKYTTDLFSLDVAYNRTRGKDTDTGEYISSINPDTVTSTLNIPIAHSGFSVGWVGTFADRSTHISSSYSKQPGYGVNDFYVSYQGQQALKGMTTTLVLGNAFDKEYWSPQGIPQDGRNGKIFVSYQW

SEQ ID NO: 6643 - protein, 192 aa, Escherichia coli
MNFAAQYQGKNDRTDVTEANGDGFGFSTTYEYEGFGVGATYAKSDRTDGQVAYGKSKFNASGKNAEVWAAGLKYDANNIYLATTYSETQNMTVFGNNHIANKAQNFEAVAQYQFDFGLRPSVAYLQSKGKDLGVHGDRDLVKYVDVGATYYFNKNMSTFVDYKINLIDDSKFTKTAGIDTDDIVAVGLVYQF

SEQ ID NO: 6644 - protein, 192 aa, Escherichia coli; identical to SEQ ID NO: 4587

SEQ ID NO: 6645 - protein, 728 aa, Escherichia coli; identical to SEQ ID NO: 4574

SEQ ID NO: 6646 - protein, 746 aa, Escherichia coli; identical to SEQ ID NO: 4597

SEQ ID NO: 6647 - protein, 518 aa, Escherichia coli; identical to SEQ ID NO: 2356

SEQ ID NO: 6648 - protein, 726 aa, Escherichia coli
MSVYAQAAVEPKEDTITVTAAPAPQESAWGPAATIAARQSATGTKTDTPIQKVPQSISVVTAEEMALHQPKSVKEALSYTPGVAVGTRGASNTYDYLIIRGFAADGQSQNNYLNGLKMQGNFYNDAVIDPYMLERAEIMRGPVSVLYGKSSPGGLLNMVSKRPTTEPLKEVQFKAGTDSLFQTGFDFSDALDDDGVYSYRLTGLARSANAQQKGSEEQRYAIAPAFTWRPDDKTNFTFLSYFQNEPETGYYGWLPKEGTVEPLPNGKRLPTDFNEGAKNNTYSRNEKMIGYSFDHEFNDTFTVRQNLRFAQNKVSQKSVYGYGMCSDPLYTKDQEALKASPCLSIPQSQWGHTLTRQYVIDNEKLENFSVDTQLQSKFATGSVDHTLLTGVDFMRMRNDIDSWFGYAGSVAPSDIYNLDRSDFDFGAHPNPSGPYRVLLKQKQTGLYVQDQAQWDKVLVTLGGRYDWADQSSFNRDYGNKSERDDKEFTWRGGVNYLFDNGVTPYFSYSESFEPASQTDANGDLFAPSKGKQYEVGVKYVPEDRPIVVTGALYQLTKTNNLMADPNGSLFSVEGGEIRARGVELEAKAALSASVNVVGSYTYTDAEYTTDTTYKGNTPAQVPKHMASLWADYTFFDGPLSGLTLGTGGRYTGSSYGDPANSFKVGSYTVVDALVRYDLARVGMAGSNVALHVNNLFDREYVASCFNTYGCFWGAERQVVATATFRF

SEQ ID NO: 6649 - protein, 554 aa, Escherichia coli
MALIPACIFLCFAALSVQAEETSVTPQPPDILLGPLFNDVQNAKLFPDQKTFADAVPNSDPLMILADYRMQQNQSGFDLRHFVNVNFTLPKEGEKYVPPEGQSLREHIDGLWPVLTRSTENTEKWDSLLPLPKPYVVPGGRFREVYYWDSYFTMLGLAESGHWDKVADMVANFAHEIDTYGHIPNGNRSYYLSRSQPPFFALMVELLAQHEGDAALKQYLPQMQKEYAYWMDGVENLQAGQQEKRVVKLQDGTLLNRYWDDRDTPRPESWVEDIATAKSNPNRPATEIYRDLRSAAASGWDFSSRWMDNPQQLNTLRTTSIVPVDLNSLMFKMEKILSRASKAAGDNAMANQYETLANARQKGIEKYLWNDQQGWYADYDLKSHKVRNQLTAAALFPLYVNAAAKDRASKMATATKTHLLQPGGLNTTSVKSGQQWDAPNGWAPLQWVATEGLQNYGQKEVAMDISWHFLTNVQHTYDREKKLVEKYDVSTTGTGGGGGEYPLQDGFGWTNGVTLKMLDLICPKEQPCDNVPATRPLSESTTQPLKQKEAEPTP

SEQ ID NO: 6650 - protein, 191 aa, Escherichia coli
MNKSLLGLTFASLMFSAGSAVAADYKIDKEGQHAFVNFRIQHLGYSWLYGTFKDFDGTFTFDEKNPAADKVNVTINTTSVDTNHAERDKHLRSADFLNTAKYPQATFTSTSVKKDGDELDITGDLTLNGVTKPVTLEAKLIGQGDDPWGGKRAGFEAEGKIKLKDFNIKTDLGPASQEVDLIISVEGVQQK

SEQ ID NO: 6651 - protein, 235 aa, Escherichia coli; identical to SEQ ID NO: 4365

SEQ ID NO: 6652 - protein, 729 aa, Escherichia coli; identical to SEQ ID NO: 4557

SEQ ID NO: 6653 - protein, 119 aa, Escherichia coli; identical to SEQ ID NO: 5512

SEQ ID NO: 6654 - protein, 681 aa, Escherichia coli
MTLSIWRKKTTGLKTKKRLLPLMLAAALCSSPVWAEEATFTANFKDTDLKSFIETVGANLNKTIIMGPGVQGKVSIRTMTPLNERQYYQLFLNLLEAQGYAVVPMENDVLKVVKSSAAKVEPLPLVGEGSDNYAGDEMVTKVVPVRNVSVRELAPILRQMIDSAGSGNVVNYDPSNVIMLTGRASVVERLTEVIQRVDHAGNRTEEVIPLDNASASEIARVLESLTKNSGENQPATLKSQIVADERTNSVIVSGDPATRDKMRRLIRRLDSEMERSGNSQVFYLKYSKAEDLVDVLKQVSGTLTAAKEEAEGTVGSGREVVSIAASKHSNALIVTAPQDIMQSLQSVIEQLDIRRAQVHVEALIVEVAEGSNINFGVQWGSKDAGLMQFANGTQIPIGTLGAAISAAKPQKGSTVISENGATTINPDTNGDLSTLAQLLSGFSGTAVGVVKGDWMALVQAVKNDSSSNVLSTPSITTLDNQEAFFMVGQDVPVLTGSTVGSNNSNPFNTVERKKVGIMLKVTPQINEGNAVQMVIEQEVSKVEGQTSLDVVFGERKLKTTVLANDGELIVLGGLMDDQAGESVAKVPLLGDIPLIGNLFKSTADKKEKRNLMVFIRPTILRDGMAADGVSQRKYNYMRAEQIYRDEQGLSLMPHTAQPILPAQNQALPPEVRAFLNAGRTR

SEQ ID NO: 6655 - protein, 753 aa, Escherichia coli
MNVIKLAIGSGILLLSCGAYSQSISEKTNSDKKGAAEFSPLSVSVGKTTSEQEALEKTGATSSRTTDKNLQSLDATVRSMPGTYTQIDPGQGAISVNIRGMSGFGRVNTMVDGITQSFYGTSTSGTTTHGSTNNMAGVLIDPNLLVAVDVTRGDSSGSEGINALAGSANMRTIGVDDVIFNGNTYGLRSRFSVGSNGLGRSGMIALGGKSDAFTDTGSIGVMAAVSGSSVYSNFSNGSGINSKEFGYDKYMKQNPKSQLYKMDIRPDEFNSFELSARTYENKFTRRDITSDDYYIKYHYTPFSELIDFNVTASTSRGNQKYRDGSLYTFYKTSAQNRSDALDINNTSRFTVADNDLEFMLGSKLMRTRYDRTIHSAAGDPKANQESIENNPFAPSGQQDISALYTGLKVTRGIWEADFNLNYTRNRITGYKPACDSRVICVPQGSYDIDDKEGGFNPSVQLSAQVTPWLQPFIGYSKSMRAPNIQEMFFSNSGGASMNPFLKPERAETWQAGFNIDTRDLLVEQDALRFKALAYRSRIQNYIYSESYLVCSGGRKCSLPEVIGNGWEGISDEYSDNMYIYVNSASDVIAKGFELEMDYDAGFAFGRLSFSQQQTDQPTSIASTHFGAGDITELPRKYMTLDTGVRFFDNALTLGTIIKYTGKARRLSPDFEQDEHTGAIIKQDLPQIPTIIDLYGTYEYNRNLTLKLSVQNLMNRDYSEALNKLNMMPGLGDETHPANSARGRTWIFGGDIRF

SEQ ID NO: 6656 - protein, 446 aa, Escherichia coli; identical to SEQ ID NO: 2177

SEQ ID NO: 6657 - protein, 224 aa, Escherichia coli; identical to SEQ ID NO: 4578

SEQ ID NO: 6658 - protein, 650 aa, Escherichia coli
MKGLNKITCCLLAALLMPCAGHAENEQYGANFNNADIRQFVEIVGQHLGKTILIDPSVQGTISVRSNDTFSQQEYYQFFLSILDLYGYSVITLDNGFLKVVRSANVKTSPGMIADSSRPGVGDELVTRIVPLENVPARDLAPLLRQMMDAGSVGNVVHYEPSNVLILTGRASTINKLIEVIKRVDVIGTEKQQIIHLEYASAEDLAEILNQLISESHGKSQMPALLSAKIVADKRTNSLIISGPEKARQRITSLLKSLDVEESEEGNTRVYYLKYAKATNLVEVLTGVSEKLKDEKGNARKPSSSGAMDNVAITADEQTNSLVITADQSAQEKLATVIARLDIRRAQVLVEAIIVEVQDGNGLNLGVQWANKNVGAQQFTNTGLPIFNAAQGVADYKKNGGITSANPAWDMFSAYNGMAAGFFNGDWGVLLTALASNNKNDILATPSIVTLDNKLASFNVGQDVPVLSGSQTTSGDNVFNTVERKTVGTKLKVTPQVNEGDAVLLEIEQEVSSVDSSSNSTLGPTFNTRTIQNAVLVKTGETVVLGGLLDDFSKEQVSKVPLLGDIPLVGQLFRYTSTERAKRNLMVFIRPTIIRDDDVYHSLSKEKYTRYRQEQQQRIDGKSKALVGSEDLPVLDENTFNSHAPAPSSR

SEQ ID NO: 6659 - protein, 245 aa, Escherichia coli; identical to SEQ ID NO: 3410

SEQ ID NO: 6660 - protein, 331 aa, Escherichia coli; identical to SEQ ID NO: 2705

SEQ ID NO: 6661 - protein, 656 aa, Escherichia coli
MRLKKRYLCTVLSLAFTQQAVAAQESDTLTVWSSPVSSTTTTVLDQPTMKALDKQNVAQALSVVPGVVLQKSGSRNEEQVKVRGFDSRQVPVYFDGVPIYVPYDGNLDLARILTNNLGAVEVSKGYSSLLQGPNQMGGAINITTQKPTKPLEANLGYRQGWSRSHDNAYDMHASFAASSDLGYLQVSGSQLKQDFLGLPHGVNNDIAGKHGKMINSSADDKRGIVKLGFTPRENDEYTLTYIKQDGEKDNPPYSGNSGQKSRYWQWPEYDKESFYYQGTTQLNDRFTLKSRLYRDTFENTLMMYNSLADLKNKKGSYSHYSDYSDGAGLQLAADVRENDLLSFAVNWKDDVHREKGAPHAAYDRYEDRTWSLASEYQWAAADNVDVVAGISYDWRDSVEAKKHEKDGSITHYDDNNQSAFNWQVMGKYHFANEDTLALSYYDRTRFPTLKERYTTSKPAYNQIAIVNPQLKPERARGVDLTWNGAFTHDWGFEVSVYYNRVSDAILSHNIDADTIQNQNSGTVDYSGLDAGIKGKISNILDVGLSYALIHADAKRKDIGKITDLPTQTMTAWMTLKPWEPLSVTLSEEARSSSYSNSDGSQKAAGFAVTHIRADYTLGHGFSVNASVNNLFDTKYAYSEGFIEEGRNFWAGIEYTF

SEQ ID NO: 6662 - protein, 243 aa, Escherichia coli; identical to SEQ ID NO: 2910

SEQ ID NO: 6663 - protein, 224 aa, Escherichia coli; identical to SEQ ID NO: 3115

SEQ ID NO: 6664 - protein, 241 aa, Escherichia coli
MSNKNVNVRKSQEITFCLLAGILMFMAMMVAGRAEAGVALGATRVIYPAGQKQVQLAVTNNDENSTYLIQSWVENADGVKDGRFIVTPPLFAMKGKKENTLRILDATNNQLPQDRESLFWMNVKAIPSMDKSKLTENTLQLAIISRIKLYYRPAKLALPPDQVAEKLRFRRSANSLTLINPTPYYLTVTELNAGTRVLENALVPPMGESTVKLPSDAGSNITYRTINDYGALTPKMTGVME

SEQ ID NO: 6665 - protein, 242 aa, Escherichia coli
MLVSTALMALLTTASLTAHASVTPDRTRLVFNESDKSISVTLRNNNEKLPYLAQSWLEDEKGNKITSPLAVLPPVQRIDAMMNGQVKIQALPDIHTLPSDRESLFYYNVREIPPKSGKANTLQIALQTRIKLFWRPKALEKIDMRRPWQFKVTLTRSGQDYTVNNPTPYHVIISDASTQKKGLTAAGFKPLVMPPKTSQPLKAKLASAPVLTYINDYGARMPLIFRCEGNTCKVDEDQSSKG

SEQ ID NO: 6666 - protein, 614 aa, Escherichia coli
MIKKASLLTACSVTAFSAWAQDTSPDTLVVTANRFEQPRSTVLAPTTVVTRQDIDRWQSTSVNDVLRRLPGVDITQNGGSGQLSSIFIRGTNASHVLVLIDGVRLNLAGVSGSADLSQFPIALVQRVEYIRGPRSAVYGSDAIGGVVNIITTRDHPGTEISAGWGSNSYQNYDVSTQQQLGDKTRVTLLGDYAHTHGYDVVAYGNTGTQAQPDNDGFLSKTLYGALEHNFTDAWSGFVRGYGYDNRTNYDAYYSPGLPLVDTRKLYSQSWDAGLRYNGELIKSQLITSYSHSKDYNYDPHYGRYDSSATLDEMKQYTVQWANNIIIGHGNIGAGVDWQKQSTAPGTAYVEDGYDQRNTGIYLTGLQQVGDFTFEGAGRSDDNSQFGRHGTWQTSAGWEFIEGYRFIASYGTSYKAPNLGQLYGSYGNPNLNPEKSKQWEGAFEGLTAGVNWRISGYRNDVSDLIDYDDHTLKYYNEGKARIKGVEATANFDTGPLTHTVSYDYVDARNAITDTPLLRRAKQQVKYQLDWQLYDFDWGITYQYLGTRYDKDYSSYPYQTVKMGGVSLWDLAVAYPVTSHLTVRGKIANLFDKDYETVYGYQTAGREYTLSGSYTF

SEQ ID NO: 6667 - protein, 252 aa, Escherichia coli
MKLMRYLNTKNIIAAGVLLSCMNSIAWGAIIPDRTRIIMNESDKGEALKLTNQSKKLPYLAQTWIEDTKGNKSRDFIVTVPPMVRLNPNEQIQIRMITQEKIAQLPKDRETLFYFNVREIPPKTDKKNVMQVTMQHALKLFWRPKAIELEDDGVMTYEKVEIIRRNDGSIRFNNKMPYHVTLGYIGTNGVTMLPQTQSLMVLPFSHADTQFKNVPSTFQVGYINDFGGLSFYEINCPTVNNSCNVSVAKRDK

SEQ ID NO: 6668 - protein, 478 aa, Escherichia coli
MTRIKINARRIFSLLIPFFFFTSVHAEQTAAPAKPVTVEAKNETFAPQHPDQYLSWKATSEQSERVDALAEDPRLVILWAGYPFSRDYNKPRGHAFAVTDVRETLRTGAPKNAEDGPLPMACWSCKSPDVARLIQTDGEDGYFHGKWARGGPEIVNNLGCADCHNTASPEFAKGKPELTLSRPYAARAMEAIGKPFEKAGRFDQQSMVCGQCHVEYYFDGKNKAVKFPWDDGMKVENMEQYYDKIAFSDWTNSLSKTPMLKAQHPEYETWTAGIHGKNNVTCIDCHMPKVQNAEGKLYTDHKIGNPFDNFAQTCANCHTQDKAALQKVVAERKQSINDLKIKVEDQLVHAHFEAKAALDAGATEAEMKPIQDDIRHAQWRWDLAIASHGIHMHAPEEGLRMLGTAMDKAADARTKLARLLATKGITHEIQIPDISTKEKAQQAIGLNMEQIKAEKQDFIKTVIPQWEEQARKNGLLSQ

SEQ ID NO: 6669 - protein, 236 aa, Escherichia coli
MTNTWNRLALLIFAVLSLLVAGELRAGVVVGGTRFIFPADRESISILLTNTSQESWLINSKINRPTRWAGGEASTVPAPLLAAPPLILLKPGTTGTLRLLRTESDILPVDRETLFELSIASVPSGKVENQSVKVAMRSIFKLFWRPEGLPGDPLEAYQQLRWTRNSQGVQLTNPTPYYINLIQVSVNGKALSNAGVVPPKSQRQTSWCQAIAPCHVAWRAINDYGGLSAKKEQNLP

SEQ ID NO: 6670 - protein, 446 aa, Escherichia coli; identical to SEQ ID NO: 5815

SEQ ID NO: 6671 - protein, 213 aa, Escherichia coli; identical to SEQ ID NO: 2232

SEQ ID NO: 6672 - protein, 784 aa, Escherichia coli
MKKRIPTLLATMIATALYSQQGLAADLASQCMLGVPSYDRPLVQGDTNDLPVTINADHAKGDYPDDAVFTGSVDIMQGNSRLQADEVQLHQKEAPGQPEPVRTVDALGNVHYDDNQVILKGPKGWANLNTKDTNVWEGDYQMVGRQGRGKADLMKQRGENRYTILDNGSFTSCLPGSDTWSVVGSEIIHDREEQVAEIWNARFKVGPVPIFYSPYLQLPVGDKRRSGFLIPNAKYTTTNYFEFYLPYYWNIAPNMDATITPHYMHRRGNIMWENEFRYLSQAGAGLMELDYLPSDKVYKDEHPNDDSSRRWLFYWKHSGVMDQVWRFNVDYTKVSDPSYFNDFDNKYGSSTDGYATQKFSIGYAVQNFNATVSTKQFQVFSEQNTSSYSAEPQLDVNYYQNDVGPFDTRIYGQAVHFVNTRDDMPEATRVHLEPTINLPLSNNWGSINTEAKLLATHYQQTNLDWYNSRNTTRLAESANRVMPQFKVDGRMVFERDMEMLAPGYTQTLEPRAQYLYVPYRDQSKIYNYDSSLLQSDYSGLFRDRTYGGLDRIASANQVTTGVTSRIYDDAAVERFNISVGQIYYFTESRTGDDNITWENDDKTGSLVWAGDTYWRISDRWGLRGGIQYDTRLDNVATSNSSIEYRRDEDRLVQLNYRYASPEYIQATLPKYYSTAEQYKNGISQVGAVASWPIADRWSIVGAYYYDTNANKQADSMLGVQYSSCCYAIRVGYERKLNGWDNDKQHAVYDNAIGFNIELRGLSSNYGLGTQEMLRSNILPYQNTL

SEQ ID NO: 6673 - protein, 208 aa, Escherichia coli; identical to SEQ ID NO: 1948

SEQ ID NO: 6674 - protein, 518 aa, Escherichia coli; identical to SEQ ID NO: 2349

SEQ ID NO: 6675 - protein, 746 aa, Escherichia coli; identical to SEQ ID NO: 5629

SEQ ID NO: 6676 - protein, 233 aa, Escherichia coli; identical to SEQ ID NO: 2006

SEQ ID NO: 6677 - protein, 386 aa, Escherichia coli; identical to SEQ ID NO: 3072

SEQ ID NO: 6678 - protein, 275 aa, Escherichia coli
NRAESQGSSKDKTRLAFAGLKFGDYGSIDYGRNYGVAYDIGAWTDVLPEFGGDTWTQTDVFMTGRTTGVATYRNNDFFGLVDGLNFAAQYQGKNDRTDVTEANGDGFGFSTTYEYEGFGVGATYAKSDRTNDQVIYGNNSLNASGQNAEVWAAGLKYDANNIYLATTYSETQNMTVFGNNHIANKAQNFEVVAQYQFDFGLRPSVAYLQSKGKDLGAWGDQDLVEYIDVGATYYFNKNMSTFVDYKINLIDKSDFTKASGVATDDIVAVGLVYQF

SEQ ID NO: 6679 - protein, 235 aa, Escherichia coli; identical to SEQ ID NO: 4365

SEQ ID NO: 6680 - protein, 274 aa, Escherichia coli; identical to SEQ ID NO: 6497

SEQ ID NO: 6681 - protein, 208 aa, Escherichia coli; identical to SEQ ID NO: 1949

SEQ ID NO: 6682 - protein, 362 aa, Escherichia coli; identical to SEQ ID NO: 4554

SEQ ID NO: 6683 - protein, 204 aa, Escherichia coli; identical to SEQ ID NO: 2957

SEQ ID NO: 6684 - protein, 230 aa, Escherichia coli; identical to SEQ ID NO: 4598

SEQ ID NO: 6685 - protein, 654 aa, Escherichia coli; identical to SEQ ID NO: 5571

SEQ ID NO: 6686 - protein, 367 aa, Escherichia coli
MKVKVLSLLVPALLVAGAANAAEVYNKDGNKLDLYGKVDGLHYFSDDKSVDGDQTYMRLGFKGETQVTDQLTGYGQWEYQIQGNSAENENNSWTRVAFAGLKFQDVGSFDYGRNYGVVYDVTSWTDVLPEFGGDTYGSDNFMQQRGNGFATYRNTDFFGLVDGLNFAVQYQGKNGSVSGEGMTNNGRGALRQNGDGVGGSITYDYEGFGIGGAISSSKRTDDQNSPLYIGNGDRAETYTGGLKYDANNIYLAAQYTQTYNATRVGSLGWANKAQNFEAVAQYQFDFGLRPSLAYLQSKGKNLGVINGRNYDDEDILKYVDVGATYYFNKNMSTYVDYKINLLDDNQFTRDAGINTDNIVALGLVYQF

SEQ ID NO: 6687 - protein, 237 aa, Escherichia coli
MICLLGICNFAQATVSPDRTRIIFNASNKSATVRLTNQSKIDPYLAQSWIEDASGKKTRDYISTLPPMERIEPDEQIQIRLMALASLNDLPQDRETLFYYNVREIPPRAKEQNVMQIAMQSRLKLFWRPKAIELKEGEMIPLQKVTITRTAAGLTLNNPTPYHITVGYIGTNGKTLMPGADSIMVAPFTSATQHLSSLPSTFQLGFVADYGGLEMFKVECNSIQSLCQSSPAKKGKI

SEQ ID NO: 6688 - protein, 305 aa, Escherichia coli
MMKKYLALALIAPLLISCSTTKKGDTYNEAWVKDTNGFDILMGQFAHNIENIWGFKEVVIAGPKDYVKYTDQYQTRSHINFDDGTITIETIAGTEPAAHLRRAIIKTLLMGDDPSSVDLYSDVDDITISKEPFLYGQVVDNTGQPIRWEGRASNFADYLLKNRLKSRSNGLRIIYSVTINMVPNHLDKRAHKYLGMVRQASRKYGVDESLILAIMQTESSFNPYAVSRSDALGLMQVVQHTAGKDVFRSQGKSGTPSRSFLFDPASNIDTGTAYLAMLNNVYLGGIDNPTSRRYAVITAYNGGAG

SEQ ID NO: 6689 - protein, 222 aa, Escherichia coli; identical to SEQ ID NO: 1956

SEQ ID NO: 6690 - protein, 360 aa, Escherichia coli; identical to SEQ ID NO: 3354

SEQ ID NO: 6691 - protein, 230 aa, Escherichia coli
MAFSSSSIADIVISGTRVIYKSDQKSVNVRLENKGNNPLLVQSWLDTGDDNAEPGSITVPFTATPPVSRIDAKRGQTIKLMYTASTSLPKDRESVFWFNVLEVPPKPDAEKVANQSLLQLAFRTRIKLFYRPDGLKGNPSEAPLALKWSWSGSEGKASLRVANPTPYYVSFSSGDLEASGKRYPIDVKMIAPFSDEVMKVTGLNGKANSAKVHFYAINDFGGAIEGNARL

SEQ ID NO: 6692 - protein, 541 aa, Escherichia coli; identical to SEQ ID NO: 3377

SEQ ID NO: 6693 - protein, 760 aa, Escherichia coli; identical to SEQ ID NO: 2080

SEQ ID NO: 6694 - protein, 122 aa, Escherichia coli; identical to SEQ ID NO: 2915

SEQ ID NO: 6695 - protein, 431 aa, Escherichia coli; identical to SEQ ID NO: 3408

SEQ ID NO: 6696 - protein, 713 aa, Escherichia coli; identical to SEQ ID NO: 6243

SEQ ID NO: 6697 - protein, 224 aa, Escherichia coli
MKGLLALLISSMVLPAHAGIVIYGTRIIYPAEHKEVMVQLMNQGNRSSLMQAWIDDGDTSLPPEKIQVPFMLTPPVAKIGANSGQQVKIKIMPNKLPTNKESIFYLNVLDIPPNSPEQEGKNALKFAMQNRIKLFYRPAGIAPVNKATFKKLLVNRSGNGLVIKNASANWVTISDVKANNVKVNYETIMIAPLESQSVNVKSNNANNWHLTIIDDHGNYISDKI

SEQ ID NO: 6698 - protein, 673 aa, Escherichia coli
MKMTRLYPLALGGLLLPAIANAQTSQQDESTLVVTASKQSSRSASANNVSSTVVSAPELSDAGVTASDKLPRVLPGLNIENSGNMLFSTISLRGVSSAQDFYNPAVTLYVDGVPQLSTNTIQALTDVQSVELLRGPQGTLYGKSAQGGIINIVTQQPDSTPRGYIEGGVSSRDSYRSKFNLSGPIQDGLLYGSVTLLRQVDDGDMINPATGSDDLGGTRASIGNVKLRLAPDDQPWEMGFAASRECTRATQDAYVGWNDIKGRKLSISDGSPDPYMRRCTDSQTLSGKYTTDDWVFNLISAWQQQHYSRTFPSGSLIVNMPQRWNQDVQELRAATLGDAHTVDMVFGLYRQNTREKLNSAYDMPTMPYLSSTGYTTAETLAAYSDLTWHLTDRFDIGGGVRFSHDKSSTQYHGSMLGNPFGDQGKSNDDQVLGQLSAGYMLTDDWRVYTRVAQGYKPSGYNIVPTAGLDAKPFVAEKSINYELGTRYETADVTLQAATFYTHTKDMQLYSGPVGMQTLSNAGKADATGVELEAKWRFAPGWSWDINGNVIRSEFTNDSELYHGNRVPFVPRYGAGSSVNGVIDTRYGALMPRLAVNLVGPHYFDGDNQLRQGTYATLDSSLGWQATERMNISVYVDNLFDRRYRTYGYMNGSSAVAQVNMGRTVGINTRIDFF

SEQ ID NO: 6699 - protein, 541 aa, Escherichia coli; identical to SEQ ID NO: 4576

SEQ ID NO: 6700 - protein, 431 aa, Escherichia coli; identical to SEQ ID NO: 3408

SEQ ID NO: 6701 - protein, 663 aa, Escherichia coli
MFRLNPFVRVGLCLSAISCAWPVLAVDDDGETMVVTASSVEQNLKDAPASISVITQEDLQRKPVQNLKDVLKEVPGVQLTNEGDNRKGVSIRGLDSSYTLILVDGKRVNSRNAVFRHNDFDLNWIPVDSIERIEVVRGPMSSLYGSDALGGVVNIITKKIGQKWSGTVTVDTTIQEHRDRGDTYNGQFFTSGPLIDGVLGMKAYGSLAKREKDDPQNSTTTDTGETPRIEGFSSRDGNVEFAWTPSQNHDFTAGYGFDRQDRDSDSLDKNRLERQNYSVSHNGRWDYGTSELKYYGEKVENKNPGNSSPITSESNTVDGKYTLPLTAINQFLTVGGEWRHDKLSDAVNLTGGTSSKTSASQYALFVEDEWRIFEPLALTTGVRMDDHETYGEHWSPRAYLVYNATDTVTVKGGWATAFKAPSLLQLSPDWTSNSCRGACKIVGSPDLKPETSESWELGLYYMGEEGWLEGVESSVTVFRNDVKDRISISRTSDVNAAPGYQNFVGFETGANGRRIPVFSYYNVNKARIQGVETELKIPFSDEWKLSINYTYNDGRDVSNGENKPLSDLPFHTANGTLDWKPLALEDWSFYVSGHYTGQKRADSATAKTPGGYTIWNTGAAWQVTKDVKLRAGVLNLGDKDLSRDDYSYNEDGRRYFMAVDYRF

SEQ ID NO: 6702 - protein, 169 aa, Escherichia coli; identical to SEQ ID NO: 3373

SEQ ID NO: 6703 - protein, 191 aa, Escherichia coli
MKKSLLGLTFASLMCSAGSAVAADYKIDKEGQHAFVNFRIQHLGYSWLYGTFKDFDGTFTFDEINPAADKVNVTINTTSVDTNHAERDKHLRSADFLNTTKYPQATFTSTSVKKDGDELDITGDLTLNGVTKPVTLEAKLIGQGDDPWGGKRAGFEAEGKIKLKDFNIKTDLGPASQEVDLIISVEGVQQK

SEQ ID NO: 6704 - protein, 353 aa, Escherichia coli
MKMKKSTLALVVMGIVASVSVQAAEIYNKDGNKLDVYGKVKAMHYMSDNDSKDGDQSYIRFGFKGETQINDQLTGYGRWEAEFAGNKAESDTAQQKTRLAFAGLKYKDLGSFDYGRNLGALYDVEAWTDMFPEFGGDSSAQTDNFMTKRASGLATYRNTDFFGVIDGLNLTLQYQGKNENRDVKKQNGDGFGTSLTYDFGGSDFAISGAYTNSDRTNEQNLQSRGTGKRAEAWATGLKYDANNIYLATFYSETRKMTPISGGFANKTQNFEAVAQYQFDFGLRPSLGYVLSKGKDIEGIGDEDLVNYVDVGATYYFNKNMSAFVDYKINQLDSDNKLNINNDDIVAVGMTYQF

SEQ ID NO: 6705 - protein, 274 aa, Escherichia coli; identical to SEQ ID NO: 2313

SEQ ID NO: 6706 - protein, 700 aa, Escherichia coli
MKIFSVRQTVLPALLVLSPVVFAADEQTMIVSAAPQVVSELDTPAAVSVVDGEEMRLATPRINLSESLTGVPGLQVQNRQNYAQDLQLSIRGFGSRSTYGIRGIRLYVDGIPATMPDGQGQTSNIDLSSVQNVEVLRGPFSALYGNASGGVMNVTTQTGQQPPTIEASSYYGSFGSWRYGLKATGATGDGTQPGDVDYTVSTTRLTTHGYRDHSGAQKNLANAKLGVRIDDASKLSLIFNSVDIKADDPGGLTEAEWKANPQQAPRAEQYDTRKTIKQTQAGLRYERSLSAQDDMSVMMYAGERETTQYQSIPMAPQLNPSHAGGVITLQRHYQGIDSRWTHRGELGVPLTFTTGLNYENMSENRKGYNNFRLNSGVPEYGQKGELRRDERNLMWNVDPYLQTQWQLSEKLSLDAGVRYSSVWFDSNDHYVTPGNGDDSGDASYHKWLPAGSLKYAMTDAWNIYLAAGRGFETPTINELSYRADGQSGMNFGLKPSTNDTIEIGSKTRIGDGLLSLALFQTDTDDEIVVDSSSGGRTTYKNAGKTRRQGAELAWDQRFAGDFRVKASWTWLDATYRSNVCNEQDCNGNRMPGIARNMGFASIGYIPEDGWYAGTEARYMGDIMADDENTAKAPSYTLVGLFTGYKYNYHNFTVDLFGRVDNLFDKEYVGSVIVNESNGRYYEPAPGRNYGVGINIAWRFE

SEQ ID NO: 6707 - protein, 111 aa, Escherichia coli; identical to SEQ ID NO: 3419

SEQ ID NO: 6708 - protein, 432 aa, Escherichia coli; identical to SEQ ID NO: 2026

SEQ ID NO: 6709 - protein, 747 aa, Escherichia coli
MARSKTAQPKHSLRKIAVVVATAVSGMSVYAQAAVEPKEDTITVTAAPAPQESAWGPAATIAARQSATGTKTDTPIQKVPQSISVVTAEEMALHQPKSVKEALSYTPGVSVGTRGASNTYDHLIIRGFAAEGQSQNNYLNGLKLQGNFYNDAVIDPYMLERAEIMRGPVSVLYGKSSPGGLLNMVSKRPTTEPLKEVQFKAGTDSLFQTGFDFSDALDDDGVYSYRLTGLARSANAQQKGSEEQRYAIAPAFTWRPDDKTNFTVLSYFQNEPETGYYGWLPKEGTVEPLPNGKRLPTDFNEGAKNNTYSRNEKMVGYSFDHEFNDTFTVRQNLRFAENKTSQNSVYGYGVCSDPANAYSKQCAALAPADKGHYLARKYVVDDEKLQNFSVDTQLQSKFATGDIDHTLLTGVDFMRMRNDINAWFGYDDSVPLLNLYNPVNTDFDFNAKDPANSGPYRILNKQKQTGVYVQDQAQWDKVLVTLGGRYDWADQESLNRVAGTTDKRDDKQFTWRGGVNYLFDNGVTPYFSYSESFEPSSQVGKDGNIFAPSKGKQYEVGVKYVPEDRPIVVTGAVYNLTKTNNLMADPEGSFFSVEGGEIRARGVEIEAKAALSASVNVVGSYTYTDAEYTTDTTYKGNTPAQVPKHMASLWADYTFFDGPLSGLTLGTGGRYTGSSYGDPANSFKVGSYTVVDALVRYDLARVGMAGSNVALHVNNLFDREYVASCFNTYGCFWGAERQVVATATFRF

SEQ ID NO: 6710 - protein, 432 aa, Escherichia coli; identical to SEQ ID NO: 2026

SEQ ID NO: 6711 - protein, 700 aa, Escherichia coli
MKIFSVRQTVLPALLALSPVVFAADEQTMIVSAAPQVVSELDTPAAVSVVDGEGMRLATPRINLSESLTSVPGLQVQNRQNYAQDLQLSIRGFGSRSTYGIRGIRLYVDGIPATMPDGQGQTSNIDLSSVQNVEVLRGPFSALYGNASGGVMNVTTQTGQQPPTIEASSYYGSFGSWRYGLKATGATGDGTQPGDVDYTVSTTRFTTHGYRDHSGAQKNLANAKLGVRIDEASKLSLIFNSVDIKADDPGGLTKAEWKANPQQAPRAEQYDTRKTIKQTQAGLRYERSLSSRDDMSVMMYAGERETTQYQSIPMAPQLNPSHAGGVITLQRHYQGIDSRWTHRGELGVPVTFTIGLNYENMSENRKGYNNFRLNSGMPEYGQKGELRRDERNLMWNIDPYLQTQWQLSEKLSLDAGVRYSSVWFDSNDHYITPSNGDDSGDASYHKWLPAGSLKYAMTDAWNIYLAAGRGFETPTINELSYRADGQSGMNFGLKPSTNDTIEIGSKTRIGDGLLSLALFQTDTDDEIVVDSSSGGRTTYKNAGKTRRQGAELAWDQRFAGDFRVNASWTWLDATYRSNVCNEQDCNGNRMPGIARNMGFASIGYVPEDGWYAGTEARYMGDIMADDENTAKAPSYTLIGLFTGYKYNYHNLTVDLFGRVDNLFDKEYVGSVIVNESNGRYYEPAPGRNYGVGVNIAWRFE

SEQ ID NO: 6712 - protein, 478 aa, Escherichia coli; identical to SEQ ID NO: 2405

SEQ ID NO: 6713 - protein, 517 aa, Escherichia coli
MKHKLQMMKTRWLSAAVMLTLYTSSSWAFSIDDVAKQAQSLAGKGYEAPKSNLPSVFRDMKYADYQQIQFNHDKAYWNNLKTPFKLEFYHQGMYFDTPVKINEVTATAVKRIKYSPDYFTFGDVQHDKDTVKDLGFAGFKVLYPINSKDKNDEIVSMLGASYFRVIGAGQVYGLSARGLAIDTALPSGEEFPRFKEFWIERPKPTDKRLTIYALLDSPRATGAYKFVVMPGRDTVVDVQSKIYLRDKVGKLGVAPLTSMFLFGPNQPSPANNYRPELHDSNGLSIHAGNGEWIWRPLNNPKHLAVSSFSMENPQGFGLLQRGRDFSRFEDLDDRYDLRPSAWVTPKGEWGKGSVELVEIPTNDETNDNIVAYWTPDQLPEPGKEMNFKYTITFSRDEDKLHAPDNAWVQQTRRSTGDVKQSNLIRQPDGTIAFVVDFTGAEMKKLPEDTPVTAQTSIGDNGEIVESTVRYNPVTKGWRLVMRVKVKDAKKTTEMRAALVNADQTLSETWSYQLPANE

SEQ ID NO: 6714 - protein, 228 aa, Escherichia coli
MKRISLAVLALLMTAQQCFAGGVALSTTRVIYDGGKKEASLTVENHNKNEEFLIQSWIDDVNGNKKTPFIITPPLFKLDPDKNNVLRIVNIEDTLPKDRESVYWINVKAIPAKSAENENKNVLQIAVRTRLKLFYRPKGLPGSNLEAMKQLRFQRQNNQIVVNNDSAYNLTFNQMSINGQKIERAGMVLAKGTLNINLPAGTGNANEVKYSIINDFGVAGEMLTKSIN

SEQ ID NO: 6715 - protein, 656 aa, Escherichia coli
MYMNVIRNVICTLIILPIGLQAETSHSSMAKDTITVVATGNQNTVFETPSMVSVVTNDTPWSQNAVTSAGMLKGVAGLSQTGAGRTNGQTFNLRGYDKSGVLVLVDGIRQLSDMAKSSGTYLDPALVKRIEVVRGPNSSLYGSGGLGGVVDFRTADAADFLPPGETNGLSLWGNIASGDHSTGSGLTWFGKTGKTDALLSVIMRKRGNIYQSDGERAPNKEKPAALFAKGSVGITDSNKAGASLRLYRNNTTEPGNPTQTHGDSGLRDRKTVQNDVQFWYQYAPVDNSLINVKSTLYLSDITIKTNGHNKTAEWRNNRTSGVNVVNRSHTLIFPGAHQLSYGAEYYRQQQKPEGSATLYPEGNIDFTSLYFQDEMTMKSYPVNIIVGSRYDRYKSFNPRAGELKAERLSPRAAISVSPTDWLMMYGSISSAFRAPTMAEMYRDDVHFYRKGKPNYWVPNLNLKPENNITREIGAGIQLDGLLTGNDRLQLKGGYFGTDARNYIATRVDMKRMRSYSYNVSRARIWGWDMQGNYQSDYFDWMLSYNRTESMDASSREWLGSGNPDTLISDISIPVGHGGVSAGWRAELSAAATHVKKGDPHQAGYAVHSFSLSYKPVSVKGFEASVTLDNAFNKLAMNGKGVPLSGRTVSLYTRYQW

SEQ ID NO: 6716 - protein, 784 aa, Escherichia coli; identical to SEQ ID NO: 2244

SEQ ID NO: 6717 - protein, 353 aa, Escherichia coli; identical to SEQ ID NO: 4626

SEQ ID NO: 6718 - protein, 249 aa, Escherichia coli
MIKVVIVLFSLLFSTAQAGLVIGGTRFAYPENQSSISVELKNTSDRDMLVKIAVSPDDARQLTGTVESLPSYSETVFIATPPLFVLKPDKNTKIRINRVGGSLPADRESLFILNVAALPTLENSHSVKTDNQLQIAVRNRMKIFYRPSNLSEDPNMSYQKLRWARKNEIVTVYNPGPRYVTLYNLHVDGKVIDGGMVAPFSHRQQSWCKSQGVCEIAWQTLDIYNNVLPILKVKLNPSQLDFTGFAFSQ

SEQ ID NO: 6719 - protein, 760 aa, Escherichia coli
MENNRNFPARQFHSLTFFAGLCIGITPVAQALAAEGQANADDTLVVEASTPSLYAPQQSADPKFSRPVADTTRTMTVISEQVIKDQGATNLTDALKNVPGVGAFFAGENGNSTTGDAIYMRGADTSNSIYIDGIRDIGSVSRDTFNTEQVEVIKGPSGTDYGRSAPTGSINMISKQPRNDSGIDASASIGSAWFRRGTLDVNQVIGDTTAVRLNVMGEKTHDAGRDKVKNERYGVAPSVAFGLGTANRLYLNYLHVTQHNTPDGGIPTIGLPGYSAPSAGTAALNHSGKVDTHNFYGTDSDYDDSTTDTATMRFEHDINDNTTIRNTTRWSRVKQDYLMTAIMGGASNITQPTSDVNSWTWSRTANTKDVSNKILTNQTNLTSTFYTGAIGHDLSTGVEFTRETQTNYGVNPVTLPAVNIYHPDSSIHPGGLTRNGANANGQTDTFAIYAFDTLQITRDFELNGGIRLDNYHTEYDSATACGGSGRGAITCPAGVAKGSPVTTVDTAKSGNLVNWKAGALYHLTENGNVYINYAVSQQPPGGNNFALAQSGSGNSANRTDFKPQKANTSEIGTKWQVLDKRLLLTAALFRTDIENEVEQNDDGTYSQYGKKRVEGYEISVAGNITPAWQMIGGYTQQKATIKNGKDVAQDGSSSLPYTPEHAFTLWSQYQATDDISVGAGARYIGSMHKGSDGAVGTPAFTEGYWVADAKLGYRVNRNLDFQLNVYNLFDTDYVASINKSGYRYHPDEPRTFLLTANMHF

SEQ ID NO: 6720 - protein, 213 aa, Escherichia coli; identical to SEQ ID NO: 2232

SEQ ID NO: 6721 - protein, 169 aa, Escherichia coli
MKKESKKMKTILPAVLFAAFATTSAWAAESVQPLEKIAPYPQAEKGMKRQVIQLTPQEDESTLKVELLIGQTLEVDCNLHRLGGKLESKTLEGWGYDYYVFDKVSSPVSTMMACPDGKKEKKFVTAYLGDAGMLRYNSKLPIVVYTPDNVDVKYRVWKAEGKIDNAVVR

SEQ ID NO: 6722 - protein, 231 aa, Escherichia coli; identical to SEQ ID NO: 5780

SEQ ID NO: 6723 - protein, 204 aa, Escherichia coli; identical to SEQ ID NO: 2957

SEQ ID NO: 6724 - protein, 111 aa, Escherichia coli; identical to SEQ ID NO: 2911

SEQ ID NO: 6725 - protein, 368 aa, Escherichia coli; identical to SEQ ID NO: 2370

SEQ ID NO: 6726 - protein, 871 aa, Escherichia coli; identical to SEQ ID NO: 3519

SEQ ID NO: 6727 - protein, 816 aa, Escherichia coli; identical to SEQ ID NO: 3562

SEQ ID NO: 6728 - protein, 459 aa, Escherichia coli
MAVKISGVLKDGTGKPVENCTIQLKARRNSATVVVNTVASENPDEAGRYSMDVEYGQYSVILLVEGFPPSHAGTITVYEDSQPGTLNDFLGAMSEDDVRPEALRRFELMVEEAARHAEEAKKNAGEAETSARNAGISASQAEESAANADTSAGDASESARQAAESAAAAKQSEEASSSSASAAAQKASESSQSAAEAELSRKTAESAAGNAARDATTATEKARESAESAQSAEQSRIAAEEAVNRIPTVVGPPGPKGEPGPAGPQGPKGDKGERGDTGPAGATGERGPAGDAGPAGPAGPAGPQGPKGETGAAGPVGATGPQGPKGDPGETQIRFRLGPGNIIETNSHGWFPDTDGALITGLTFLDPKDATRVQVFFSICRSGLVTGRGRMLRGWMKWAVIQAEQENDMNILKKLCSVCAVAESMMTVNTGSRLQYNCDWGRQTSWSQMRMALFRSRTG

SEQ ID NO: 6729 - protein, 89 aa, Escherichia coli; identical to SEQ ID NO: 2810

SEQ ID NO: 6730 - protein, 233 aa, Escherichia coli; identical to SEQ ID NO: 3548

SEQ ID NO: 6731 - protein, 391 aa, Escherichia coli
MAVKISGVLKDGTGKPVENCTIQLKARRTSSTVVVNTVASENPDEAGRYSMDVEYGQYSVILLVEGFPPSHAGTITVYEDSQPGTLNDFLGAMSEDDVRPEALRRFELMVEEAARHAEEAKKNAGEAETSARNAGISASQAEESAANADTSAGDASESARQAAESAAAAKQSEDASSSSASAAAQKASESSQSAAEAELSRKTAESAAGNAARDATTATEKARESAESAQSAEQSRIAAEEAVNRIPTVVGPPGPKGEQGPAGPQGPKGDKGERGDTGPVGATGERGPAGDAGPAGPQGPKGDRGERGETGLTGNAGPQGPKGDTGAAGPAGPQGPKGETGAAGPVGEPDLRDRRATRGRHKSVFVWGRETLLRQTAMAGSRIQMAHSSPD

SEQ ID NO: 6732 - protein, 656 aa, Escherichia coli; identical to SEQ ID NO: 4901

SEQ ID NO: 6733 - protein, 207 aa, Escherichia coli; identical to SEQ ID NO: 2211

SEQ ID NO: 6734 - protein, 359 aa, Escherichia coli; identical to SEQ ID NO: 2332

SEQ ID NO: 6735 - protein, 231 aa, Escherichia coli; identical to SEQ ID NO: 2868

SEQ ID NO: 6736 - protein, 838 aa, Escherichia coli; identical to SEQ ID NO: 2916

SEQ ID NO: 6737 - protein, 236 aa, Escherichia coli; identical to SEQ ID NO: 3970

SEQ ID NO: 6738 - protein, 551 aa, Escherichia coli; identical to SEQ ID NO: 2446

SEQ ID NO: 6739 - protein, 386 aa, Escherichia coli; identical to SEQ ID NO: 3600

SEQ ID NO: 6740 - protein, 660 aa, Escherichia coli
MSRPQFTSLRLSLLALAVSATLPTFAFATETMTVTATGNARSSFEAPMMVSVIDTSAPENQTATSATDLLRHVPGITLDGTGRTNGQDVNMRGYDHRGVLVLVDGVRQGTDTGHLNGTFLDPALIKRVEIVRGPSALLYGSGALGGVISYDTVDAKDLLQEGQSSGFRVFGTGGTGDHSLGLGASAFGRTENLDGIVAWSSRDRGDLRQSNGETAPNDESINNMLAKGTWQIDSAQSLSGLVRYYNNDAREPKNPQTVGASESSNPMVDRSTIQRDAQLSYKLAPQGNDWLNADAKIYWSEVRINAQNTGSSGEYREQITKGARLENRSTLFADSFASHLLTYGGEYYRQEQHPGGATTGFPQAKIDFSSGWLQDEITLRDLPITLLGGTRYDSYRGSSDGYKDVDADKWSSRAGMTINPTNWLMLFGSYAQAFRAPTMGEMYNDSKHFSIGRFYTNYWVPNPNLRPETNETQEYGFGLRFDDLMLSNDALEFKASYFDTKAKDYISTTVDFAAATTMSYNVPNAKIWGWDVMTKYTTDLFSLDVAYNRTRGKDTDTGEYISSINPDTVTSTLNIPIAHSGFSVGWVGTFADRSTHISSSYSKQPGYGVNDFYVSYQGQQALKGMTTTLVLGNAFDKEYWSPQGIPQDGRNGKIFVSYQW

SEQ ID NO: 6741 - protein, 367 aa, Escherichia coli; identical to SEQ ID NO: 6155

SEQ ID NO: 6742 - protein, 228 aa, Escherichia coli; identical to SEQ ID NO: 5492

SEQ ID NO: 6743 - protein, 619 aa, Escherichia coli
MGDGNTGSDIFDGVGFRGVRLYSSDNMYPDSQQGFAPTVRGIARTAAQLTIRQNGFIIYQSYVSPGAFEITDLHPTSSNGDLDVTIDERDGNQQNYTIPYSTVPILQREGRFKFDLTAGDFRSGNSQQSSPFFFQGTALGGLPQEFTAYGGTQLSANYTAFLLGLGRNLGNWGAVSLDVTHARSQLADDSRHEGDSIRFLYAKSMNTFGTNFQLMGYRYSTQGFYTLDDVAYRRMEGYEYDYDYDGEHRDEPIIVNYHNLRFSRKDRLQLNISQSLNDFGSLYISGTHQKYWNTSDSDTWYQVGYTSSWVGISYSLSFSWNESVGIPDNERIVGLNVSVPFNVLTKRRYTRENALDRAYASFNANRNSNGQNSWLAGVGGTLLEGHNLSYHVSQGDTSNNGYTGSATANWQAAYGTLGVGYNYDRDQHDVNWQLSGGVVGHENGITLSQPLGDTNVLIKAPGAGGVRIENQTGILTDWRGYAVMPYATVYRYNRIALDTNTMGNSIDVEKNISSVVPTQGALVRANFDTRIGVRALITVTQGGKPVPFGSLVRENSTGITSMVGDDGQVYLSGAPLSGELLVQWGDGANSRCIAHYVLPKQSLQQAVTVISAVCTHPGS

SEQ ID NO: 6744 - protein, 193 aa, Escherichia coli; identical to SEQ ID NO: 2250

SEQ ID NO: 6745 - protein, 715 aa, Escherichia coli; identical to SEQ ID NO: 3971

SEQ ID NO: 6746 - protein, 720 aa, Escherichia coli; identical to SEQ ID NO: 6178

SEQ ID NO: 6747 - protein, 760 aa, Escherichia coli; identical to SEQ ID NO: 2078

SEQ ID NO: 6748 - protein, 878 aa, Escherichia coli; identical to SEQ ID NO: 2855

SEQ ID NO: 6749 - protein, 102 aa, Escherichia coli; identical to SEQ ID NO: 1825

SEQ ID NO: 6750 - protein, 446 aa, Escherichia coli; identical to SEQ ID NO: 2180

SEQ ID NO: 6751 - protein, 237 aa, Escherichia coli; identical to SEQ ID NO: 2816

SEQ ID NO: 6752 - protein, 162 aa, Escherichia coli; identical to SEQ ID NO: 1969

SEQ ID NO: 6753 - protein, 200 aa, Escherichia coli; identical to SEQ ID NO: 1788

SEQ ID NO: 6754 - protein, 208 aa, Escherichia coli
MVIYGTRIIYPEKNREVLVQLMNQSKNASLIQAWIDDGNTTIAPEKIQVTFILTPPVSRVAGGSGQQLKIRKMPNNLPHNKESLFYLNVLDIPPNNPQNAGKNKIKLALQNRIKLLWRPSGIAPVDKKSLSQLNIKKKNNAISINNETANWITVTTIKAQNVKVNNESILLPPFSHNDITLKNNHASEYELTVVDDYGNNIHSKIAAR

SEQ ID NO: 6755 - protein, 274 aa, Escherichia coli; identical to SEQ ID NO: 2304

SEQ ID NO: 6756 - protein, 252 aa, Escherichia coli; identical to SEQ ID NO: 3543

SEQ ID NO: 6757 - protein, 860 aa, Escherichia coli; identical to SEQ ID NO: 6118

SEQ ID NO: 6758 - protein, 241 aa, Escherichia coli; identical to SEQ ID NO: 3582

SEQ ID NO: 6759 - protein, 361 aa, Escherichia coli; identical to SEQ ID NO: 3601

SEQ ID NO: 6760 - protein, 747 aa, Escherichia coli; identical to SEQ ID NO: 6089

SEQ ID NO: 6761 - protein, 266 aa, Escherichia coli; identical to SEQ ID NO: 1892

SEQ ID NO: 6762 - protein, 614 aa, Escherichia coli; identical to SEQ ID NO: 1883

SEQ ID NO: 6763 - protein, 351 aa, Escherichia coli; identical to SEQ ID NO: 2872

SEQ ID NO: 6764 - protein, 713 aa, Escherichia coli; identical to SEQ ID NO: 5996

SEQ ID NO: 6765 - protein, 746 aa, Escherichia coli; identical to SEQ ID NO: 2949

SEQ ID NO: 6766 - protein, 678 aa, Escherichia coli; identical to SEQ ID NO: 2902

SEQ ID NO: 6767 - protein, 883 aa, Escherichia coli; identical to SEQ ID NO: 2822

SEQ ID NO: 6768 - protein, 191 aa, Escherichia coli; identical to SEQ ID NO: 2727

SEQ ID NO: 6769 - protein, 209 aa, Escherichia coli; identical to SEQ ID NO: 3547

SEQ ID NO: 6770 - protein, 630 aa, Escherichia coli; identical to SEQ ID NO: 4909

SEQ ID NO: 6771 - protein, 118 aa, Escherichia coli [sequence omitted]

SEQ ID NO: 6772 - protein, 630 aa, Escherichia coli
MGAEFSANFKDTDIQEFINTVSKNLHKTVIINPDVQGTITVRSYDMLNEEQYYQFFLSVLDVYGFAVVDMHNGILKVVRSKDAKTSAVPVASDVSPGTGDEVVTRVVPVSNVAARDLAPLLRQLNDNAGAGSVVHYEPSNVLLMTGRAAVMKRLMEIVERVDKVGNRSVATVPLTYASATDVARLVTELTKETDKTAIPAWMTAKLVADERTNSVLVSGEPISQQRIISIIKQLDRQEDVQGNTKVIYLKYAKAKDLVEVLTGISSSIENDSKKSPSTEALRKGVTIKSHEQTNALILTGAPDVIRDLENVISQLDIRRPQVLVEAIIAEIQDADGLNLGIQWVNKHAGVAQFTSTGLPITTMVQTRQNEILDSDQSNALSMFNGIAAGFYQGNWAMLLTALSTSSKNDILATPSIVTLDNMEATFNVGQEVPVLSGSQTTSGDNIFNTVERKTVGIKLRVKPQINEGDSVLLEIEQEVSGVADTAVATTTDLGATFNTRTVTNAMLVGNGETVVVGGLLDKSIRGSESKVPLLGDIPVLGHLFRAKSEQTAKRNLMLFIRPTIIRERDGFRHASAEKYQSFNQEQVQSRGKETTALTLNEEQLRLSPDQDDTAFRKVKAAIAAFYAQEM

SEQ ID NO: 6773 - protein, 243 aa, Escherichia coli; identical to SEQ ID NO: 3561

SEQ ID NO: 6774 - protein, 430 aa, Escherichia coli; identical to SEQ ID NO: 2617

SEQ ID NO: 6775 - protein, 729 aa, Escherichia coli; identical to SEQ ID NO: 2948

SEQ ID NO: 6776 - protein, 203 aa, Escherichia coli; identical to SEQ ID NO: 2009

SEQ ID NO: 6777 - protein, 879 aa, Escherichia coli; identical to SEQ ID NO: 4479

SEQ ID NO: 6778 - protein, 213 aa, Escherichia coli; identical to SEQ ID NO: 2232

SEQ ID NO: 6779 - protein, 108 aa, Escherichia coli; identical to SEQ ID NO: 3602

SEQ ID NO: 6780 - protein, 170 aa, Escherichia coli; identical to SEQ ID NO: 5004

SEQ ID NO: 6781 - protein, 826 aa, Escherichia coli; identical to SEQ ID NO: 3563

SEQ ID NO: 6782 - protein, 161 aa, Escherichia coli; identical to SEQ ID NO: 2582

SEQ ID NO: 6783 - protein, 207 aa, Escherichia coli; identical to SEQ ID NO: 2211

SEQ ID NO: 6784 - protein, 366 aa, Escherichia coli; identical to SEQ ID NO: 3520

SEQ ID NO: 6785 - protein, 232 aa, Escherichia coli; identical to SEQ ID NO: 2087

SEQ ID NO: 6786 - protein, 368 aa, Escherichia coli; identical to SEQ ID NO: 2370

SEQ ID NO: 6787 - protein, 233 aa, Escherichia coli; identical to SEQ ID NO: 2005

SEQ ID NO: 6788 - protein, 863 aa, Escherichia coli; identical to SEQ ID NO: 3959

SEQ ID NO: 6789 - protein, 266 aa, Escherichia coli; identical to SEQ ID NO: 1892

SEQ ID NO: 6790 - protein, 567 aa, Escherichia coli; identical to SEQ ID NO: 3518

SEQ ID NO: 6791 - protein, 784 aa, Escherichia coli; identical to SEQ ID NO: 2240

SEQ ID NO: 6792 - protein, 840 aa, Escherichia coli; identical to SEQ ID NO: 3591

SEQ ID NO: 6793 - protein, 216 aa, Escherichia coli
MAMMVAGRAEAGVALGATRIIYPAGQKQVQLAVTNNDENSTYLIQSWVENADGVKDGRFIVTPPLFAMKGKKENTLRILDATNNQLPQDRESLFWMNVKAIPSMDKSKLTENTLQLAIISRIKLYYRPAKLALPPDQAAEKLRFRRSANSLTLINPTPYYLTVTELNAGARVLENALVPPMGESTVKLPSDAGSNITYRTINDYGALTPKMTGVME

SEQ ID NO: 6794 - protein, 826 aa, Escherichia coli; identical to SEQ ID NO: 3563

SEQ ID NO: 6795 - protein, 208 aa, Escherichia coli; identical to SEQ ID NO: 1949

SEQ ID NO: 6796 - protein, 367 aa, Escherichia coli; identical to SEQ ID NO: 2431

SEQ ID NO: 6797 - protein, 230 aa, Escherichia coli; identical to SEQ ID NO: 2995

SEQ ID NO: 6798 - protein, 191 aa, Escherichia coli; identical to SEQ ID NO: 2996

SEQ ID NO: 6799 - protein, 869 aa, Escherichia coli; identical to SEQ ID NO: 2903

SEQ ID NO: 6800 - protein, 170 aa, Escherichia coli; identical to SEQ ID NO: 2565

SEQ ID NO: 6801 - protein, 998 aa, Escherichia coli; identical to SEQ ID NO: 2918

SEQ ID NO: 6802 - protein, 224 aa, Escherichia coli; identical to SEQ ID NO: 3604

SEQ ID NO: 6803 - protein, 627 aa, Escherichia coli; identical to SEQ ID NO: 3529

SEQ ID NO: 6804 - protein, 203 aa, Escherichia coli; identical to SEQ ID NO: 2201

SEQ ID NO: 6805 - protein, 478 aa, Escherichia coli; identical to SEQ ID NO: 2404

SEQ ID NO: 6806 - protein, 432 aa, Escherichia coli; identical to SEQ ID NO: 2026

SEQ ID NO: 6807 - protein, 514 aa, Escherichia coli; identical to SEQ ID NO: 3590

SEQ ID NO: 6808 - protein, 700 aa, Escherichia coli; identical to SEQ ID NO: 2926

SEQ ID NO: 6809 - protein, 89 aa, Escherichia coli; identical to SEQ ID NO: 2833

SEQ ID NO: 6810 - protein, 518 aa, Escherichia coli; identical to SEQ ID NO: 2351

SEQ ID NO: 6811 - protein, 161 aa, Escherichia coli; identical to SEQ ID NO: 2582

SEQ ID NO: 6812 - protein, 252 aa, Escherichia coli; identical to SEQ ID NO: 3543

SEQ ID NO: 6813 - protein, 412 aa, Escherichia coli; identical to SEQ ID NO: 2908

SEQ ID NO: 6814 - protein, 203 aa, Escherichia coli; identical to SEQ ID NO: 2009

SEQ ID NO: 6815 - protein, 122 aa, Escherichia coli; identical to SEQ ID NO: 2915

SEQ ID NO: 6816 - protein, 715 aa, Escherichia coli; identical to SEQ ID NO: 3971

SEQ ID NO: 6817 - protein, 331 aa, Escherichia coli; identical to SEQ ID NO: 2705

SEQ ID NO: 6818 - protein, 89 aa, Escherichia coli; identical to SEQ ID NO: 2810

SEQ ID NO: 6819 - protein, 229 aa, Escherichia coli; identical to SEQ ID NO: 4047

SEQ ID NO: 6820 - protein, 230 aa, Escherichia coli; identical to SEQ ID NO: 2995

SEQ ID NO: 6821 - protein, 614 aa, Escherichia coli; identical to SEQ ID NO: 1883

SEQ ID NO: 6822 - protein, 213 aa, Escherichia coli; identical to SEQ ID NO: 2232

SEQ ID NO: 6823 - protein, 191 aa, Escherichia coli; identical to SEQ ID NO: 2727

SEQ ID NO: 6824 - protein, 430 aa, Escherichia coli; identical to SEQ ID NO: 2617

SEQ ID NO: 6825 - protein, 229 aa, Escherichia coli; identical to SEQ ID NO: 3589

SEQ ID NO: 6826 - protein, 359 aa, Escherichia coli; identical to SEQ ID NO: 2332

SEQ ID NO: 6827 - protein, 478 aa, Escherichia coli; identical to SEQ ID NO: 2409

SEQ ID NO: 6828 - protein, 366 aa, Escherichia coli; identical to SEQ ID NO: 3520

SEQ ID NO: 6829 - protein, 713 aa, Escherichia coli; identical to SEQ ID NO: 3523

SEQ ID NO: 6830 - protein, 162 aa, Escherichia coli; identical to SEQ ID NO: 1969

SEQ ID NO: 6831 - protein, 696 aa, Escherichia coli; identical to SEQ ID NO: 4038

SEQ ID NO: 6832 - protein, 233 aa, Escherichia coli; identical to SEQ ID NO: 3548

SEQ ID NO: 6833 - protein, 231 aa, Escherichia coli; identical to SEQ ID NO: 2868

SEQ ID NO: 6834 - protein, 241 aa, Escherichia coli; identical to SEQ ID NO: 3582

SEQ ID NO: 6835 - protein, 224 aa, Escherichia coli; identical to SEQ ID NO: 3604

SEQ ID NO: 6836 - protein, 518 aa, Escherichia coli; identical to SEQ ID NO: 2351

SEQ ID NO: 6837 - protein, 203 aa, Escherichia coli; identical to SEQ ID NO: 2201

SEQ ID NO: 6838 - protein, 512 aa, Escherichia coli; identical to SEQ ID NO: 2813

SEQ ID NO: 6839 - protein, 274 aa, Escherichia coli; identical to SEQ ID NO: 2304

SEQ ID NO: 6840 - protein, 700 aa, Escherichia coli; identical to SEQ ID NO: 2926

SEQ ID NO: 6841 - protein, 224 aa, Escherichia coli; identical to SEQ ID NO: 3578

SEQ ID NO: 6842 - protein, 650 aa, Escherichia coli; identical to SEQ ID NO: 3057

SEQ ID NO: 6843 - protein, 659 aa, Escherichia coli; identical to SEQ ID NO: 2942

SEQ ID NO: 6844 - protein, 828 aa, Escherichia coli; identical to SEQ ID NO: 2381

SEQ ID NO: 6845 - protein, 660 aa, Escherichia coli; identical to SEQ ID NO: 4092

SEQ ID NO: 6846 - protein, 236 aa, Escherichia coli; identical to SEQ ID NO: 3970

SEQ ID NO: 6847 - protein, 111 aa, Escherichia coli; identical to SEQ ID NO: 2911

SEQ ID NO: 6848 - protein, 362 aa, Escherichia coli; identical to SEQ ID NO: 2998

SEQ ID NO: 6849 - protein, 859 aa, Escherichia coli
MWNLLRRTRKNQKSGRDVREAGWTSLFQAVAEPFSGAWQQGLKADPEAVLSFHAVFACISLISQDIAKMRLRLMQTDAHGIRRETRRGDIARLCRRPHAQQNLIQFFELWLNAKLRHGNTVVLKIRNARGQIKELRILDWSRVEPLVADDGEVFYRITPDRNCGITEAVTVPAREVIHDRFNCFFHPLIGLPPVYAAGLAATQGHHIQENSTSFFRNGGRPSGVIEIPGSITEENAKKLKSNWDSGYTGENAGKTAILSNGAKYNPTTFSPVDAQTVEQLKMTAEIVCSVFRVPAYKIGVGQPPSSDNVEALEQQYYSQCLQTLIESIELLLDEALETGENESTEFDVTTLLRMDSERRMKTLGDAVKNTLLTPNEARKRENLPPLAGGDALYLQQQNYSLEALSRRDAREDPFASAGKTVSSQLPDGASDGNKAISETEHDAVKAMFRGDTEKMTERELSIIRALGEEFSTVLADLQRTFEGKMASQAQAFEEKLTSLSAVLQKHVTVDEVRPVLQAMVDDAVGAIPVPRDGRDYDPDVLQQAVNDAVANIPQPADGKSLTPDDVRPMLEQMVKEAVSHIPVPRDGRDYDPEVLQKAVNDAVANIPQPADGKSLTPDDVRPMLEQMVKEAVSHIPVPRDGRDYDPEVLQKAVNDAVANIPQPADGKSLTPDDVRPMLEQMVKEAVSHIPVPRDGRDYDPDVLQKAVLDAVSALPAPQDGRDATALEILPAIDDQKSFPRGTYATHQGGLWRAYEKTHGMRGWECLVDGVADIDVSMTGERLFSVVVRQSSGQRTEKTFSLPVMLYRGVFRAGETYHPGDTVTWGGSLWHCNSMTEDKPGEAHSSAWTLAAKRGRDAGG

SEQ ID NO: 6850 - protein, 193 aa, Escherichia coli; identical to SEQ ID NO: 2250

SEQ ID NO: 6851 - protein, 208 aa, Escherichia coli; identical to SEQ ID NO: 1949

SEQ ID NO: 6852 - protein, 432 aa, Escherichia coli; identical to SEQ ID NO: 2026

SEQ ID NO: 6853 - protein, 678 aa, Escherichia coli; identical to SEQ ID NO: 2902

SEQ ID NO: 6854 - protein, 729 aa, Escherichia coli; identical to SEQ ID NO: 2948

SEQ ID NO: 6855 - protein, 539 aa, Escherichia coli; identical to SEQ ID NO: 3050

SEQ ID NO: 6856 - protein, 241 aa, Escherichia coli; identical to SEQ ID NO: 2887

SEQ ID NO: 6857 - protein, 227 aa, Escherichia coli; identical to SEQ ID NO: 3570

SEQ ID NO: 6858 - protein, 746 aa, Escherichia coli; identical to SEQ ID NO: 2949

SEQ ID NO: 6859 - protein, 351 aa, Escherichia coli; identical to SEQ ID NO: 2872

SEQ ID NO: 6860 - protein, 998 aa, Escherichia coli; identical to SEQ ID NO: 3056

SEQ ID NO: 6861 - protein, 367 aa, Escherichia coli; identical to SEQ ID NO: 2431

SEQ ID NO: 6862 - protein, 232 aa, Escherichia coli; identical to SEQ ID NO: 2087

SEQ ID NO: 6863 - protein, 760 aa, Escherichia coli; identical to SEQ ID NO: 2078

SEQ ID NO: 6864 - protein, 446 aa, Escherichia coli; identical to SEQ ID NO: 2180

SEQ ID NO: 6865 - protein, 517 aa, Escherichia coli; identical to SEQ ID NO: 2462

SEQ ID NO: 6866 - protein, 243 aa, Escherichia coli; identical to SEQ ID NO: 3561

SEQ ID NO: 6867 - protein, 200 aa, Escherichia coli; identical to SEQ ID NO: 1789

SEQ ID NO: 6868 - protein, 237 aa, Escherichia coli; identical to SEQ ID NO: 2816

SEQ ID NO: 6869 - protein, 89 aa, Escherichia coli; identical to SEQ ID NO: 2812

SEQ ID NO: 6870 - protein, 567 aa, Escherichia coli; identical to SEQ ID NO: 3518

SEQ ID NO: 6871 - protein, 747 aa, Escherichia coli; identical to SEQ ID NO: 2954

SEQ ID NO: 6872 - protein, 831 aa, Escherichia coli; identical to SEQ ID NO: 3367

SEQ ID NO: 6873 - protein, 856 aa, Escherichia coli
MAGFFVRLFVACAFAAQTPLSSAELYFNPRFLADDPQAVADLSRFENGQELPPGTYRVDIYLNNGYMATRDVTFNTGDSEQGIVPCLTRAQLASMGLNTASVSGMNLLADDACVPLTSMIHDATAHLDVGQQRLNLTIPQAFMSNRARGYIPPELWDPGINAGLLNYNFSGNSVQNRIGGNNHYAYLNLQSGLNIGAWRLRDNTSWSYNSSDRSSGSKNKWQHINTWLERDIIPLRSRLTLGDGYTQGDIFDGINFRGAQLASDDNMLPDSQRGFAPVIHGIARGTAQVTIKQNGYDIYNSTVPPGPFTINDIYAAGNSGDLQVTIKEADGSTQIFTVPYSSVPLLQREGHTRYSITAGEYRSGNAQQEKPRFFQSTLLHGLPAGWTIYGGTQLADRYRAFNFGIGKNMGALGALSVDMTQANSTLPDDSQHDGQSVRFLYNKSLNESGTNIQLVGYRYSTSGYFNFADTTYSRMNGYNIETQDGVIQVKPKFTDYYNLAYNKRGKLQLTVTQQLGRTSTLYLSGSHQTYWGTSNVDEQFQAGLNTAFEDINWTLSYSLTKNAWQKGRDQMLALNVNIPFSHWLRSDSKSQWRHASASYSMSHDLNGRMTNLAGVYGTLLEDNNLSYSVQTGYAGGGDGNSGSTGYATLNYRGGYGNANIGYSHSDDIKQLYYGVSGGVLAHANGVTLGQPLNDTVVLVKAPGAKDAKVENQTGVRTDWRGYAVLPYATEYRENRVALDTNTLADNVDLDNAVANVVPTRGAIVRAEFKARVGIKLLMTLTHNNKPLPFGAMVTSESSQSSGIVADNGQVYLSGMPLAGKVQVKWGEEENAHCVANYQLPPERQQQLLTQLSAECR

SEQ ID NO: 6874 - protein, 266 aa, Escherichia coli; identical to SEQ ID NO: 1894

SEQ ID NO: 6875 - protein, 207 aa, Escherichia coli; identical to SEQ ID NO: 2211

SEQ ID NO: 6876 - protein, 843 aa, Escherichia coli
MFVMAMCSICHANSGVERTYSFDSTLLNSDAKNVDLTLFEAGAQLPGTYHVDIILNDSIVESREMFFHTAQDSEGKTYLKTCLTRDMLIRYGVKTEMYPELFHTSGKKNNVGAEEDCADLSVIPHATEMFQFASQQLRLGIPQAALRPPLRGIAPEALWDDGITAFLMNWQANVSQSEYRKYGHSVSDNFWASIEPGFNLGPWRVRNLMTWSKSSDQPGNWETVYTRAERGVNNMKSRLTLGDDYTPSDIFDSLPFRGIMLGSDESMVPYNQRAFAPVVRGVARTQARIEVRQNGYLIQSQTVAPGAFALTDLPLTSSGGDLQVTVLESDGTTQVFTVPFTTPAVALREGYMKYNVTMGQYRPSDSAVERSLLGQLTSIYGLPYGLTVFGGVQMAEHYLAGALGGGWSLGGLGAISVDSIYARSQLKGKDNEAGNTWRIRYNKSFELTDTSFTVASYQYSSAGYHSLPNVLDSYRDSRTGSFDHSENKLRRTTLNLTQPLGVLGSASLYGSRDEYRGNRAKQDSVGVTLGGSWNNISWSVNGSRNRNFGLYKGQEGKTENRISLWMSVPLERWLGNAANDIRATTQILKSSGQKTRYEVGMNGNAFDRRLYWDISEEMVPGSENSSDNSRLNLRWQGTYGELTGMYGYSSHMRQISAGISGGMIAHSEGITLGQKTGDTTALVVAPGVSGASVEGWPGVKTDYRGYTLAGYMSAYQENVITMDPSTFKENAEVVRTDTKVIPTKGAVVKANFETRVGARTLITLTRHDGSPVPFGSVVTLEEEKESHPSVGVMGNNGEVYMSGLPKKGNLKVVWGEKNQCNASYQLPEQKGTAGIFLARSVCM

SEQ ID NO: 6877 - protein, 851 aa, Escherichia coli
MPSFIGGLVVFVSAAFNAQAETWFDPAFFKDDPSMVADLSRFEKGQKITPGVYRVDIVLNQTIVDTRNVNFVEITPEKGIAACLTTESLDAMGVNTDAFPAFKQLDKQACVPLAEIIPDASVTFNVNKLRLEISVPQIAIKSNARGYVPPERWDEGINALLLGYSFSGANSIHSSADSDSGDSYFLNLNSGVNLGPWRLRNNSTWSRSSGQTAEWKNLSSYLQRAVIPLKGELTVGDDYTAGDFFDSVSFRGVQLASDDNMLPDSLKGFAPVVRGIAKSNAQITIKQNGYTIYQTYVSPGAFEISDLYSTSSSGDLLVEIKEADGSVNSYSVPFSSVPLLQRQGRIKYAVTLAKYRTNSNEQQESKFAQATLQWGGPWGTTWYGGGQYAEYYRAAMFGLGFNLGDFGAISFDVTQAKSTLADQSEHKGQSYRFLYAKTLNQLGTNFQLMGYRYSTSGFYTLSDTMYKHMDGYEFNDGDDEDTPMWSRYYNLFYTKRGKLQVNISQQLGEYGSFYLSGSQQTYWHTDQQDRLLQFGYNTQIKDLSLGVSWNYSKSRGQPDADQVFALNFSLPLNLLLPRSNDSYTRKKNYAWMTSNTSIDNEGHITQNLGLTETLLDDGNLSYSVQQGYNSEGKTANGSASMDYKGAFADARVGYNYSDNGSQQQLNYALSGSLVAHSQGITLGQSLGETNVLIAAPGAENTRVANSTGLKTDWRGYTVVPYATSYRENRIALDAASLKRNVDLENAVVNVVPTKGALVLAEFNAHAGARVLMKTSKQGIPLRFGAIATLDGIQTNSGIIDDDGSLYMSGLPAQGAITVRWGEAPDQICHISYQLTEQQINSAITRMDAICR

SEQ ID NO: 6878 - protein, 800 aa, Escherichia coli
MDLWRNDEFIGSQDIVFESTTENTGDKSGGLMPCFNQVLLERIGLNSSAFPELAQQQNNKCINLLKAVPDATINFDFAAMRLNITIPQITLLSSAHGYIPPEEWDEGIPALLLNYNFTGNRGNGNDSYFFSELSGINIGPWRLRNNGSWNYFRGNGYHSEQWNNIGTWVQRAIIPLKSELVMGDGNTGSDIFDGVGFRGVRLYSSDNMYPDSQQGFAPTVRGIARTAAQLTIRQNGFIIYQSYVSPGAFEITDLHPTSSNGDLDVTIDERDGNQQNYTIPYSTVPILQREGRFKFDLTAGDFRSGNSQQSSPFFFQGTALGGLPQEFTAYGGTQLSANYTAFLLGLGRNLGNWGAVSLDVTHARSQLADDSRHEGDSIRFLYAKSMNTFGTNFQLMGYRYSTQGFYTLDDVAYRRMEGYEYDYDYDGEHRDEPIIVNYHNLRFSRKDRLQLNISQSLNDFGSLYISGTHQKYWNTSDSDTWYQVGYTSSWVGISYSLSFSWNESVGIPDNERIVGLNVSVPFNVLTKRRYTRENALDRAYASFNANRNSNGQNSWLAGVGGTLLEGHNLSYHVSQGDTSNNGYTGSATANWQATYGTLGVGYNYDRDQHDVNWQLSGGVVGHENGITLSQPLGDTNVLIKAPGAGGVRIENQTGILTDWRGYAVMPYATVYRYNRIALDTNTMGNSIDVEKNISSVVPTQGALVRANFDTRIGVRALITVTQGGKPVPFGSLVRENSTGITSMVGDDGQVYLSGAPLSGELLVQWGDGANSRCIAHYVLPKQSLQQAVTVISAVCTHPGS

SEQ ID NO: 6879 - protein, 816 aa, Escherichia coli
CLPMVLTGSGMLCTTANAEEYYFDPIMLETTKSGMQTTDLSRFSKKYAQLPGTYQVDIWLNKKKVSQKKITFTANAEQLLQPQFTVEQLRELGIKVDEIPALAEKDDDSVINSLEQIIPGTAAEFDFNHQRLNLSIPQIALYRDAKGYVSPSRWDDGIPTLFTNYSFTGSDNRYRQGNRSQRQYLNMQNGANFGPWRLRNYSTWTRNDQASSWNTISSYLQRDIKALKSQLLLGESATSGSIFSSYTFTGVQLASDDNMLPNSQRGFAPTVRGIANSSAIVTIRQNGYVIYQSNVPAGAFEINDLYPSSNSGDLEVTIEESDGTQRRFIQPYSSLPMMQRPGHLKYSATAGRYRADANSDSKEPEFAEATAIYGLNNTFTLYGGLLGSEDYYALGIGIGGTLGALGALSMDINRADTQFDNRHSFHGYQWRTQYIKDIPETNTNIAVSYYRYTNDGYFSFDEANTRNWDYNSRQKSEIQFNISQTIFDGVSLYASGSQQDYWGNNDKNRNISVGVSGQQWGIGYSLNYQYSRYTDQNNDRALSLNLSIPLERWLPRSRVSYQMTSQKDRPTQHEMRLDGSLLDDGRLSYSLEQSLDDDNNHNSSLNASYRSPYGTFSAGYSYGNDSSQYNYGVTGGVVIHPHGVTLSQYLGNAFALIDANGASGVRIQNYPGIATDPFGYAVVPYLTTYQENRLSVDTTQLPDNVDLEQTTQFVVPNRGAMVAARFNANIGYRVLVTVSDRNGKPLPFGALASNDETGQQSIVDEGGILYLSGISSKSQSWTVRWGNQADQQCQFAFSTPDSEPTTSVLQGTAQCH

SEQ ID NO: 6880 - protein, 219 aa, Escherichia coli; identical to SEQ ID NO: 3328

SEQ ID NO: 6881 - protein, 819 aa, Escherichia coli; identical to SEQ ID NO: 3875

SEQ ID NO: 6882 - protein, 861 aa, Escherichia coli
MSGSYSSVWAEDDIQFDSRFLELKGDTKIDLKRFSSQGYVEPGKYNLQVQLNKQPLAEEYDIYWYAGEDDASKSYACLTPELVAQFGLKEDVAKNLQWSHDAKCLKSGQLEGMEIKADLSQSALVISLPQAYLEYTYPDWDPPSRWDDGISGIVADYSINAQTRHEENGGDDSNEISGNGTVGVNLGPWRMRADWQTNYQHTRSNDDDEFSGDETQKKWEWSRYYAWRALPSLKAKLALGEDYLRSDIFDGFNYVGGSVSTDDQMLPPNLRGYAPDISGVAHTTAKVTVSQMGRVIYETQVPAGPFRIQDLGDSVSGTLHIRIEEQNGQVQEYDISTASMPYLTRPGQVRYKIMMGRPQEWGHHVEGEFFSGAEASWGIANGWSLYGGALGDENYQSAALGVGRDLSTFGAVAFDVTHSHTKLDKDTAYGKGSLDGNSFRVSYSKDFDQLNSRVTFAGYRFSEENFMTMSEYLDASDSGMVRTGNDKEMYTATYNQNFRDAGVSVYLNYTRHTYWDREEQTNYNIMLSHYFNMGSIRNVSISMTGYRYEYDNQADKGMYISLSMPWGDNSTVSYNGNYGSGTDSSQVGYFSRVDDATHYQLNVGTSDKHTSVDGYYSHDGSLAQVDLSANYHEGQYTSAGLSLQGGATLTAHGGALHRTQNMGGTRLLIDADGVADVPVEGNGAAVYTNMFGKAVVSDVNNYYRNQAYIDLNRLPENAEATQSVVQATLTEGAIGYRKFAVISGQKAMAVLRLSDGSHPPFGAEVKNDNEQTVGLVDDDGNVYLAGVKPGEHMSVFWSGVAHCDINLPDPLPADLFNGLLLPCQHKGNVAPITSPAVKPAIQEQTQRVTPTEPPTSISVNQ

SEQ ID NO: 6883 - protein, 836 aa, Escherichia coli; identical to SEQ ID NO: 4550

SEQ ID NO: 6884 - protein, 883 aa, Escherichia coli; identical to SEQ ID NO: 4305

SEQ ID NO: 6885 - protein, 834 aa, Escherichia coli; identical to SEQ ID NO: 3095

SEQ ID NO: 6886 - protein, 161 aa, Escherichia coli; identical to SEQ ID NO: 2582

SEQ ID NO: 6887 - protein, 362 aa, Escherichia coli; identical to SEQ ID NO: 2434

SEQ ID NO: 6888 - protein, 231 aa, Escherichia coli; identical to SEQ ID NO: 3055

SEQ ID NO: 6889 - protein, 224 aa, Escherichia coli; identical to SEQ ID NO: 3115

SEQ ID NO: 6890 - protein, 686 aa, Escherichia coli; identical to SEQ ID NO: 3129

SEQ ID NO: 6891 - protein, 747 aa, Escherichia coli; identical to SEQ ID NO: 2072

SEQ ID NO: 6892 - protein, 130 aa, Escherichia coli; identical to SEQ ID NO: 3184

SEQ ID NO: 6893 - protein, 733 aa, Escherichia coli; identical to SEQ ID NO: 2881

SEQ ID NO: 6894 - protein, 663 aa, Escherichia coli; identical to SEQ ID NO: 3453

SEQ ID NO: 6895 - protein, 111 aa, Escherichia coli; identical to SEQ ID NO: 3370

SEQ ID NO: 6896 - protein, 432 aa, Escherichia coli; identical to SEQ ID NO: 2026

SEQ ID NO: 6897 - protein, 541 aa, Escherichia coli
MAMAAVCGTSGIASLFSQAAFAADSDIADGQTQRFDFSILQSMAHDLAQTAWRGAPRPLPDTLATMTPQAYNSIQYDAEKSLWHNVENRQLDAQFFHMGMGFRRRVRMFSVDPATHLAREIHFRPELFKYNDAGVDTKQLEGQTDLGFAGFRVFKAPELARRDVVSFLGASYFRAVDDTYQYGLSARGLAIDTYTDSKEEFPDFTAFWFDTVKPGATTFTVYALLDSASITGAYKFTIHCEKSQVIMDVENHLYARKDIKQLGIAPMTSMFSCGTNERRMCDTIHPQIHDSDRLSMWRGNGEWICRPLNNPQKLQFNAYTDNNPKGFGLLQLDRDFSHYQDIMGWYNKRPSLWVEPRNKWGKGTIGLMEIPTTGETLDNIVCFWQPEKAVKAGDEFAFQYRLYWSAQPPVHCPLARVMATRTGMGGFPEGWAPGEHYPEKWARRFAVDFVGGDLKAAAPKGIEPVITLSSGEAKQIEILYIEPIDGYRIQFDWYPTSDSTDPVDMRMYLRCQGDAISETWLYQYFPPAPDKRQYVDDRVMS

SEQ ID NO: 6898 - protein, 746 aa, Escherichia coli; identical to SEQ ID NO: 3031

SEQ ID NO: 6899 - protein, 682 aa, Escherichia coli
MKNKYIIAPGIAVMCSAVISSGYASSDKKEDTLVVTASGFTQQLRNAPASVSVITSEQLQKKPVSDLVDAVKDVEGISITGGNEKPDISIRGLSGDYTLILVDGRRQSGRESRPNGSGGFEAGFIPPVEAIERIEVIRGPMSSLYGSDAIGGVINIITKPVNNQTWDGVLGLGGIIQEHGKFGNSTTNDFYLSGPLIKDKLGLQLYGGMNYRKEDSISQGTPAKDNKNITATLQFTPTESQKFVFEYGKNNQVHTLTPGESLDAWTMRGNLKQPNSKRETHNSRSHWVAAWNAQGEILHPEIAVYQEKVIREIKSGKKDKYNHWDLNYESRKPEITNTIIDAKVTAFLPENVLTIGGQFQHAELRDDSATGKKTTETQSVSIKQKAVFIENEYAATDSLALTGGLRLDNHEIYGSYWNPRLYAVYNLTDNLTLKGGIAKAFRAPSIREVSPGFGTLTQGGASIMYGNRDLKPETSVTEEIGIIYSNDSGFSASATLFNTDFKNKLTSYDIGTKDPVTGLNTFIYDNVGEANIRGVELATQIPVYDKWHVSANYTFTDSRRKSDDESLNGKSLKGEPLERTPRHAANAKLEWDYTQDITFYSSLNYTGKQIWAAQRNGAKVPRVRNGFTSMDIGLNYQILPDTLINFAVLNVTDRKSEDIDTIDGNWQVDEGRRYWANVRVSF

SEQ ID NO: 6900 - protein, 235 aa, Escherichia coli; identical to SEQ ID NO: 4365

SEQ ID NO: 6901 - protein, 191 aa, Escherichia coli; identical to SEQ ID NO: 2727

SEQ ID NO: 6902 - protein, 518 aa, Escherichia coli; identical to SEQ ID NO: 2350

SEQ ID NO: 6903 - protein, 331 aa, Escherichia coli; identical to SEQ ID NO: 2705

SEQ ID NO: 6904 - protein, 245 aa, Escherichia coli; identical to SEQ ID NO: 3410

SEQ ID NO: 6905 - protein, 230 aa, Escherichia coli; identical to SEQ ID NO: 3348

SEQ ID NO: 6906 - protein, 614 aa, Escherichia coli; identical to SEQ ID NO: 1884

SEQ ID NO: 6907 - protein, 431 aa, Escherichia coli; identical to SEQ ID NO: 3408

SEQ ID NO: 6908 - protein, 230 aa, Escherichia coli; identical to SEQ ID NO: 6078

SEQ ID NO: 6909 - protein, 224 aa, Escherichia coli; identical to SEQ ID NO: 4306

SEQ ID NO: 6910 - protein, 554 aa, Escherichia coli; identical to SEQ ID NO: 4379

SEQ ID NO: 6911 - protein, 353 aa, Escherichia coli
MKMKKSTLALVVMGIVASASVQAAEIYNKDGNKLDVYGKVKAMHYMSDNDSKDGDQSYIRFGFKGETQINDQLTGYGRWEAEFAGNKAESDTAQQKTRLAFAGLKYKDLGSFDYGRNLGALYDVEAWTDMFPEFGGDSSAQTDNFMTKRASGLATYRNTDFFGVIDGLNLTLQYQGKNENRDVKKQNGDGFGTSLTYDFGGSDFAISGAYTNSDRTNEQNLQSRGTGKRAEAWATGLKYDANNIYLATFYSETRKMTPITGGFANKTQNFEAVAQYQFDFGLRPSLGYVLSKGKDIEGIGGEDLVNYIDVGATYYFNKNMSAFVDYKINQLDSDNKLNINNDDIVAIGMTYQF

SEQ ID NO: 6912 - protein, 169 aa, Escherichia coli; identical to SEQ ID NO: 3373

SEQ ID NO: 6913 - protein, 243 aa, Escherichia coli; identical to SEQ ID NO: 6081

SEQ ID NO: 6914 - protein, 188 aa, Escherichia coli
MLVQSEVLAEDRKGKAPFVVTPPLFRLDGLQSSRLRIVRTGGVFPEDRESLQWLCVKGIPPKSGDRWADDKNRNKADDRVSLQMNFSVNSCIKLIIRPDSVKGHPEDVAGNVVWQKTGNKLIGTNPTPFYINLSELSVGGKKVESRHYIAPFSTYEYDIPVSTAGNVYWKVITDYGGNSKQFEAKPKS

SEQ ID NO: 6915 - protein, 208 aa, Escherichia coli; identical to SEQ ID NO: 1949

SEQ ID NO: 6916 - protein, 250 aa, Escherichia coli; identical to SEQ ID NO: 3427

SEQ ID NO: 6917 - protein, 760 aa, Escherichia coli; identical to SEQ ID NO: 5980

SEQ ID NO: 6918 - protein, 700 aa, Escherichia coli; identical to SEQ ID NO: 3128

SEQ ID NO: 6919 - protein, 828 aa, Escherichia coli; identical to SEQ ID NO: 5894

SEQ ID NO: 6920 - protein, 233 aa, Escherichia coli; identical to SEQ ID NO: 3276

SEQ ID NO: 6921 - protein, 517 aa, Escherichia coli; identical to SEQ ID NO: 2462

SEQ ID NO: 6922 - protein, 244 aa, Escherichia coli; identical to SEQ ID NO: 2964

SEQ ID NO: 6923 - protein, 446 aa, Escherichia coli; identical to SEQ ID NO: 2176

SEQ ID NO: 6924 - protein, 478 aa, Escherichia coli; identical to SEQ ID NO: 2404

SEQ ID NO: 6925 - protein, 213 aa, Escherichia coli; identical to SEQ ID NO: 2232

SEQ ID NO: 6926 - protein, 784 aa, Escherichia coli; identical to SEQ ID NO: 2244

SEQ ID NO: 6927 - protein, 729 aa, Escherichia coli; identical to SEQ ID NO: 6108

SEQ ID NO: 6928 - protein, 386 aa, Escherichia coli; identical to SEQ ID NO: 4392

SEQ ID NO: 6929 - protein, 252 aa, Escherichia coli; identical to SEQ ID NO: 3400

SEQ ID NO: 6930 - protein, 274 aa, Escherichia coli; identical to SEQ ID NO: 2300

SEQ ID NO: 6931 - protein, 204 aa, Escherichia coli; identical to SEQ ID NO: 2957

SEQ ID NO: 6932 - protein, 374 aa, Escherichia coli
MKVKVLSLLVPALLVAGAANAAEVYNKDGNKLDLYGKVDGLHYFSDNKSEDGDQTYVRLGFKGETQVTDQLTGYGQWEYQIQGNTSEDNKENSWTRVAFAGLKFQDVGSFDYGRNYGVVYDVTSWTDVLPEFGGDTYGSDNFMQQRGNGYATYRNTDFFGLVDGLNFAVQYQGKNGSVSGEGMTNNGRGALRQNGDGVGGSITYDYEGFGIGAAVSSSKRTDDQNFGLNGYGERYLGNGDRAETYTGGLKYDANNIYLAAQYTQTYNATRVGSLGWANKAQNFEAVAQYQFDFGLRPSVAYLQSKGKNLGVVAGRNYDDEDILKYVDVGATYYFNKNMSAYVDYKINLLDDNQFTRDAGINTDNIVALGLVYQF

SEQ ID NO: 6933 - protein, 360 aa, Escherichia coli
MMKKYLALALIAPLLISCSTTKKGDTYNEAWVKDTNGFDILMGQFAHNIENIWGFKEVVIAGPKDYVKYTDQYQTRSHINFDDGTITIETIAGTEPAAHLRRAIIKTLLMGDDPSSVDLYSDVDDITISKEPFLYGQVVDNTGQPIRWEGRASNFADYLLKNRLQSRSNGLRIIYSVTINMVPNHLDKRAHKYLGMVRQASRKYGVDESLILAIMQTESSFNPYAVSRSDALGLMQVVQHTAGKDVFRSQGKSGTPSRSFLFDPASNIDTGTAYLAMLNNVYLGGIDNPTSRRYAVITAYNGGAGSVLRVFSNDKIQAANIINTMTPGDVYQTLTTRHPSAESRRYLYKVNTAQKSYRRR

SEQ ID NO: 6934 - protein, 236 aa, Escherichia coli
MTNTWNRLALLIFAVLSLLVAGELQAGVVVGGTRFIFPADKESIAILLTNTSQESWLINSKINRPTRWAGGEVSTVPAPLLAAPPLILLKPGTTGTLRLLRTESDILPVDRETLFELSIASVPSGKVENQSVKVAMRSVFKLFWRPEGLPGDPLEAYQQLRWTRNSQGVQLTNPTPYYINLIQVSVNGKALSNAGVVPPKSQRQTSWCQAIAPCHVAWRAINDYGGLSAKKEQNLP

SEQ ID NO: 6935 - protein, 688 aa, Escherichia coli
MLSYNLNGYHSETPGRRNDSIYAAFNGGMNLGAWRLRASGNYNWMTDSGSNYDFKNRYIQRDIASLRSQLILGESYTTGETFDSVSIRGIRLYSDSRMLPPTLASFAPIIHGVANTNAKVTITQGGYKIYETTVPPGAFVIDDLSPSGYGSDLIVTVEESDGSKRTFSQPFSSVVQMLRPGVGRWDISGGQVLKDDIQDEPNLFQASYYYGLNNYLTGYTGIQITDNNYTAGLLGLGLNTSVGAFSFDVTHSNVRIPDDKTYQGQSYRVSWNKLFEETSTSLNIAAYRYSTQNYLGLNDALTLIDEVKHPEQDLEPKSMRNYSRMKNQVTVSINQPLKFEKKDYGSFYLSGSWSDYWASGQNRSNYSIGYSNSASWGSYSVSAQRSWNEDGDTDDSVYLSFTIPIEKLLGTEQRTSGFQSIDTQMSSDFKGNNQLNVSSSGYSDNARLSYSVNTGYTMNKASKDLSYVGGYASYESPWGTLAGSVSANSDNSRQVSLSTDGGFVLHSGGLTFSNDSFSDSDTLAVVQAPGAQGARINYGNSTIDRWGYGVTSALSPYHENRIALDINDLENDVELKSTSAVAVPRQGSVVFADFETVQGQSAIMNITRSDGKNIPFAADIYDEQGNVIGNVGQGGQAFVRGIEQQGNISIKWLEESKPVSCLAHYQQSSEAEKIAQSIILNGIRCQIQ

SEQ ID NO: 6936 - protein, 241 aa, Escherichia coli; identical to SEQ ID NO: 2884

SEQ ID NO: 6937 - protein, 111 aa, Escherichia coli; identical to SEQ ID NO: 2911

SEQ ID NO: 6938 - protein, 678 aa, Escherichia coli; identical to SEQ ID NO: 2902

SEQ ID NO: 6939 - protein, 208 aa, Escherichia coli; identical to SEQ ID NO: 1949

SEQ ID NO: 6940 - protein, 659 aa, Escherichia coli; identical to SEQ ID NO: 2942

SEQ ID NO: 6941 - protein, 162 aa, Escherichia coli; identical to SEQ ID NO: 1969

SEQ ID NO: 6942 - protein, 432 aa, Escherichia coli; identical to SEQ ID NO: 2026

SEQ ID NO: 6943 - protein, 412 aa, Escherichia coli; identical to SEQ ID NO: 2908

SEQ ID NO: 6944 - protein, 243 aa, Escherichia coli; identical to SEQ ID NO: 4409

SEQ ID NO: 6945 - protein, 236 aa, Escherichia coli; identical to SEQ ID NO: 3970

SEQ ID NO: 6946 - protein, 252 aa, Escherichia coli; identical to SEQ ID NO: 5502

SEQ ID NO: 6947 - protein, 879 aa, Escherichia coli
MPDHSLFRLRVLPCCVALAMSGSYVNAWAENEIQFDSRFLELKGDTKIDLKRFSSQGYVEPGKYNLQVQLNKQPLTEEYDIYWYASENDASKTYACLTPELVAQFGLKEDVAKNLQWIHDGKCLKPGQLEGIDIKADLSQSALVISLPQAYLEYTDINWDPPSRWDDGISGLIADYSITAQTRHEENGGDDSNEISGNGTVGVNLGAWRLRADWQTDYLHSKSNDDDVINGDDTQKNWEWSRYYAWRALPSLKAKLGLGEDYLNSDIFDGFNYVGGSISTDDQMLPPNLRGYAPDISGVAHTTAKVTVSQLGRVIYETQVPAGPFRIQDLGDSVSGTLHIRIEEQNGQVQEYDINTASMPFLTRPGQVRYKLMMGRPQEWGHHVEGGFFSGGEASWGIANGWSLYGGALADEHYQSAALGVGRDLSVFGAVAFDITHSHTRLDKETAYGKGSLDGNSFRLSYSKDFDELNSRVTFAGYRFSEENFMTMSEYLDASDSEMVRTGNDKEMYTATYNQNFRDAGVSVYLNYTGHTYWDRDEQTNYNVMLSHYFNLGSIRNMSISMTGYRYEYDNQADKGVYISLSMPWGDSSTISYNGNYGSGSDSSQVGYFSRVDDATHYQLNVGTSDNHSSVDGYYSHDGSLAQVDLSANYHEGQYTSAGISLQGGATLTAQGGALHRTQNMGGTRLLIDADGVAGVPVEGNGAAVYTNMFGKAVVADVNNYYRNQAYIDLNNLPENAEATQSVVQATLTEGAIGYRKFSVISGQKAMAVLRLQDGSYPPFGAEVKNDSAQNVGLVDDDGNVYLAGVKPGEHMIVSWGGVAHCDIHLPDPLPADLFNGLLLPCQQTGAISPSMPHEIKPVIQEQTQQVMPTEAPVSVSAN

SEQ ID NO: 6948 - protein, 362 aa, Escherichia coli; identical to SEQ ID NO: 2998

SEQ ID NO: 6949 - protein, 229 aa, Escherichia coli; identical to SEQ ID NO: 5497

SEQ ID NO: 6950 - protein, 127 aa, Escherichia coli; identical to SEQ ID NO: 5431

SEQ ID NO: 6951 - protein, 203 aa, Escherichia coli; identical to SEQ ID NO: 2009

SEQ ID NO: 6952 - protein, 883 aa, Escherichia coli
MTAFRAAFKAYRMHQVLLLPRFARLTIALSLATAVFPVDAEYYFNPRFLSNDLAESVDLSAFTKGREAPPGTYRVDIYLNDEFMTSRDITFITDDNNADLIPCLSTDLLVSLGIKKSALLDNKEHSAEKHVPDNSACTPLQDRLVDASTEFDVGQQHLSLSVPQIYVGRMARGYVSPDLWEEGINAGLLNYSFNGNSINNRSNHNAGKSNYAYLNLQSGINIGSWRLRDNSTWSYNSGSSNSSDSNKWQHINTSAERDIIPLRSRLTVGDSYTDGDIFDSVNFRGLKINSTEAMLPDSQHGFAPVIHGIARGTAQVSVKQNGYDVYQTTVPPGPFTIDDINSAANGGDLQVTIKEADGSIQTLYVPYSSVPVLQRAGYTRYALAMGEYRSGNNLQSSPRFIQGSLMHGLEGNWTPYGGMQIAEDYQAFNLGIGKDLGLFGAFSFDITQANTTLADGTRHSGQSVKSVYSKSFYQTGTNIQVAGYRYSTQGFYNLSDSAYSRMSGYTVKPPTGDSNEQTQFIDYFNLFYSKRGQEQISISQQLGNYGTTFFSASRQSYWNTSRSDQQISFGLNLPFGDITTSLNYSYSNNIWQNDRDHLLAFTLNVPFSHWMRTDSQSAFRNSNASYSMSNDLKGGMTNLSGVYGTLLPDNNLNYSVQVGNTHGGNTSSGTSGYSTLNYRGAYGNTNVGYSRSGDSSQIYYGMSGGIIAHADGITFGQPLGDTMVLVKAPGADNVKIENQTGIHTDWRGYAILPFATEYRENRVALNANSLADNVELDETVVTVIPTHGAIARATFNAQIGGKVLMTLKYGNKSVPFGAIVTHGENKNGSIVAENGQVYLTGLPQSGKLQVSWGNDKNSNCIVDYKLPEVSPGTLLNQQTAICR

SEQ ID NO: 6953 - protein, 686 aa, Escherichia coli; identical to SEQ ID NO: 3015

SEQ ID NO: 6954 - protein, 715 aa, Escherichia coli
MLYNIPCRIYILSTLSLCISGIVSTATATSSETKISNEETLVVTTNRSASNLWETPATIQVIDQQTLQNSTNASIADNLQDIPGVEITDNSLAGRKQIRIRGEASSRVLILIDGQEVTYQRAGDNYGVGLLIDESALERVEVVKGPYSVLYGSQAIGGIVNFITKKGGDKLASGVVKAVYNSATAGWEESIAVQGSIGGFDYRINGSYSDQGNRDTPDGRLPNTNYRNNSQGVWLGYNSGNHRFGLSLDRYRLATQTYYEDPDGSYEAFSVKIPKLEREKVGVFYDTDVDGDYLKKIHFDAYEQTIQRQFANEVKTTQPVPSPMIQALTVHNKTDTHDKQYTQAVTLQSHFSLPANNELVTGAQYKQDRVSQRSGGMTSSKSLTGFINKETRTRSYYESEQSTVSLFAQNDWQFADHWTWTMGVRQYWLSSKLTRGDGVSYTAGIISDTSLARESASDHEMVTSTSLRYSGFDNLELRAAFAQGYVFPTLSQLFMQTSAGGSVTYGNPDLKAEHSNNFELGARYNGNQWLIDSAVYYSEAKDYIASLICDGSIVCNGNTNSSRSSYYYYDNIDRAKTWGLEISAEYNGWVFSPYISGNLIRRQYETSTLKTTNTGEPAINGRIGLKHTLVMGQANIISDVFIRAASSAKDDSNGTETNVPGWATLNFAVNTEFGNEDQYRINLALNNLTDKRYRTAHETIPAAGFNAAIGFVWNF

SEQ ID NO: 6955 - protein, 230 aa, Escherichia coli; identical to SEQ ID NO: 5433

SEQ ID NO: 6956 - protein, 869 aa, Escherichia coli
MKIPTTTDIPQRYTWCLAGICYSSLAILPSFLSYAESYFNPAFLLENGTSVADLSRFERGNHQPAGVYRVDLWRNDEFIGSQDIVFESTTENTGDKSGGLMPCFNQVLLERIGLNSSAFPELAQQQNNKCINLLKAVPDATINFDFAAMRLNITIPQIALLSSAHGYIPPEEWDEGVPALLLNYNFTGNRGNGNDSYFFSELSGINIGPWRLRNNGSWNYFRGNGYHSEQWNNIGTWVQRAIIPLKSELVMGDGNTGSDIFDGVGFRGVRLYSSDNMYPDSQQGFAPTVRGIARTAAQLTIRQNGFIIYQSYVSPGAFEITDLHPTSSNGDLDVTIDERDGNQQNYTIPYSTVPILQREGRFKFDLTAGDFRSSNSQQSSPFFFQGTALGGLPQEFTAYGGTQLSANYTAFLLGLGRNLGNWGAVSLDVTHARSQLADDSRHEGDSIRFLYAKSMNTFGTNFQLMGYRYSTQGFYTLDDVAYRRMEGYEYDYDYDGEHRDEPIIVNYHNLRFSRKDRLQLNISQSLNDFGSLYISGTHQKYWNTSDSDTWYQVGYTSSWVGISYSLSFSWNESVGIPDNERIVGLNVSVPFNVLTKRRYTRENALDRAYASFNANRNSNGQNSWLAGVGGTLLEGHNLSYHVSQGDTSNNGYTGSATANWQAAYGTLGVGYNYDRDQHDVNWQLSGGVVGHENGITLSQPLGDTNVLIKAPGAGGVRIENQTGILTDWRGYAVMPYATVYRYNRIALDTNTMGNSIDVEKNISSVVPTQGALVRANFDTRIGVRALITVTQGGKPVPFGSLVRENSTGITSMVGDDGQVYLSGAPLSGELLVQWGDGANSRCIAHYVLPKQSLQQAVTVISAVCTHPGS

SEQ ID NO: 6957 - protein, 87 aa, Escherichia coli
MIPAAVLMMFFPQLAMVAGSSGQDLMASGNTTVKATFGKDSSVVKWVVLAEVLVGAVMYMMTKNVKFLAGFAIISVFIAVGMAVVGL

SEQ ID NO: 6958 - protein, 237 aa, Escherichia coli; identical to SEQ ID NO: 2816

SEQ ID NO: 6959 - protein, 228 aa, Escherichia coli
MKSKFVALALSLFLSQSVLAGGVGLSSTRVIYDCSKKEASLTVQNKSKTEEFLIQSWVDDAAGSKKTPFIITPPLFKLDPEKNNILRIVNITPGLPQDRESVYWVNVKAIPSKSDDSENKNVLQIAVRTRIKLFYRPAGLKGDVKTAPNELRFTRNGNQLRVDNPTVFNITFNQFFANDKEIEKAGMVPAKGALNITLPAGVGSVSKIKYNTINDFGSSAEMITKNVD

SEQ ID NO: 6960 - protein, 368 aa, Escherichia coli; identical to SEQ ID NO: 2370

SEQ ID NO: 6961 - protein, 241 aa, Escherichia coli
MSNKNVNVRKSQEITFCLLAGILMFMAMMVAGRAEAGVALGATRIIYPAGQKQVQLAVTNNDENSTYLIQSWVENADGVKDGRFIVTPPLFAMKGKKENTLRILDATNNQLPQDRESLFWMNVKAIPSMDKSKLTENTLQLAIISRIKLYYRPAKLALPPDQAAEKLRFRRSANSLTLINPTLYYLTVTELNAGARVLENALVPPMGESTVKLPSDAGSNITYRTINDYGALTPKMTGVME

SEQ ID NO: 6962 - protein, 782 aa, Escherichia coli; identical to SEQ ID NO: 5513

SEQ ID NO: 6963 - protein, 266 aa, Escherichia coli; identical to SEQ ID NO: 1894

SEQ ID NO: 6964 - protein, 840 aa, Escherichia coli; identical to SEQ ID NO: 3591

SEQ ID NO: 6965 - protein, 241 aa, Escherichia coli; identical to SEQ ID NO: 5479

SEQ ID NO: 6966 - protein, 838 aa, Escherichia coli; identical to SEQ ID NO: 2916

SEQ ID NO: 6967 - protein, 207 aa, Escherichia coli; identical to SEQ ID NO: 2211

SEQ ID NO: 6968 - protein, 232 aa, Escherichia coli; identical to SEQ ID NO: 2087

SEQ ID NO: 6969 - protein, 567 aa, Escherichia coli
MKIKLRITIILISVLCIFNGLLTPGAYAAAENGYVANKENLRSFFETVSSYAGKPTIVSKLAMKKQISGNFDLTEPYALIERLSAQMGLIWYDDGKAIYIYDSSEMRNALINLRKVSTNEFNNFLKKSGLYNSRYEIKGDGNGTFYVSGPPVYVDLVVNAAKLMEQNSDGIEIGRNKVGIIHLVNTFVNDRTYELRGEKIVIPGMAKVLSTLLNNNIKQSTGVNVLSEISSRQQLKNVSRMPPFPGAEEDDDLQVEKIISTAGAPETDDIQIIAYPDTNSLLVKGTVSQVDFIEKLVATLDIPKRHIELSLWIIDIDKTDLEQLGADWSGTIKIGSSLSASFNNSGSISTLDGTQFIATIQALAQKRRAAVVARPVVLTQENIPAIFDNNRTFYTKLVGERTAELDEVTYGTMISVLPRFAARNQIELLLNIEDGNEINSDKTNVDDLPQVGRTLISTIARVPQGKSLLIGGYTRDTNTYESRKIPILGSIPFIGKLFGYEGTNANNIVRVFLIEPREIDERMMNNANEAAVDARAITQQMAKNKEINDELLQKWIKTYLNREVVGG

SEQ ID NO: 6970 - protein, 351 aa, Escherichia coli
MKKSTLALVVMGIVASASVQAAEIYNKDGNKLDVYGKVKAMHYMSDNDSKDGDQSYIRFGFKGETQINDQLTGYGRWEAEFAGNKAESDTAQQKTRLAFAGLKYKDLGSFDYGRNLGALYDVEAWTDMFPEFGGDSSAQTDNFMTKRASGLTTYRNTDFFGVIDGLNLTLQYQGKNENRDVKKQNGDGFGTSLTYDFGGSDFAISGAYTNSDRTNEQNLQSRGTGKRAEAWATGLKYDANNIYLATFYSETRKMTPITGGFANKTQNFEAVAQYQFDFGLRPSLGYVLSKGKDIEGIGDEDLVNYIDVGATYYFNKNMSAFVDYKINQLDSDNKLNINNDDIVAVGMTYQF

SEQ ID NO: 6971 - protein, 446 aa, Escherichia coli; identical to SEQ ID NO: 2180

SEQ ID NO: 6972 - protein, 729 aa, Escherichia coli; identical to SEQ ID NO: 2948

SEQ ID NO: 6973 - protein, 274 aa, Escherichia coli; identical to SEQ ID NO: 2891

SEQ ID NO: 6974 - protein, 229 aa, Escherichia coli; identical to SEQ ID NO: 5424

SEQ ID NO: 6975 - protein, 203 aa, Escherichia coli; identical to SEQ ID NO: 2201

SEQ ID NO: 6976 - protein, 713 aa, Escherichia coli; identical to SEQ ID NO: 3523

SEQ ID NO: 6977 - protein, 170 aa, Escherichia coli; identical to SEQ ID NO: 2565

SEQ ID NO: 6978 - protein, 213 aa, Escherichia coli; identical to SEQ ID NO: 2232

SEQ ID NO: 6979 - protein, 233 aa, Escherichia coli; identical to SEQ ID NO: 3548

SEQ ID NO: 6980 - protein, 191 aa, Escherichia coli; identical to SEQ ID NO: 2727

SEQ ID NO: 6981 - protein, 747 aa, Escherichia coli; identical to SEQ ID NO: 2954

SEQ ID NO: 6982 - protein, 656 aa, Escherichia coli
MRLKKHYLCTALSLAFTQQAVAAQESDSLTVWSSPVSSTTTTVLDQPTMKALDKQNVAQALSVVPGVVLQKSGSRNEEQVKVRGFDSRQVPVYFDGVPIYVPYDGNLDLARILTNNLGAVEVSKGYSSLLQGPNQMGGAINITTQKPTKPLEASLGYRQGWSRSQDNAYDMHASFAASSELGYLQVSGSQLKQDFLGLPHGVNNDIAGKHGKMINSSADDKRGIVKLGFTPRENDEYTLTYIKQDGEKDNPPYSGNCGQKSRYWQWPEYDKESFYYQGTTQLNDRFTLKSRLYRDTFENTLMMYNSLADLKNKKGSYSHYSDYSDGAGLQLAADVRENDLLSFAVNWKDDVHREKGAPHAAYDRYEDRTWSLASEYQWAAADNVDVVAGISYDWRDSVEAKKHEKDGSITHYDDNNQSAFNWQVMGKYHFVNEDTLALSYYDRKRFPTLKERYTTSKPAYNQIAIVNPQLKPERARGVDLTWNGAFTHDWGFEVSVYYNRVSDAILSHNIDADTIQNQNSGTVDYSGLDAGIKGKISNILDVGLSYALIHADAKRKDIGKITDLPTQTMTAWMTLKPWEPLSVTLSEEARSSSYSNSDGSQKAAGFAVTHIRADYTLGHGFSVNASVNNLFDTQYAYSEGFIEEGRNFWAGVEYTF

SEQ ID NO: 6983 - protein, 227 aa, Escherichia coli; identical to SEQ ID NO: 3570

SEQ ID NO: 6984 - protein, 367 aa, Escherichia coli; identical to SEQ ID NO: 2431

SEQ ID NO: 6985 - protein, 200 aa, Escherichia coli; identical to SEQ ID NO: 1788

SEQ ID NO: 6986 - protein, 700 aa, Escherichia coli; identical to SEQ ID NO: 2926

SEQ ID NO: 6987 - protein, 118 aa, Escherichia coli [sequence omitted]

SEQ ID NO: 6988 - protein, 366 aa, Escherichia coli; identical to SEQ ID NO: 5499

SEQ ID NO: 6989 - protein, 511 aa, Escherichia coli; identical to SEQ ID NO: 2457

SEQ ID NO: 6990 - protein, 331 aa, Escherichia coli; identical to SEQ ID NO: 2705

SEQ ID NO: 6991 - protein, 161 aa, Escherichia coli; identical to SEQ ID NO: 2582

SEQ ID NO: 6992 - protein, 651 aa, Escherichia coli
MNGRLSVFVFTTVFLSAIPGWGAEFSASFKDTDIQEFINTVSKNLHKTVIINPDVQGTITVRSYDMLNEEQYYQFFLSVLDVYGFAVVDMHNGILKVVRSKDAKTSAVPVASDASPGTGDEVVTRVVPVSNVAARDLAPLLRQLNDNAGAGSVVHYEPSNVLLMTGRAAVMKRLMEIVERVDKEGNRSVATVPLTYASATDVARLVTELTKESDKTAMPAWMTAKLVADERTNSVLVSGEPISQQRIISMIKQLDRKEDVQGNTKVIYLKYAKAKDLVEVLTGISSNIENDAKKSSSTEALRKGVTIKSHEQTNALILTGAPDVIRDLENVISQLDIRRPQVLVEAIIAEVQDADGLNLGIQWVNKHSGVTQFTSTGLPITTMVQTRQSDISDSDQSNTLSMFNGIAAGFYQGNWAMLLTALSTSSKNDILATPSIVTLDNMEATFNVGQEVPVLSGSQTTSGDNIFNTVERKTVGIKLRVKPQINEGDSVLLEIEQEVSGVADTAVATTTDLGATFNTRTVTNAMLVGNGETVVVGGLLDKSIRGSESKVPLLGDIPVLGHLFSSKSEHAAKRNLMLFIRPTIIRERDGFRHASAEKYLSFNQEQVQSRGKETMALTLNEEQLKLSRDRDDTTFRKVKTAIAAFYARGMQ

SEQ ID NO: 6993 - protein, 660 aa, Escherichia coli
MSRPQFTSLRLSLLALAVSATLPTFAFATETMTVTATGNARSSFEAPMMVSVIDTSAPENQTATSATDLLRHVPGITLDGTGRTNGQDVNMRGYDHRGVLVLVDGVRQGTDTGHLNGTFLDPALIKRVEIVRGPSALLYGSGALGGVISYDTVDAKDLLQEGQSSGFRVFGTGGTGDHSLGLGASAFGRTENLDGIVAWSSRDRGDLRQSNGETAPNDESINNMLAKGTWQIDSAQSLSGLVRYYNNDAREPKNPQTVEASESSNPMVDRSTIQRDAQLSYKLAPQGNDWLNADAKIYWSEVRINAQNTGSSGEYREQITKGARLENRSTLFADSFASHLLTYGGEYYRQEQHPGGATTGFPQAKIDFSSGWLQDEITLRDLPITLLGGTRYDSYRGSSDGYKDVDADKWSSRAGMTINPTNWLMLFGSYAQAFRAPTMGEMYNDSKHFSIGRFYTNYWVPNPNLRPETNETQEYGFGLRFDDLMLSNDALEFKASYFDTKAKDYISTTVDFAAATTMSYNVPNAKIWGWDVMTKYTTDLFSLDVAYNRTRGKDTDTGEYISSINPDTVTSTLNIPIAHSGFSVGWVGTFADCSTHISSSYSKQPGYGVNDFYVSYQGQQALKGMTTTLVLGNAFDKEYWSPQGIPQDGRNGKIFVSYQW

SEQ ID NO: 6994 - protein, 395 aa, Escherichia coli
MKRKVLAMLAPALLVAGAANAAEIYNKDGNKLDLYGKVAGLHYFSDDASSDGDMSYARIGFKGETQIADQFTGYGQWEFNIGANGPESDKGNTATRLAFAGFGFGQNGTFDYGRNYGVVYDVEAWTDMLPEFGGDTYAGADNFMNGRANSVATYRNNGFFGQVDGLNFALQYQGNNEKSGLFDQEGSGNGNGRKLAKENGDGYGMSTSYDFDFGLSLGAAYSNSDRTDNQVHKGTHNTRYGDRFDATAGGETAEAWTVGAKYDANNVYLAAMYAETRNMTGYGDADAIANKTQNFEVVAQYQFDFGLRPSIAYLQSKGKDLGGVNSDNFDSQGNHHYTNKDLVKYVDIGMTYYFNKNMSTYVDYKINLLDNDDDFYKENGIATDDIVAVGLVYQF

SEQ ID NO: 6995 - protein, 359 aa, Escherichia coli
MKKYLALALIAPLLISCSTTKKGGTYNEAWVKDTNGFDILMGQFAHNIENIWGFKEVVIAGPKDYVKYTDQYQTRSHINFDDGTITIETIAGTEPAAHLRRAIIKTLLMGDDPSSVDLYSDVDDITISKEPFLYGQVVDNTGQPIRWEGRASNFADYLLKNRLKSRSNGLRIIYSVTINMVPNHLDKRAHKYLGMVRQASRKYGVDESLILAIMQTESSFNPYAVSRSDALGLMQVVQHTAGKDVFRSQGKSGTPSRSFLFDPTSNIDTGTAYLAMLNNVYLGGIDNPTSRRYAVITAYNGGAGSVLRVFSNDKIQAANIINTMTPGDVYQTLTTRHPSAESRRYLYKVNTAQKSYRRR

SEQ ID NO: 6996 - protein, 816 aa, Escherichia coli; identical to SEQ ID NO: 4456

SEQ ID NO: 6997 - protein, 878 aa, Escherichia coli
MSYLNLRLYQRNTQCLHIRKHRLAGFFVRLFVACAFAVQAPLSSAELYFNPRFLADDPQAVADLSRFENGQELPPGTYRVDIYLNNGYMATRDVTFNTGDSEQGIVPCLTRAQLASMGLNTASVAGMNLLADDACVPLTTMVQDATAHLDVGQQRLNLTIPLAFMSNRARGYIPPELWDPGINAGLLNYNFSGNSVQNRIGGNSHYAYLNLQSGLNIGAWRLRDNTTWSYNSSDRSSGSKNKWQHINTWLERDIIPLRSRLTLGDGYTQGDIFDGINFRGAQLASDDNMLPDSQRGFAPVIHGIARGTAQVTIKQNGYDIYNSTVPPGPFTINDIYAAGNSGDLQVTIKEADGSTQIFTVPYSSVPLLQREGHTRYSITAGEYRSGNAQQEKPRFFQSTLLHGLPAGWTIYGGTQLADRYRAFNFGIGKNMGALGALSVDMTQANSTLPDDSQHDGQSVRFLYNKSLNESGTNIQLVGYRYSTSGYFNFADTTYSRMNGYNIETQDGVIQVKPKFTDYYNLAYNKRGKLQLTVTQQLGRSSTLYLSGSHQTYWGTSNVDEQFQAGLNTAFEDINWTLSYSLTKNAWQKGRDQMLALNVNIPFSHWLRSDSKSQWRHASASYSMSHDLNGRMTNLAGVYGTLLEDNNLSYSVQTGYAGGGDGNSGSTGYATLNYRGGYGNANIGYSHSDDIKQLYYGVSGGVLAHANGVTLGQPLNDTVVLVKAPGAKDAKVENQTGVRTDWRGYAVLPYATEYRENRVALDTNTLADNVDLDNAVANVVPTRGAIVRAEFKARVGIKLLMTLTHNNKPLPFGAMVTSESSQSSGIVADNGQVYLSGMPLAGKVQVKWGEEENAHCVANYQLPPESQQQLLTQLSAECR

SEQ ID NO: 6998 - protein, 430 aa, Escherichia coli
MKQALRVAFGFLILWASVLHAEVRIVIDSGVDSGRPIGVVPFQWAGPGAAPEDIGGIVAADLRNSGKFNPLDRAHLPQQPGSAQEVQPAAWSALGIDAVVVGQVTPNPDGSYNVAYQLVDTGGAPGTVLAQNSYKVNKQWLRYAGHTASDEVFEKLTGIKGAFRTRIAYVVQTNGGQFPYELRVSDYDGYNQFVVHRSPQPLMSPAWSPDGSKLAYVTFESGRSALVIQTLANGAVRQVASFPRHNGAPAFSPDGSKLAFALSKTGSLNLYVMDLASGQIRQVTDGRSNNTEPTWFPDSQNLAFTSDQAGRPQVYKVNINGGAPQRITWEGSQNQDADVSSDGKFMVMVSSNGGQQHIAKQDLATGGVQVLSSTFLDETPSLAPNGTMVIYSSSQGMGSVLNLVSTDGRFKARLPATDGQVKFPAWSPYL

SEQ ID NO: 6999 - protein, 233 aa, Escherichia coli
MKTCITKGIVTVSLTAILLSCSSTWAAGKGGVELAATRLVYSEGEEQISLGVRNTSPDVPYLIQSWVMTPDNKKSADFIITPPLFVLNPANENLLRIMYIGAPLAKDRETLFFTSVRAVPSTTKREEGNTLKIATQSVIKLFWRPKGLAYPLGEAPAKLRCTSSADMVTVSNPTPYFITLTDLKIGGKLVKNQMISPFDKYQFSLPKGAKNSSVTYRTINDYGAETPQLNCKS

SEQ ID NO: 7000 - protein, 518 aa, Escherichia coli; identical to SEQ ID NO: 2349

SEQ ID NO: 7001 - protein, 614 aa, Escherichia coli; identical to SEQ ID NO: 4469

SEQ ID NO: 7002 - protein, 746 aa, Escherichia coli; identical to SEQ ID NO: 2949

SEQ ID NO: 7003 - protein, 760 aa, Escherichia coli; identical to SEQ ID NO: 2078

SEQ ID NO: 7004 - protein, 857 aa, Escherichia coli
MSRKTVSRTFSSFSISVVAVAVASTFSAHAGKFNPKFLEDVQGVGQHVDLTMFEKGQEQQLPGIYRVSVYVNEQRMETRTLEFKEATEAQRKAMGESLVPCLSRTQLAEMGVRVESFPALNLVSAEACVPFDEIIPLASSHFDFSEQKLVLSFPQAAMHQVARGTVPESLWDEGIPALLLDYSFSGSNSEYDSTGSSSSYVDDNGTVHHDDGKDTLKSDSYYLNLRSGLNLGAWRLRNYSTWSHSGGKAQWDNIGTSLSRAIIPFKAQLTMGDTATAGDIFDSVQMRGAMLASDEEMLPDSQRGFAPIVRGIAKSNAEVSIEQNGYVIYRTYVQPGAFEINDLYPTANSGDLTVIIKEADGSEQRFIQPFSSVPIFQREGHLKYSFAAGEYQAGNYDSASPRFGQLDLIYGLPWGMTAYGGVLISNNYNAFALGIGKNFGYIGAISIDVTQAKSELNNDRDSQGQSYRFLYSKSFESGTDFRLAGYRYFTSGFYTFQEATDVRSDADSDYNRYHKRSEIQGNLTQQLGAYGSVYLNLTQQDYWNDAGKQNTVSAGYNGRIGKVSYSIAYSWNKSPEWDESDRLWSFNISVPLGRAWSNYRVTTDQDGRTNQQVGVSGTLLEDRNLSYSVQEGYASNGVGNSGNANVGYQGGSGNVNVGYSYGKDYRQLNYSVRGGVIVHSEGVTLSQPLGETMTLISVPGARNARVVNNGGVQVDWMGNAIVPYAMPYRENEISLRSDSLGDDVDVENAFQKVVPTRGAIVRARFDTRVGYRVLMTLLRSAGSPVPFGATATLITDKQNEVSSIVGEEGQLYISGMPEEGRVLIKWGNDASQQCVAPYKLSLELKQGGIIPVSANCQ

SEQ ID NO: 7005 - protein, 512 aa, Escherichia coli; identical to SEQ ID NO: 2813

SEQ ID NO: 7006 - protein, 231 aa, Escherichia coli; identical to SEQ ID NO: 2868

SEQ ID NO: 7007 - protein, 478 aa, Escherichia coli; identical to SEQ ID NO: 2404

SEQ ID NO: 7008 - protein, 407 aa, Escherichia coli; identical to SEQ ID NO: 5515

SEQ ID NO: 7009 - protein, 193 aa, Escherichia coli; identical to SEQ ID NO: 2250

SEQ ID NO: 7010 - protein, 816 aa, Escherichia coli; identical to SEQ ID NO: 3562

SEQ ID NO: 7011 - protein, 551 aa, Escherichia coli; identical to SEQ ID NO: 2446

SEQ ID NO: 7012 - protein, 837 aa, Escherichia coli; identical to SEQ ID NO: 4687

SEQ ID NO: 7013 - protein, 883 aa, Escherichia coli; identical to SEQ ID NO: 4713

SEQ ID NO: 7014 - protein, 237 aa, Escherichia coli; identical to SEQ ID NO: 3022

SEQ ID NO: 7015 - protein, 161 aa, Escherichia coli; identical to SEQ ID NO: 2582

SEQ ID NO: 7016 - protein, 207 aa, Escherichia coli; identical to SEQ ID NO: 2211

SEQ ID NO: 7017 - protein, 794 aa, Escherichia coli; identical to SEQ ID NO: 4850

SEQ ID NO: 7018 - protein, 866 aa, Escherichia coli; identical to SEQ ID NO: 3025

SEQ ID NO: 7019 - protein, 880 aa, Escherichia coli; identical to SEQ ID NO: 3008

SEQ ID NO: 7020 - protein, 266 aa, Escherichia coli; identical to SEQ ID NO: 1894

SEQ ID NO: 7021 - protein, 843 aa, Escherichia coli; identical to SEQ ID NO: 3042

SEQ ID NO: 7022 - protein, 866 aa, Escherichia coli; identical to SEQ ID NO: 4866

SEQ ID NO: 7023 - protein, 826 aa, Escherichia coli; identical to SEQ ID NO: 3256

SEQ ID NO: 7024 - protein, 869 aa, Escherichia coli; identical to SEQ ID NO: 3012

SEQ ID NO: 7025 - protein, 838 aa, Escherichia coli; identical to SEQ ID NO: 3041

SEQ ID NO: 7026 - protein, 230 aa, Escherichia coli; identical to SEQ ID NO: 3019

SEQ ID NO: 7027 - protein, 359 aa, Escherichia coli; identical to SEQ ID NO: 2328

SEQ ID NO: 7028 - protein, 746 aa, Escherichia coli; identical to SEQ ID NO: 3031

SEQ ID NO: 7029 - protein, 360 aa, Escherichia coli; identical to SEQ ID NO: 3032

SEQ ID NO: 7030 - protein, 760 aa, Escherichia coli; identical to SEQ ID NO: 3026

SEQ ID NO: 7031 - protein, 402 aa, Escherichia coli; identical to SEQ ID NO: 4768

SEQ ID NO: 7032 - protein, 729 aa, Escherichia coli; identical to SEQ ID NO: 3052

SEQ ID NO: 7033 - protein, 118 aa, Escherichia coli [sequence omitted]

SEQ ID NO: 7034 - protein, 243 aa, Escherichia coli; identical to SEQ ID NO: 2910

SEQ ID NO: 7035 - protein, 446 aa, Escherichia coli; identical to SEQ ID NO: 2179

SEQ ID NO: 7036 - protein, 162 aa, Escherichia coli; identical to SEQ ID NO: 1965

SEQ ID NO: 7037 - protein, 200 aa, Escherichia coli; identical to SEQ ID NO: 1784

SEQ ID NO: 7038 - protein, 732 aa, Escherichia coli; identical to SEQ ID NO: 4926

SEQ ID NO: 7039 - protein, 518 aa, Escherichia coli; identical to SEQ ID NO: 2349

SEQ ID NO: 7040 - protein, 784 aa, Escherichia coli; identical to SEQ ID NO: 2244

SEQ ID NO: 7041 - protein, 250 aa, Escherichia coli; identical to SEQ ID NO: 3048

SEQ ID NO: 7042 - protein, 203 aa, Escherichia coli; identical to SEQ ID NO: 2201

SEQ ID NO: 7043 - protein, 274 aa, Escherichia coli; identical to SEQ ID NO: 2303

SEQ ID NO: 7044 - protein, 663 aa, Escherichia coli; identical to SEQ ID NO: 1910

SEQ ID NO: 7045 - protein, 430 aa, Escherichia coli; identical to SEQ ID NO: 2617

SEQ ID NO: 7046 - protein, 89 aa, Escherichia coli; identical to SEQ ID NO: 2810

SEQ ID NO: 7047 - protein, 228 aa, Escherichia coli; identical to SEQ ID NO: 3034

SEQ ID NO: 7048 - protein, 246 aa, Escherichia coli; identical to SEQ ID NO: 3021

SEQ ID NO: 7049 - protein, 696 aa, Escherichia coli; identical to SEQ ID NO: 3314

SEQ ID NO: 7050 - protein, 331 aa, Escherichia coli; identical to SEQ ID NO: 2700

SEQ ID NO: 7051 - protein, 686 aa, Escherichia coli; identical to SEQ ID NO: 3015

SEQ ID NO: 7052 - protein, 213 aa, Escherichia coli; identical to SEQ ID NO: 2232

SEQ ID NO: 7053 - protein, 700 aa, Escherichia coli; identical to SEQ ID NO: 3047

SEQ ID NO: 7054 - protein, 614 aa, Escherichia coli; identical to SEQ ID NO: 3301

SEQ ID NO: 7055 - protein, 432 aa, Escherichia coli; identical to SEQ ID NO: 2026

SEQ ID NO: 7056 - protein, 673 aa, Escherichia coli; identical to SEQ ID NO: 3295

SEQ ID NO: 7057 - protein, 193 aa, Escherichia coli; identical to SEQ ID NO: 2246

SEQ ID NO: 7058 - protein, 191 aa, Escherichia coli; identical to SEQ ID NO: 2727

SEQ ID NO: 7059 - protein, 224 aa, Escherichia coli; identical to SEQ ID NO: 3035

SEQ ID NO: 7060 - protein, 233 aa, Escherichia coli; identical to SEQ ID NO: 3276

SEQ ID NO: 7061 - protein, 102 aa, Escherichia coli; identical to SEQ ID NO: 1824

SEQ ID NO: 7062 - protein, 351 aa, Escherichia coli; identical to SEQ ID NO: 3010

SEQ ID NO: 7063 - protein, 208 aa, Escherichia coli; identical to SEQ ID NO: 1949

SEQ ID NO: 7064 - protein, 678 aa, Escherichia coli; identical to SEQ ID NO: 3014

SEQ ID NO: 7065 - protein, 828 aa, Escherichia coli; identical to SEQ ID NO: 2380

SEQ ID NO: 7066 - protein, 362 aa, Escherichia coli; identical to SEQ ID NO: 2434

SEQ ID NO: 7067 - protein, 229 aa, Escherichia coli; identical to SEQ ID NO: 3277

SEQ ID NO: 7068 - protein, 478 aa, Escherichia coli; identical to SEQ ID NO: 2404

SEQ ID NO: 7069 - protein, 747 aa, Escherichia coli; identical to SEQ ID NO: 2072

SEQ ID NO: 7070 - protein, 236 aa, Escherichia coli; identical to SEQ ID NO: 3286

SEQ ID NO: 7071 - protein, 539 aa, Escherichia coli; identical to SEQ ID NO: 3050

SEQ ID NO: 7072 - protein, 249 aa, Escherichia coli; identical to SEQ ID NO: 3028

SEQ ID NO: 7073 - protein, 231 aa, Escherichia coli; identical to SEQ ID NO: 3055

SEQ ID NO: 7074 - protein, 774 aa, Escherichia coli; identical to SEQ ID NO: 3018

SEQ ID NO: 7075 - protein, 203 aa, Escherichia coli; identical to SEQ ID NO: 2009

SEQ ID NO: 7076 - protein, 367 aa, Escherichia coli; identical to SEQ ID NO: 3016

SEQ ID NO: 7077 - protein, 565 aa, Escherichia coli; identical to SEQ ID NO: 2669

SEQ ID NO: 7078 - protein, 209 aa, Escherichia coli; identical to SEQ ID NO: 4977

SEQ ID NO: 7079 - protein, 232 aa, Escherichia coli; identical to SEQ ID NO: 2087

SEQ ID NO: 7080 - protein, 446 aa, Escherichia coli; identical to SEQ ID NO: 2180

SEQ ID NO: 7081 - protein, 816 aa, Escherichia coli; identical to SEQ ID NO: 3939

SEQ ID NO: 7082 - protein, 879 aa, Escherichia coli; identical to SEQ ID NO: 3956

SEQ ID NO: 7083 - protein, 869 aa, Escherichia coli
MKIPTTTDIPQRYTWCLAGICYSSLAILPSFLSYAESYFNPAFLLENGTSVADLSRFERGNHQPAGVYRVDLWRNDEFIGSQDIVFESTTVNTGDKSGGLMPCFNQALLERIGLNSSAFPELAQQQNNKCINLLKAVPDATINFDFAAMRLNITIPQIALLSSAHGYIPPEEWDEGIPALLLNYNFTGNRGNGNDSYFFSELSGINIGPWRLRNNGSWNYFRGNGYHSEQWNNIGTWVQRAIIPLKSELVMGDGNTGSDIFDGVGFRGVRLYSSDNMYPDSQQGFAPTVRGIARTAAQLTIRQNGFIIYQSYVSPGAFEITDLHPTSSNGDLDVTIDERDGNQQNYTIPYSTVPILQREGRFKFDLTAGDFRSGNSQQSSPFFFQGTALGGLPQEFTAYGGTQLSANYTAFLLGLGRNLGNWGAVSLDVTHARSQLADDSRHEGDSIRFLYAKSMNTFGTNFQLMGYRYSTQGFYTLDDVAYRRMEGYEYDYDYDGEHRDEPIIVNYHNLRFSRKDRLQLNISQSLNDFGSLYISGTHQKYWNTSDSDTWYQVGYTSSWVGISYSLSFSWNESVGIPDNERIVGLNVSVPFNVLTKRRYTRENALDRAYASFNANRNSNGQNSWLAGVGGTLLEGHNLSYHVSQGDTSNNGYTGSATANWQATYGTLGVGYNYDRDQHDVNWQLSGGVVGHENGITLSQPLGDTNVLIKAPSAGGVRIENQTGILTDWRGYAVMPYATVYRYNRIALDTNTMGNSIDVEKNISSVVPTQGALVRANFDTRIGVRALITVTQGGKPVPFGSLVRENSTGITSMVGDDGQVYLSGAPLSGELLVQWGDGANSRCIAHYVLPKQSLQQAVTVISAVCTHPGS

SEQ ID NO: 7084 - protein, 816 aa, Escherichia coli; identical to SEQ ID NO: 3948

SEQ ID NO: 7085 - protein, 856 aa, Escherichia coli
MAGFFVRLFVACAFAAQSPLSSAELYFNPRFLADDPQAVADLSRFENGQELPPGTYRVDIYLNNGYMATRDVTFNTGDSEQGIVPCLTRAQLASMGLNTASVSGMNLLADDACVPLTSMIHDATAQLDVGQQRLNLTIPQAFMSNRARGYIPPELWDPGINAGLLNYNFSGNSVQNRIGGNSHYAYLNLQSGLNIGAWRLRDNTTWSYNSSDSSSGSKNKWQHINTWLERDIIPLRSRLTLGDGYTQGDIFDGINFRGAQLASDDNMLPDSQRGFAPVIHGIARGTAQVTIKQNGYDIYNSTVPPGPFTINDIYAAGNSGDLQVTIKEADGSTQIFTVPYSSVPLLQREGHTRYSITAGEYRSGNAQQEKPRFFQSTLLHGLPAGWTIYGGTQLADRYRAFNFGIGKNMGALGALSVDMTQANSTLPDDSQHDGQSVRFLYNKSLNESGTNIQLVGYRYSTSGYFNFADTTYSRMNGYNIETQDGVIQVKPKFTDYYNLAYNKRGKLQLTVTQQLGRTSTLYLSGSHQTYWGTSNVDEQFQAGLNTAFEDINWTLSYSLTKNAWQKGRDQMLALNVNIPFSHWLRSDSKSQWRHASASYSMSHDLNGRMTNLAGVYGTLLEDNNLSYSVQTGYAGGGDGNSGSTGYATLNYRGGYGNANIGYSHSDDIKQLYYGVSGGVLAHANGVTLGQPLNDTVVLVKAPGAKDTKVENQTGVRTDWRGYAVLPYATEYRENRVALDTNTLADNVDLDNAVANVVPTRGAIVRAEFKARVGIKLLMTLTHNNKPLPFGAMVTSESSQSSGIVADNGQVYLSGMPLAGKVQVKWGEEENAHCVANYQLPPESQQQLLTQLSAECR

SEQ ID NO: 7086 - protein, 866 aa, Escherichia coli; identical to SEQ ID NO: 3945

SEQ ID NO: 7087 - protein, 266 aa, Escherichia coli; identical to SEQ ID NO: 3338

SEQ ID NO: 7088 - protein, 366 aa, Escherichia coli
MKLKIVAVVVTGLLAANVAHAAEVYNKDGNKLDLYGKVTALRYFTDDKRDDGDKTYVRLGFKGETQINDQMIGFGHWEYDFKGYNDEANGSRDNKTRLAYAGLKISEFGSLDYGRNYGVGYDIGSWTDMLPEFGGDTWSQKDVFMTYRTTGVATYRNYDFFGLIEGLNFAAQYQGKNERTDNSHLYGADYTRANGDGFGISSTYVYDGFGIGAVYTKSDRTNAQERAAANPLNASGKNAELWATGIKYDANNIYFAANYAETLNMTTYGDGYISNKAQSFEVVAQYQFDFGLHPSLAYLKSKGIDLGRYGDQDMIEYIDVGATYFFNKNMSTYVDYKINLIDESDFTRAVDIRTDNIVATGITYQF

SEQ ID NO: 7089 - protein, 629 aa, Escherichia coli; identical to SEQ ID NO: 3597

SEQ ID NO: 7090 - protein, 747 aa, Escherichia coli; identical to SEQ ID NO: 2954

SEQ ID NO: 7091 - protein, 170 aa, Escherichia coli; identical to SEQ ID NO: 2565

SEQ ID NO: 7092 - protein, 395 aa, Escherichia coli; identical to SEQ ID NO: 5516

SEQ ID NO: 7093 - protein, 213 aa, Escherichia coli; identical to SEQ ID NO: 3368

SEQ ID NO: 7094 - protein, 222 aa, Escherichia coli
MLIIFYLIISASVHAAGGIALGATRIIYPADAKQTAVWIRNSHTNERFLVNSWIENSSGVKEKSFIITPPLFVSEPKSENTLRIIYTGPPLAADRESLFWMNVKTIPSVDKNALNGRNVLQLAILSLMKLFLRPIQLQELPAEAPDTLKFSRSGNYINVHNPSPFYVTLVNLQVGSQKLGNAMAAPRVNSQIPLPSGVQGKLKFQTVNDYGSVTPVREVNLN

SEQ ID NO: 7095 - protein, 869 aa, Escherichia coli
MKIPTTTDIPQRYTWCLAGICYSSLAILPSFLSYAESYFNPAFLLENGTSVADLSRFERGNHQPAGVYRVDLWRNDEFIGSQDIVFESTTENTGDKSGGLMPCFNQVLLERIGLNSSAFPELAQQQNNKCINLLKAVPDATINFDFAAMRLNITIPQIALLSSAHGYIPPEEWDEGVPALLLNYNFTGNRGNGNDSYFFSELSGINIGPWRLRNNGSWNYFRGNGYHSEQWNNIGTWVQRAIIPLKSELVMGDGNTGSDIFDGVGFRGVRLYSSDNMYPDSQQGFAPTVRGIARTAAQLTIRQNGVIIYQSYVSPGAFEITDLHPTSSNGDLDVTIDERDGNQQNYTIPYSTVPILQREGRFKFDLTAGDFRSSNSQQSSPFFFQGTALGGLPQEFTAYGGTQLSANYTAFLLGLGRNLGNWGAVSLDVTHARSQLADDSRHEGDSIRFLYAKSMNTFGTNFQLMGYRYSTQGFYTLDDVAYRRMEGYEYDYDYDGEHRDEPIIVNYHNLRFSRKDRLQLNISQSLNDFGSLYISGTHQKYWNTSDSDTWYQVGYTSSWVGISYSLSFSWNESVGIPDNERIVGLNVSVPFNVLTKRRYTRENALDRAYASFNANRNSNGQNSWLAGVGGTLLEGHNLSYHVSQGDTSNNGYTGSATANWQAAYGTLGVGYNYDRDQHDVNWQLSGGVVGHENGITLSQPLGDTNVLIKAPGAGGVRIENQTGILTDWRGYAVMPYATVYRYNRIALDTNTMGNSIDVEKNISSVVPTQGALVCANFDTRIGVRALITVTQGGKPVPFGSLVRENSTGITSMVGDDGQVYLSGAPLSGELLVQWGDGANSRCIAHYVLPKQSLQQAVTVISAVCTHPGS

SEQ ID NO: 7096 - protein, 162 aa, Escherichia coli; identical to SEQ ID NO: 1969

SEQ ID NO: 7097 - protein, 478 aa, Escherichia coli; identical to SEQ ID NO: 2404

SEQ ID NO: 7098 - protein, 274 aa, Escherichia coli; identical to SEQ ID NO: 2891

SEQ ID NO: 7099 - protein, 199 aa, Escherichia coli
MIYDASRKEAALPVANKGAETPYLLQSWVDNIDGTSRAPFIITPPLIRLEAGDDSSLRIIKTADNLPENKESLFYINVRAIPAKKKSDDVNANELTLVFKTRIKMFYRPAHLKGRVSDAWKSLEFKRSDHSLNIYNPTEYYVVFAGLAVDKADLTSKIEYIAPGEHKQLPLPASGGKNVKWAAINDYGGSSGTETRPLQ

SEQ ID NO: 7100 - protein, 746 aa, Escherichia coli; identical to SEQ ID NO: 2949

SEQ ID NO: 7101 - protein, 863 aa, Escherichia coli
MHIRKHRLAGFFVRLFVACAFAVQAPLSSAELYFNPRFLADDPQAVADLSRFENGQELPPGTYRVDIYLNNGYMATRDVTFNTGDSEQGIVPCLTRAQLASMGLNTASVAGMNLLADDACVPLTTMVQDATAHLDVGQQRLNLTIPQAFMSNRARGYIPPELWDPGINAGLLNYNFSGNSVQNRIGGNSHYAYLNLQSGLNIGAWRLRDNTTWSYNSSDRSSGSKNKWQHINTWLERDIIPLRSRLTLGDGYTQGDIFDGINFRGAQLASDDNMLPDSQRGFAPVIHGIARGTAQVTIKQNGYDIYNSTVPPGPFTINDIYAAGNSGDLQVTIKEADGSTQIFTVPYSSVPLLQREGHTRYSITAGEYRSGNAQQEKPRFFQSTLLHGLPAGWTIYGGTQLADRYRAFNFGIGKNMGALGALSVDMTQANSTLPDDSQHDGQSVRFLYNKSLNESGTNIQLVGYRYSTSGYFNFADTTYSRMNGYNIETQDGVIQVKPKFTDYYNLAYNKRGKLQLTVTQQLGRSSTLYLSGSHQTYWGTSNVDEQFQAGLNTAFEDINWTLSYSLTKNAWQKGRDQMLALNVNIPFSHWLRSDSKSQWRHASASYSMSHDLNGRMTNLAGVYGTLLEDNNLSYSVQTGYAGGGDGNSGSTGYATLNYRGGYGNANIGYSHSDDIKQLYYGVSGGVLAHANGVTLGQPLNDTVVLVKAPGAKDAKVENQTGVRTDWRGYAVLPYATEYRENRVALDTNTLADNVDLDNAVANVVPTRGAIVRAEFKARVGIKLLMTLTHNNKPLPFGAMVTSESSQSSGIVADNGQVYLSGMPLAGKVQVKWGEEENAHCVANYQLPPESQQQLLTQLSAECR

SEQ ID NO: 7102 - protein, 193 aa, Escherichia coli; identical to SEQ ID NO: 2250

SEQ ID NO: 7103 - protein, 860 aa, Escherichia coli
MSGSYVNAWAENEIQFDSRFLELKGDTKIDLKRFSSQGYVEPGKYNLQVQLNKQPLTEEYDIYWYASENDASKTYACLTPELVAQFGLKEDVAKNLQWIHDGKCLKPGQLEGIDIKADLSQSALVISLPQAYLEYTDINWDPPSRWDDGISGLIADYSITAQTRHEENGGDDSNEISGNGTVGVNLGAWRLRADWQTDYLHSKSNDDDVINGDDTQKNWEWSRYYAWRALPSLKAKLGLGEDYLNSDIFDGFNYVGGSISTDDQMLPPNLRGYAPDISGVAHTTAKVTVSQLGRVIYETQVPAGPFRIQDLGDSVSGTLHIRIEEQNGQVQEYDINTASMPFLTRPGQVRYKLMMGRPQEWGHHVEGGFFSGGEASWGIANGWSLYGGALADEHYQSAALGVGRDLSVFGAVAFDITHSHTRLDKETAYGKGSLDGNSFRLSYSKDFDELNSRVTFAGYRFSEENFMTMSEYLDASDSEMVRTGNDKEMYTATYNQNFRDAGVSVYLNYTGHTYWDRDEQTNYNVMLSHYFNLGSIRNMSISMTGYRYEYDNQADKGVYISLSMPWGDSSTISYNGNYGSGSDSSQVGYFSRVDDATHYQLNVGTSDNHSSVDGYYSHDGSLAQVDLSANYHEGQYTSAGISLQGGATLTAQGGALHRTQNMGGTRLLIDADGVAGVPVEGNGAAVYTNMFGKAVVADVNNYYRNQAYIDLNNLPENAEATQSVVQATLTEGAIGYRKFSVISGQKAMAVLRLQDGSYPPFGAEVKNDSAQNVGLVDDDGNVYLAGVKPGEHMIVSWGGVAHCDIHLPDPLPADLFNGLLLPCQQTGAISPSMPHEIKPVIQEQTQQVMPTEAPVSVSAN

SEQ ID NO: 7104 - protein, 243 aa, Escherichia coli; identical to SEQ ID NO: 4409

SEQ ID NO: 7105 - protein, 361 aa, Escherichia coli; identical to SEQ ID NO: 3601

SEQ ID NO: 7106 - protein, 224 aa, Escherichia coli; identical to SEQ ID NO: 3578

SEQ ID NO: 7107 - protein, 203 aa, Escherichia coli; identical to SEQ ID NO: 2009

SEQ ID NO: 7108 - protein, 567 aa, Escherichia coli
MKIKLRITIILISVLCIFNGLLTPGAYAAAANGYVANKENLRSFFETVSSYAGKPTIVSKLAMKKQISGNFDLTEPYALIERLSAQMGLIWYDDGKAIYIYDSSEMRNALINLRKVSTNEFNNFLKKSGLYNSRYEIKGDGNGTFYVSGPPVYVDLVVNAAKLMEQNSDGIEIGRNKVGIIHLVNTFVNDRTYELRGEKIVIPGMAKVLSTLLNNNIKQSTGVNVLSEISSRQQLKNVSRMPPFPGAEEDDDLQVEKIISTAGAPETDDIQIIAYPDTNSLLVKGTVSQVDFIEKLVATLDIPKRHIELSLWIIDIDKTDLEQLGADWSGTIKIGSSLSASFNNSGSISTLDGTQFIATIQALAQKRRAAVVARPVVLTQENIPAIFDNNRTFYTKLVGERTAELDEVTYGTMISVLPRFAARNQIELLLNIEDGNEINSDKTNIDDLPQVGRTLISTIARVPQGKSLLIGGYTRDTNTYESRKIPILGSIPFIGKLFGYEGTNANNIVRVFLIEPREIDERMMNNANEAAVDARAITQQMAKNKEINDELLQKWIKTYLNREVVGG

SEQ ID NO: 7109 - protein, 840 aa, Escherichia coli; identical to SEQ ID NO: 3591

SEQ ID NO: 7110 - protein, 233 aa, Escherichia coli; identical to SEQ ID NO: 3548

SEQ ID NO: 7111 - protein, 178 aa, Escherichia coli
MFSAGSAVAADYKIDKEGQHAFVNFRIQHLGYSWLYGTFKDFDGTFTFDEKNPAADKVNVTINTTSVDTNHAERDKHLRSADFLNTAKYPQATFTSTSVKKDGDELDITGDLTLNGVTKPVTLEAKLIGQGDDPWGGKRAGFEAEGKIKLKDFNIKTDLGPASQEVDLIISVEGVQQK

SEQ ID NO: 7112 - protein, 729 aa, Escherichia coli; identical to SEQ ID NO: 2948

SEQ ID NO: 7113 - protein, 213 aa, Escherichia coli; identical to SEQ ID NO: 2232

SEQ ID NO: 7114 - protein, 331 aa, Escherichia coli; identical to SEQ ID NO: 2705

SEQ ID NO: 7115 - protein, 760 aa, Escherichia coli
MENNRNFPARQFHSLTFFAGLCIGITPVAQALAAEGQTNADDTLVVEASTPSLYAPQQSADPKFSRPVADTTRTMTVISEQVIKDQGATNLTDALKNVPGVGAFFAGENGNSTTGDAIYMRGADTSNSIYIDGIRDIGSVSRDTFNTEQVEVIKGPSGTDYGRSAPTGSINMISKQPRNDSGIDASASIGSAWFRRGTLDVNQVIGDTTAVRLNVMGEKTHDAGRDKVKNERYGVAPSIAFGLGTANRLYLNYLHVTQHNTPDGGIPTIGLPGYSAPSAGTATLNHSGKVDTHNFYGTDSDYDDSTTDTATMRFEHDINDNTTIRNTTRWSRVKQDYLMTAIMGGASNITQPTSDVNSWTWSRTANTKDVSNKILTNQTNLTSTFYTASIGHDVSTGVEFTRETQTNYGVNPVTLPAVNIYHPDSSIHPGGLTRNGANANGQTDTFAIYAFDTLQITRDFELNGGIRLDNYHTEYDSATACGGSGRGAITCPAGVAKGSPVTTVDTAKSGNLVNWKAGALYHLTENGNVYINYAVSQQPPGGNNFALAQSGSGNSANRTDFKPQKANTSEIGTKWQVLDKRLLLTAALFRTDIENEVEQNDEGTYSQYGKKRVEGYEISVAGNITPAWQVIGGYTQQKATIKNGKDVAQDGSSSLPYTPEHAFTLWSQYQATDDISVGAGARYIGSMHKGSDGAVGTPAFTEGYWVADAKLGYRVNRNLDFQLNVYNLFDTDYVASINKSGYRYHPGEPRTFLLTANMHF

SEQ ID NO: 7116 - protein, 656 aa, Escherichia coli; identical to SEQ ID NO: 6440

SEQ ID NO: 7117 - protein, 432 aa, Escherichia coli
MSKIVKIIGREIIDSRGNPTVEAEVHLEGGFVGMAAAPSGASTGSREALELRDGDKSRFLGKGVTKAVAAVNGPIAQALIGKDAKDQAGIDKIMIDLDGTENKSKFGANAILAVSLANAKAAAAAKGMPLYEHIAELNGTPGKYSMPVPMMNIINGGEHADNNVDIQEFMIQPVGAKTVKEAIRMGSEVFHHLAKVLKAKGMNTAVGDEGGYAPNLGSNAEALAVIAEAVKAAGYELGKDITLAMDCAASEFYKDGKYVLAGEGNKAFTSEEFTHFLEELTKQYPIVSIEDGLDESDWDGFAYQTKALGDKIQLVGDDLFVTNTKILKEGIEKGIANSILIKFNQIGSLTETLAAIKMAKDAGYTAVISHRSGETEDATIADLAVGTAAGQIKTGSMSRSDRVAKYNQLIRIEEALGEKAPYNGRKEIKGQA

SEQ ID NO: 7118 - protein, 207 aa, Escherichia coli; identical to SEQ ID NO: 2211

SEQ ID NO: 7119 - protein, 407 aa, Escherichia coli; identical to SEQ ID NO: 5515

SEQ ID NO: 7120 - protein, 94 aa, Escherichia coli
MLRLARAVIPAAVLMMFFPQLAMVAGSSGQDLMASGNTTVKATFGKDSSVVKWVVLAEVLVGAVMYMMTKNVKFLAGFAIISVFIAVGMAVVGL

SEQ ID NO: 7121 - protein, 125 aa, Escherichia coli; identical to SEQ ID NO: 6182

SEQ ID NO: 7122 - protein, 689 aa, Escherichia coli; identical to SEQ ID NO: 5715

SEQ ID NO: 7123 - protein, 686 aa, Escherichia coli; identical to SEQ ID NO: 3015

SEQ ID NO: 7124 - protein, 228 aa, Escherichia coli
MSTLLASAPAFADIIISGTRIIYNADKKDVNVRLENKGNRPLLIQNWLDTGDDNADPSQIKVPFTATPPVSRVEPKRGQTVKVMYTGATALPKDRESVYWFNVLEVPPKPKDAEADKNLLQLAFRTRIKLFYRLSGLQGEPAEAPAKITWKLNNAQLQANNPTPYYVSFNEVKLESGGKTYNVNSSMVTPFSQASFGVTGLPGSVSSGKVVFKAINDFGGNIDGSATF

SEQ ID NO: 7125 - protein, 700 aa, Escherichia coli; identical to SEQ ID NO: 2926

SEQ ID NO: 7126 - protein, 551 aa, Escherichia coli; identical to SEQ ID NO: 2446

SEQ ID NO: 7127 - protein, 630 aa, Escherichia coli
MQRAVIPLKGELTVGDDYTAGDFFDSVSFRGVQLASDDNMLPDSLKGFAPVVRGIAKSNAQITIKQNGYTIYQTYVSPGAFEISDIYSTSSSGDLLVEIKEADGSVNSYSVPFSSVPLLQRQGRIKYAVTLAKYRTNSNEQQESKFAQATLQWGGPWGTTWYGGGQYAEYYRAAMFGLGFNLGDFGAISFDVTQAKSTLADQSEHKGQSYRFLYAKTLNQLGTNFQLMGYRYSTSGFYTLSDTMYKHMDGYEFNDGDDEDTPMWSRYYNLFYTKRGKLQVNISQQLSEYGSFYLSGSQQTYWHTDQQDRLLQFGYNTQIKDLSLGISWNYSKSRGQPDADQVFALNFSLPLNLLLSRSNDSYTSKKNYAWMTSNTSIDNEGHTTQNLGLTETLLDDGNLSYSVQQGYNSEGKTANGSASMDYKGAFADARVGYNYSDNGSQQQLNYALSGSLVAHSQGITLGQSLGETNVLIAAPGAENTRVANSTGLKTDWRGYTVVPYATSYRENRIALDAASLKRNVDLENAVVNVVPTKGALVLAEFNAHAGARVLMKTSKQGISLRFGAIATLDGVQTNSGIIDDDGSLYMAGLPAKGTITVRWGEAPDQICHISYELTEQQINSAITRMDAICR

SEQ ID NO: 7128 - protein, 367 aa, Escherichia coli; identical to SEQ ID NO: 2431

SEQ ID NO: 7129 - protein, 512 aa, Escherichia coli; identical to SEQ ID NO: 2813

SEQ ID NO: 7130 - protein, 368 aa, Escherichia coli
MNKTITALTIIMASFAANASVLPETPVPFKSGTGAIDNDTVYIGLGSAGTAWYKLDTQAKDKKWTALAAFPGGPRDQATSAFIDGNLYVFGGIGKNSEGLTQVFNDVHKYNPKTNSWVKLMSHAPMGMAGHVTFVHNGKAYVTGGVNQNIFNGYFEDLNEAGKDSTAIDKINAHYFDKKAEDYFFNKFLLSFDPSTQQWSYAGESPWYGTAGAAVVSKGDKTWLINGEAKPGLRTDAVFELDFTGNNLKWNKLAPVASPDGVAGGFAGMSNDSLIFAGGAGFKGSRENYQNGKNYAHEGLKKSYSADIHLWHNGKWDKSGELSRGRAYGVSLPWNNSLLIIGGETAGGKAVTDSVLISVKDNKVTVQN

SEQ ID NO: 7131 - protein, 871 aa, Escherichia coli
MHQVLLLPRFARLTIALSLATAVFPVDAEYYFNPRFLSNDLAESVDLSAFTKGREAPPGTYRVDIYLNDEFMTSRDITFITDDNNADLIPCLSTDLLVSLGIKKSALLDNKEHSAEKHVPDNSACTPLQDRLVDASTEFDVGQQHLSLSVPQIYVGRMARGYVSPDLWEEGINAGLLNYSFNGNSINNRSNHNAGKSNYAYLNLQSGINIGSWRLRDNSTWSYNSGSSNSSDSNKWQHINTSAERDIIPLRSRLTVGDSYTDGDIFDSVNFRGLKINSTEAMLPDSQHGFAPVIHGIARGTAQVSVKQNGYDVYQTTVPPGPFTIDDINSAANGGDLQVTIKEADGSIQTLYVPYSSVPVLQRAGYTRYALAMGEYRSGNNLQSSPRFIQGSLMHGLEGNWTPYGGMQIAEDYQAFNLGIGKDLGLFGAFSFDITQANTTLADGTRHSGQSVKSVYSKSFYQTGTNIQVAGYRYSTQGFYNLSDSAYSRMSGYTVKPPTGDSNEQTQFIDYFNLFYSKRGQEQISISQQLGNYGTTFFSASRQSYWNTSRSDQQISFGLNVPFGDITTSLNYSYSNNIWQNDRDHLLAFTLNVPFSHWMRTDSQSAFRNSNASYSMSNDLKGGMTNLSGVYGTLLPDNNLNYSVQVGNTHGGNTSSGTSGYSTLNYRGAYGNTNVGYSRSGDSSQIYYGMSGGIIAHADGITFGQPLGDTMVLVKAPGADNVKIENQTGIHTDWRGYAILPFATEYRENRVALNANSLADNVELDETVVTVIPTHGAIARATFNAQIGGKVLMTLKYGNKSVPFGAIVTHGENKNGSIVAENGQVYLTGLPQSGKLQVSWGNDKNSNCIVDYKLPEVSPGTLLNQQTAICR

SEQ ID NO: 7132 - protein, 111 aa, Escherichia coli; identical to SEQ ID NO: 2911

SEQ ID NO: 7133 - protein, 386 aa, Escherichia coli; identical to SEQ ID NO: 3600

SEQ ID NO: 7134 - protein, 241 aa, Escherichia coli; identical to SEQ ID NO: 2887

SEQ ID NO: 7135 - protein, 637 aa, Escherichia coli
MLAVDDDGETMVVTASSVEQNLKDAPASISVITQEDLQRKPVQNLKDVLKEVPGVQLTNEGDNRKGVSIRGLDSSYTLILVDGKRVNSRNAVFRHNDFDLNWIPVDSIERIEVVRGPMSSLYGSDALGGVVNIITKKIGQKWSGTVTVDTTIQEHRDRGDTYNGQFFTSGPLIDGVLGMKAYGSLAKREKDDPQNSTTTDTGETPRIEGFSSRDGNVEFAWTPNQNHDFTAGYGFDRQDRDSDSLDKNRLERQNYSVSHNGRWDYGTSELKYYGEKVENKNPGNSSPITSESNTVDGKYTLPLTAINQFLTVGGEWRHDKLSDAVNLTGGTSSKTSASQYALFVEDEWRIFEPLALTTGVRMDDHETYGEHWSPRAYLVYNATDTVTVKGGWATAFKAPSLLQLSPDWTSNSCRGACKIVGSPDLKPETSESWELGLYYMGEEGWLEGVESSVTVFRNDVKDRISISRTSDVNAAPGYQNFVGFTANGVPVFSYYNINKARIQGVETELKIPFNDEWKLSLNYTYNDGRDVSNGENKPLSDLPFHTANGTLDWKPLTLEDWSFYVSGHYTGQKRADSATAKTPGGYTIWNTGAAWQVTKDVKLRAGVLNLGDKDLSRDDYSYNEDGRRYFMAVDYRF

SEQ ID NO: 7136 - protein, 359 aa, Escherichia coli; identical to SEQ ID NO: 2332

SEQ ID NO: 7137 - protein, 190 aa, Escherichia coli
MLTACSVTTPKGPGKSPDSPQWRQHQQDVRNLNQYQTRGAFAYISDQQKVYARFFWQQTGQDRYRLLLTNPLGSTELELNAQPGNVQLVDNKGQRYTADDAEEMIGKLTGMPIPLNSLRQWILGLPGDATDYKLDDQYRLSEITYSQNGKNWKVVYGGYDTKTQPAMPANMELTDGGQRIKLKMDNWIVK

SEQ ID NO: 7138 - protein, 351 aa, Escherichia coli; identical to SEQ ID NO: 2872

SEQ ID NO: 7139 - protein, 203 aa, Escherichia coli; identical to SEQ ID NO: 2201

SEQ ID NO: 7140 - protein, 208 aa, Escherichia coli; identical to SEQ ID NO: 1949

SEQ ID NO: 7141 - protein, 232 aa, Escherichia coli; identical to SEQ ID NO: 2087

SEQ ID NO: 7142 - protein, 239 aa, Escherichia coli; identical to SEQ ID NO: 4453

SEQ ID NO: 7143 - protein, 826 aa, Escherichia coli
MLRMTPLASAIVALLLGIEAYAAEETFDTHFMIGGMKDQQVANIRLDDNQPLPGQYDIDIYVNKQWRGKYEIIVKDNPQETCLSREIIKRLGINTDNFASGKQCLTFEQLVQGGSYTWDIGVFRLDFSVPQAWVEELESGYVPPENWERGINAFYTSYYVGQYYSDYKASGNSKSTYVRFNSGLNLLGWQLHSDASFSKTNSNPGVWKSNTLYLERGFAQLLGTLRVGDMYTSSDIFDSVRFSGVRLFRDMQMLPNSKQNFTPRVQGIAQSNALVTIEQNGFVVYQKEVPPGPFAITDLQLAGGGADLDVSVKEADGSVTTYLVPYAAVPNMLQPGVSKYDFAAGRSHIEGASKQSDFVQAGYQYGFNNLLTLYGGSMVANNYYAFTLGTSWNTRIGAISVDATKSHSKQDNGDVFDGQSYQIAYNKFVSQTSTRFGLAAWRYSSRDYRTFNDHVWANNKDNYRRDENDIYDIADYYQNDFGRKNSFSANMSQSLPEGWGSVSLSTLWRDYWGRSGSSKDYQLSYSNNLRRISYTLAASQAYDENHHEEKRFNIFISIPFDWGDDVTTPRRQIYMSNSTTFDDQGFASNNTGLSGTVGNRDQFNYGVNLSHQHQGNETTAGANLTWNAPVATVNGSYSQSSTYRQAGASVSGGIVAWSGGVNLANRLSETFAVMNAPGIKDAYVNGQKYRTTNRNGVVVYDGMTPYRENHLMLDVSQSDSEAELRGNRKIAAPYRGAVVLVNFDTDQRKPWFIKALRTDGQPLTFGYEVNDIHGHNIGVVGQGSQLFIRTNEVPPSVNVAIDKQQGLSCTITFGKEIDESRNYICQ

SEQ ID NO: 7144 - protein, 161 aa, Escherichia coli; identical to SEQ ID NO: 2582

SEQ ID NO: 7145 - protein, 814 aa, Escherichia coli
MGQHVDLTMFEKGQEQQLPGIYRVSVYVNEQRMETRTLEFKEATEAQRKAMGESLVPCLSRTQLAEMGVRVESFPALNLVSAEACVPFDEIIPLASSHFDFSEQKLVLSFPQAAMHQVARGTVPESLWDEGIPALLLDYSFSGSNSEYDSTGSSSSYVDDNGTVHHDDGKDTLKSDSYYLNLRSGLNLGAWRLRNYSTWSHSGGKAQWDNIGTSLSRAIIPFKAQLTMGDTATAGDIFDSVQMRGAMLASDEEMLPDSQRGFAPIVRGIAKSNAEVSIEQNGYVIYRTYVQPGAFEINDLYPTANSGDLTVIIKEADGSEQRFIQPFSSVPIFQREGHLKYSFAAGEYQAGNYDSASPRFGQLDLIYGLPWGMTAYGGVLISNNYNAFALGIGKNFGYIGAISIDVTQAKSELNNDRDSQGQSYRFLYSKSFESGTDFRLAGYRYSTSGFYTFQEATDVRSDADSDYNRYHKRSEIQGNLTQQLGAYGSVYLNLTQQDYWNDAGKQNTVSAGYNGRIGKVSYSIAYSWNKSPEWDESDRLWSFNISVPLGRAWSNYRVTTDQDGRTNQQVGVSGTLLEDRNLSYSVQEGYASNGVGNSGNANVGYQGGSGNVNVGYSYGKDYRQLNYSVRGGVIVHSEGVTLSQPLGETMTLISVPGARNARVVNNGGVQVDWMGNAIVPYAMPYRENEISLRSDSLGDDVDVENAFQKVVPTRGAIVRARFDTRVGYRVLMTLLRSAGSPVPFGATATLITDKQNEVSSIVGEEGQLYISGMPEEGRVLIKWGNDASQQCVAPYKLSLELKQGGIIPVSANCQ

SEQ ID NO: 7146 - protein, 161 aa, Escherichia coli; identical to SEQ ID NO: 2582

SEQ ID NO: 7147 - protein, 219 aa, Escherichia coli; identical to SEQ ID NO: 6014

SEQ ID NO: 7148 - protein, 518 aa, Escherichia coli; identical to SEQ ID NO: 2349

SEQ ID NO: 7149 - protein, 838 aa, Escherichia coli
MPQRHHQGHKRTPKQLALIIKRCLPMVLTGSGMLCTTANAEEYYFDPIMLETTKSGMQTTDLSRFSKKYAQLPGTYQVDIWLNKKKVSQKKITFTANAEQLLQPQFTVEQLRELGIKVDEIPALAEKDDDSVINSLEQIIPGTAAEFDFNHQRLNLSIPQIALYRDARGYVSPSRWDDGIPTLFTNYSFTGSDNRYRQGNRSQRQYLNMQNGANFGPWRLRNYSTWTRNDQASSWNTISSYLQRDIKALKSQLLLGESATSGSIFSSYNFTGVQLASDDNILPNSQRGFAPTVRGIANSSAIVTIRQNGYVIYQSNVPAGAFEINDLYPSSNSGDLEVTIEESDGTQRRFIQPYSSLPMMQRPGHLKYSATAGRYRADANSDSKEPEFAEATAIYGLNNTFTLYGGLLGSEDYYALGIGIGGTLGALGALSMDINRADTQFDNQHSFHGYQWRTQYIKDIPETNTNIAVSYYRYTNDGYFSFDEANTRNWDYNSRQKSEIQFNISQTIFDGVSLYASGSQQDYWGNNEKNRNISVGVSGQQWGIGYSLNYQYSRYTDQNNDRALSLNLSIPLERWLPRSRVSYQMTSQKDRPTQHEMRLDGSLLDDGRLSYSLEQSLDDDNNHNSSVNASYRSPYGTFSAGYSYGNDSSQYNYGVTGGVVIHPHGVTLSQYLGNAFALIDANGASGVRIQNYPGIATDPFGYAVVPYLTTYQENRLSVDTTQLPDNVDLEQTTQFVVPNRGAMVAARFNANIGYRVLVTVSDRNGKPLPFGALASNDDTGQQSIVDEGGILYLSGISSKSQSWTVRWGNQADQQCQFAFSTPDSEPTTSVLQGTAQCH

SEQ ID NO: 7150 - protein, 651 aa, Escherichia coli; identical to SEQ ID NO: 6992

SEQ ID NO: 7151 - protein, 252 aa, Escherichia coli; identical to SEQ ID NO: 5502

SEQ ID NO: 7152 - protein, 237 aa, Escherichia coli
MRKITQAISAVCLLFALNSSAVALASSPSPLNPGTNVARLAEQAPIHWVSVAQIENSLAGRPPMAVGFDIDDTVLFSSPGFWRGKKNFSPESEDYLKNPVFWEKMNNGWDEFSIPKEVARQLIDMHVRRGDAIFFVTGRSPTKTETVSKTLADNFHIPATSMNPVIFAGDKPGQNTKSQWLQDKNIRIFYGDSDNDITAARDVGARGIRILRASNSTYKPLPKAGAFGEEVIVNSEY

SEQ ID NO: 7153 - protein, 118 aa, Escherichia coli [sequence omitted]

SEQ ID NO: 7154 - protein, 229 aa, Escherichia coli; identical to SEQ ID NO: 3589

SEQ ID NO: 7155 - protein, 774 aa, Escherichia coli
MTPLRVFRKTTPLVNAIRLSLLPLAGLSFSAFAAQVNIAPGSLDKALNQYAAHSGFTLSVDASLTRGKQSNGLHGDYDVESGLQQLLDGSGLQVKPLGNNSWTLEPAPAPKEDALTVVGDWLGDARENDVFEHAGARDVIRREDFAKTGATTMREVLNRIPGVSAPENNGTGSHDLAMNFGIRGLNPRLASRSTVLMDGIPVPFAPYGQPQLSLAPVSLGNMDAIDVVRGGGAVRYGPQSVGGVVNFVTRAIPQDFGIEAGVEGQLSPTSSQNNPKETHNLMVGGTADNGFGTALLYSGTRGSDWREHSATRIDDLMLKSKYAPDEVHTFNSLLQYYDGEADMPGGLSRADYDADRWQSTRPYDRFWGRRKLASLGYQFQPDSQHKFNIQGFYTQTLRSGYLEQGKRITLSPRNYWVRGIEPRYSQIFMIGPSAHEVGVGYRYVNESTHEMRYYTATSSGQLPSGSSPYDRDTRSGTEAHAWYLDDKIDIGNWTITPGMRFEHIESYQNNAITGTHEEVSYNAPLPALNVLYHLTDSWNLYANTEGSFGTVQYSQIGKAVQSGNVEPEKARTWELGTRYDDGALTAEMGLFLINFNNQYDSNQTNDTVTARGKTRHTGLETQARYDLGTLTPTLDNVSIYASYAYVNAEIREKGDTYGNLVPFSPKHKGTLGVDYKPGNWTFNLNSDFQSSQFADNSNTVKESADGSTGRIPGFMLWGARVAYDFGPQMADLNLAFGVKNIFDQDYFIRSYNDNNKGIYAGQPRTLYMQGSLKF

SEQ ID NO: 7156 - protein, 430 aa, Escherichia coli; identical to SEQ ID NO: 2617

SEQ ID NO: 7157 - protein, 715 aa, Escherichia coli; identical to SEQ ID NO: 3971

SEQ ID NO: 7158 - protein, 614 aa, Escherichia coli; identical to SEQ ID NO: 4469

SEQ ID NO: 7159 - protein, 816 aa, Escherichia coli; identical to SEQ ID NO: 5436

SEQ ID NO: 7160 - protein, 226 aa, Escherichia coli
MIFAVLSLLVAGELQAGVVVGGTRFIFPADRESISILLTNTSQESWLINSKINRPTRWAGGEASTVPAPLLAAPPLILLKPGTTGTLRLLRTESDILPVDRETLFELSIASVPSGKVENQSVKVAMRSVFKLFWRPEGLPGDPLEAYQQLRWTRKSQGVQLTNPTPYYINLIQVSVNGKALSNVGVVPPKSQRQTSWCQAIAPCHVAWRAINDYGGLSAKKEQNLP

SEQ ID NO: 7161 - protein, 209 aa, Escherichia coli; identical to SEQ ID NO: 3547

SEQ ID NO: 7162 - protein, 266 aa, Escherichia coli; identical to SEQ ID NO: 1894

SEQ ID NO: 7163 - protein, 259 aa, Escherichia coli
MHQFPLSSLMINVLICILICCTNAQAGVVVGGTRFVYPEKQSSISVELKNTASKDMLVKISVTPDDGRQLKGTLESQPLLPDKAFIATPPLLVLKQDKNTKIRINRVGGQLPIDRESLFILNIAALPAQEQNSQLKNENQLQVAVRNRMKIFYRPETLSGNPLDAYQQLRWSRNNEAVTVFNPTPWYVTLYNLSIDGKSINGGMVAPFSHRQQDWCQRQGYCEINWQTLDLYNNALPVWSVKLNVLQNNAIMGAVAIHG

SEQ ID NO: 7164 - protein, 784 aa, Escherichia coli; identical to SEQ ID NO: 2244

SEQ ID NO: 7165 - protein, 170 aa, Escherichia coli
MSGILTRWRQFGKRYFWPHLLLGMVAASLGLPALSNAAEPNAPAKATTRNHEPSAKVNFGQLALLEANTRRPNSNYSVDYWHQHAIRTVIRHLSFAMAPQTLPVAEESLPLQAQHLALLDTLSALLTQEGTPSEKGYRIDYAHFTPQAKFSMPVWISQAQGIRAGPQRLS

SEQ ID NO: 7166 - protein, 446 aa, Escherichia coli; identical to SEQ ID NO: 2176

SEQ ID NO: 7167 - protein, 89 aa, Escherichia coli
MKKMFMAVLFALVSVNAMAADCAKGKIEFSKYNENDTFTVKVAGKEYWTNRWNLQPLLQSAQLTGMTVTIKSSTCASGSGFAEVQFNND

SEQ ID NO: 7168 - protein, 249 aa, Escherichia coli; identical to SEQ ID NO: 4132

SEQ ID NO: 7169 - protein, 230 aa, Escherichia coli; identical to SEQ ID NO: 4004

SEQ ID NO: 7170 - protein, 193 aa, Escherichia coli; identical to SEQ ID NO: 2246

SEQ ID NO: 7171 - protein, 243 aa, Escherichia coli; identical to SEQ ID NO: 4044

SEQ ID NO: 7172 - protein, 432 aa, Escherichia coli; identical to SEQ ID NO: 2026

SEQ ID NO: 7173 - protein, 243 aa, Escherichia coli; identical to SEQ ID NO: 4122

SEQ ID NO: 7174 - protein, 752 aa, Escherichia coli; identical to SEQ ID NO: 4012

SEQ ID NO: 7175 - protein, 162 aa, Escherichia coli; identical to SEQ ID NO: 1965

SEQ ID NO: 7176 - protein, 236 aa, Escherichia coli; identical to SEQ ID NO: 4069

SEQ ID NO: 7177 - protein, 713 aa, Escherichia coli
MAMFTPSFSGIKGRALFSLLFAAPMIHATDTATTKDGETITVTADANTATEATDGYQPLSTSTATLTDMPMLDIPQVVNTVSDQVLENQNATTLDEALYNVSNVVQTNTLGGTQDAFVRRGFGANRDGSIMTNGLRTVLPRSFNAATERVEVLKGPASTLYGILDPGGLINVVTKRPEKTFHGSVSATSSSFGGGTGQLDITGPIEGTQLAYRLTGEVQDEDYWRNFGKERSTFIAPSLTWFGDNATVTMLYSHRDYKTPFDRGTIFDLTTKQPVNVDRKIRFDEPFNITDGQSDLAQLNAEYHLNSQWTARFDYSYSQDKYGDNQARVTAYDATTGTLTRRVDATQGSTQRMHATRADLQGNVDIAGFYNEILGGVSYEYYDLLRTDMIRCKNAKDFNIYNPVYGNTSKCTTVSASDSDQTIKQESYSAYAQDALYLTDNWIAVAGIRYQYYTQYAGKGRPFNVNTDSRDEQWTPKLGLVYKLTPSVSLFANYSQTFMPQSSIASYIGDLPPESSNAYEVGAKFELFDGITADIALFDIHKRNVLYTESIGDETIAKTAGRVRSRGVEVDLAGALTENINIIASYGYTDAKVLEDPDYAGKPLPNVPRHTGSLFLTYDIHNMPGNNTLTFGGGGHGVSRRSATNGADYYLPGYFVADAFAAYKMKLQYPVTLQLNVKNLFDKTYYTSSIATNNLGNQIGDPREVQFTVKMEF

SEQ ID NO: 7178 - protein, 222 aa, Escherichia coli; identical to SEQ ID NO: 4102

SEQ ID NO: 7179 - protein, 359 aa, Escherichia coli; identical to SEQ ID NO: 2328

SEQ ID NO: 7180 - protein, 118 aa, Escherichia coli [sequence omitted]

SEQ ID NO: 7181 - protein, 331 aa, Escherichia coli; identical to SEQ ID NO: 2705

SEQ ID NO: 7182 - protein, 361 aa, Escherichia coli; identical to SEQ ID NO: 3357

SEQ ID NO: 7183 - protein, 614 aa, Escherichia coli; identical to SEQ ID NO: 4016

SEQ ID NO: 7184 - protein, 430 aa, Escherichia coli; identical to SEQ ID NO: 2617

SEQ ID NO: 7185 - protein, 232 aa, Escherichia coli; identical to SEQ ID NO: 2087

SEQ ID NO: 7186 - protein, 828 aa, Escherichia coli; identical to SEQ ID NO: 2388

SEQ ID NO: 7187 - protein, 637 aa, Escherichia coli
MLAVDDDGETMVVTASSVEQNLKDAPASISVITQEDLQRKPVQNLKDVLKEVPGVQLTNEGDNRKGVSIRGLDSSYTLILVDGKRVNSRNAVFRHNDFDLNWIPVDSIERIEVVRGPMSSLYGSDALGGVVNIITKKIGQKWSGTVTVDTTIQEHRDRGDTYNGQFFTSGPLIDGVLGMKAYGSLAKREKDDPQNSTTTDTGDTPRIEGFSSRDGNVEFAWTPNQNHDFTAGYGFDRQDRDSDSLDKNRLERQNYSVSHNGRWDYGTSELKYYGEKVENKNPGNSSPITSESNTVDGKYTLPLTAINQFLTVGGEWRHDKLSDAVNLTGGTSSKTSASQYALFVEDEWRIFEPLALTTGVRMDDHETYGEHWSPRAYLVYNATDTVTVKGGWATAFKAPSLLQLSPDWTSNSCRGACKIVGSPDLKPETSESWELGLYYMGEEGWLEGGESSVTVFRNDVKDRISISRTSDVNAAPGYQNFVGFTANGVPVFSYYNVNKARIQGVETELKIPFNDEWKLSLNYTYNDGRDVSNGENKPLSDLPFHTANGTLDWKPLALEDWSFYVSGHYTGQKRADSATAKTPGGYTIWNTGAAWQVTKDVKLRAGVLNLGDKDLSRDDYSYNEDGRRYFMAVDYRF

SEQ ID NO: 7188 - protein, 366 aa, Escherichia coli; identical to SEQ ID NO: 4014

SEQ ID NO: 7189 - protein, 203 aa, Escherichia coli; identical to SEQ ID NO: 2201

SEQ ID NO: 7190 - protein, 367 aa, Escherichia coli; identical to SEQ ID NO: 3998

SEQ ID NO: 7191 - protein, 567 aa, Escherichia coli; identical to SEQ ID NO: 4028

SEQ ID NO: 7192 - protein, 191 aa, Escherichia coli; identical to SEQ ID NO: 2730

SEQ ID NO: 7193 - protein, 208 aa, Escherichia coli; identical to SEQ ID NO: 1949

SEQ ID NO: 7194 - protein, 518 aa, Escherichia coli; identical to SEQ ID NO: 2349

SEQ ID NO: 7195 - protein, 111 aa, Escherichia coli; identical to SEQ ID NO: 3996

SEQ ID NO: 7196 - protein, 386 aa, Escherichia coli
MVDDVPVAQVLQALAEQEKLNLVVSPDVRGTVSLHLTDVPWKQALQTVVKSAGLITRQEGNILSVHSVAWQNDNIARQEAEQARAQANLPLENRNITLQYADAGELAKAGEKLLSAKGSMTVDKRTNRLLLRDNKAALSALEQWVAQMDLPVGQVELSAHIVTINEKSLRELGVKWTLADAQQAGGVGQVTTLGSDLSVATATTHVGFNIGRINGRLLDLELSALEQKQQLDIIASPRLLASHLQPASIKQGSEIPYQVSSGESGATSVEFKEAVLGMEVTPTVLQKGRIRLKLHISQNVPGQVLQQADGEVLAIDKQEIETQVEVKSGETLALGGIFTRKNKSGQDSVPLLGDIPWFGQLFRHDGKEDERRELVVFITPRLVSSE

SEQ ID NO: 7197 - protein, 224 aa, Escherichia coli; identical to SEQ ID NO: 4063

SEQ ID NO: 7198 - protein, 243 aa, Escherichia coli; identical to SEQ ID NO: 4001

SEQ ID NO: 7199 - protein, 250 aa, Escherichia coli; identical to SEQ ID NO: 4096

SEQ ID NO: 7200 - protein, 746 aa, Escherichia coli; identical to SEQ ID NO: 4130

SEQ ID NO: 7201 - protein, 203 aa, Escherichia coli; identical to SEQ ID NO: 2009

SEQ ID NO: 7202 - protein, 237 aa, Escherichia coli; identical to SEQ ID NO: 1814

SEQ ID NO: 7203 - protein, 686 aa, Escherichia coli
MFWRDITLSVWRKKTTGLKTKKRLLPLVLAAALCSSPVQAEEATFTANFKDTDLKSFIETVGANLNKTIIMGPGVQGKVSIRTMTPLNERQYYQLFLNLLEAQGYAVVPMENDVLKVVKSSAAKVEPLPLIGEGSDNYAGDEMVTKVVPVRNVSVRELAPILRQMIDSAGSGNVVNYDPSNVIMLTGRASVVERLTEVIQRVDHAGNRTEEVIPLDNASASEIARVLESLTKNSGENQPATLKSQIVADERTNSVIVSGDPATRDKMRRLIRRLDSEMERSGNSQVFYLKYSKAEDLVDVLKQVSGTLTAAKEEAEGTVGSGREVVSIAASKHSNALIVTAPQDIMQSLQSVIEQLDIRRAQVHVEALIVEVAEGSNINFGVQWASKDAGLMQFANGTQIPIGTLGAAISQAKPQKGSTVISENGATTINPDTNGDLSTLAQLLSGFSGTAVGVVKGDWMALVQAVKNDSSSNVLSTPSITTLDNQEAFFMVGQDVPVLTGSTVGSNNSNPFNTVERKKVGIMLKVTPQINEGNAVQMVIEQEVSKVEGQTSLDVVFGERKLKTTVLANDGELIVLGGLMDDQAGESVAKVPLLGDIPLIGNLFKSTADKKEKRNLMVFIRPTILRDGMAADGVSQRKYNYMRAEQIYRDEQGLSLMPNTAQPVLPAQNQALPPEVRAFLNAGRTR

SEQ ID NO: 7204 - protein, 200 aa, Escherichia coli; identical to SEQ ID NO: 1801

SEQ ID NO: 7205 - protein, 629 aa, Escherichia coli
MTVTATGNARSSFEAPMMVSVIDTSAPENQTATSATDLLRHVPGITLDGTGRTNGQDVNMRGYDHRGVLVLVDGVRQGTDTGHLNGTFLDPALIKRVEIVRGPSALLYGSGALGGVISYDTVDAKDLLQEGQSSGFRVFGTGGTGDHSLGLGASAFGRTENLDGIVAWSSRDRGDLRQSNGETAPNDESINNMLAKGTWQIDSAQSLSGLVRYYNNDAREPKNPQTVEASDSSNPMVDRSTIQRDAQLSYKLAPQGNDWLNADAKIYWSEVRINAQNTGSSGEYREQITKGTRLENRSTLFADSFASHLLTYGGEYYRQEQHPGGATTGFPQAKIDFSSGWLQDEITLRDLPITLLGGTRYDSYRGSSDGYKDVDADKWSSRAGMTINPTNWLMLFGSYAQAFRAPTMGEMYNDSKHFSIGRFYTNYWVPNPNLRPETNETQEYGFGLRFDDLMLSNDALEFKASYFDTKAKDYISTTVDFAAATTMSYNVPNAKIWGWDVMTKYTTDLFSLDVAYNRTRGKDTDTGEYISSINPDTVTSTLNIPIAHSGFSVGWVGTFADRSTHISSSYSKQPGYGVNDFYVSYQGQQALKGMTTTLVLGNAFDKEYWSPQGIPQDGRNGKIFVSYQW

SEQ ID NO: 7206 - protein, 241 aa, Escherichia coli; identical to SEQ ID NO: 2922

SEQ ID NO: 7207 - protein, 729 aa, Escherichia coli; identical to SEQ ID NO: 4015

SEQ ID NO: 7208 - protein, 213 aa, Escherichia coli; identical to SEQ ID NO: 2232

SEQ ID NO: 7209 - protein, 274 aa, Escherichia coli; identical to SEQ ID NO: 2317

SEQ ID NO: 7210 - protein, 539 aa, Escherichia coli; identical to SEQ ID NO: 3050

SEQ ID NO: 7211 - protein, 656 aa, Escherichia coli; identical to SEQ ID NO: 4094

SEQ ID NO: 7212 - protein, 227 aa, Escherichia coli; identical to SEQ ID NO: 4009

SEQ ID NO: 7213 - protein, 700 aa, Escherichia coli
MKIFSVRQTVLPALLVLSPVVFAADEQTMIVSAAPQVVSELDTPAAVSVVDGEEMRLATPRINLSESLTSVPGLQVQNRQNYAQDLQLSIRGFGSRSTYGIRGIRLYVDGIPATMPDGQGQTSNIDLSSVQNVEVLRGPFSALYGNASGGVMNVITQTGQQPPTIEASSYYGSFGSWRYGLKATGAMGDGTQPGDVDYTVSTTRFTTHGYRDHSGAQKNLANAKLGVRIDDASKLSLIFNSVDIKADDPGGLTEAEWKANPQQAPRAEQYDTRKTIKQTQAGLRYERSLSAQDDMSVMMYAGERETTQYQSIPMAPQLNPSHAGGVITLQRHYQGIDSRWTHRGELGVPLTFTTGLNYENMSENRKGYNNFRLNSGVPEYGQKGELRRDERNLMWNVDPYLQTQWQLSEKLSLDAGVRYSSVWFDSNDHYVTPGNGDDSGDASYHKWLPAGSLKYAMTDAWNIYLAAGRGFETPTINELSYRADGQSGMNFGLKPSTNDTIEIGSKTRIGDGLLSLALFQTDTDDEIVVDSSSGGRTTYKNAGKTRRQGAELAWDQRFAGDFRVKASWTWLDATYRSNVCNEQDCNGNRMPGIARNMGFASIGYVPEDGWYAGTEARYMGDIMADDENTAKAPSYTLVGLFTGYKYNYHNLTVDLFGRVDNLFDKEYVGSVIVNESNGRYYEPAPGRNYGVGMNIAWRFE

SEQ ID NO: 7214 - protein, 392 aa, Escherichia coli
MKRKVLAMLVPALLVAGAANAAEVYNKDGNKLDLYGKVAGLHYFSDDAGSDGDMSYARIGFKGETQIADQFTGYGQWEFNIGANGPESDKGNTATRLAFAGLGFGQNGTFDYGRNYGVVYDIEAWTDMLPEFGGDTYAGADNFMNGRANGVATYRNNGFFGQVDGLNFALQYQGNNEDDGLFGQEGSGNGNGRKLAKENGDGFGMSTSYDFDFGLSLGAAYSNSDRTDNQVHKGWHNTRDGDRSDTTAGGETAEAWTVGAKYDANNVYLAAMYAETRNMTGYGKADAIANKTQNFEVVAQYQFDFGLRPSIAYLQSKGKDLGGWAHDGNGDPRYTNKDLVKYVDIGATYYFNKNMSTYVDYKINLLDNDDDFYEANGIATDDIVAVGLVYQF

SEQ ID NO: 7215 - protein, 678 aa, Escherichia coli; identical to SEQ ID NO: 4005

SEQ ID NO: 7216 - protein, 565 aa, Escherichia coli
MKSPAPSRPQKMALIPACIFLCFAALSVQAEETSVTPQPPDILLGPLFNDVQNAKLFPDQKTFADAVPNSDPLMILADYRMQQNQSGFDLRHFVNVNFTLPKEGEKYVPPEGQSLREHIDGLWPVLTRSTENTEKWDSLLPLPEPYVVPGGRFREVYYWDSYFTMLGLAESGHWDKVADMVANFAHEIDTYGHIPNGNRSYYLSLSQPPFFALMVELLAQHEGDAALKQYLPQMQKEYAYWMDGVENLQAGQQEKRVVKLQDGTLLNRYWDDRDTPRPESWVEDIATAKSNPNRPATEIYRDLRSAAASGWDFSSRWMDNPQQLNTLRTTSIVPVDLNSLMFKMEKILARASKAAGDNAMANQYETLANARQKGIEKYLWNDQQGWYADYDLKSHKVRNQLTAAALFPLYVNAAAKDRASKMATATKTHLLQPGGLNTTSVKSGQQWDAPNGWAPLQWVATEGLQNYGQNEVAMDISWHFLTNVQHTYDREKKLVEKYDVSTTGTGGGGGEYPLQDGFGWTNGVTLKMLDLICPKEQPCDNVPATRPLSESTTQPVKQKEAEPTP

SEQ ID NO: 7217 - protein, 161 aa, Escherichia coli; identical to SEQ ID NO: 2582

SEQ ID NO: 7218 - protein, 862 aa, Escherichia coli
MTIKSTNHLTHIATFCALLYSNSALCAELVEYDHTFLMGKDASNIDLSRYTEGNPTLPGIYDVSVYVNDQPIMSQSIAFAVIEGKKNAQACITQKNLLQFHISSPDKNSEKAILLKRDDDLGDCLNLAEMIPQSSIRYDVNDQRLDIDVPQAWIMKNYQNYVDPSLWENGINAAMLSYNLNGYHSESPGRTNDSIYAAFNGGINLGAWRLRASGNYNWMTNVHSDYDFQNRYLQRDLASLRSQLVIGESYTTGETFDSVRIRGIRLYSDSRMLPPVLASFAPIIHGVANTNAKVTVMQNGYKIYETTVPPGAFAIDDLSPSGYGSDLIVTIEEADGTKRTFSQPFSSVVQMLRPGVGRWDISAGQVLKDSIQDEPNLFQASYYYGLNNYLTGYTGIQLTDNNYTAGLLGLGMNTPVGAFSVDVTHSNVSIPDDKTYQGQSYRISWNKLFENTSTSLNIAAYRYSTQHYLGLNDALTLIDEVEHPEQDLEPKSMRNYSRMKNQVTVSINQPLKFEKKDYGSFYLSGSWSDYWASGQNSTNYSIGYSNSASWGSYSISAQRSLNEDGQTDDSIYLSFTIPIENLLGTEHRSSGFQSIDTQLNSDFKGNNQLNISSSGYSDTNRISYSVNTGYMMNKSSDDLSYIGGYASYESPWGTLSGSASASSDNSRQFSLNTDGGFVLHSGGLTFSNDSFSDSDTLAVIQAPGAKGARINYGNSTVDRWGYGVTSALSPYHENRIALDINDLENDVELKSTSTVAVPRQGAVVFADFETVQGQSAIMNIVRSDGKNIPFAADIYDEQNNIIGNVGQGGQAFVRGIGQEGNIRITWIEEGKPVSCFAHYQQNTTSEKIAQSIILNGLRCQIQ

SEQ ID NO: 7219 - protein, 836 aa, Escherichia coli; identical to SEQ ID NO: 4550

SEQ ID NO: 7220 - protein, 878 aa, Escherichia coli
MSYLNLRLYQRNTQCLHIRKHRLAGFFVRLFVACAFAAQAPLSSAELYFNPRFLADDPQAVADLSRFENGQELPPGTYRVDIYLNNGYMATRDVTFNTGDSEQGIVPCLTRAQLASMGLNTASISGMNLLADDACVPLTDMIHDATAHLDVGQQRLNLTIPQAFMSNRARGYIPPELWDPGINAGLLNYNFSGNSVQNRIGGNSHYAYLNLQSGLNIGAWRLRDNTTWSYNSSDRSSGSKNKWQHINTWLERDIIPLRSRLTLGDGYTQGDIFDGINFRGAQLASDDNMLPDSQRGFAPVIHGIARGTAQVTIKQNGYDIYNSTVPPGPFTINDIYAAGNSGDLQVTIKEADGSTQIFTVPYSSVPLLQREGHTRYSITAGEYRSGNAQQEKPRFFQSTLLHGLPAGWTIYGGTQLADRYRAFNFGIGKNMGALGALSVDMTQANSTLPDDSQHDGQSVRFLYNKSLNESGTNIQLVGYRYSTSGYFNFADTTYSRMNGYNIETQDGVIQVKPKFTDYYNLAYNKRGKLQLTVTQQLGRTSTLYLSGSHQTYWGTSNVDEQFQAGLNTAFEDINWTLSYSLTKNAWQKGRDQMLALNVNIPFSHWLRSDSKSQWRHASASYSMSHDLNGRMTNLAGIYGTLLEDNDLSYSVQTGYAGGGDGNSGSTGYATLNYRGGYGNANIGYSHSDDIKQLYYGVSGGVLAHANGVTLGQPLNDTVVLVKAPGAKDAKVENQTGVRTDWRGYAVLPYATEYRENRVALDTNTLADNVDLDNAVANVVPTRGAIVRAEFKARVGIKLLMTLTHNNKPLPFGAMVTSESSQSSGIVADNGQVYLSGMPLAGKVQVKWGEEENAHCVANYQLPPESQQQLLTQLSAECR

SEQ ID NO: 7221 - protein, 747 aa, Escherichia coli; identical to SEQ ID NO: 3857

SEQ ID NO: 7222 - protein, 432 aa, Escherichia coli; identical to SEQ ID NO: 2026

SEQ ID NO: 7223 - protein, 693 aa, Escherichia coli
MKKSIFNYTTFFISMSYSLFANASPAIKSTENRNNEVLEVYSTPLHTPQEKMAIPVSVLTQEDLRANRSASIAETLTSLPGFHASFFGGGSVHPVIRGMSGNRVKVLHSGSDLMDVSSIGADHTITSEPFLSQRIEVLKGPSTLLYGGGTIGGAINVIDSKIPMSVPEKGYEGELHYQYDSVSKGNTGSVGLTLGENNLALRLEGTKRYQSDYKQPEPLHQGETSRLAGSYQDNQSANIGVSWLFDDGYIGIGYGEQHRRYGLPGHTHFHDHEDDHHHHAPIRPPLIGHHHHNHNHEYPDEQHQHGIPYIVMDSKRWDLRGEKNNPFTGIESIRFSAVRTDYHHDEKEGNEVSTSFKNKGDELRLTFTHQPIWGWHGVIGGQFNQRDFSAQGEEAYVPSTKTKNHSLFLLEEYQLGDFRYELGFRQEWQSLLNRETQKNNKQSASSISAGLAWNFTQDYFLNLSLSHTKRLPVAEELYANGVHAASRTIEKGDPNLTAEAANNIDIGITKVTGDIQFNMSAYYNRINNYIYGQFTGTELNNGYRSLQYVQNDAQFKGIEGNIDYYYNQDSLIGISGDYVRANLLHNKGNIPRIPAYRLSTYIKHSFTENVIGQIRIDHFGKQNKTADYETSTEAYNTVSLGSEYIGYLDNTDYTLYAKINNIFDVKGKDSTSYIKDEMYLPGRNIILGATLTF

SEQ ID NO: 7224 - protein, 368 aa, Escherichia coli; identical to SEQ ID NO: 4547

SEQ ID NO: 7225 - protein, 551 aa, Escherichia coli; identical to SEQ ID NO: 2452

SEQ ID NO: 7226 - protein, 700 aa, Escherichia coli; identical to SEQ ID NO: 4566

SEQ ID NO: 7227 - protein, 111 aa, Escherichia coli; identical to SEQ ID NO: 3419

SEQ ID NO: 7228 - protein, 478 aa, Escherichia coli; identical to SEQ ID NO: 2405

SEQ ID NO: 7229 - protein, 446 aa, Escherichia coli; identical to SEQ ID NO: 2177

SEQ ID NO: 7230 - protein, 715 aa, Escherichia coli; identical to SEQ ID NO: 5610

SEQ ID NO: 7231 - protein, 360 aa, Escherichia coli; identical to SEQ ID NO: 3354

SEQ ID NO: 7232 - protein, 200 aa, Escherichia coli; identical to SEQ ID NO: 1785

SEQ ID NO: 7233 - protein, 660 aa, Escherichia coli
MSRPQFTSLRLSLLALAVSATLPTFAFATETMTVTATGNARSSFEAPMMVSVIDTSAPENQTATSATDLLRHVPGITLDGTGRTNGQDVNMRGYDHRGVLVLVDGVRQGTDTGHLNGTFLDPALIKRVEIVRGPSALLYGSGALGGVISYDTVDAKDLLQEGQSSGFRVFGTGGTGDHSLGLGASAFGRTENLDGIVAWSSRDRGDLRQSNGETAPNDESINNMLAKGTWQIDSAQSLSGLVRYYNNDAREPKNPQTVEASDSSNPMVDRSTIQRDAQLSYKLAPQGNDWLNADAKIYWSEVRINAQNTGSSGEYREQITKGARLENRSTLFADSFASHLLTYGGEYYRQEQHPGGATTGFPQAKIDFSSGWLQDEITLRDLPITLLGGTRYDSYRGSSDGYKDVDADKWSSRAGMTINPTNWLMLFGSYAQAFRAPTMGEMYNDSKHFSIGRFYTNYWVPNPNLRPETNETQEYGFGLRFDDLMLSNDALEFKASYFDTKAKDYISTTVDFAAATTMSYNVPNAKIWGWDVMTKYTTDLFSLDVAYNRTRGKDTDTGEYISSINPDTVTSTLNIPIAHSGFSVGWVGTFADRSTHISSSYSKQPGYGVNDFYVSYQGQQALKGVTTTLVLGNAFDKEYWSPQGIPQDGRNGKIFVSYQW

SEQ ID NO: 7234 - protein, 360 aa, Escherichia coli; identical to SEQ ID NO: 3862

SEQ ID NO: 7235 - protein, 656 aa, Escherichia coli; identical to SEQ ID NO: 4560

SEQ ID NO: 7236 - protein, 203 aa, Escherichia coli; identical to SEQ ID NO: 2008

SEQ ID NO: 7237 - protein, 193 aa, Escherichia coli; identical to SEQ ID NO: 2246

SEQ ID NO: 7238 - protein, 828 aa, Escherichia coli; identical to SEQ ID NO: 2379

SEQ ID NO: 7239 - protein, 332 aa, Escherichia coli; identical to SEQ ID NO: 2702

SEQ ID NO: 7240 - protein, 203 aa, Escherichia coli; identical to SEQ ID NO: 2201

SEQ ID NO: 7241 - protein, 162 aa, Escherichia coli; identical to SEQ ID NO: 1967

SEQ ID NO: 7242 - protein, 274 aa, Escherichia coli; identical to SEQ ID NO: 2301

SEQ ID NO: 7243 - protein, 362 aa, Escherichia coli; identical to SEQ ID NO: 4554

SEQ ID NO: 7244 - protein, 517 aa, Escherichia coli; identical to SEQ ID NO: 2462

SEQ ID NO: 7245 - protein, 191 aa, Escherichia coli; identical to SEQ ID NO: 2727

SEQ ID NO: 7246 - protein, 232 aa, Escherichia coli; identical to SEQ ID NO: 2087

SEQ ID NO: 7247 - protein, 380 aa, Escherichia coli
MNIYRAVTSFFNNSSKKGRTMKKLTVAISAVAASVLMAMSAQAAEIYNKDSNKLDLYGKVNAKHYFSSNDADDGDTTYARLGFKGETQINDQLTGFGQWEYEFKGNRAESQGSSKDKTRLAFAGLKFGDYGSIDYGRNYGVAYDIGAWTDVLPEFGGDTWTQTDVFMTGRTTGVATYRNNDFFGLVDGLNFAAQYQGKNDRTDVTEANGDGFGFSTTYEYEGFGVGATYAKSDRTDGQVAYGKSKFNASGKNAEVWAAGLKYDANNIYLATTYSETQNMTVFGNNHIANKAQNFEAVAQYQFDFGLRPSVAYLQSKGKDLGVHGDRDLVKYVDVGATYYFNKNMSTFVDYKINLIDDSKFTKTAGIDTDDIVAVGLVYQF

SEQ ID NO: 7248 - protein, 518 aa, Escherichia coli; identical to SEQ ID NO: 2350

SEQ ID NO: 7249 - protein, 246 aa, Escherichia coli
MKSPLITTGMICLLGICNFAQATVSPDRTRIIFNASNKSATVRLTNQSKIDPYLAQSWIEDASGKKTRDYISTLPPMERIEPDEQIQIRLMALASLNDLPQDRETLFYYNVREIPPRAKEQNVMQIAMQSRLKLFWRPKAIELKEGEMIPLQKVTITRTAAGLTLNNPTPYHITVGYIGTNGKTLMPGADSIMVVPFTSATQHLSSLPSTFQLGFVADYGGLEMFKVECNSIQSLCQSSPAKKGKI

SEQ ID NO: 7250 - protein, 746 aa, Escherichia coli; identical to SEQ ID NO: 4597

SEQ ID NO: 7251 - protein, 250 aa, Escherichia coli; identical to SEQ ID NO: 3855

SEQ ID NO: 7252 - protein, 678 aa, Escherichia coli; identical to SEQ ID NO: 2230

SEQ ID NO: 7253 - protein, 565 aa, Escherichia coli
MKSPAPSRPQKMALIPACIFLCFAALSVQAEETSVTPQPPDILLGPLFNDVQNAKLFPDQKTFADAVPNSDPLMILADYRMQQNQSGFDLRHFVNVNFTLPKEGEKYVPPEGQSLREHIDGLWPVLTRSTENTEKWDSLLPLPKPYVVPGGRFREVYYWDSYFTMLGLAESGHWDKVADMVANFAHEIDNYGHIPNGNRSYYLSRSQPPFFALMVELLAQHEGDAALKQYLPQMQKEYAYWMDGVENLQAGQQEKRVVKLQDGTLLNRYWDDRDTPRPESWVEDIATAKSNPNRPATEIYRDLRSAAASGWDFSSRWMDNPQQLNTLRTTSIVPVDLNSLMFKMEKILARASKAIGDNAMANQYETLANARQKGIEKYLWNDQQGWYADYDLKSHKVRNQLTAAALFPLYVNAAAKDRASKMATATKTHLLQPGGLNTTSVKSGQQWDAPNGWAPLQWVATEGLQNYGQKEVAMDISWHFLTNVQHTYDREKKLVEKYDVSTTGTGGGGGEYPLQDGFGWTNGVTLKMLDLICPKEQPCDNVPTTRPLSESTTQPLKQKEAEPTP

SEQ ID NO: 7254 - protein, 884 aa, Escherichia coli
MCMPNHSNFRLRGIACYIALAISGGSVNAWADDSIQFDPRFLELKGDTKIDLGKFSKKGYVDAGKYNLRVFINKQPLSDEYDINWYVSENDPTKNYACLTPELVAALGLKEGIAKSLQWTHNDECLKPGQLDGMEVENDLSQSALLLTVPQAYLEYTSSDWDPPSRWDDGIPGLIADYSLNAQTRHQEQGGEDSHDISGNGTVGANLGAWRFRADWQSDYQHTRSNDDDDDSSNSTTSKNWDWSRYYAWRALPSLKAKLSLGEDYLNSDIFDGFNYIGSSVSTDDQMLPPNLRGYAPDVSGVAHSSAKVTISQMGRVLYETQVPAGPFRIQDIGDSVSGTLHVRVEEQNGQVQEYDVTTASMPFLTRQGQVRYKVMMGRPEDWNHKTEGGFFSGGEASWGVADGWSLYGGALADKHYQSAAMGVGRDLAQFGALAFDVTHSHVNLDHDSAYGKGKLDGNSFRVSYAKDFDELNSRVTFAGYRFSEKNFMTMSEYLDANQSDMARTGNDKEMYTITYNQNFAAAGVSIYLNYSHRTYWDRPEQTNYNLMFSHYFNMGSIRNMSISVTGYRYEYDDNADKGMYLSMSIPWSDSSTVTYNGSYGSGSDSSQVGYFKRVDDATHYQVNVGTSEQHGSVDGYLSHDGSLAKVDLSANYHEGEYRSAGIALQGGATLTAHGGALHRTQNMGGTRLLIDADGIANVPVESNGAPVYTNMFGKAVVADINNYYRNQAYIDLNNLPEDAEATQSVVQATLTEGAIGYRKFKVISGQKAMAVLRLRDGSYPPFGAEVKNDEQQQVGIVDDEGNVYLAGVNAGEHMMVFWEGSAQCEIVLPKPLPADLFSGLLLPCEQKGTAAPDSSAPEIKPVIQDQTRQVTPTEAPTSISATQ

SEQ ID NO: 7255 - protein, 246 aa, Escherichia coli; identical to SEQ ID NO: 3838

SEQ ID NO: 7256 - protein, 760 aa, Escherichia coli; identical to SEQ ID NO: 2081

SEQ ID NO: 7257 - protein, 241 aa, Escherichia coli; identical to SEQ ID NO: 2922

SEQ ID NO: 7258 - protein, 656 aa, Escherichia coli; identical to SEQ ID NO: 6715

SEQ ID NO: 7259 - protein, 237 aa, Escherichia coli; identical to SEQ ID NO: 3793

SEQ ID NO: 7260 - protein, 840 aa, Escherichia coli; identical to SEQ ID NO: 4545

SEQ ID NO: 7261 - protein, 207 aa, Escherichia coli; identical to SEQ ID NO: 2213

SEQ ID NO: 7262 - protein, 222 aa, Escherichia coli; identical to SEQ ID NO: 4581

SEQ ID NO: 7263 - protein, 753 aa, Escherichia coli; identical to SEQ ID NO: 6655

SEQ ID NO: 7264 - protein, 122 aa, Escherichia coli; identical to SEQ ID NO: 2915

SEQ ID NO: 7265 - protein, 266 aa, Escherichia coli; identical to SEQ ID NO: 3745

SEQ ID NO: 7266 - protein, 250 aa, Escherichia coli; identical to SEQ ID NO: 3811

SEQ ID NO: 7267 - protein, 363 aa, Escherichia coli; identical to SEQ ID NO: 3839

SEQ ID NO: 7268 - protein, 645 aa, Escherichia coli
MGAANCPGDAKENDASNPWRYVRAATATEITQYGNPASCSVKPDNNGGAVTPVDPTPETPETPVTPTPDNNEPSTPADSSNDYSLQAWSGQEGSEIYHVIFNGNVYQNAWWVGSEDCPRGTSVENSNNPWRLVRTATAAEMSQYGNPTTCEIDNGGVIIADGFQASKAYSANSIVDYNDAHYKTSVDQDAWGFVPGGDNPWKKYEPAKAWSASTVYVKGDRVVVDGQAYEALFWTQSDNPALIANQNATGSNSRPWKPLGKTQSYSNEELNNAPQFNPETLYASDTLIRFNGENYISQSKVQKVSPSDSNPWRVFVDWTGTKERVGTPKKAWPKHVYAPYVDFTLNTIPDLAALAKSHNVNHFTLAFVVSKDANTCLPTWGTAYGMQNYAQYSKIKALREAGGDVMLSIGGANNAPLAASCKNVDDLMQHYYDIVDNLNLRVLDFDIEGTWVADQASIERRNLAVKKVQDKWKSEGKDIAIWYTLPILPTGLTPEGMNVLSDAKAKGVELAGVNVMTMDYGNAICQSANTEGQNIHGKCATSAIANLHSQLKGLHPNKSDAEIDAMMGTTPMVGVNDVQGEVFYLSDARLVMQDAQKRNLGMVGIWSIARDLPGGTNLSPEFHGLTKEQAPKYAFSEIFAPFTKQ

SEQ ID NO: 7269 - protein, 826 aa, Escherichia coli; identical to SEQ ID NO: 3791

SEQ ID NO: 7270 - protein, 662 aa, Escherichia coli
MENKGTLFKSISFVAATMVTVSSVAATEQHDNTITVTATKRIQSSFDVIGNVNVQTDEQLKKSLVNQTDDLSAVFPELLSANRSSRIYNNMTLRGQSSADFFSPSLGLFVDGAPQLSQSYAQSLQGVEQVELLKGPQGVIYGRGTLGGIISVITKKPSSHAEAWLGGQYFGQGERINTGGSTGYMENGWAFQGNVSLDRNNGSLNNPAWDKKNVDSRDIKAGWLSANYISPDTLFESNLKVGGENYHSHEEYFVPFSPLSRSKIDTEWLYETPNLKRKLKNISWNTGYDFNDEWKFKTILSYQNMDIDRLFMDGTLQDDSQDILYSEARANYEGGDLSGIIGVSFQKMGYRHDNLSVGKVGMGGKKSDNDIYNYSGYFDGAYRINDNWELGAGARFSHEKAKTRMIILEKGKGESNYNNNAVFNAFIPRASIAWLPNEQNRIWFGVGRGFKPGGFNKEGVDKLALTSYKSEIATEMELGWKWHSVNDNHMAEITLYQIDSKDVQGYVGVIGYQALSNMGDSRSRGIEYLWKSKLTPNHSISLGGMFNQSEFTSGEHKNKRPAYTPSYSSLISWEGLYGKEQKWSSRIAVRFNGPFYFNEQNNLEQGHYTVVDASISWHPTKQYELSIYAKNIGDALYRTYAFGNKAQLGNPREIGVQGSINF

SEQ ID NO: 7271 - protein, 208 aa, Escherichia coli; identical to SEQ ID NO: 1948

SEQ ID NO: 7272 - protein, 266 aa, Escherichia coli
MSNQGMQMRQYRLLSPMIKVVIVLFSLLFSTAQAGLVIGGTRFAYPENQSSISVELKNTSDRDMLVKVAVSPDDARQLTGTVESLPSYSETVFIATPPLFVLKPDKNTKIRINRVGGSLSADRESLFILNVAALPTLENSHSVKTDNQLQIAVRNRMKIFYRPSNLSEDPNMSYQKLRWARKNEIVTVYNPGPRYVTLYNLHVDGKVIDGGMVAPFSHRQQSWCKSQGVCEIAWQTLDVYNNVLPAWKVKMNLLQMDVSGLQVKTD

SEQ ID NO: 7273 - protein, 682 aa, Escherichia coli; identical to SEQ ID NO: 3817

SEQ ID NO: 7274 - protein, 213 aa, Escherichia coli; identical to SEQ ID NO: 2232

SEQ ID NO: 7275 - protein, 673 aa, Escherichia coli; identical to SEQ ID NO: 2919

SEQ ID NO: 7276 - protein, 614 aa, Escherichia coli; identical to SEQ ID NO: 1885

SEQ ID NO: 7277 - protein, 654 aa, Escherichia coli; identical to SEQ ID NO: 3854

SEQ ID NO: 7278 - protein, 402 aa, Escherichia coli
MIPTRWTKTDLERQNYSVSHNGRWDYGTSELKYYGEKVENKNPGNSSPITSESNTVDGKYTLPLTAINQFLTVGGEWRHDKLSDAVNLTGGTSSKTSASQYALFVEDEWRIFEPLALTTGVRMDDHETYGEHWSPRAYLVYNATDTVTVKGGWATAFKAPSLLQLSPDWTSNSCRGACKIVGSPDLKPETSESWELGLYYMGEEGWLEGVESSVTVFRNDVKDRISISRTSDVNAAPGYQNFVGFETGANGRRIPVFSYYNVNKARIQGVETELKIPFNDEWKLSINYTYNDGRDVSNGENKPLSDLPFHTANGTLDWKPLALEDWSFYVSGHYTGQKRADSATAKTPGGYTIWNTGAAWQVTKDVKLRAGVLNLGDKDLSRDDYSYNEDGRRYFMAVDYRF

SEQ ID NO: 7279 - protein, 615 aa, Escherichia coli
MFWRDMTLSIWRKKTTGLKTKKRLLPLMLAAALCSSPVWAEEATFTANFKDTDLKSFIETVGANLNKTIIMGPGVQGKVSIRTMTPLNERQYYQLFLNLLEAQGYAVVPMENDVLKVVKSSAAKVEPLPLVGEGSDNYAGDEMVTKVVPVRNVSVRELAPILRQMIDSAGSGNVVNYDPSNVIMLTGRASVVERLTEVIQRVDHAGNRTEEVIPLDNASASEIARVLESLTKNSGENQPATLKSQIVADERTNSVIVSGDPATRDKMRRLIRRLDSEMERSGNSQVFYLKYSKAEDLVDVLKQVSGTLTAAKEEAEGTVGSGREVVSIAASKHSNALIVTAPQDIMQSLQSVIEQLDIRRAQVHVEALIVEVAEGSNINFGVQWGSKDAGLMQFANGTQIPIGTLGAAISAAKPQKGSTVISENGATTINPDTNGDLSTLAQLLSGFSGTAVGVVKGDWMALVQAVKNDSSSNVLSTPSITTLDNQEAFFMVGQDVPVLTGSTVGSNNSNPFNTVERKKVGIMLKVTPQINEGNAVQMVIEQEVSKVEGQTSLDVVFGERKLKTTVLANDGELIVLGGLMDDQAGESVAKVPLLGDIPVIGNLFKSTADKKENVT

SEQ ID NO: 7280 - protein, 119 aa, Escherichia coli; identical to SEQ ID NO: 5512

SEQ ID NO: 7281 - protein, 276 aa, Escherichia coli
MVVIMDPEVLQQAVNDAVAKIPVPADGKSVTADDVRPMIEQMVKDAVSHIPAPRDGRDYDPEVLLRAVNDAVGKLPVPADGKSITPDDVRPMLEQMVTDAVSHIPVPRDGRDYDPEVLQKAVLDAVSALPAPQDGRDATALEIFPAIDEQKSFPRGTYATHQGGLWRAYEKTHGMRGWECLVDGVADIDVSMTGERSFTVVVRQSSGQCTEKTFSLPVMLYRGVFRTGETYHPGDTVTWGGSLWHCNSMTGDKPGEAHSSGWTLAAKRGRDAGGGK

SEQ ID NO: 7282 - protein, 784 aa, Escherichia coli; identical to SEQ ID NO: 2241

SEQ ID NO: 7283 - protein, 412 aa, Escherichia coli
MKQWIAALLLMLIPGVQAAKPQKVTLMVDDVPVAQVLQVLAEQEKLNLVVSPDVSGTVSLHLTDVPWKQALQTVVKSAGLITRQEGNILSVHSVAWQNDNIARQEAEQTRAQANLPLENRNITLQYADAGELAKAGEKLLSAKGSMTVDKRTNRLLLRDNKTALSTLEQWVSQMDLPVGQVELSAHIVTINEKSLRELGVKWTLADAQQAGGVGQVTTLGSDLSVATATTHIGFNIGRINGRLLDLELSALEQKQQLDIIASPRLLASHLQPASIKQGSEIPYQVSSGESGATSVEFKEAVLGMEVTPTVLQKGRIRLKLHISQNVPGQVLQQADGEVLAIDKQEIETQVEVKSGETLALGGIFTRKNKSGQDSVPLLGDIPWFGQLFRHDGKEDERRELVVFITPRLVSSE

SEQ ID NO: 7284 - protein, 244 aa, Escherichia coli
  MOD_RES (243)..(243): Any amino acid
MWKLSMIRKKILMAAIPLFVISGADAAVSLDRTRAVFDGSEKSMTLDISNDNKQLPYLAQAWIENENQEKIITGPVIATPPVQRLEPGAKSMVRLSTTPDISKLPQDRESLFYFNLREIPPRSEKANVLQIALQTKIKLFYRPAAIKTRPNEVWQDQLILNKVSGGYRIENPTPYYVTVIGLGGSEKQAEEGEFETVMLSPRSEQTVKSANYNTPYLSYINDYGGRPVLSFICNGSRCSVKKXK

SEQ ID NO: 7285 - protein, 721 aa, Escherichia coli; identical to SEQ ID NO: 4553

SEQ ID NO: 7286 - protein, 729 aa, Escherichia coli; identical to SEQ ID NO: 4557

SEQ ID NO: 7287 - protein, 153 aa, Escherichia coli
MYTGEALPNDRESIFWLNVLDISAKPKFENKNNLNVNSNYLQLPIHSRIKLFYCPEKLTRSLSEAYNSVIWHIEKQGAKAFLCADNQSPYFITYNHITLIQSNYSQSINPVDMVAPYSSIRLPIHGNMSGYGKVKWTVVNDYGGHELSESALK

SEQ ID NO: 7288 - protein, 430 aa, Escherichia coli; identical to SEQ ID NO: 2617

SEQ ID NO: 7289 - protein, 711 aa, Escherichia coli; identical to SEQ ID NO: 3849

SEQ ID NO: 7290 - protein, 826 aa, Escherichia coli
MLRMTPLASAIVALLLGIEAYAAEETFDTHFMIGGMKDQQVANIRLDDNQPLPGQYDIDIYVNKQWRGKYEIIVKDNPQETCLSREVIKRLGINSDNFASGKQCLTFEQLVQGGSYTWDIGVFRLDFSVPQAWVEELESGYVPPENWERGINAFYTSYYVSQYYSDYKASGNSKSTYVRFNSGLNLLGWQLHSDASFSKTNNNPGAWKSNTLYLERGFAQLLGTLRVGDMYTSSDIFDSVRFRGVRLFRDMQMLPNSKQNFTPRVQGIAQSNALVTIEQNGFVVYQKEVPPGPFAITDLQLAGGGADLDVSVKEADGSVTTYLVPYAAVPNMLQPGVSKYDFAAGRSHIEGASKQSDFVQAGYQYGFNNLLTLYGGSMVANNYYAFTLGTGWNTRIGAISVDATKSHSKQDNGDVFDGQSYQIAYNKFLSQTSTRFGLAAWRYSSRDYRTFNDHVWANNKDNYRRDENDVYDIADYYQNDFGRKNSFSANMSQSLPEGWGSVSLSTLWRDYWGRSGSSKDYQLSYSNNLRRISYTLAASQAYDENHHEEKRFNIFISIPFDWGDDVSTPRRQIYMSNSTTFDDQGFASNNTGLSGTVGSRDQFNYGVNLSHQHQGNETTAGANLTWNAPVATVNGSYSQSSTYRQAGASVSGGIVAWSGGVNLANRLSETFAVMNAPGIKDAYVNGQKYRTTNRNGVVVYDGMTPYRENHLMLDVSQSDSEAELRGNRKIAASYRGAVVLVNFDTDQRKPWFIKALRADGQPLTFGYEVNDIHGHNIGVVGQGSQLFIRTNEVPPSVNVAIDKQQGLSCTITFGKEIDESRNYICQ

SEQ ID NO: 7291 - protein, 883 aa, Escherichia coli
MDTCMPDHSLFRLRVLPCCVALAMSGSYVNAWAEDEIQFDSRFLELKGDTKIDLKRFSSQGYVEPGKYNLQVQLNKQPLTEEYDIYWYASENDASKTYACLTPELVAQFGLKEDVAKNLQWIHDGKCLKPSQLEGIDIKADLSQSALVISLPQAYLEYTDINWDPPSRWDDGISGLIADYSITAQTRHEENGGDDSNEISGNGTVGVNLGAWRLRADWQTDYLHSKSNDDDVINGDDTQKNWEWSRYYAWRALPSLKAKLGLGEDYLNSDIFDGFNYVGGSISTDDQMLPPNLRGYAPDISGVAHTTAKVTVSQLGRVIYETQVPAGPFRIQDLGDSVSGTLHIRIEEQNGQVQEYDINTASMPFLTRPGQVRYKLMMGRPQEWGHHVEGGFFSGGEASWGIANGWSLYGGALADEHYQSAALGVGRDLSVFGAVAFDVTHSHTRLDKETAYGKGSLDGNSFRVSYSKDFDELNSRVTFAGYRFSEENFMTMSEYLDASDSEMVRTGNDKEMYTATYNQNFRDAGVSVYLNYTRHTYWDRDEQTNYNIMLSHYFNLGSIRNMSISMTGYRYEYDNQSDKGVYISLSMPWGDSSTISYNGNYGSGSDSSQVGYFSRVDDATHYQLNVGTSDNHSSVDGYYSHDGSMAQVDVSANYHEGQYTSAGISLQGGATLTAQGGALHRTQNMGGTRLLIDADGVAGVPVEGNGAAVYTNMFGKAVVADVNNYYRNQAYIDLNNLPENAEATQSVVQATLTEGAIGYRKFSVISGQKAMAVLRLQDGSYPPFGAEVKNDNAQNVGLVDDDGNVYLAGVKPGEHMIVSWGGVAHCDIHLPDPLPADLFNGLLLPCQQTGAISPSMPHQIKPVIQEQTQQVMPTEAPVSVSAN

SEQ ID NO: 7292 - protein, 368 aa, Escherichia coli
MNKTITALAIMMASFATNASVLPETPVPFKSGTGAIDNDTVYIGLGSAGTAWYKLDTQAKDKKWTALAAFPGGPRDQATSAFIDGNLYVFGGIGKNSEGLTQVFNDVHKYNPKTNSWVKLMSHAPMGMAGHVTFVHNGKAYVTGGVNQNIFNGYFEDLNEAGKDSTAVDKINAYYFDKKAEDYFFNKFLLSFDPSTQQWSYAGESPWYGTAGAAVVNKGDKTWLINGEAKPGLRTDAVFELDFTGNNLKWNKLAPVSSPDGVAGGFAGISNDSLIFAGGAGFKGSRENYQNGKNYAHEGLKKSYSTDIHLWHNGKWDKSGELSQGRAYGVSLPWNNSLLIIGGETAGGKAVTDSVLISVKDNKVTVQN

SEQ ID NO: 7293 - protein, 883 aa, Escherichia coli
MTAFRAAFKAYRMHQVLLLPRFARLTIALSLATAVFPVDAEYYFNPRFLSNDLAESVDLSAFTKGREAPPGTYRVDIYLNDEFMTSRDITFITDDNNADLIPCLSTDLLVSLGIKKSALLDNKEHSAEKHVPDNSACTPLQDRLVDASTEFDVGQQHLSLSVPQIYVGRMARGYVSPDLWEEGINAGLLNYSFNGNSINNRSNHNAGKSNYAYLNLQSGINIGSWRLRDNSTWSYNSGSSNSSDSNKWQHINTSAERDIIPLRSRLTVGDSYTDGDIFDSVNFRGFKINSTEAMLPDSQHGFAPVIHGIARGTAQVSVKQNGYDVYQTTVPPGPFTIDDINSAANGGDLQVTIKEADGSIQTLYVPYSSVPVLQRAGYTRYALAMGEYRSGNNLQSSPRFIQGSLMHGLEENWTPYGGMQIAEDYQAFNLGIGKDLGLFGAFSFDITQANTTLADGTRHSGQSGKSVYSKSFYQTGTNIQVAGYRYSTQGFYNLSDSAYSRMSGYTVKPPTGDSNEQTQFIDYFNLFYSKRGQEQISISQQLGNYGTTFFSASRQSYWNTSRSDQQISFGLNVPFGDITTSLNYSYSNNIWQNDRDHLLAFTLNVPFSHWMRTDSQSAFRNSNASYSMSNDLKGSMTNLSGVYGTLLPDNNLNYSVQVGNTHGGNTSSGTSGYSSLNYRGAYGNTNVGYSRSGDSSQIYYGMSGGIIAHADGITFGQPLGDTMVLVKAPGADNVKIENQTGIHTDWRGYAILPFATEYRENRVALNANSLADNVELDETVVTVIPTHGAIARATFNAQIGGKVLMTLKYGNKSVPFGAIVTHGENKNGSIVAENGQVYLTGLPQSGKLQVSWGNDKNSNCIVDYKLPEVSPGTLLNQQTAICR

SEQ ID NO: 7294 - protein, 275 aa, Escherichia coli
MSHWCRNWHMAKSLFRALVALSFLAPLWLNAAPRVITLSPANTELAFAAGITPVGVSSYSDYPPQAQKIEQVSTWQGMNLERIVALKPDLVIAWRGGNAERLVDQLASLGIKVMWVDATSIEQIANALRQLAPWSPQPDKAEQAAQSLLDQYAQLKAQYADKPKKRVFLQFGINPPFTSGKESIQNQVLEVCGGENIFKDSRVPWPQVSREQVLARSPQAIVITGGPDQIPKIKQYWGEQLKIPVIPLTSDWFERASPRIILAAQQLCNALSQVD

SEQ ID NO: 7295 - protein, 814 aa, Escherichia coli
MCAGKKAVAEPVSSVFFRRAALALAVSAAFASATGIAGEKLDMSFIQGGAGVNPEVWAALNGSYAPGRYLVDLSLNGKEAGKQILDVTPEDSKELCLSEAWLTKAGVYVSADYFREGYDATRQCYVLTKAPSVKVDFDVSTQSLALSIPQKGLVKMPENVDWDYGTSAFRVNYNANANTGRNNTSAFGSADLKANIGRWVVSSSATASGGDSGDNSTTINMFTATRAIRALSADLAVGKTSTGDSLLGSTGTYGVSLSRNNSMKPGNLGYTPVFSGIANGPSRVTLTQNGRLLHSEMVPAGPFSITDVPLYTSGDVTMRITGEDGREQVQNFPLSVMAGQLSPGQHEFSVAAGLPDDDSDLKGGVFAASYGYGLDGLTLRTGGVFNQDWQGVSAGAVLGLSYLGAVSADGAYATAKYRDGSRSGNKVQLSWSKQLEMTNTGLRVSWSRQSEEYEDMSSFDPTELWSQSNHGRRTKDEWNAGVSQPVGGLFSLSVSGWQRSYYPASTTGSYRYSDDNGKDTGITGTLSTQIKGVSLNLGWSGSRNTRGENNWSASASVSVPFTLFDRRYSSSTSVSTSKDGGTGFSTGVSGSLNDRFSYGLGGGRDSSGGVSSYLNASYSGDRAYLNGALNHSQSGGTSGSVSVSGSVLAVPAAKDIMFSRTTGDTVAVVNVKDTPGVKVTSGDGQTNSDGNLVVPLNSYDWNTVTIDAGTLPLSTELTNTSQKVVPTDKAVVWMPFDALKVKRYLLQVKQRDGEFVPGGTWARDSKNTPLGFVANNGVLMINTVDAPGDITLGQCRIPAVKLQDTEKLQEITCE

SEQ ID NO: 7296 - protein, 777 aa, Escherichia coli
MKNWICPLVRGGGRVNPEVWAALNGSYAPGRYLVDLSLNGKEAGKQILDVTPQDSNELCLTEAWLTKAGVYVSADYFREGYDATRQCYVLTKAPSVKVDFDVSTQSLALSIPQKGLVKMPENVDWDYGTSAFRVNYNANANTGRNNTSAFGSADLKANIGHWVVSSSATASGGDSGDNSTTINMFTAARAIRALSADLAVGKTSTGDSLLGSTGTYGVSLSRNNSMKPGNLGYTPVFSGIANGPSRVTLTQNGRLLHSEMVPAGPFSITDVPLYTSGDVTMKITGEDGREQVQNFPLSVMAGQLSPGQHEFSVAAGLPDDDSDLKGGVFAASYGYGLDGLTLRAGGVFNQDWQGASAGVVAGLGYLGAVSADGAYATAKYRDGSHSGNKVQLSWSKQLETTNTGLRVSWSRQSEEYEGMSSFDPTELWSQSNHGRRTKDEWNAGISQPVGGLFSLSVSGWQRSYYPASMTGSYRYSDDNGKETGITGSLSTQIKGVSLNLGWSGSRNSRGENNWSASASVSVPFTLFDRRYSSSASVSTSKGGGTGFSTGVSGSLNDRFSYGLGGGRDGDGGTSSYLNASYSGDRAYLNGVLNHSQSGGTSGSVSVSGSVLAVPAAKDIMFSRTTGDTVAVVNVKDTPGVKVTSGDGQTDSDGNLVVPLNSYDWNTVTIDAGTLPLSTELTNTSQKVVPTDKAVVWMPFDALKVKRYLLQVKQRDGEFVPGGTWARDSKNTPLGFVANNGVLMINTVDAPGDITLGQCRIPAARLQDTEKLQEITCE

SEQ ID NO: 7297 - protein, 161 aa, Escherichia coli; identical to SEQ ID NO: 2582

SEQ ID NO: 7298 - protein, 881 aa, Escherichia coli; identical to SEQ ID NO: 6485

SEQ ID NO: 7299 - protein, 207 aa, Escherichia coli; identical to SEQ ID NO: 2211

SEQ ID NO: 7300 - protein, 591 aa, Escherichia coli; identical to SEQ ID NO: 6507

SEQ ID NO: 7301 - protein, 903 aa, Escherichia coli; identical to SEQ ID NO: 6467

SEQ ID NO: 7302 - protein, 207 aa, Escherichia coli; identical to SEQ ID NO: 5917

SEQ ID NO: 7303 - protein, 834 aa, Escherichia coli
MYKKLKLTTISELIKNIYCSLSVLIIGCASAYAVEFNKDLIEAEDRENVNLSQFETDGQLPVGKYSLNALINNKRTPIHLDLQWVLIDNQTAVCLTPEQLTLLGFTDEIIEEAQQNLIDGCYPIEKEKQITTYLDKGKMQLSISAPQAWLKYKDANWTPPELWDHGIAGAFLDYNLYASHYAPHQGDNSQNISSYGQAGVNLGAWRLRTDYQYDQSFNNGKSQANNLDFPRIYLFRPIPAINAKLTIGQYDTESSIFDSFHFSGVSLKSDENMLPPDLRGYAPQITGVAQTNAKVTVSQNNRIIYQENVPPGPFAITNLFNTLQGQLDVKVEEEDGQVTQWQVASNSIPYLTRKGQIRYTTAMGKPTSVGGDSLQQPFFWTGEFSWGWLNNVSLYGSSVLTNRDYQSLAAGVGFNLNSLGSLSFDVTRSDAQLHNQDKETGYSYRANYSKRFESTGSQLTFAGYRFSDKNFVTMNEYINDTNHYTNYQNEKESYIVTFNQYLESLRLNTYVSLARNTYWDASSNVNYSLSLSRDFDIGPLKNVSTSLTFSRINWEEDNQDQLYLNISIPWGTSRTLSYGMQRNQDNKISHTASWYDSSDRNNSWSVSASGDNDEFKDMKASLRASYQHNTENGRLYLSGTSQRDSYYSLNASWNGSFTATRHGAAFHDYSGSADSRFMIDADGAEDIPLNNKRAVTNRYGIGVIPSVSSYITTSLSVDTRNLPENVDIENSVITTTLTEGAIGYAKLDTRKGYQIMGVIRLADGSHPPLGISVKDKTSHKELGLVADGGFVYLNGIQDDSKLTLRWGDKSCFIQPPNSSNLTTGTVILPCISQN

SEQ ID NO: 7304 - protein, 866 aa, Escherichia coli
MYRTHRQHSLLSSGGVPSFIGGLVVFVSAAFNAQAETWFDPAFFKDDPSMVADLSRFEKGQKITPGVYRVDIVLNQTIVDTRNVNFVEITPEKGIAACLTTESLDAMGVNTDAFPAFKQLDKQACALLAEIIPDASVTFNVNKLRLEISVPQIAIKSNARGYVPPERWDEGINALLLGYSFSGANSIHSSADSDSGDSYFLNLNSGVNLGPWRLRNNSTWSRSSGQTAEWKNLSSYLQRAVIPLKGELTVGDDYTAGDFFDSVSFRGVQLASDDNMLPDSLKGFAPVVRGIAKSNAQITIKQNGYTIYQTYVSPGAFEISDLYSTSSSGDLLVEIKEADGSVNSYSVPFSSVPLLQRQGRIKYAVTLAKYRTNSNEQQESKFAQATLQWGGPWGTTWYGGGQYAEYYRAAMFGLGFNLGDFGAISFDVTQAKSTLADQSEHKGQSYRFLYAKTLNQLGTNFQLMGYRYSTSGFYTLSDTMYKHMDGYEFNDGDDEDTPMWSRYYNLFYTKRGKLQVNISQQLGEYGSFYLSGSQQTYWHTDQQDRLLQFGYNTQIKDLSLGVSWNYSKSRGQPDADQVFALNFSLPINLLLPRSNDSYTSKKNYAWMTSNTSIDNEGHTTQNLGLTETLLDDGNLSYSVQQGYNSEGKTANGSASMDYKGAFADARVGYNYSDNGSQQQLNYALSGSLVAHSQGITLGQSLGETNVLIAAPGAENTRVANSTGLKTDWRGYTVVPYATSYRENRIALDAASLKRNVDLENAVVNVVPTKGALVLAEFNAHAGARVLMKTTKQGIPLRFGAIATLDGVQANSGIIDDDGSLYMAGLPAKGTITVRWGEAPDQICHISYELTEQQINSAITRMDAICR

SEQ ID NO: 7305 - protein, 819 aa, Escherichia coli; identical to SEQ ID NO: 5920

SEQ ID NO: 7306 - protein, 368 aa, Escherichia coli; identical to SEQ ID NO: 4616

SEQ ID NO: 7307 - protein, 816 aa, Escherichia coli
MNIYRLSVLSCLAMVTPPALTAEFNLNVLDKSIRDSVDISLLNQKGVVAPGDYFVSVTVNNNKISNGQQIRWQKSGDKIIPCINESLIELFGLKSDFRKKLPAIKECVDFSVFPEIIFTFDQANQQLNITIPQAWLAWHSENWTPPSTWNNGIPGFLMDYNLFASTYRPQSGSSSNNLNAYGTTGLNAGAWRLRSDYQLSQSDSGDNREQSGAISRTYLFRPLPQIGSRLTLGETDFSSNIFDGFSYTGAALASDDRMLPWELRGYAPQISGIAQTNATVTISHSGRVIYQKKVPPGPFIIDDLNQSVQGTLDVKVSEEDGRVNNFQVSAASTPFLTRQGQVRYKLAAGRPRSSMSHHTEDETFISHEVSWGMLSNTSLYGGMLLAGDDYRSGALGIGQNMLWLGALSFDVTWADSHFDTQQDEQGYSYRFNYSKQVDATNSTISLAAYRFSDRHFHSYANYIDHKYNDADAQDEKQTISLSFGQPITPLNLNLYANILHQSWWNADTSTTANITVGFNVDIGDWKDISVSTSFNTTHYEDKDRDNQIYFSISLPIGESGRLGYDMQNNSNTTTHRMSWNDTLDERNSWGMSAGIQSDRPDNGAQVSGNYQHLSSAGEWDLTGTYAANDYTSASASWSGSFTATQHGVAFHRRSSTNEPRLMVSTDGVGDIPIQGNIDYTNRFGIAVVPFVSSYQPTTVAVNMNDLPDGVTVSENVVKETWTEGAIGFKSLASRAGKDLNVIISDANGHFPPLGADVRQAEGGVSVGMVGENGHAWLSGVDENQQFTVHWGDQKTCAIHLPEHLEDVTNRLILPCH

SEQ ID NO: 7308 - protein, 266 aa, Escherichia coli; identical to SEQ ID NO: 1894

SEQ ID NO: 7309 - protein, 820 aa, Escherichia coli; identical to SEQ ID NO: 5921

SEQ ID NO: 7310 - protein, 161 aa, Escherichia coli; identical to SEQ ID NO: 2582

SEQ ID NO: 7311 - protein, 863 aa, Escherichia coli
MIMAAVPGQKLVHCNNKYKNTGHQGMPQRHHQGHKRTPKQLALIIKRCLPMVLTGSGMLCTTANAEEYYFDPIMLETTKSGMQTTDLSRFSKKYAQLPGTYQVDIWLNKKKVSQKKITFTANAEQLLQPQFTVEQLRELGIKVDEIPALAEKDDDSVINSLEQIIPGTAAEFDFNHQRLNLSIPQIALYRDARGYVSPSRWDDGIPTLFTNYSFTGSDNRYRQGNRSQRQYLNMQNGANFGPWRLRNYSTWTRNDQASSWNTISSYLQRDIKALKSQLLLGESATSGSIFSSYTFTGVQLASDDNMLPNSQRGFAPTVRGIANSSAIVTIRQNGYVIYQSNVPAGAFEINDLYPSSNSGDLEVTIEESDGTQRRFIQPYSSLPMMQRPGHLKYSATAGRYRADANSDSKEPEFAEATAIYGLNNTFTLYGGLLGSEDYYALGIGIGGTLGALGALSMDINRADTQFDNQHSFHGYQWRTQYIKDIPETNTNIAVSYYRYTNDGYFSFDEANTRNWDYNSRQKSEIQFNISQTIFDGVSLYASGSQQDYWGNNEKNRNISVGVSGQQWGIGYSLNYQYSRYTDQNNDRALSLNLSIPLERWLPRSRVSYQMTSQKDRPTQHEMRLDGSLLDDGRLSYSLEQSLDDDNNHNSSLNASYRSPYGTFSAGYSYGNDSSQYNYGVTGGVVIHPHGVTLSQYLGNAFALIDANGASGVRIQNYPGIATDPFGYAVVPYLTTYQENRLSVDTTQLPDNVDLEQTTQFVVPNRGAMVAARFNANIGYRVLVTVSDRNGKPLPFGALASNDDTGQQSIVDEGGILYLSGISSKSQSWTVRWGNQADQQCQFAFSTPDSEPTTSVLQGTAQCH

SEQ ID NO: 7312 - protein, 816 aa, Escherichia coli
MLRTTRWVAAIIFLYSFPGYAEETFDTHFMIGGMRGEKVSEYRFDNKQPLPGNYELDFYVNHQWRGKKDITIPESPAKPCLPKVLLTTLGVKTDNLNTEDNCILLDEAVHGGQYQWDISEHRLNLTVPQAYINELERGYVPPESWDRGIDAFYTSYNLSQYRSYDSNNNSHTASYGRFNSGLNLFSWQLHSDASYSKPDDMKGKWQSNTLYLERGWSQILSTVQIGENYTSSLIFDSLRFSGIRLFRDMQMLPDSMQSFTPLVQGVAQSNALITVSQNGYTIYQKEVPPGPFTIADLQLSGSGSDLDVSIKEADGSVRSFLVPYSSVPNMLQPGVSNFDFIAGRSQIYGVKNQEDFLEANYIYGLNNLLTLYGGTILSDNYNAITLGNGWNTPLGAISFDATRSSSKLNNDTRHEGTSYQVAYNKYLLQTATHFSVAAWRYASQDYRTFSDHLYENDKINHQSDYDDFYDIGRKNSLSANIMQPLSNNLGNVSLSALWRNYWGRSGNAKDYQFSYSNNWQHISYTFSASQSYDENDKEEERFNLFISIPFYWGDDIAKTRHQINLSNSTSFSKDGYSSNNTGITGIAGEHDQLNYGIYVNQQQQNNDTSLGTNLSWRTPIATIDGSYSHSKNAWQSGGSISSGLVVWPGGINITNQLSDTFAILDAPGLEGAHINGQKYNRTNSKGQVVYDLMIPHRENHLVLDTANSESETELQGNRQIIAPYRGAVSYVQFTTDQRKPWYIQALRPDGSPLTFGYDVLDLQENNIGVVGQGSLLFIRVDEIPTGIKVALNDEQNLFCTITFQHVIDENKTYICQ

SEQ ID NO: 7313 - protein, 857 aa, Escherichia coli
MSRKTVSRTFSSFSISVVAVAVASTFSAHAGKFNPKFLEDVQGVGQHVDLTMFEKGQEQQLPGIYRVSVYVNEQRMETRTLEFKEATEAQRKAMGESLVPCLSRTQLAEMGVRVESFPTLNQVPAEACVPFDEIIPQASSHFDFSEQKLVLSFPQAAMHQVARGTVPESLWDEGIPALLLDYSFSGSNSEYDSSGSSSSYVDDNGTVHHDDGKDTLKSDSYYLNLRSGLNLGAWRLRNYSTWSHSGGKAQWDNIGTSLSRAIIPFKAQLTMGDTATAGDIFDSVQMRGAMLASDEEMLPDSQRGFAPIVRGIAKSNAEVSIEQNGYVIYRTYVQPGAFEINDLYPTANSGDLTVIIKEADGSEQRFIQPFSSVPIFQREGHLKYSFAAGEYQAGNYDSASPRFGQLDLIYGLPWGMTAYGGVLISNNYNAFALGIGKNFGYIGAISIDVTQAKSELNNDRDSQGQSYRFLYSKSFESGTDFRLAGYRYSTSGFYTFQEATDVRSDADSDYNRYHKRSEIQGNLTQQLGAYGSVYLNLTQQDYWNDAGKQNTVSAGYNGRIGKVSYSIAYSWNKSPEWDESDRLWSFNISVPLGRAWSNYRVMTDQDGRTNQQVGVSGTLLEDRNLSYSVQEGYASNGVGNSGNANVGYQGGSGNVNVGYSYGKDYRQLNYSVRGGVIVHSEGVTLSQPLGETMTLISVPGARNARVVNNGGVQVDWMGNAVVPYATPYRENEVSLRSDSLGDDVDVENAFQKVVPTRGAIVRARFDTRVGYRVLMTLLRSAGSPVPFGATATLITDKQNDVSSIVGEEGQLYISGMPEEGQVLIKWGNDASQQCVAPYKLSLELKQGGIIPVSANCQ

SEQ ID NO: 7314 - protein, 298 aa, Escherichia coli
MINSLEQIIPGTAAEFDFNHQRLNLSIPQIALYRDARGYVSPSRWDDGIPTLFTNYSFTGSDNRYRQGNRSQRQYLNMQNGANFGPWRLRNYSTWTRNDQTSSWNTISSYLQRDIKALKSQLLLGESATSGSIFSSYTFTGVQLASDDNMLPNSQRGFAPTVRGIANSSAIVTIRQNGYVIYQSNVPAGAFEINDLYPSSNSGDLEVTIEESDGTQRRFIQPYSSLPMMQRPGHLKYSATAGRYRADANSDSKEPEFAEATAIYGLNNTFTLYSGLLGSEDYYALGIGIGGTLGRLAP

SEQ ID NO: 7315 - protein, 878 aa, Escherichia coli
MSYLNLRLYQRNTQCLHIRKHRLAGFFVRLFVACAFAAQAPLSSAELYFNPRFLADDPQAVADLSRFENGQELPPGTYRVDIYLNNGYMATRDVTFNTGDSEQGIVPCLTRAQLASMGLNTASVSGMNLLADDACVPLTSMIHDATAHLDVGQQRLNLTIPQAFMSNRARGYIPPELWDPGINAGLLNYNFSGNSVQNRIGGNSHYAYLNLQSGLNIGAWRLRDNTTWSYNSSDSSSGSKNKWQHINTWLERDIIPLRSRLTLGDGYTQGDIFDGINFRGAQLASDDNMLPDSQRGFAPVIHGIARGTAQVTIKQNGYDIYNSTVPPGPFTINDIYAAGNSGDLQVTIKEADGSTQIFTVPYSSVPLLQREGHTRYSITAGEYRSGNAQQEKPRFFQSTLLHGLPAGWTIYGGTQLADRYRAFNFGIGKNMGALGALSVDMTQANSTLPDDSQHDGQSVRFLYNKSLNESGTNIQLVGYRYSTSGYFNFADTTYSRMNGYNIETQDGVIQVKPKFTDYYNLAYNKRGKLQLTVTQQLGRTLTLYLSGSHQTYWGTSNVDEQFQAGLNTAFEDINWTLSYSLTKNAWQKGRDQMLALNVNIPFSHWLRSDSKSQWRHASASYSMSHDLNGRMTNLVGVYGTLLEDNNLSYSVQTGYAGGGDGNSGSTGYATLNYRGGYGNANIGYSHSDDIKQLYYGVSGGVLAHANGVTLGQPLNDTVVLVKAPGAKDAKVENQTGVRTDWRGYAVLPYATEYRENRVALDTNTLADNVDLDNAVANVVPTRGAIVRAEFKARVGIKLLMTLTHNNKPLPFGAMVTSESSQSSGIVADNGQVYLSGMPLAGKVQVKWGEEENAHCVANYQLPPESQQQLLTQLSAECR

SEQ ID NO: 7316 - protein, 237 aa, Escherichia coli; identical to SEQ ID NO: 1814

SEQ ID NO: 7317 - protein, 840 aa, Escherichia coli
MNKSVVSISAAILVLLCQPVMGKEISPATPSDEDNYTFDPQLFRGSRFSQSSLAKLTTRESVAPGNYKMDIYTNNKLSGSWNVTFKEAADGRVLPCLTPEVADAIGLKTGEDKGEKDPVCTFAQELAPGITSQTQLSQLRLDLSVPQSQMISRPRGYVPPSELDTGASLAFMNYIANYYNVAYSGQNAHSQRSLWASFNGGINLGAWQYRQLSNMTWDNDKGNQWNNIRSYLQRPLPAINSQLMMGQLITSGRFFSGLSYHGVSLATDERMLPDSMRGYAPTIRGVAATNARVSVMQNGHEIYQTTVAPGPFEINDLYPTSYSGDLDVTVTEANGAVSRFSVPFSAVPESMRPGTSRYNVEVGKTQDSGDDSMFGDLTWQHGMTNTLTFNSGSRIADGYQALMLGGVYGSSLGAFGANLTWSHARVPESEAQSGWMSQLTWSKTFQPTSTTVSLAGYRYSTSGYRDLADVLGERHAASNKQSWDSSQWRQQSRFDLTLSQSLANYGNLFVSGSTQNYRGGKSRDTQLQLGYSNSFSHGISMNLSVGRQRMGGYKDNSDDMQTVTSLSFSFPLGGNGPRVPSLSNSWTHSTDGSSQLQSSLTGMLDEAQTTNYSLNVMRDQQYKQTTLSGNMQKRFSQTTVGLNASKGQDYWQASGNVQGAMAVHGGGITFGPYLGETFALVEAKGAEGAKVYNSSQLEINDSGYALVPAVTPYRYNRISLDPQGMDGDAELVDSERQVAPVAGAAVKVIFRTRPGKALLIKSRMADGSELPMGADVLDENNTVVGIAGQGGQIYLRTEQTKGHLSVRWGEGANDSCQLPFDISGKDSNSPIIRLNETCQS

SEQ ID NO: 7318 - protein, 878 aa, Escherichia coli
MSYLNLRLYQRNTQCLHIRKHRLAGFFVRLVVACAFAAQAPLSSAELYFNPRFLADDPQAVADLSRFENGQELPPGTYRVDIYLNNGYMATRDVTFNTGDSEQGIVPCLTRAQLASMGLNTASVAGMNLLADDACVPLTTMVQDATAHLDVGQQRLNLTIPQAFMSNRARGYIPPELWDPGINAGLLNYNFSGNSVQNRIGGNSHYAYLNLQSGLNIGAWRLRDNTTWSYNSSDRSSGSKNKWQHINTWLERDIIPLRSRLTLGDGYTQGDIFDGINFRGAQLASDDNMLPDSQRGFAPVIHGIARGTAQVTIKQNGYDIYNSTVPPGPFTINDIYAAGNSGDLQVTIKEADGSTQIFTVPYSSVPLLQREGHTRYSITAGEYRSGNAQQEKPRFFQSTLLHGLPAGWTIYGGTQLADRYRAFNFGIGKNMGALGALSVDMTQANSTLPDDSQHDGQSVRFLYNKSLNESGTNIQLVGYRYSTSGYFNFADTTYSRMNGYNIETQDGVIQVKPKFTDYYNLAYNKRGKLQLTVTQQLGRTSTLYLSGSHQTYWGTSNVDEQFQAGLNTAFEDINWTLSYSLTKNAWQKGRDQMLALNVNIPFSHWLRSDSKSQWRHASASYSMSHDLNGRMTNLAGVYGTLLEDNNLSYSVQTGYAGGGDGNSGSTGYATLNYRGGYGNANIGYSHSDDIKQLYYGVSGGVLAHANGVTLGQPLNDTVVLVKAPGAKDAKVENQTGVRTDWRGYAVLPYATEYRENRVALDTNTLADNVDLDNAVANVVPTRGAIVRAEFKARVGIKLLMTLTHNNKPLPFGAMVTSESSQSSGIVADNGQVYLSGMPLAGKVQVKWGEEENAHCVANYQLPPESQQQLLTQLSAECR

SEQ ID NO: 7319 - protein, 826 aa, Escherichia coli; identical to SEQ ID NO: 6475

SEQ ID NO: 7320 - protein, 765 aa, Escherichia coli
MQFHINSPDINNEKAVLLARDETLGNCLNLTEIIPQTSVRYDVNEQRLDIDVPQAWVMKNYQNYVDPSLWENGINAAMLSYNLNGYHSETPGRRNDSIYAAFNGGMNLGAWRLRASGNYNWMTDSGSNYDFKNRYIQRDIASLRSQLILGESYTTGETFDSVSIRGIRLYSDSRMLPPTLASFAPIIHGVANTNAKVTITQGGYKIYETTVPPGAFVIDDLSPSGYGSDLIVTVEESDGSKRTFSQPFSSVVQMLRPGVGRWDISGGQVLKDDIQDEPNLFQASYYYGLNNYLTGYTGIQITDNNYTAGLLGLGLNTSVGAFSFDVTHSNVRIPDDKTYQGQSYRVSWNKLFEETSTSLNIAAYRYSTQNYLGLNDALTLIDEVKHPEQDLEPKSMRNYSRMKNQVTVSINQPLKFEKKDYGSFYLSGSWSDYWASGQNRSNYSIGYSNSASWGSYSVSAQRSWNEDGDTDDSVYLSFTIPIEKLLGTEQRTSGFQSIDTQMSSDFKGNNQLNVSSSGYSDNARLSYSVNTGYTMNKASKDLSYVGGYASYESPWGTLAGSVSANSDNSRQVSLSTDGGFVLHSGGLTFSNDSFSDSDTLAVVQAPGAQGARINYGNSTIDRWGYGVTSALSPYHENRIALDINDLENDVELKSTSAVAVPRQGSVVFADFETVQGQSAIMNITRSDGKNIPFAADIYDEQGNVIGNVGQGGQAFVRGIEQQGNISIKWLEESKPVSCLAHYQQSSEAEKIAQSIILNGIRCQIE

SEQ ID NO: 7321 - protein, 869 aa, Escherichia coli
MKIPTTTDIPQRYTWCLAGICYSSLAILPSFLSYAESYFNPAFLLENGTSVADLSRFERGNHQPAGVYRVDLWRNDEFIGSQDIVFESTTENTGDKSGGLMPCFNQVLLERIGLNSSAFPELAQQQNNKCINLLKAVPDATINFDFAAMRLNITIPQVALLSSAHGYIPPEEWDEGIPALLLNYNFTGNRGNGNDSYFFSELSGINIGPWRLRNNGSWNYFRGNGYHSEQWNNIGTWVQRAIIPLKSELVMGDGNTGSDIFDGVGFRGVRLYSSDNMYPDSQQGFAPTVRGIARTAAQLTIRQNGFIIYQSYVSPGAFEITDLHPTSSNGDLDVTIDERDGNQQNYTIPYSTVPILQREGRFKFDLTAGDFRSGNSQQSSPFFFQGTALGGLPQEFTAYGGTQLSANYTAFLLGLGRNLGNWGAVSLDVTHARSQLADDSRHEGDSIRFLYAKSMNTFGTNFQLMGYRYSTQGFYTLDDVAYRRMEGYEYDYDYDGEHRDEPIIVNYHNLRFSRKDRLQLNISQSLNDFGSLYISGTHQKYWNTSDSDTWYQVGYTSSWVGISYSLSFSWNESVGIPDNERIVGLNVSVPFNVLTKRRYTRENALDRAYASFNANRNSNGQNSWLAGVGGTLLEGHNLSYHVSQGDTSNNGYTGSATANWQAAYGTLGVGYNYDRDQHDVNWQLSGGVVGHENGITLSQPLGDTNVLIKAPGAGGVRIENQTGILTDWRGYAVMPYATVYRYNRIALDTNTMGNSIDVEKNISSVVPTQGALVRANFDTRIGVRALITVTQGGKPVPFGSLVRENSTGITSMVGDDGQVYLSGAPLSGELLVQWGDGANSRCIAHYVLPKQSLQQAVTVISAVCTHPGS

SEQ ID NO: 7322 - protein, 233 aa, Escherichia coli
MNIFAYLLVLVFSMSMSSSAFASVVMTGTRIIFPGDAKEKTIQLRNTSDQPYIINIHVEDERGSDKNVPFMPTPQTFRMEAAAGQALRLLYTGDNLPQDRESVFWFSFSQLPYLNKNDKSQNQLILALTNRVKIFYRPSSIVGKSSDAPKNLTYQVKQNRIEVTNPTGYYVVIRAAELLNNGKKVPLANSVMIAPQSTIEWTLRTGISVAPGAQIHLVTVNDYGVNVTSEHAL

SEQ ID NO: 7323 - protein, 200 aa, Escherichia coli; identical to SEQ ID NO: 1801

SEQ ID NO: 7324 - protein, 227 aa, Escherichia coli
MRIITALLMSFFILPVHAGVVIYGTRIIYPEKNREVLVQLMNQSKNTSLIQAWIDDGNTTIAPEKIQVPFILTPPVSRVAGGSGQQLKIRKMPNNLPHNKESLFYLNVLDIPPNNPQNAGKNKIKLALQNRIKLLWRPSGIAPVDKKSLSQLNIKKKNNAISINNETANWITVTTIKAQNVKVNNESILLPPFSNNDITLKNNHASEYELTVVDDYGNNIHSKIAAR

SEQ ID NO: 7325 - protein, 784 aa, Escherichia coli; identical to SEQ ID NO: 2244

SEQ ID NO: 7326 - protein, 230 aa, Escherichia coli; identical to SEQ ID NO: 2580

SEQ ID NO: 7327 - protein, 362 aa, Escherichia coli; identical to SEQ ID NO: 2998

SEQ ID NO: 7328 - protein, 224 aa, Escherichia coli; identical to SEQ ID NO: 3165

SEQ ID NO: 7329 - protein, 660 aa, Escherichia coli
MSRPQFTSLRLSLLALAVSATLPTFAFATETMTVTATGNARSSFEAPMMVSVIDTSAPENQTATSATDLLRHVPGITLDGTGRTNGQDVNMRGYDHRGVLVLIDGVRQGTDTGHLNGTFLDPALIKRVEIVRGPSALLYGSGALGGVISYDTVDAKDLLQEGQSSGFRVFGTGGTGDHSLGLGASAFGRTENLDGIVAWSSRDRGDLRQSNGETAPNDESINNMLAKGTWQIDSAQSLSGLVRYYNNDAREPKNPQTVEASESSNPMVDRSTIQRDAQLSYKLAPQGNDWLNADAKIYWSEVRINAQNTGSSGEYREQITKGARLENRSTLFADSFASHLLTYGGEYYRQEQHPGGVTTGFPQAKIDFSSGWLQDEITLRDLPITLLGGTRYDSYRGSSDGYKDVDADKWSSRAGMTINPTNWLMLFGSYAQAFRAPTMGEMYNDSKHFSIGRFYTNYWVPNPNLRPETNETQEYGFGLRFDDLMLSNDALEFKASYFDTKAKDYISTTVDFAAATTMSYNVPNAKIWGWDVMTKYTTDLFSLDVAYNRTRGKDTDTGEYISSINPDTVTSTLNIPIAHSGFSVGWVGTFADRSTHISSSYSKQPGYGVNDFYVSYQGQQALKGMTTTLVLGNAFDKEYWSPQGIPQDGRNGKIFVSYQW

SEQ ID NO: 7330 - protein, 747 aa, Escherichia coli; identical to SEQ ID NO: 2954

SEQ ID NO: 7331 - protein, 243 aa, Escherichia coli; identical to SEQ ID NO: 4409

SEQ ID NO: 7332 - protein, 274 aa, Escherichia coli; identical to SEQ ID NO: 5190

SEQ ID NO: 7333 - protein, 565 aa, Escherichia coli; identical to SEQ ID NO: 5228

SEQ ID NO: 7334 - protein, 241 aa, Escherichia coli; identical to SEQ ID NO: 2922

SEQ ID NO: 7335 - protein, 351 aa, Escherichia coli
MKKSTLALVVMGIVASASVQAAEIYNKDGNKLDVYGKVKAMHYMSDNDSKDGDQSYIRFGFKGETQINDQLTGYGRWEAEFAGNKAESDTAQQKTRLAFAGLKYKDLGSFDYGRNLGALYDVEAWTDMFPEFGGDSSAQTDNFMTKRASGLATYRNTDFFGVIDGLNLTLQYQGKNENRDVKKQNGDGFGTSLTYDFGGSDFAISGAYTNSDRTNEQNLQSRGTGKRAEAWATGLKYDANNIYLATFYSETHKMTPITGGFANKTQNFEAVAQYQFDFGLRPSLGYVLSKGKDIEGIGDEDLVNYIDVGATYYFNKNMSAFVDYKINQLDSDNKLNINNDDIVAVGMTYQF

SEQ ID NO: 7336 - protein, 366 aa, Escherichia coli
MKLKIVAVVVTGLLAANVAHAAEVYNKDGNKLDLYGKVTALRYFTDDKRDDGDKTYARLGFKGETQINDQMIGFGHWEYDFKGYNDEANGSRGNKTRLAYAGLKISEFGSLDYGRNYGVGYDIGSWTDMLPEFGGDTWSQKDVFMTYRTTGVATYRNYDFFGLIEGLNFAAQYQGKNERTDNSHLYGADYTRANGDGFGISSTYVYDGFGIGAVYTKSDRTNAQERAAANPLNASGKNAELWATGVKYDANNIYFAANYAETLNMTTYGDGYISNKAQSFEVVAQYQFDFGLRPSLAYLKSKGRDLGRYGDQDMIEYIDVGATYFFNKNMSTYVDYKINLIDESDFTRAVDIRTDNIVATGITYQF

SEQ ID NO: 7337 - protein, 263 aa, Escherichia coli
MSKRNAVTTFFTNRVTKALGMTLALMMTCQSAMASLAADQTRYIFRGDKDALTITVTNNDKERTFGGQAWVDNIVEKDTRPTFVVTPSFFKVKPNGQQTLRIIMASDHLPKDKESVYWLNLQDIPPALEGSGIAVALRTKLKLFYRPKALLEGRKGAEEGISLQSRPDGRTMLVNTTPYIFAIGSLLDGNGKKIATDNETAQKLLMFMPGDEVQVKGNVVKVDSLNDWGSLQTWTINQKKAAAPSGQKASDSPVNPSDKADKK

SEQ ID NO: 7338 - protein, 432 aa, Escherichia coli; identical to SEQ ID NO: 2026

SEQ ID NO: 7339 - protein, 713 aa, Escherichia coli
MAKFTPSFSRIKGRALFSLLFAAPMIHATDTATTKDGETITVTADANTATEATDGYQPLSTSTATLTDMPMLDIPQVVNTVSDQVLENQNATTLDEALYNVSNVVQTNTLGGTQDAFVRRGFGANRDGSIMTNGLRTVLPRSFNAATERVEVLKGPASTLYGILDPGGLINVVTKRPEKTFHGSVSATSSSFGGGTGQLDITGPIEGTQLAYRLTGEVQDEDYWRNFGKERSTFIAPSLTWFGDNATVTMLYSHRDYKTPFDRGTIFDLTTKQPVNVDRKIRFDEPFNITDGQSDLAQLNAEYHLNSQWTARFDYSYSQDKYSDNQARVTAYDATTGTLTRRVDATQGSTQRMHSTRADLQGNVDIAGFYNEILGGVSYEYYDLLRTDMIRCKNAKDFNIYNPVYGNTSKCTTVSASDSDQTIKQESYSAYAQDALYLTDNWIAVAGIRYQYYTQYAGKGRPFNVNTDSRDEQWTPKLGLVYKLTPSVSLFANYSQTFMPQSSIASYIGDLPPESSNAYEVGAKFELFDGITADIALFDIHKRNVLYTESIGDETIAKTAGRVRSRGVEVDLAGALTENINIIASYGYTDAKVLEDPDYAGKPLPNVPRHTGSLFLTYDIHNMPGNNTLTFGGGGHGVSRRSATNGADYYLPGYFVADAFAAYKMKLQYPVTLQLNVKNLFDKTYYTSSIATNNLGNQIGDPREVQFTVKMEF

SEQ ID NO: 7340 - protein, 446 aa, Escherichia coli; identical to SEQ ID NO: 5236

SEQ ID NO: 7341 - protein, 551 aa, Escherichia coli; identical to SEQ ID NO: 2446

SEQ ID NO: 7342 - protein, 567 aa, Escherichia coli; identical to SEQ ID NO: 5264

SEQ ID NO: 7343 - protein, 828 aa, Escherichia coli; identical to SEQ ID NO: 2381

SEQ ID NO: 7344 - protein, 332 aa, Escherichia coli
MMKKTVVIGLAVVVLAAVVAGGYWWYQSRQDNGLTLYGNVDIRTVNLSFRVGGRVESLAVDEGDAIKAGQVLGELDHKPYEIALMQAKAGVSVAQAQYDLMLAGYRDEEIAQAAAAVKQAQAAYDYAQNFYNRQQGLWKSRTISANDLENARSSRDQAQATLKSAQDKLRQYRSGNREQDIAQAKASLEQAQAQLAQAELNLQDSTLIAPSDGTLLTRAVEPGTVLNEGGTVFTVSLTRPVWVRAYVDERNLDQAQPGRKVLLYTDGRPDKPYHGQIGFVSPTAEFTPKTVETPDLRTDLVYRLRIVVTDADDALRQGMPVTVQFGDEAGHE

SEQ ID NO: 7345 - protein, 208 aa, Escherichia coli; identical to SEQ ID NO: 1949

SEQ ID NO: 7346 - protein, 230 aa, Escherichia coli; identical to SEQ ID NO: 3348

SEQ ID NO: 7347 - protein, 703 aa, Escherichia coli; identical to SEQ ID NO: 6514

SEQ ID NO: 7348 - protein, 351 aa, Escherichia coli; identical to SEQ ID NO: 2872

SEQ ID NO: 7349 - protein, 614 aa, Escherichia coli; identical to SEQ ID NO: 1884

SEQ ID NO: 7350 - protein, 446 aa, Escherichia coli; identical to SEQ ID NO: 2176

SEQ ID NO: 7351 - protein, 237 aa, Escherichia coli; identical to SEQ ID NO: 6498

SEQ ID NO: 7352 - protein, 569 aa, Escherichia coli
MSDPVIHGRLAYAGERLASLVSAASEHVQKDNRFLHAADKALKALLDTPLTVKKNDGTADNDPMFVPLRAPAVEIQETLNAEGRLTLLLGRLATLMGDNSVSQLASRLENRLAVIASQQQQREQLSGAFQTASEEAQSAMDVYKTALDSLTAAQAAYHDCAGKLERAEAKLDGLAPGAPDYVSLKQEIDTLRNELSSLRRNQEKALNAAEVAHNSARQKTEKLDGIASQIQGVFLTGGRAERHQTDNLNSIARFTMLLSIFIELVGKNNEESLKNDMALFRTLQESRQEEMLRKSEEYQEETRKAEVLNRTMGCVGKVVGALLTVASVVAAAFTGGAALGLAAASLALILTDGIVKAATGISFIQEALNPVIQHVLKPLMDIIGKAVAEILKGFGVDKASAEMVGNILGAILAAVTSVVVIVGVAILGKGAVSKLGHVLKKMMDEAVKKLLPDVLKHVMRNGNQILSHGIQRLAGVSGSRAVLLNKTVLGVSGAGATAAEGVFLKKASDAFADFTLSRFSSEQLRQWLKQAVDIFKDNNKMALELQKTLSSVIRQHSDTSRFVLRQIRA

SEQ ID NO: 7353 - protein, 566 aa, Escherichia coli
MKPSNIIVIFIILLFGISPFSIATGSETLFDNGYVARNDSLNSFFEAMSTKLNKTVVVSKSASRKKINGNFNFRDPEALLDRLASQLGVIWYSDGQTIYIYDAEEIRNSVISLQNISLSAFKSFLKEAGLYDSRYPLKGDEQNGIVYISGPPIFVSIVTKTAALIDKQNNDIEMGRLKIGVFRLHNTFVNDRTYQLRDQNIVIPGIATVIEKLLAGEQQNLTEVQGRMFRASGSNIASEALSGNSSTDNEMYIDEARDSTTSSSTPISDIKVISYPDTNSLLVKGTAEQVDFIGALVRLLDVAKRHVELSLWIIDLNKNDLEQLGVAWGGSTSFSNKLDIALNQTLVSTLDGVHFLASVYALEKKNQARIVSKPVLMTQENVPAIFDNNRTFYTKLIGERNSSLAHVTYGTMISVLPRFSADGEIEMSLNIEDGNEEKQSVSGNEDSVLPEVGRTHISTVARVPQGKSLLIGGYTRDSRTKDVQKIPLLGDIPLIGGLFRYENQNQNNVVRVFLIQPKEILDPLMPDADVFAAELMQDSGIENNRDPLDKWVLSYLNRGQALNHGK

SEQ ID NO: 7354 - protein, 200 aa, Escherichia coli; identical to SEQ ID NO: 1784

SEQ ID NO: 7355 - protein, 746 aa, Escherichia coli; identical to SEQ ID NO: 4389

SEQ ID NO: 7356 - protein, 193 aa, Escherichia coli; identical to SEQ ID NO: 2246

SEQ ID NO: 7357 - protein, 216 aa, Escherichia coli; identical to SEQ ID NO: 3112

SEQ ID NO: 7358 - protein, 760 aa, Escherichia coli; identical to SEQ ID NO: 6506

SEQ ID NO: 7359 - protein, 224 aa, Escherichia coli; identical to SEQ ID NO: 3165

SEQ ID NO: 7360 - protein, 432 aa, Escherichia coli; identical to SEQ ID NO: 2026

SEQ ID NO: 7361 - protein, 232 aa, Escherichia coli; identical to SEQ ID NO: 2087

SEQ ID NO: 7362 - protein, 213 aa, Escherichia coli; identical to SEQ ID NO: 2232

SEQ ID NO: 7363 - protein, 360 aa, Escherichia coli; identical to SEQ ID NO: 3062

SEQ ID NO: 7364 - protein, 359 aa, Escherichia coli; identical to SEQ ID NO: 2329

SEQ ID NO: 7365 - protein, 231 aa, Escherichia coli
MSSIAWGAIIPDRTRIIMNESDKGEALKLTNQSKNLPYLAQTWIEDTKGNKSRDFIVTVPPMVRLNPSEQIQIRMISQEKIAQLPNDRETLFYFNVREIPPKTDKKNVMQVTMQHALKLFWRPKAIELEDDGVMSYEKVEIIRRNDGSIRFNNKMPYHVTLGYIGTNGITMLPQTQSLMVTPYSHADTQFKNVPSAFQVGYINDFGGLSFYEINCPTVNNSCNVSVAKRDK

SEQ ID NO: 7366 - protein, 539 aa, Escherichia coli; identical to SEQ ID NO: 3050

SEQ ID NO: 7367 - protein, 1024 aa, Escherichia coli
MTTITTAQIKSTLQSAKQSAANKLHSAGQSTKDALKKAAEQTRNAGNRLILLIPKDYKGQGSSLNDLVRTADELGIEVQYDEKNGTAITKQVFGTAEKLIGLTERGVTIFAPQLDKLLQKYQKAGNILGGGAENIGDNLGKAGGILSTFQNFLGTALSSMKIDELIKKQKSGGNVSSSEMAEASIELINQLVDTVASLNNNVNSFSQQLNTLGSVLSNTKHLNGVGNKLQNLPNLDNIGAGLDTVSGILSAISASFILSNADADTRTKAAAGVELTTKVLGNVGKGISQYIIAQRAAQGLSTSAAAAGLIASAVTLAISPLSFLSIADKFKRANKIEEYSQRFKKLGYDGDSLLAAFHKETGAIDASLTTISTVLASVSSGISAAATTSLVGAPVSALVGAVTGIISGILEASKQAMFEHVASKMADVIAEWEKKHGKNYFENGYDARHAAFLEDNFKILSQYNKEYSVERSVLITQQHWDTLIGELAGVTRNGDKTLSGKSYIDYYEEGKRLEKKPDEFQKQVFDPLKGNIDLSDSKSSTLLKFVTPLLTPGEEIRERRQSGKYEYITELLVKGVDKWTVKGVQDKGAVYDYSNLIQHASVGNNQYREIRIESHLGDGDDKVFLSAGSANIYAGKGHDVVYYDKTDTGYLTIDGTKATEAGNYTVTRVLGGDVKVLQEVVKEQEVSVGKRTEKTQYRSYEFTHINGKNLTETDNLYSVEELIGTTRADKFFGSKFTDIFHGADGDDLIEGNDGNDRLYGDKGNDTLSGGNGDDQLYGGDGNDKLIGGAGNNYLNGGDGDDELQVQGNSLAKNVLFGGKGNDKLYGSEGADLLDGGEGDDLLKGGYGNDIYRYLSGYGHHIIDDDGGKEDKLSLADIDFRDVAFKREGNDLIMYKAEGNVLSIGHKNGITFRNWFEKESGDISNHQIEQIFDKSGRIITPDSLKKALEYQQRNNKASYVYGNDALAYGSQGDLNPLINEISKIISAAGSFDVKEERTAASLLQLSGNASDFSYGRNSITLTTSA

SEQ ID NO: 7368 - protein, 236 aa, Escherichia coli; identical to SEQ ID NO: 3286

SEQ ID NO: 7369 - protein, 203 aa, Escherichia coli; identical to SEQ ID NO: 2009

SEQ ID NO: 7370 - protein, 565 aa, Escherichia coli; identical to SEQ ID NO: 6494

SEQ ID NO: 7371 - protein, 224 aa, Escherichia coli
MIITLLCSFCIGQALAGGIVLQRTRVIYDASRKEAALPVANKGAETPYLLQSWVDNIDGTSRAPFIITPPLFRLEAGDDSSLRIIKTADNLPENKESLFYINVRAIPAKKKSDNVNANELTLVFKTRIKMFYRPAHLKGRVNDAWKSLEFKRSDHSLNIYNPTEYYVVFAGLAVDKTDLTSKIEYIAPGEHKQLPLPASGGKNVKWAAINDYGGSSGTETRPLQ

SEQ ID NO: 7372 - protein, 222 aa, Escherichia coli
MLIIFYLIISASAHAAGGIALGATRIIYPADAKQTAVWIRNSHTNERFLVNSWIENSSGVKEKSFIITPPLFVSEPKSENTLRIIYTGPPLAADRESLFWMNVKTIPSVDKNALNGRNVLQLAILSRMKLFLRPIQLQELPAEAPDTLKFSRSGNYINVHNPSPFYVTLVNLQVGSQKLGNAMAAPRVSSQIPLPSGVQGKLKFQTVNDYGSVTPVREVNLN

SEQ ID NO: 7373 - protein, 118 aa, Escherichia coli [sequence omitted]

SEQ ID NO: 7374 - protein, 686 aa, Escherichia coli; identical to SEQ ID NO: 3129

SEQ ID NO: 7375 - protein, 729 aa, Escherichia coli; identical to SEQ ID NO: 2948

SEQ ID NO: 7376 - protein, 193 aa, Escherichia coli; identical to SEQ ID NO: 2246

SEQ ID NO: 7377 - protein, 306 aa, Escherichia coli
MNSIPLSEFSGVRGSGHARLYIKASDSGPQTVVSEKLGSRILTRLGKLPLLRNTESVQKRRNAAAREDYYTRRTFKESLKQVYGDSFSQQAMQDIAGKPLTRRMVRQIIHNAEKVKAGGDKKEQKLSLSDKASEFTKISYDTSLNQLGLFAQKVKMITGSELKNIETLATGNGCLRSLMTAAHGVAQFSGNADITKAVETLLDIRVGNIPFSQFGTYTTTEGSSVQWIQNASQDDLEKAAEVIRRVAGDLELLFQNIKNGQNNKVSSTLSETIKPNNTGERGQTNVTTETARHWGRVVNEFRAIRR

SEQ ID NO: 7378 - protein, 232 aa, Escherichia coli; identical to SEQ ID NO: 2087

SEQ ID NO: 7379 - protein, 700 aa, Escherichia coli; identical to SEQ ID NO: 5975

SEQ ID NO: 7380 - protein, 331 aa, Escherichia coli; identical to SEQ ID NO: 6460

SEQ ID NO: 7381 - protein, 258 aa, Escherichia coli; identical to SEQ ID NO: 2060

SEQ ID NO: 7382 - protein, 102 aa, Escherichia coli; identical to SEQ ID NO: 1824

SEQ ID NO: 7383 - protein, 518 aa, Escherichia coli; identical to SEQ ID NO: 2349

SEQ ID NO: 7384 - protein, 650 aa, Escherichia coli
MSAISCAWPVLAVDDDGETMVVTASSVEQNLKDAPASISVITQEDLQRKPVQNLKDVLKEVPGVQLTNEGDNRKGVSIRGLDSSYTLILVDGKRVNSRNAVFRHNDFDLNWIPVDSIERIEVVRGPMSSLYGSDALGGVVNIITKKIGQKWSGTVTVDTTIQEHRDRGDTYNGQFFTSGPLIDGVLGMKAYGSLAKREKDDPQNSTTTDTGETPRIEGFSSRDGNVEFAWTPNQNHDFTAGYGFDRQDRDSDSLDKNRLERQNYSVSHNGRWDYGTSELKYYGEKVENKNPGNSSPITSESNTVDGKYTLPLTAINQFLTVGGEWRHDKLSDAVNLTGGTSSKTSASQYALFVEDEWRIFEPLALTTGVRMDDHETYGEHWSPRAYLVYNATDTVTVKGGWATAFKAPSLLQLSPDWTSNSCRGACKIVGSPDLKPETSESWELGLYYMGEEGWLEGVESSVTVFRNDVKDRISISRTSDVNAAPGYQNFVGFETGANGRRIPVFSYYNVNKARIQGVETELKIPFNDEWKLSFNYTYNDGRDVSNGENKPLSDLPFHTANGTLDWKPLALEDWSFYVSGHYTGQKRADSATAKTPGGYTIWNTGAAWQVTKDVKLRAGVLNLGDKDLSRDDYSYNEDGRRYFMAVDYRF

SEQ ID NO: 7385 - protein, 365 aa, Escherichia coli; identical to SEQ ID NO: 3878

SEQ ID NO: 7386 - protein, 656 aa, Escherichia coli
MRLKKHYLCTALSLAFTQQAVAAQESDSLTVWSSPVSSTTTTVLDQPTMKALDKQNVAQALSVVPGVVLQKSGSRNEEQVKVRGFDSRQVPVYFDGVPIYVPYDGNLDLARILTNNLGAVEVSKGYSSLLQGPNQMGGAINITTQKPTKPLEASLGYRQGWSRSQDNAYDMHASFAASSDLGYLQVSGSQLKQDFLGLPHGVNNDIAGNHGKMINSSADDKRGIVKLGFTPRENDEYTLTYIKQDGEKDNPPYSGNSGQKSRYWQWPEYDKESFYYQGTTQLNDRFTLKSRLYRDTFENTLMMYNSLADLKNKKGSYSHYSDYSDGAGLQLAADVRENDLLSFAVNWKDDVHREKGAPHAAYDRYEDRTRSLASEYQWAAADNVDVVAGISYDWRDSVEAKKHEKDGSITHYDDNNQSAFNWQVMGKYHFVNEDTLALSYYDRTRFPTLKERYTTSKPAYNQIAIVNPQLKPERARGVDLTWNGAFTRDWGFEVSVYYNRVSDAILSHNIDADTIQNQNSGTVDYSGLDAGIKGKISNILDVGLSYALIHADAKRKDIGKITDLPTQTMTAWMTLKPWEPLSVTLSEEARSSSYSNSDGSQKAAGFAVTHIRADYTLGHGFSVNASVNNLFDTQYAYSEGFIEEGRNFWAGVEYTF

SEQ ID NO: 7387 - protein, 203 aa, Escherichia coli; identical to SEQ ID NO: 2201

SEQ ID NO: 7388 - protein, 236 aa, Escherichia coli; identical to SEQ ID NO: 2726

SEQ ID NO: 7389 - protein, 729 aa, Escherichia coli; identical to SEQ ID NO: 6527

SEQ ID NO: 7390 - protein, 45 aa, Escherichia coli; identical to SEQ ID NO: 6471

SEQ ID NO: 7391 - protein, 130 aa, Escherichia coli
MPDDRESVFWLNIKNIPPSASNKATNSLEIAVKTRIKLFWRPANIRLIPEDAAPKVKWRREGRNLIAENPNPIHISVMDVIVDGHDVPLNMIRPFETLTLPLPANSAGGQMTWRFINDYGAVSDPIKMTL

SEQ ID NO: 7392 - protein, 412 aa, Escherichia coli
MKQWIAALLLMLIPSVQAAKPQKVTLMVDDVPVAQVLQALAEQEKLNLVVSPDVSGTVSLHLTDVPWKQALQTVVKSAGLITRQEGNILSVHSIAWQNDNIARQEAEQARAQANLPLENRNITLQYADAGELAKAGEKLLSAKGSMTVDKRTNRLLLRDNKTALSALEKWVAQMDLPVGQVELSAHIVTINEKSLRELGVKWTLADAQQAGGVGQVTTLGSDLSVATATTHVGFNIGRINGRLLDLELSALEQKQQLDIIASPRLLASHLQPASIKQGSEIPYQVSSGESGATSVEFKEAVLGMEVTPTVLQKGRIRLKLHISQNVPGQVLQQADGEVLAIDKQEIETQVEVKSGETLALGGIFTRKNKSGQDSVPLLGDIPWFGQLFRHDGKEDERRELVVFITPRLVSSE

SEQ ID NO: 7393 - protein, 92 aa, Escherichia coli
MLRLVRAVIPVAVLMMLFPELAMAAGKGDLMAKGNDTVKATFGKDSSIVKWVVLAEVLVGAVMYMMTKNVKFLAGFAIISVFIAVGMAVVGL

SEQ ID NO: 7394 - protein, 123 aa, Escherichia coli
MAEMTVLNNVMATSAKKRKPGLLSRCLSAVNKSTAKALVKYVAAPLALYLVAQGVAQADDLAAAGKQDVQDTFGQDSTMMYYFMIAEVFLVFMLYLRNHNPATFVLIPVFIVVTKVIFSMIGG

SEQ ID NO: 7395 - protein, 760 aa, Escherichia coli
MENNRNFPARQFHSLTFFAGLCIGITPVAQALAAEGQTNADDTLVVEASTPSLYAPQQSADPKFSRPVADTTRTMTVISEQVIKDQGATNLTDALKNVPGVGAFFAGENGNSTTGDAIYMRGADTSNSIYIDGIRDIGSVSRDTFNTEQVEVIKGPSGTDYGRSAPTGSINMISKQPRNDSGIDASASIGSAWFRRGTLDVNQVIGDTTAVRLNVMGEKTHDAGRDKVKNERYGIAPSVAFGLGTANRLYLNYLHVTQHNTPDGGIPTIGLPGYSAPSAGTATLNHSGKVDTHNFYGTDSDYDDSTTDTATMRFEHDINDNTTIRNTTRWSRVKQDYLMTAIMGGASNITQPTSDVNSWTWSRTANTKDVSNKILTNQTNLTSTFYTGSIGHDVSTGVEFTRETQTNYGVNPVTLPAVNIYHPDSSIHPGGLTSNGANANGQTDTFAIYAFDTLQITRDFELNGGIRLDNYHTEYDSATACGGSGRGAITCPAGVAKGSPVTTVDTAKSGNLVNWKAGALYHLTENGNVYINYAVSQQPPGGNNFALAQSGSGNSANRTDFKPQKANTSEIGTKWQVLDKRLLLTAALFRTDIENEVEQNDDGTYSQYGKKRVEGYEISVAGNITPAWQVIGGYTQQKATIKNGKDVAQDGSSSLPYTPEHAFTLWSQYQATDDISVGAGARYIGSMHKGSDGAVGTPAFTEGYWVADAKLGYRVNRNLDFQLNVYNLFDTDYVASINKSGYRYHPGEPRTFLLTANMHF

SEQ ID NO: 7396 - protein, 828 aa, Escherichia coli; identical to SEQ ID NO: 2388

SEQ ID NO: 7397 - protein, 367 aa, Escherichia coli
MKVKVLSLLVPALLVAGAANAAEVYNKDGNKLDLYGKVDGLHYFSDNKDVDGDQTYMRLGFKGETQVTDQLTGYGQWEYQIQGNSAENENNSWTRVAFAGLKFQDVGSFDYGRNYGVVYDVTSWTDVLPEFGGDTYGSDNFMQQRGNGFATYRNTDFFGLVDGLNFAVQYQGTNGSVSGEDQTNNGRGALRQNGDGVGGSITYDYEGFGIGGAISSSKRTWDQNNTGLIGTGDRAETYTGGLKYDANNIYLAAQYTQTYNATRVGSLGWANKAQNFEAVAQYQFDFGLRPSLAYLQSKGKNLGVINGRNYDDEDILKYVDVGATYYFNKNMSTYVDYKINLLDDNQFTRDAGINTDNIVALGLVYQF

SEQ ID NO: 7398 - protein, 170 aa, Escherichia coli [sequence omitted]

SEQ ID NO: 7399 - protein, 243 aa, Escherichia coli; identical to SEQ ID NO: 3483

SEQ ID NO: 7400 - protein, 122 aa, Escherichia coli; identical to SEQ ID NO: 2915

SEQ ID NO: 7401 - protein, 229 aa, Escherichia coli; identical to SEQ ID NO: 5182

SEQ ID NO: 7402 - protein, 191 aa, Escherichia coli; identical to SEQ ID NO: 2727

SEQ ID NO: 7403 - protein, 405 aa, Escherichia coli
MKIIITREYIMKRKVLAMLVPALLVAGAANAAEVYNKDGNKLDLYGKVAGLHYFSDDAGSDGDMSYARIGFKGETQIADQFTGYGQWEYNLQANGTEGDGDNSATRLAFAGLGFGQNGTFDYGRNYGVVYDIEAWTDMLPEFGGDTYAGADNFMNGRTNGVATYRNNGFFGQVDGLNFALQYQGNNEGSGDGFLFGQEGSGSGDGRKLSKENGDGYGMSTSYNFDFGLSFGAAYSNSDRTDEQTKPDFHNTRAGDRNDITAGGETAEAWTVGAKYDANNVYLAAMYAETRNMTGYGDANAIANKTQNFEVVAQYQFDFGLRPSIAYLQSKGKDLGGWAHDGNGDPRYTNKDLVKYVDIGATYYFNKNMSTYVDYKINLLDNDDDFYEANGIATDDIVAVGLVYQF

SEQ ID NO: 7404 - protein, 239 aa, Escherichia coli
MHQMQTTRTPYSISFMATVLLLLLFACHSTVANAAVALGATRVIYPANQKQVLLPVTNNDPASVYLIQSWIENAGDQKDTQFVITPPLFSMQGKKENTLRIINATNHQLPGDRESLFWVNVKAIPAMEKDQKNENTLQLAIISRIKMFYRPTNLAMAPEEAPAMLRFRRSGSKLTLINPTPYFITVTNMKAGSSNLPNTMVPPKGEVSVDIPHAATGDISFQTINDYGALTPRIKATMQ

SEQ ID NO: 7405 - protein, 478 aa, Escherichia coli
MTRIKINARRIFSLLIPFFFFTSVHAEQTAAPAKPVTVEAKNETFAPQHPDQYLSWKATSEQSERVDALEEDPRLVILWAGYPFSRDYNKPRGHAFAVTDVRETLRTGAPKNAEDGPLPMACWSCKSPDVARLIQKDGEDGYFHGKWARGGPEIVNNLGCADCHNTASPEFAKGKPELTLSRPYAARAMEAIGKPFEKAGRFDQQSMVCGQCHVEYYFDGKNKAVKFPWDDGMKVENMEQYYDKIAFSDWTNSLSKTPMLKAQHPEYETWTAGIHGKNNVTCIDCHMPKVQNAEGKLYTDHKIGNPFDNFAQTCANCHTQDKAALQKVVAERKQSINDLKIKVEDQLVHAHFEAKAALDAGATEAEMKPIQDDIRHAQWRWDLAIASHGIHMHAPEEGLRMLGTAMDKAADARTKLARLLATKGITHEIQIPDISTKEKAQQAIGLNMEQIKAEKQDFIKTVIPQWEEQARKNGLLSQ

SEQ ID NO: 7406 - protein, 274 aa, Escherichia coli; identical to SEQ ID NO: 6497

SEQ ID NO: 7407 - protein, 209 aa, Escherichia coli
MAMAGIVVGGTRVIFYGDKPDTTISIFNKETNLPYLLQTWVDPFNKEDKSKPPFSVIPPVSRIEPQQEKILRILKTAGELPKDRESVFWLNVKNIPPSIDKKNTNVLEIAIKTRIKLFWRPAAVKIIPEQAIKNVKWSRQGNNLIVENPNPIHINVMSVTVDDKDVSLNMIHPFETLTLPIPAGVAGKSLVWRFINDYGAISQPLKKNL

SEQ ID NO: 7408 - protein, 162 aa, Escherichia coli; identical to SEQ ID NO: 1965

SEQ ID NO: 7409 - protein, 678 aa, Escherichia coli; identical to SEQ ID NO: 6490

SEQ ID NO: 7410 - protein, 386 aa, Escherichia coli; identical to SEQ ID NO: 6520

SEQ ID NO: 7411 - protein, 517 aa, Escherichia coli; identical to SEQ ID NO: 2462

SEQ ID NO: 7412 - protein, 224 aa, Escherichia coli
MKGLSSLLIFSMVLPAHAGIVIYGTRIIYPAENKEVMVQLMNQGNRSSLLQAWIDDGDTSLPPEKIQVPFMLTPPVAKIGANSGQQVKINIMPNKLPTNKESIFYLNVLDIPPNSPEQEGKNALKFAMQNRIKLFYRPAGIAPVNKATFKKLLVNRSGNGLVIKNDSANWVTISDVKANNVKVNYETIMIAPLESQSVNVKSNNANNWYLTIIDDHGNYISDKI

SEQ ID NO: 7413 - protein, 678 aa, Escherichia coli
MVPSTFSRLKAARCLPVVLAALIFVGCGTHTPDQSTAYMQGTAQADSAFYLQQMQQSSDDTRINWQLLAIRALVKEGKTGQAVELFNQLPQELNDSQRREKTLLAVEIKLAQKDFAGAQNLLAKITPADLEQNQQARYWQAKIDASQGRPSIDLLRALIAQEPLLGAKEKQQNIDAIWQALSSMTQEQANTLVINADENILQGWLDLQRVWFDNRNDPDMMKAGIADWQKRYPNNPGAKMLPTQLVNVKAFKPASTNKIALLLPLNGQAAVFGRTIQQGFEAAKNIGTQPVAAQVAAAPAADVAEQPQPQTVDGVASPAQASVSDLTGEQPAAQPVPVSAPATSTAAVSAPANPSAELKIYDTSSQPLSQILSQVQQDGASIVVGPLLKNNVEELLKSNTPLNVLALNQPENIENRVNICYFALSPEDEARDAARHIRDQGKQAPLVLIPRSSLGDRVANAFAQEWQKLGGGTVLQQKFGSTSELRAGVNGGSGIALTGTPITPRATTDSGMTTNNPTLQTTPTDDQFTNNGGRVDAVYIVATPGEIAFIKPMIAMRNGSQSGATLYASSRSAQGTAGPDFRLEMEGLQYSEIPMLAGGNLPLMQQALSAVNNDYSLARMYAMGVDAWSLANHFSQMRQVQGFEINGNTGSLTANPDCVINRKLSWLQYQQGQVVPAS

SEQ ID NO: 7414 - protein, 191 aa, Escherichia coli; identical to SEQ ID NO: 2727

SEQ ID NO: 7415 - protein, 241 aa, Escherichia coli
MFPLVKKTVSALFVSTLLSSAPAFADIIISGTRIIYNADKKDVNVRLENKGNRPLLIQNWLDTGDDNADPSQIKVPFTATPPVSRVEPKRGQTVKVMYTGATALPKDRESVYWFNVLEVPPKPKDAEADKNLLQLAFRTRIKLFYRPSGLQGEPAEAPAKITWKLNNAQLQANNPTPYYVSFNEVKLESGGKTYNVNSSMVAPFSQASFGVTGLPGSVSSGKVVFKAINDFGGNIDGSATF

SEQ ID NO: 7416 - protein, 430 aa, Escherichia coli; identical to SEQ ID NO: 2617

SEQ ID NO: 7417 - protein, 204 aa, Escherichia coli
MNINLYDHARGTQTGFVRYDDGYVSTSLSLRSAHLAGQSILSGYSTYYIYVIATAPNMFNVNDVLGVYSPHPYEQEVSALGGIPYSQIYGWYRVNFGVIDERLHRNREYRDRYYRNLNIAPAEDGYRLAGFPPDHQAWREEPWIHHAPQGCGNSSRTITGDTCNEETQNLSTIYLREYQSKVKRQIFSDYQSEVDIYNRIRDEL

SEQ ID NO: 7418 - protein, 250 aa, Escherichia coli; identical to SEQ ID NO: 3048

SEQ ID NO: 7419 - protein, 229 aa, Escherichia coli; identical to SEQ ID NO: 5424

SEQ ID NO: 7420 - protein, 367 aa, Escherichia coli; identical to SEQ ID NO: 4285

SEQ ID NO: 7421 - protein, 659 aa, Escherichia coli; identical to SEQ ID NO: 2942

SEQ ID NO: 7422 - protein, 213 aa, Escherichia coli; identical to SEQ ID NO: 2232

SEQ ID NO: 7423 - protein, 430 aa, Escherichia coli; identical to SEQ ID NO: 2617

SEQ ID NO: 7424 - protein, 361 aa, Escherichia coli; identical to SEQ ID NO: 3061

SEQ ID NO: 7425 - protein, 654 aa, Escherichia coli; identical to SEQ ID NO: 6524

SEQ ID NO: 7426 - protein, 686 aa, Escherichia coli
MFWRDITLSVWRKKTTGLKTKKRLLPLVLAAALCSSPVWAEEATFTANFKDTDLKSFIETVGANLNKTIIMGPGVQGKVSIRTMTPLNERQYYQLFLNLLEAQGYAVVPMENDVLKVVKSSAAKVEPLPLVGEGSDNYAGDEMVTKVVPVRNVSVRELAPILRQMIDSAGSGNVVNYDPSNVIMLTGRASVVERLTEVIQRVDHAGNRTEEVIPLDNASASEIARVLESLTKNSGENQPATLKSQIVADERTNSVIVSGDPATRDKMRRLIRRLDSEMERSGNSQVFYLKYSKAEDLVDVLKQVSGTLTAAKEEAEGTVGSGREVVSIAASKHSNALIVTAPQDIMQSLQSVIEQLDIRRAQVHVEALIVEVAEGSNINFGVQWASKDAGLMQFANGTQIPIGTLGAAISQAKPQKGSTVISENGATTINPDTNGDLSTLAQLLSGFSGTAVGVVKGDWMALVQAVKNDSSSNVLSTPSITTLDNQEAFFMVGQDVPVLTGSTVGANNSNPFNTVERKKVGIMLKVTPQINEGNAVQMVIEQEVSKVEGQTSLDVVFGERKLKTTVLANDGELIVLGGLMDDQAGESVAKVPLLGDIPLIGHLFKSTADKKEKRNLMVFIRPTILRDGMAADGVSQRKYNYMRAEQIYRDEQGLSLMPHTAQPVLPAQNQALPPEVRAFLNAGRTR

SEQ ID NO: 7427 - protein, 231 aa, Escherichia coli
MSKRTFAVIITLLCSFCIGQALAGGIVLQRTRVIYDASRKEAALPVANKGAETPYLLQSWVDNIDGTSRAPFIITPPLFRLEAGDDSSLRIIKTADNLPENKESLFYINVRAIPAKKKSDDVNANELTLVFKTRIKMFYRPAHLKGLVNDAWKSLEFKRSDHSLNIYNPTEYYVVFAGLAVDKADLTSKIEYIAPGEHKQLPLPASGGKNVKWAAINDYGGSSGTETRPLQ

SEQ ID NO: 7428 - protein, 203 aa, Escherichia coli; identical to SEQ ID NO: 2009

SEQ ID NO: 7429 - protein, 120 aa, Escherichia coli
MDAVLSVQGASAPVKKKSFFSKFTRLNMLRLVRAVLPAAVLMMFFPQLAMASGSQDLMASGNSTVKATFGKDSSVVKWVVLAEVLVGAVMYMMTKNVKFLAGFAIISVFIAVGMAVVGLK

SEQ ID NO: 7430 - protein, 154 aa, Escherichia coli
MLTPPVAKIGANSGQQVKIKIMPNKLPTNKESIFYLNVLDIPPNSPEQEGKNALKFAMQNRIKLFYRPAGIAPVNKATFKKLLVSRSGNGLVIKNDSANWVTISDVKANNVKVNYETIMIAPLESQSVNVKSNNANNWYLTIIDDHGNYISDKI

SEQ ID NO: 7431 - protein, 746 aa, Escherichia coli
MNKKIHSLALLVNLGIYGVAQAQEPTDTPVSHDDTIVVTAAEQNLQAPGVSTITADEIRKNPVARDVSEIIRTMPGVNLTGNSTSGQRGNNRQIDIRGMGPENTLILIDGKPVSSRNSVRQGWRGERDTRGDTSWVPPEMIERIEVLRGPAAARYGNGAAGGVVNIITKKGSGEWHGSWDAYFNAPEHKEEGATKRTNFSLTGPLGDEFSFRLYGNLDKTQADAWDINQGHQSARAGTYATTLPAGREGVINKDINGVVRWDFAPLQSLELEAGYSRQGNLYAGDTQNTNSDAYTRSKYGDETNRLYRQNYSLTWNGGWDNGVTTSNWVQYEHTRNSRIPEGLAGGTEGKFNEKATQDFVDIDLDDVMLHSEVNLPIDFLVNQTLTLGTEWNQQRMKDLSSNTQALTGTNTGGAIDGVSATDRSPYSKAEIFSLFAENNMELTDSTIVTPGLRFDHHSIVGNNWSPALNISQGLGDDFTLKMGIARAYKAPSLYQTNPNYILYSKGQGCYASAGGCYLQGNDDLKAETSINKEIGLEFKRDGWLAGITWFRNDYRNKIEAGYVAVGQNAVGTDLYQWDNVPKAVVEGLEGSLNVPVSETVMWTNNITYMLKSENKTTGDRLSIIPEYTLNSTLSWQAREDLSMQTTFTWYGKQQPKKYNYKGQPAVGPETKEISPYSIVGLSATWDVTKNVSLTGGVDNLFDKRLWRAGNAQTTGDLAGANYIAGAGAYTYNEPGRTWYMSVNTHF

SEQ ID NO: 7432 - protein, 208 aa, Escherichia coli; identical to SEQ ID NO: 1949

SEQ ID NO: 7433 - protein, 673 aa, Escherichia coli; identical to SEQ ID NO: 2919

SEQ ID NO: 7434 - protein, 518 aa, Escherichia coli; identical to SEQ ID NO: 2349

SEQ ID NO: 7435 - protein, 203 aa, Escherichia coli; identical to SEQ ID NO: 2201

SEQ ID NO: 7436 - protein, 360 aa, Escherichia coli; identical to SEQ ID NO: 3354

SEQ ID NO: 7437 - protein, 614 aa, Escherichia coli
MIKKASLLTACSVTAFSAWAQDTSPDTLVVTANRFEQPRSTVLAPTTVVTRQDIDRWQSTSVNDVLRRLPGVDITQNGGSGQLSSIFIRGTNASHVLVLIDGVRLNLAGVSGSADLSQFPIALVQRVEYIRGPRSAVYGSDAIGGVVNIITTRDEPGTEISAGWGSNSYQNYDVSTQQQLGDKTRVTLLGDYAHTHGYDVVAYGNTGTQAQTDNDGFLSKTLYGALEHNFTDAWSGFVRGYGYDNRTNYDAYYSPGSPLVDTRKLYSQSWDAGLRYNGELIKSQLITSYSHSKDYNYDPHYGRYDSSATLDEMKQYTVQWANNVIVGHGSIGAGVDWQKQTTTPGTGYVEDGYDQRNTGIYLTGLQQVGDFTFEGAARSDDNSQFGRHGTWQTSAGWEFIEGYRFIASYGTSYKAPNLGQLYGFYGNPNLDPEKSKQWEGAFEGLTAGVNWRISGYRNDVSDLIDYDDHTLKYYNEGKARIKGVEATANFDTGPLTHTVSYDYVDARNAITDTPLLRRAKQQVKYQLDWQLYDFDWGITYQYLGTRYDKDYSSYPYQTVKMGGVSLWDLAVAYPVTYHLTVRGKIANLFDKDYETVYGYQTAGREYTLSGSYTF

SEQ ID NO: 7438 - protein, 250 aa, Escherichia coli
MTNLFCSARTAATTLALLITAASLSVQASVTPDRTRLIFNESDKSISVTLRNNDPKMPYLAQSWMEDEQGNKISSPLTVLPPVQRIDAMMNGQVKVQGMPDINKLPADRESVFYFNVREIPPKSNKPNTLQIALQTRIKLFWRPKALENVSMKKPWQHKVTLTRSGQEFTVNNPTPYFVVISNASAQKNGNPAAGFSPMVISPKTSVPLKVKMDSVPVLSYVNDYGARMPLYFKCGGDTCQVDVEQSRKG

SEQ ID NO: 7439 - protein, 784 aa, Escherichia coli; identical to SEQ ID NO: 5933

SEQ ID NO: 7440 - protein, 130 aa, Escherichia coli
MPVDRETLFELSIASVPSGKVENQSVKVAIRSVFKLFWRPEGLPGDPLEAYQQLRWTWNSQGVQLTNPTPYYINLIQVSVNGKALSNAGVVPPKSQRQTSWCQAIAPCHVAWRAINDYGGLSAKKEQNLP

SEQ ID NO: 7441 - protein, 119 aa, Escherichia coli
MNLSLFKGGRPASVKNRAWHYCQMAWRGVCNQKALSRLAALSPLLLLGMGQMAHATDLLAGGKDDVKATFGADSFVIMCIYIAEIVIGVATYIRTKNLLILLGLVVVIVFTTVGLTFVS

SEQ ID NO: 7442 - protein, 700 aa, Escherichia coli
MKIFSVRQTVLPALLVLSPVVFAADEQTMIVSAAPQVVSELDTPAAVSVVDGEEMRLATPRINLSESLTGVPGLQVQNRQNYAQDLQLSIRGFGSRSTYGIRGIRLYVDGIPATMPDGQGQTSNIDLSSVQNVEVLRGPFSALYGNASGGVMNVTTQTGQQPPTIEASSYYGSFGSWRYGLKATGATGDGTQSGDVDYTVSTTRFTTHGYRDHSGAQKNLANAKLGVRIDEASKLSLIFNSVDIKADDPGGLTKAEWKANPQQAPRAEQYDTRKTIKQTQAGLRYERSLSSRDDMSVMMYAGERETTQYQSIPMAPQLNPSHAGGVITLQRHYQGIDSRWTHRGELGVPVTFTTGLNYENMSENRKGYNNFRLNSGMPEYGQKGELRRDERNLMWNIDPYLQTQWQLSEKLSLDAGVRYSSVWFDSNDHYITPGNGDDSGDASYHKWLPAGSLKYAMTDAWNIYLAAGRGFETPTINELSYRADGQSGMNFGLKPSTNDTIEIGSKTRIGDGLLSLALFQTDTDDEIVVDSSSGGRTTYKNAGKTRRQGAELAWDQRFAGDFRVNASWTWLDATYRSNVCNEQDCNGNRMPGIARNMGFASIGYVPEDGWYAGTEARYMGDIMADDENTAKAPSYTLVGLFTGYKYNYHNLTVDLFGRVDNLFDKEYVSSVIVNESNGRYYEPAPGRNYGVGVNIAWRFE

SEQ ID NO: 7443 - protein, 774 aa, Escherichia coli
MTPLRVFRKTTPLVNTIRLSLLPLAGLSFSAFAAQVNIAPGSLDKALNQYAAHSGFTLSVDASLTRGKQSNGLHGDYDVESGLQQLLDGSGLQVKPLGNNSWTLEPAPAPKEDALTVVGDWLGDARENDVFEHAGARDVIRREDFAKTGATTMREVLNRIPGVSAPENNGTGSHDLAMNFGIRGLNPRLASRSTVLMDGIPVPFAPYGQPQLSLAPVSLGNMDAIDVVRGGGAVRYGPQSVGGVVNFVTRAIPQDFGIEAGVEGQLSPTSSQNNPKETHNLMVGGTADNGFGTALLYSGTRGSDWREHSATRIDDLMLKSKYAPDEVHTFNSLLQYYDGEADMPGGLSRADYDADRWQSTRPYDRFWGRRKLASLGYQFQPDSQHKFNIQGFYTQTLRSGYLEQGKRITLSPRNYWVCGIEPRYSQIFMIGPSAHEVGVGYRYLNESTHEMRYYTATSSGQLPSGSSPYDRDTRSGTEAHAWYLDDKIDIGNWTITPGMRFEHIESYQNNAITGTHEEVSYNAPLPALNVLYHLTDSWNLYANTEGSFGTVQYSQIGKAVQSGNVEPEKARTWELGTRYDDGALTAEMGLFLINFNNQYDSNQTNDTVTARGKTRHTGLETQARYDLGTLTPTLDNVSIYASYAYVNAEIREKGDTYGNLVPFSPKHKGTLGVDYKPGNWTFNLNSDFQSSQFADNANTVKESADGSTGRIPGFMLWGARVAYDFGPQMADLNLAFGVKNIFDQDYFIRSYDDNNKGIYAGQPRTLYMQGSLKF

SEQ ID NO: 7444 - protein, 351 aa, Escherichia coli; identical to SEQ ID NO: 2872

SEQ ID NO: 7445 - protein, 365 aa, Escherichia coli; identical to SEQ ID NO: 3878

SEQ ID NO: 7446 - protein, 367 aa, Escherichia coli; identical to SEQ ID NO: 4285

SEQ ID NO: 7447 - protein, 237 aa, Escherichia coli; identical to SEQ ID NO: 1814

SEQ ID NO: 7448 - protein, 478 aa, Escherichia coli
MTRIKINARRIFSLLIPFFFFTSVHAEQTAAPAKPVTVEAKNETFAPQHPDQYLSWKATSEQSERVDALAEDPRLVILWAGYPFSRDYNKPRGHAFAVTDVRETLRTGAPKNAEDGPLPMACWSCKSPDVARLIQKDGEDGYFHGKWARGGPEIVNNLGCADCHNTASPEFAKGKPELTLSRPYAARAMEAIGKPFEKAGRFDQQSMVCGQCHVEYYFDGKNKAVKFPWDDGMKVENMEQYYDKIAFSDWTNSLSKTPMLKAQHPEYETWTAGIHGKNNVTCIDCHMPKVQNAEGKLYTDHKIGNPFDNFAQTCANCHTQDKAALQKVVAERKQSINDLKIKVEDQLVHAHFEAKAALDAGATEAEMKPIQDDIRHAQWRWDLAIASHGIHMHAPEEGLRMLGTAMDKAADARTKLARLLATKGITHEIEIPDISTKEKAQQAIGLNMEQIKAEKQDFIKTVIPQWEEQARKNGLLSQ

SEQ ID NO: 7449 - protein, 121 aa, Escherichia coli
MNVKAIPSMDKSKLTENTLQLAIISRIKLYYRPAKLALPLDQAAEKLRFRRSANSLTLINPTPYYLTVTELNAGTRVLENALVPPMGESTVKLPSDAGSNITYRTINDYGALTPKMTGVME

SEQ ID NO: 7450 - protein, 856 aa, Escherichia coli; identical to SEQ ID NO: 6509

SEQ ID NO: 7451 - protein, 430 aa, Escherichia coli; identical to SEQ ID NO: 2617

SEQ ID NO: 7452 - protein, 760 aa, Escherichia coli; identical to SEQ ID NO: 3923

SEQ ID NO: 7453 - protein, 518 aa, Escherichia coli; identical to SEQ ID NO: 2349

SEQ ID NO: 7454 - protein, 232 aa, Escherichia coli; identical to SEQ ID NO: 2087

SEQ ID NO: 7455 - protein, 207 aa, Escherichia coli; identical to SEQ ID NO: 2211

SEQ ID NO: 7456 - protein, 359 aa, Escherichia coli; identical to SEQ ID NO: 2328

SEQ ID NO: 7457 - protein, 646 aa, Escherichia coli
MRLATSRINLSESLTGVPGLQVQNRQNYAQDLQLSIRGFGSRSTYGIRGIRLYVDGIPATMPDGQGQTSNIDLSSVQNVEVLRGPFSALYGNASGGVMNVTTQTGQQPPTIEASSYYGSFGSWRYGLKATGATGDGTQPGDVDYTVSTTRFTTHGYRDHSGAQKNLANAKLGVRIDEASKLSLIFNSVDIKADDPGGLTKAEWKANPQQAPRAEQYDTRKTIKQTQAGLRYERSLSAQDDMSVMMYAGERETTQYQSIPMAPQLNPSHAGGVITLQRHYQGIDSRWTHRGELGVPVTFTTGLNYENMSENRKGYNNFRLNSGMPEYGQKGELRRDERNLMWNIDPYLQTQWQLSEKLSLDAGVRYSSVWFDSNDHYVTPGNGDDSGDASYHKWLPAGSLKYAMTDAWNIYLAAGRGFETPTINELSYRADGQSGMNFGLKPSTNDTIEIGSKTRIGDGLLSLALFQTDTDDEIVVDSSSGGRTTYKNAGKTRRQGAELAWDQRFAGDFRVNASWTWLDATYRSNVCNEQDCNGNRMPGIARNMGFASIGYVPEDGWYAGTEARYMGDIMADDENTAKAPSYTLVGLFTGYKYNYHNLTVDLFGRVDNLFDKEYVGSVIVNESNGRYYEPSPGRNYGVGMNIAWRFE

SEQ ID NO: 7458 - protein, 231 aa, Escherichia coli; identical to SEQ ID NO: 3055

SEQ ID NO: 7459 - protein, 662 aa, Escherichia coli
MVPSTFSRLKAARCLPVVLAALIFAGCGTHTPDQSTAYMQGTTQADSAFYLQQMQQSSDDTRINWQLLAIRALVKEGKTGQAVELFNQLPQELNDSQRREKTLLAVEIKLAQKDFAGAQNLLAKITPADLEQNQQARYWQAKIDASQGRPSIDLLRALIAQEPLLGAKEKQQNIDATWQALSSMTQEQANTLVINADENILQGWLDLQRVWFDNRNDPDMMKAGIADWQKRYPNNPGAKMLPTQLVNVKAFKPASTNKIALLLPLNGQAAVFGHTIQQGFEAAKNIGTQPVAAQVAAAPAADVAEQPQPQTVDGVASPAQASVSDLTGEQPAAQPAPVSTPAATTTAVSAPANPSAELKIYDTSSQPLSQILSQVQQDGASIVVGPLLKNNVEELLKSNTPLNVLALNQPENIENRVNICYFALSPEDEARDAARHIRDQGKQAPLVLIPRSSLGDRVANAFAQEWQKLGGGTVLQQKFGSTSELRAGVNGGSGIALTGTPITPRATTDDQFTNNGGRVDAVYIVATPGEIAFIKPMIAMRNGSQSGATLYASSRSAQGTAGPDFRLEMEGLQYSEIPMLAGGNLPLMQQALSAVNNDYSLARMYAMGVDAWSLANHFSQMRQVQGFEINGNTGSLTANPDCVINRKLSWLQYQQGQVVPAS

SEQ ID NO: 7460 - protein, 299 aa, Escherichia coli
MASNGSLPSTGKGAVERNGNLFDNSVKISADPRLNAVVVKDREITMDIYRQLISELDIEQRQIEISVSIIDVDANDLQQLGVNWSGTLNAGQGSIAFNSSTAQANLSSSVISNANNFMIRVNALQQNSKAKILSQPSIITLNNMQAILDKNVTFYTKVSGEKVASLESITSGTLLRVTPRILDDNSNSLTGKRRERVRLLLDIQDGNQSTNQSNAQDASSILPEVQNSEMTTEATLSAGESLLLGGFIQDKESSSKDGIPLLSDIPVIGNLFSSTTKQKHSVVRLFLIKATPIKSASSE

SEQ ID NO: 7461 - protein, 386 aa, Escherichia coli; identical to SEQ ID NO: 3094

SEQ ID NO: 7462 - protein, 446 aa, Escherichia coli; identical to SEQ ID NO: 5547

SEQ ID NO: 7463 - protein, 784 aa, Escherichia coli; identical to SEQ ID NO: 2244

SEQ ID NO: 7464 - protein, 170 aa, Escherichia coli [sequence omitted]

SEQ ID NO: 7465 - protein, 747 aa, Escherichia coli; identical to SEQ ID NO: 2072

SEQ ID NO: 7466 - protein, 266 aa, Escherichia coli; identical to SEQ ID NO: 1894

SEQ ID NO: 7467 - protein, 614 aa, Escherichia coli; identical to SEQ ID NO: 1884

SEQ ID NO: 7468 - protein, 162 aa, Escherichia coli; identical to SEQ ID NO: 1973

SEQ ID NO: 7469 - protein, 729 aa, Escherichia coli; identical to SEQ ID NO: 2948

SEQ ID NO: 7470 - protein, 191 aa, Escherichia coli; identical to SEQ ID NO: 2727

SEQ ID NO: 7471 - protein, 111 aa, Escherichia coli
MKKQIEGMTMKKVLALVVAAAMGLSSAAFAAETANTPAPTATTTKAAPAKTTHHKKQHKAAPAQKAQAAKKHHKNTKAEQKAPEQKAQAAKKHAGKHSHQQPAKPAAQPAA

SEQ ID NO: 7472 - protein, 120 aa, Escherichia coli
MNTVLSVQGASAPVEKKSFFSKFTRLNMLRLARAVIPAAVLMMFFPQLAMAAQGQDLMASGNTTVKATFGKDSSVVKWVVLAEVLVGAVMYMMTKNVKFLAGFAIISVFIAVGMAVVGLK

SEQ ID NO: 7473 - protein, 200 aa, Escherichia coli; identical to SEQ ID NO: 1784

SEQ ID NO: 7474 - protein, 361 aa, Escherichia coli; identical to SEQ ID NO: 3061

SEQ ID NO: 7475 - protein, 154 aa, Escherichia coli; identical to SEQ ID NO: 3616

SEQ ID NO: 7476 - protein, 658 aa, Escherichia coli
MDYNLFASSYRPQDGSSTNLNAYGTAGINTGAWRLRSDYQLNQTDSDDNHEQSGEISRTYLFRPLPQLGSKLTLGETDFSSNIFDGFSYTGAALASDDRMLPWELRGYAPQISGIAQTNATVTISQSGRVIYQKKVPPGPFIIDDLNQSVQGTLDVKVTEEDGRVNNFQVSAASTPFLTRQGQVRYKLAAGQPRPSMSHQTENETFFSNEVSWGMLSNTSLYGGLLLSGDDYHSAAMGIGQNMLWLGALSFDVTWASSHFDTQQDERGLSYRFNYSKQVDATNSTISLAAYRFSDRHFHSYANYLDHKYNDSDAQDEKQTISLSVGQPITPLNLNLYANLLHQTWWNADASTTANITAGFNVDIGDWRDISISTSFNTTHYEDKDRDNQIYLSISLPFGNGGRVGYDMQNSSHSTTHRMSWNDTLDERNSWGMSAGLQSDRPDNGAQVSGNYQHLSSAGEWDISGTYAANDYSSVSSSWSGSFTATQYGAAFHRRSSTNEPRLMVSTDGVADIPVQGNLDYTNHFGIAVVPLISSYQPSTVAVNMNDLPDGVTVAENVIKETWIEGAIGYKSLASRSGKDVNVIIRNASGQFPPLGADIRQDDSGISVGMVGEEGHAWLSGVAENQKFTVVWGDSQHCSLHLPEHMEDTANRLILPCH

SEQ ID NO: 7477 - protein, 204 aa, Escherichia coli
MTVSLTAILLSCSSAWAAGKGGIGLAATRLVYSEGEEQISLGVRNTSPDVPYLIQSWVMTPDNKKSADFIITPPLFVLNPANENLLRIMYIGAPLAKDRETLFFTSVRAVPSTTKREEGNTLKIATQSVIKLFWRPKGLAYPLGEAPAKLRCTSSADMVTVSNPTPYFITLTDLKIGGKVVKNQMISPFDKYQFSLPKGATNHQ

SEQ ID NO: 7478 - protein, 368 aa, Escherichia coli
MNKTITALAILMASFAANASVLPETPVPFKSGTGAIDNDTVYIGLGSAGTAWYKLDTQAKDKKWTALAAFPGGPRDQATSAFIDGNLYVFGGIGKNSEGLTQVFNDVHKYNPKTNSWVKLISHAPMGMAGHVTFVHNGKAYVTGGVNQNIFNGYFEDLNEAGKDSTAIDKINAHYFDKKAEDYFFNKFLLSFDPSTQQWSYAGESPWYGTAGAAVVNKGDKTWLINGEAKPGLRTDAVFELDFTGNNLKWNKLAPVSSPDGVAGGFAGISNDSLIFAGGAGFKGSRENYQNGKNYAHEGLKKSYSADIHLWHNGKWDKSGELSQGRAYGVSLPWNNSLLIIGGETAGGKAVTDSVLISVKDNKVTVQN

SEQ ID NO: 7479 - protein, 213 aa, Escherichia coli; identical to SEQ ID NO: 2232

SEQ ID NO: 7480 - protein, 236 aa, Escherichia coli; identical to SEQ ID NO: 3482

SEQ ID NO: 7481 - protein, 591 aa, Escherichia coli; identical to SEQ ID NO: 4273

SEQ ID NO: 7482 - protein, 746 aa, Escherichia coli
MNKKIHSLALLVNLGIYGVAQAQEPTDTPVSHDDTIVVTAAEQNLQAPGVSTITADEIRKNPVARDVSEIIRTMPGVNLTGNSTSGQRGNNRQIDIRGMGPENTLILIDGKPVSSRNSVRQGWRGERDTRGDTSWVPPEMIERIEVLRGPAAARYGNGAAGGVVNIITKKGSGEWHGSWDAYFNAPEHKEEGATKRTNFSLTGPLGDEFSFRLYGNLDKTQADAWDINQGHQSARAGTYVTTLPAGREGVINKDINGVVRWDFAPLQSLELEAGYSRQGNLYAGDTQNTNSDAYTRSKYGDETNRLYRQNYALTWNGGWDNGVTTSNWVQYEHTRNSRIPEGLAGGTEGKFNEKATQDFVDIDLDDVMLHSEVNLPIDFLVNQTLTLGTEWNQQRMKDLSSNTQALTGANTGGAIDGVSATDRSPYSKAEIFSLFAENNMELTDSTIVTPGLRFDHHSIVGNNWSPALNISQGLGDDFTLKMGIARAYKAPSLYQTNPNYILYSKGQGCYASAGGCYLQGNDDLKAETSINKEIGLEFKRDGWLAGVTWFRNDYRNKIEAGYVAVGQNAVGTDLYQWDNVPKAVVEGLEGSLNVPVSETVMWTNNITYMLKSENKTTGDRLSIIPEYTLNSTLSWQAREDLSMQTTFTWYGKQQPKKYNYKGQPAVGPETKEISPYSIVGLSATWDVTKNVSLTGGVDNLFDKRLWRAGNAQTTGDLARANYIAGAGAYTYNEPGRTWYMSVNTHF

SEQ ID NO: 7483 - protein, 539 aa, Escherichia coli; identical to SEQ ID NO: 3050

SEQ ID NO: 7484 - protein, 274 aa, Escherichia coli; identical to SEQ ID NO: 3471

SEQ ID NO: 7485 - protein, 230 aa, Escherichia coli; identical to SEQ ID NO: 3348

SEQ ID NO: 7486 - protein, 597 aa, Escherichia coli
MLPPNLRGYAPDISGVAHTTAKVTVSQMGRVIYETQVPAGPFRIQDLGDSVSGTLHIRIEEQNGQVQEYDISTASMPYLTRPGQVRYKIMMGRPQEWGHHVEGEFFSGAEASWGIANGWSLYGGALGDENYQSAALGVGRDLSTFGAVAFDVTHSHTKLDKDTAYGKGSLDGNSFRVSYSKDFDQLNSRVTFAGYRFSEENFMTMSEYLDASDSGMVRTGNDKEMYTATYNQNFRDAGVSVYLNYTRHTYWDREEQTNYNIMLSHYFNMGSIRNVSISMTGYRYEYDNQADKGMYISLSMPWGDNSTVSYNGNYGSGTDSSQVGYFSRVDDATHYQLNVGTSDKHTSVDGYYSHDGSLAQVDLSANYHEGQYTSAGLSLQGGATLTAHGGALHRTQNMGGTRLLIDADGVADVPVEGNGAAVYTNMFGKAVVSDVNNYYRNQAYIDLNKLPENAEATQSVVQATLTEGAIGYRKFAVISGQKAMAVLRLQDGSHPPFGAEVKNDNEQTVGLVDDDGNVYLAGVKPGEHMSVFWSGVAHCDINLPDPLPADLFNGLLLPCQHKGNVAPVVPDDIKPVIQEQTQQVTPTNPPVSVSANQ

SEQ ID NO: 7487 - protein, 203 aa, Escherichia coli; identical to SEQ ID NO: 2009

SEQ ID NO: 7488 - protein, 230 aa, Escherichia coli; identical to SEQ ID NO: 3019

SEQ ID NO: 7489 - protein, 193 aa, Escherichia coli; identical to SEQ ID NO: 2246

SEQ ID NO: 7490 - protein, 203 aa, Escherichia coli; identical to SEQ ID NO: 2201

SEQ ID NO: 7491 - protein, 826 aa, Escherichia coli
MLRMTPLASAIVALLLGIEAYAAEETFDTHFMIGGMKDQQVANIRLDDNQPLPGQYDIDIYVNKQWRGKYEIIVKDNPQETCLSIEVIKRLGINSDNFASGKQCLTFEQLVQGRSYTWDIGVFRLDFSVPQAWVEELESGYVPPENWERGINAFYTSYYVSQYYSDYKASGNSKSTYVRFNSGLNLLGWQLHSDASFSKTNNNPGVWKSNTLYLERGFAQLLGTLRVGDMYTSSDIFDSVRFSGVRLFRDMQMLPNSKQNFTPRVQGIAQSNALVTIEQNGFVVYQKEVPPGPFAITDLQLAGGGADLDVSVKEADGSVTTYLVPYAAVPNMLQPGVSKYDFAAGRSHIEGASKQSDFVQAGYQYGFNNLLTLYGGSMVANNYYAFTLGTGWNTRFGAISVDATKSHSKQDNGDVFDGQSYQIAYNKFVSQTSTRFGLAAWRYSSRDYRTFNDHVWANNKDNYRRDENDVYDIADYYQNDFGRKNSFSANMSQSLPEGWGSVSLSTLWRDYWGRSGSSKDYQLSYSNNWRRISYILAASQAYDENHHEEKRFNIFISIPFDWGDDVTTPRRQIYMSNSTTFDDQGFASNNTGLSGTVGSRDQFNYGVNLSYQNQGNETTAGANLTWNAPVATVNGSYSQSSTYRQAGASVSGGIVAWSGGVNLANRLSETFAVMNAPGIKDAYVNGQKYRTTNRNGVVVYDGMTPYRENHLMLDVSQSDSEAELRGNRKIAAPYRGAVVLVNFDTDQRKPWFIKALRADGQPLMFGYEVNDIHGHNIGVVGQGSQLFIRTNEVPPSVNVAIDKQQGLSCTITFGKEIDESRNYICQ

SEQ ID NO: 7492 - protein, 432 aa, Escherichia coli; identical to SEQ ID NO: 2026

SEQ ID NO: 7493 - protein, 249 aa, Escherichia coli; identical to SEQ ID NO: 3492

SEQ ID NO: 7494 - protein, 721 aa, Escherichia coli
MDEIPALAEKDDDSVINSLEQIIPGTAAEFDFNHQRLNLSIPQIALYRDARGYVSPSRWDDGIPTLFTNYSFTGSDNRYRQGNRSQRQYLNMQNGANFGPWRLRNYSTWTRNDQASSWNTISSYLQRDIKALKSQLLLGESATSGSIFSSYTFTGVQLASDDNMLPNSQRGFAPTVRGIANSSAIVTIRQNGYVIYQSNVPAGAFEINDLYPSSNSGDLEVTIEESDGTQRRFIQPYSSLPMMQRPGHLKYSATAGRYRADANSDSKEPEFAEATAIYGLNNTFTLYGGLLGSEDYYALGIGIGGTLGALGALSMDINRADTQFDNQHSFHGYQWRTQYIKDIPETNTNIAVSYYRYTNDGYFSFNEANTRNWNYNSRQKSEIQFNISQTIFDGVSLYASGSQQDYWGNNEKNRNISVGVSGQQWGIGYSLNYQYSRYTDQNNDRALYLNLSIPLERWLPRSRVSYQMTSQKDRPTQHEMRLDGSLLDDGRLSYSLEQSLDDDNNHNSSLNASYRSPYGTFSAGYSYGNDSSQYNYGVTGGVVIHPHGVTLSQYLGNAFALIDANGASGVRIQNYPGIATDPFGYAVVPYLTTYQENRLSVDTTQLPDNVDLEQTTQFVVPNRGAMVAARFNANIGYRVLVTVSDRNGKPLPFGALASNDETGQQSIVDEGGILYLSGISSKSQSWTVRWGNQADQQCQFAFSTPDSEPTTSVLQGTAQCH

SEQ ID NO: 7495 - protein, 128 aa, Escherichia coli
MDRETLFELSIASVPSGKVENQSVKVAMRSVFKLFWRPEGLPGDPLEAYQQLRWTRNSQGVQLTNPTPYYINLIQLSVNGKALSNAGVVPPKSQRQTSWCQAIAPCHVAWRAINDYGGLSAKKEQNLP

SEQ ID NO: 7496 - protein, 243 aa, Escherichia coli; identical to SEQ ID NO: 3483

SEQ ID NO: 7497 - protein, 331 aa, Escherichia coli; identical to SEQ ID NO: 2700

SEQ ID NO: 7498 - protein, 765 aa, Escherichia coli
MQFHINSPDINNEKAVLLARDETLGNCLNLTEIIPQASVRYDVNEQRLDIDVPQAWVMKNYQNYVDPSLWENGINAAMLSYNLNGYHSETPGRRNDSIYAAFNGGMNLGAWRLRASGNYNWMTDSGSNYDFKNRYIQRDIASLRSQLILGESYTTGETFDSVSIRGIRLYSDSRMLPPTLASFAPIIHGVANTNAKVTITQGGYKIYETTVPPGAFVIDDLSPSGYGSDLIVTVEESDGSKRTFSQPFSSVVQMLRPGVGRWDISGGQVLKDDIQDEPNLFQASYYYGLNNYLTGYTGIQITDNNYTAGLLGLGLNTSVGAFSFDVTHSNVRIPDDKTYQGQSYRVSWNKLFEETSTSLNIAAYRYSTQNYLGLNDALTLIDEVKHPEQDLEPKSMRNYSRMKNQVTVSINQPLKFEKKDYGSFYLSGSWSDYWASGQNRSNYSIGYSNSASWGSYSVSAQRSWNEDGDTDDSVYLSFTIPIEKLLGTEQRTSGFQSIDTQMSSDFKGNNQLNVSSSGYSDNARVSYSVNTGYTMNKASKDLSYVGGYASYESPWGSLAGSVSANSDNSRQVSLSTDGGFVLHSGGLTFSNDSFSDSDTLAVVQAPGAQGARINYGNSTIDRWGYGVTSALSPYHENRIALDINDLENDVELKSTSAVAVPRQGSVVFADFETVQGQSAIMNITRSDGKNIPFAADIYDEQGNVIGNVGQGGQAFVRGIEQQGNISIKWLEESKPVSCLAHYQQSSEAEKIAQSIILNGIRCQIQ

SEQ ID NO: 7499 - protein, 130 aa, Escherichia coli; identical to SEQ ID NO: 3184

SEQ ID NO: 7500 - protein, 250 aa, Escherichia coli; identical to SEQ ID NO: 3048

SEQ ID NO: 7501 - protein, 570 aa, Escherichia coli
MGDGNTGSDIFDGVGFRGVRLYSSDNMYPDSQQGFAPTVRGIARTAAQLTIRQNGFIIYQSYVSPGAFEITDLHPTSSNGDLDVTIDERDGNQQNYTIPYSTVPILQREGRFKFDLTAGDFRSGNSQQSSPFFFQGTALGGLPQEFTAYGGTQLSANYTAFLLGLGRNLGNWGAVSLDVTHARSQLADDSRHEGDSIRFLYAKSMNTFGTNFQLMGYRYSTQGFYTLDDVAYRRMEGYEYDYDYDGEHRDEPIIVNYHNLRFSRKDRLQLNISQSLNDFGSLYISGTHQKYWNTSDSDTWYQVGYTSSWVGISYSLSFSWNESVGIPDNERIVGLNVSVPFNVLTKRRYTRENALDRAYASFNANRNSNGQNSWLAGVGGTLLEGHNLSYHVSQGDTSNNGYTGSATANWQAAYATLGVGYNYDRDQHDVNWQLSGGVVGHENGITLSQPLGDTNVLIKAPGAGGVRIENQTGILTDWRGYAVMPYATVYRYNRIALDTNTMGNSIDVEKNISSVVPTQGALVRANFDTRIGVRALITVTQGGKPVPFGSLVRENSIGITSMWVMTGKFI

SEQ ID NO: 7502 - protein, 341 aa, Escherichia coli
MPLTAINQFLTVGGEWRHDKLSDAVNLTGGTSSKTSASQYALFVEDEWRIFEPLALTTGVRMDDHETYGEHWSPRAYLVYNATDTVTVKGGWATAFKAPSLLQLSPDWTSNSCRGACKIVGSPDLKPETSESWELGLYYMGEEGWLEGVESSVTVFRNDVKDRISISRTSDVNAAPGYQNFVGFETGANGRRIPVFSYYNVNKARIQGLETELKIPFNDEWKLSINYIYNDGRDVSNGENKPLSDLPFHTANGTLDWKPLALEDWSFYVSGHYTGQKRADSATAKTPGGYTIWNTGAAWQVTKDVKLRAGVLNLGDKDLSRDDYSYNEDGRRYFMAVDYRF

SEQ ID NO: 7503 - protein, 161 aa, Escherichia coli; identical to SEQ ID NO: 2582

SEQ ID NO: 7504 - protein, 834 aa, Escherichia coli
MYKKLKLTTISELIKNIYCSLSVLIIGCASAYAVEFNKDLIEAEDRENVNLSQFETDGQLPVGKYSLNALINNKRTPIHLDLQWVLIDNQTAVCLTPEQLTLLGFTDEIIEVAQQNLIDGCYPIEKEKQITTYLDKGKMQLSISAPQAWLKYKDANWTPPELWDHGIAGAFLDYNLYASHYAPHQGDNSQNISSYGQAGVNLGAWRLRTDYQYDQSFNNGKSQANNLDFPRIYLFRPIPAINAKLTIGQYDTESSIFDSFHFSGVSLKSDENMLPPDLRGYAPQITGVAQTNAKVTVSQNNRIIYQENVPPGPFAITNLFNTLQGQLDVKVEEEDGQVTQWQVASDSIPYLTRKGQIRYTTAMGKPTSVGGDSLQQPFFWTGEFSWGWLNNVSLYGGSVLTNRDYQSLAAGVGFNLNSLGSLSFDVTRSDAQLHNQDKETGYSYRANYSKRFESTGSQLTFAGYRFSDKNFVTMNEYINDTNHYTNYQNEKESYIVTFNQYLESLRLNTYVSLARNTYWDASSNVNYSLSLSRDFDIGPLKNVSTSLTFSRINWEEDNQDQLYLNISIPWGTSRTLSYGMQRNQDNKISHTASWYDSSDRNNSWSVSASGDNDEFKDMKASLRASYQHNTENGRLYLSGTSQRDSYYSLNASWNGSFTATRHGAAFHDYSGSADSRFMIDADGAEDIPLNNKRAVTNRYGIGVIPSVSSYITTSLSVDTRNLPENVDIENSVITTTLTEGAIGYAKLDTRKGYQIMGGIRLADGSHPPLGISVKDKTSHKELGLVADGGFVYLNGIQDDSKLTLRWGDKSCFIQPPNSSNLTTGTVILPCISQN

SEQ ID NO: 7505 - protein, 208 aa, Escherichia coli; identical to SEQ ID NO: 1949

SEQ ID NO: 7506 - protein, 241 aa, Escherichia coli; identical to SEQ ID NO: 2887

SEQ ID NO: 7507 - protein, 878 aa, Escherichia coli; identical to SEQ ID NO: 2855

SEQ ID NO: 7508 - protein, 274 aa, Escherichia coli; identical to SEQ ID NO: 2304

SEQ ID NO: 7509 - protein, 860 aa, Escherichia coli; identical to SEQ ID NO: 6118

SEQ ID NO: 7510 - protein, 637 aa, Escherichia coli; identical to SEQ ID NO: 6148

SEQ ID NO: 7511 - protein, 219 aa, Escherichia coli; identical to SEQ ID NO: 6014

SEQ ID NO: 7512 - protein, 233 aa, Escherichia coli; identical to SEQ ID NO: 3548

SEQ ID NO: 7513 - protein, 191 aa, Escherichia coli; identical to SEQ ID NO: 2727

SEQ ID NO: 7514 - protein, 232 aa, Escherichia coli; identical to SEQ ID NO: 2087

SEQ ID NO: 7515 - protein, 518 aa, Escherichia coli; identical to SEQ ID NO: 2351

SEQ ID NO: 7516 - protein, 998 aa, Escherichia coli; identical to SEQ ID NO: 2918

SEQ ID NO: 7517 - protein, 655 aa, Escherichia coli
MFRKWLNGRLPVLVFTTVILGAIPGWGAEFSANFKDTDIQEFINTVSKNLHKTVIINPDVQGTITVRSYDMLNEEQYYQFFLSVLDVYGFAVVDMHNGILKVVRSKDAKTSAVPVASDVSPGTGDEVVTRVVPVSNVAARDLAPLLRQLNDNAGAGSVVHYEPSNVLLMTGRAAVMKRLMEIVERVDKVGNRSVATVPLTYASATDVARLVTELTKETDKTAIPAWMTAKLVADERTNSVLVSGEPISQQRIISIIKQLDRQEDVQGNTKVIYLKYAKAKDLVEVLTGISSSIENDSKKSPSTEALRKGVTIKSHEQTNALILTGAPDVIRDLENVISQLDIRRPQVLVEAIIAEIQDADGLNLGIQWVNKHAGVAQFTSTGLPITTMVQTRQNEILDSDQSNALSMFNGIAAGFYQGNWAMLLTALSTSSKNDILATPSIVTLDNMEATFNVGQEVPVLSGSQTTSGDNIFNTVERKTVGIKLRVKPQINEGDSVLLEIEQEVSGVADTAVATTTDLGATFNTRTVTNAMLVGNGETVVVGGLLDKSIRGSESKVPLLGDIPVLGHLFRAKSEQTAKRNLMLFIRPTIIRERDGFRHASAEKYQSFNQEQVQSRGKETTALTLNEEQLRLSPDQDDTAFRKVKAAIAAFYAQEM

SEQ ID NO: 7518 - protein, 236 aa, Escherichia coli; identical to SEQ ID NO: 3970

SEQ ID NO: 7519 - protein, 747 aa, Escherichia coli; identical to SEQ ID NO: 6089

SEQ ID NO: 7520 - protein, 161 aa, Escherichia coli; identical to SEQ ID NO: 2582

SEQ ID NO: 7521 - protein, 351 aa, Escherichia coli
MTERELSIIRALGEEFSTVLADLQRTFEGKMASQAQAFEEKLASLSAVLQKHVTVDEVHPVLQAMVDDAVGTIPVPRDGRDYDPDVLQQAVNDAVANIPVPADGKSITPDDVRPMLEQMVKEAVSHIPAPRDGRDYDPEVLKQAVNDAVANIPVPADGKSITPDDVRPMLEQMVKEAVSHIPVPRDGRDYDPDVLQKAVLDAVRALPAPQDGRDATALEIIPAIDDQKSFPRGTYATHQGGLWRAYEKTHGMRGWECLVDGVADIDVSMTGERSFTVVVRQSSGQRTEKTFSLPVMLYRGVFRAGETYHPGDTVTWGGSLWHCNSMTGDKPGEAHSSGWTLAAKRGRDAGG

SEQ ID NO: 7522 - protein, 111 aa, Escherichia coli; identical to SEQ ID NO: 2911

SEQ ID NO: 7523 - protein, 228 aa, Escherichia coli; identical to SEQ ID NO: 5492

SEQ ID NO: 7524 - protein, 746 aa, Escherichia coli; identical to SEQ ID NO: 2949

SEQ ID NO: 7525 - protein, 191 aa, Escherichia coli; identical to SEQ ID NO: 2996

SEQ ID NO: 7526 - protein, 208 aa, Escherichia coli; identical to SEQ ID NO: 1949

SEQ ID NO: 7527 - protein, 430 aa, Escherichia coli; identical to SEQ ID NO: 2617

SEQ ID NO: 7528 - protein, 614 aa, Escherichia coli; identical to SEQ ID NO: 1883

SEQ ID NO: 7529 - protein, 826 aa, Escherichia coli; identical to SEQ ID NO: 3563

SEQ ID NO: 7530 - protein, 835 aa, Escherichia coli
MSISAAMLVLLCQPVMGSEISPATPSDEDNYTFDPQLFRGSRFSQSSLAKLTTRESVAPGNYKMDIYTNNKLSGSWNVTFKEAADGRVLPCLTPEVADAIGLKTGEDKGEKDPVCTFAKELAPGITSQTQLSQLRLDLSVPQSQLISRPRGYVPPSELDTGASLAFMNYIANYYNVAYSGQNAHSQRSLWASFNGGINLGAWQYRQLSNMTWDNDKGNQWNNIRSYLQRPLPAINSQLMMGQLITSGRFFSGLSYHGVSLATDERMLPDSMRGYAPTIRGVAATNARVSVMQNGHEIYQTTVAPGPFEINDLYPTSYSGDLDVTVTEANGAVSRFSVPFSAVPESMRPGTSRYNVEVGKTQDSGDDSMFGDLTWQHGMTNTLTFNSGSRIADGYQALMLGGVYGSSLGAFGANLTWSHARVPESEAQSGWMSQLTWSKTFQPTSTTVSLAGYRYSTSGYRDLADVLGERHAASNKQSWDSSQWRQQSRFDLTLSQSLANYGNLFVSGSTQNYRGGKSRDTQLQLGYSNSFSHGISMNLSVGRQRMGGYKDNSDDMQTVTSLSFSFPLGGNGPRVPSLSNSWTHSTDGSSQLQSSLTGMLDEAQTTNYSLNVMRDQQYKQTTLSGNMQKRFSQTTVGLNASKGQDYWQASGNVQGAMAVHGGGITFGPYLGETFALVEAKGAEGAKVYNSSQLEINDSGYALVPAVTPYRYNRISLDPQGMDGDAELVDSERQVAPVAGAAVKVIFRTRPGKALLIKSRMADGSELPMGADVLDENNTVVGIAGQGGQIYLRTEQTKGHLSVRWGEGANDSCQLPFDISGKDSNSPIIRLNETCQS

SEQ ID NO: 7531 - protein, 207 aa, Escherichia coli; identical to SEQ ID NO: 2211

SEQ ID NO: 7532 - protein, 869 aa, Escherichia coli; identical to SEQ ID NO: 2903

SEQ ID NO: 7533 - protein, 478 aa, Escherichia coli; identical to SEQ ID NO: 2404

SEQ ID NO: 7534 - protein, 203 aa, Escherichia coli; identical to SEQ ID NO: 2201

SEQ ID NO: 7535 - protein, 89 aa, Escherichia coli; identical to SEQ ID NO: 2833

SEQ ID NO: 7536 - protein, 224 aa, Escherichia coli; identical to SEQ ID NO: 3604

SEQ ID NO: 7537 - protein, 368 aa, Escherichia coli; identical to SEQ ID NO: 2370

SEQ ID NO: 7538 - protein, 228 aa, Escherichia coli
MSTLLASAPAFADIIISGTRIIYNADKKDVNVRLENKGNRPLLIQNWLDTGDDNADPSQIKVPFTATPPVSRVEPKRGQTVKVMYTGATALPKDRESVYWFNVLEVPPKPKDAEADKNLLQLAFRTRIKLFYRPSGLQGEPAEAPAKITWKLNNAQLQANNPTPYYVSFNEVKLESGGKTYNVNSSMVTPFSQASFGVTSLPGSVSSGKVVFKAINDFGGNIDGSATF

SEQ ID NO: 7539 - protein, 266 aa, Escherichia coli; identical to SEQ ID NO: 1892

SEQ ID NO: 7540 - protein, 230 aa, Escherichia coli; identical to SEQ ID NO: 2995

SEQ ID NO: 7541 - protein, 713 aa, Escherichia coli; identical to SEQ ID NO: 5996

SEQ ID NO: 7542 - protein, 324 aa, Escherichia coli; identical to SEQ ID NO: 3579

SEQ ID NO: 7543 - protein, 656 aa, Escherichia coli; identical to SEQ ID NO: 4901

SEQ ID NO: 7544 - protein, 231 aa, Escherichia coli; identical to SEQ ID NO: 2868

SEQ ID NO: 7545 - protein, 224 aa, Escherichia coli; identical to SEQ ID NO: 3578

SEQ ID NO: 7546 - protein, 370 aa, Escherichia coli; identical to SEQ ID NO: 3599

SEQ ID NO: 7547 - protein, 237 aa, Escherichia coli; identical to SEQ ID NO: 2816

SEQ ID NO: 7548 - protein, 362 aa, Escherichia coli
MAVKISGVLKDGTGKPVENCTIQLKARRNSATVVVNTVASENPDEAGRYSMDVEYGQYSVILLVEGFPPSHAGTITVYEDSQPGTLNDFLGAMSEDDVRPEALRRFELMVEEAARHAEEAKKNAGEAETSARNAGISASQAEESAANADTSAGDASESARQAAESAAAAKQSEEASSSSASAAAQKASESSQSAADAELSKKTAESAAGNAARDATTATEKARESAESAQSAEQSRIAAEEAVNRIPTVVGPPGPKGEPGPAGPQGPKGDKGERGDTGPAGATGERGPAGDAGPAGPAGPAGPQGPKGETGAAGPVGATGPQGPKGDPGETANTVPSGAGKRLLRQTAMAGSRIQMAHSSPD

SEQ ID NO: 7549 - protein, 720 aa, Escherichia coli; identical to SEQ ID NO: 6178

SEQ ID NO: 7550 - protein, 229 aa, Escherichia coli; identical to SEQ ID NO: 4047

SEQ ID NO: 7551 - protein, 700 aa, Escherichia coli; identical to SEQ ID NO: 2926

SEQ ID NO: 7552 - protein, 118 aa, Escherichia coli [sequence omitted]

SEQ ID NO: 7553 - protein, 678 aa, Escherichia coli; identical to SEQ ID NO: 2902

SEQ ID NO: 7554 - protein, 170 aa, Escherichia coli; identical to SEQ ID NO: 2565

SEQ ID NO: 7555 - protein, 86 aa, Escherichia coli
MFMAVLFALASVNAMAADCAKGKIEFSKYNEDDTFTVKVDGKEYWTSRWNLQPLLQSAQLTGMTVTIKSSTCESGSGFAEVQFNND

SEQ ID NO: 7556 - protein, 539 aa, Escherichia coli; identical to SEQ ID NO: 3050

SEQ ID NO: 7557 - protein, 432 aa, Escherichia coli; identical to SEQ ID NO: 2026

SEQ ID NO: 7558 - protein, 170 aa, Escherichia coli; identical to SEQ ID NO: 5004

SEQ ID NO: 7559 - protein, 351 aa, Escherichia coli; identical to SEQ ID NO: 2872

SEQ ID NO: 7560 - protein, 729 aa, Escherichia coli; identical to SEQ ID NO: 2948

SEQ ID NO: 7561 - protein, 331 aa, Escherichia coli; identical to SEQ ID NO: 2705

SEQ ID NO: 7562 - protein, 784 aa, Escherichia coli; identical to SEQ ID NO: 2240

SEQ ID NO: 7563 - protein, 162 aa, Escherichia coli; identical to SEQ ID NO: 1969

SEQ ID NO: 7564 - protein, 629 aa, Escherichia coli; identical to SEQ ID NO: 6084

SEQ ID NO: 7565 - protein, 367 aa, Escherichia coli; identical to SEQ ID NO: 2431

SEQ ID NO: 7566 - protein, 193 aa, Escherichia coli; identical to SEQ ID NO: 2250

SEQ ID NO: 7567 - protein, 243 aa, Escherichia coli; identical to SEQ ID NO: 3561

SEQ ID NO: 7568 - protein, 213 aa, Escherichia coli; identical to SEQ ID NO: 2232

SEQ ID NO: 7569 - protein, 361 aa, Escherichia coli; identical to SEQ ID NO: 3601

SEQ ID NO: 7570 - protein, 359 aa, Escherichia coli; identical to SEQ ID NO: 2332

SEQ ID NO: 7571 - protein, 567 aa, Escherichia coli; identical to SEQ ID NO: 3518

SEQ ID NO: 7572 - protein, 446 aa, Escherichia coli; identical to SEQ ID NO: 2180

SEQ ID NO: 7573 - protein, 252 aa, Escherichia coli; identical to SEQ ID NO: 3543

SEQ ID NO: 7574 - protein, 760 aa, Escherichia coli; identical to SEQ ID NO: 2078

SEQ ID NO: 7575 - protein, 669 aa, Escherichia coli; identical to SEQ ID NO: 3677

SEQ ID NO: 7576 - protein, 838 aa, Escherichia coli; identical to SEQ ID NO: 2916

SEQ ID NO: 7577 - protein, 386 aa, Escherichia coli; identical to SEQ ID NO: 3600

SEQ ID NO: 7578 - protein, 110 aa, Escherichia coli
MSMATAGIVVGGTRVIFYGDKPDTTISIFNKETNLPYLLQTWVDPFNKEDKSKPPFSVIPPVSRIEPQQEKILRILKTAGELPKDRESVFWLNVKNIPPSIDKKIPMFLR

SEQ ID NO: 7579 - protein, 366 aa, Escherichia coli; identical to SEQ ID NO: 3520

SEQ ID NO: 7580 - protein, 461 aa, Escherichia coli
MTERELSIIRALGEEFSTVLADLQRTFEEKIAAQAQTFEEKLASQSVVLQKCVTGDDVRPMLEQMVKEAVSHIPVPRDGRDYDPDVLQKAVNDAVANIPVPADGKSITPDDVRPMLEQMVKEAVSHIPVPRDGRDYDPDVLQKAVNDAVAKIPVPADGKSITPDDVHPMLEQMVKEAVSHIPVPRDGRDYDPDVLQKAVLEAVSALPAPQDGRDATALEILPAIDDQKSFPRGSYATHQGGLWRAYEKTHGMRGWECLVDGVADIDVSMTGERLFSVVVRQSSGQRTEKTFSLPVMLYRGVFRAGETYHPGDTVTWGGSLWHCNSMTEDKPGEAHSSAWTLAAKRGRDAGGWKVTALLTLEEIKAHLRVDHDADDEMLMDKVRQATAVLLAYIQGSRDKVISEDGELIPGEALTRMKGAAMRLTGMLYRNPDLAEREDLVQGELPFSVSVLIYDLRCPTVL

SEQ ID NO: 7581 - protein, 200 aa, Escherichia coli; identical to SEQ ID NO: 1788

SEQ ID NO: 7582 - protein, 514 aa, Escherichia coli; identical to SEQ ID NO: 3590

SEQ ID NO: 7583 - protein, 845 aa, Escherichia coli
MSHYSLSGLKYRVIYLCCLSGLYMLSVPLWAAEDAEFDPSFLSRTPGSSVIDVRRFMHGNPVPSGNYYSDIYLNGEWKGNAELSFRDMSSSQEESVLCVTPELLSILDVSPEAVAREPDTGNGRCMPFSAVVPDAKIRFDLSLLRLNVEIPQAMLVSRPRGYISPSQWQTGVPAAFVSYDVNHWRYRTPDMENNQSYLGLRAGFNAGGWAFRHRGTESWSDSHAEGYRSIETNLQHDIAMLRAQLTLGDFTTTGELMDSNSLRGIRLASDDRMLPGSLRGYAPVVRGMAGSNARVTVRQNGNIIYETTVPAGPFSISDLYPSGYGGDLTVTVTESDGQTRSFIVPFASVAQLVRPGFSRWQVAAGRYRYGNRTFSDTVFQGTLQYGLTNDITLNTGMSTAPHYLSGLGGVAFNTPLGAVATDITLARTTFPGSDTTHRGYSLHAGYSARIPETSTNVTLAAYRYSSRDFWSLRDAILTRNRDVINDSSVRSATGYRPRNQLQLTVNQSLGEGWGNLYLTGATYHYWGHTGTFNEYQAGYNNVWKKMSYQIGFSQTRRSGDYHHDNRFFFSFSLPLSDTGRTLLSTTVNVSDKNSNSIQSSISGVSGDDNQLSYGVSLNTQENGPTGYAVNGSYRSPVATLQATAGNDSRHNRQISAGISGAIVAHPFGVTASNDLGDTFTVIHADGAGGAVINNAPGNRLDPWGNGIVPYVTPYEKNYISIDPTALAADVELSATEREIIPRANSTTMVTFTTKTGKAMLFDVKMQDGTPPPMAAEALTADGKSAGYIAQGGRLFVRDLDAEKGMLRVVWGSGQNDSCVIHYSASGENARGNAVPENHHVVCMRQ

SEQ ID NO: 7584 - protein, 878 aa, Escherichia coli
MSYLNLRLYQRNTQCLHIRKHRLAGFFVRLFVACAFAAQAPLSSAELYFNPRFLADDPQAVADLSRFENGQELPPGTYRVDIYLNNGYMATRDVTFNTGDSEQGIVPCLTRAQLASMELNTASVSGMNLLADDACVPLTSMIHDATAHLDVGQQRLNLTIPQAFMSNRARGYIPPELWDPGINAGLLNYNFSGNSVQNRIGGNSHYAYLNLQSGLNIGAWRLRDNTTWSYNSSDSSSGSKNKWQHINTWLERDIIPLRSRLTLGDGYTQGDIFDGINFRGAQLASDDNMLPDSQRGFAPVIHGIARGTAQVTIKQNGYDIYNSTVPPGPFTINDIYAAGNSGDLQVTIKEADGSTQIFTVPYSSVPLLQREGHTRYSITAGEYRSGNAQQEKPRFFQSTLLHGLPAGWTIYGGTQLADRYRAFNFGIGKNMGALGALSVDMTQANSTLPDDSQHDGQSVRFLYNKSLNESGTNIQLVGYRYSTSGYFNFADTTYSRMNGYNIETQDGVIQVKPKFTDYYNLAYNKRGKLQLTVTQQLGRTSTLYLSGSHQTYWGTSNVDEQFQAGLNTAFEDINWTLSYSLTKNAWQKGRDQMLALNVNIPFSHWLRSNSKSQWRHASASYSMSHDLNGRMTNLVGVYGTLLEDNNLSYSVQTGYAGGGDGNSGSTGYATLNYRGGYGNANIGYSHSDDIKQLYYGVSGGVLAHANGVTLGQPLNDTVVLVKAPGAKDAKVENQTGVRTDWRGYAVLPYATEYRENRVALDTNTLADNVDLDNAVANVVPTRGAIVRAEFKARVGIKLLMTLTHNNKPLPFGAMVTSESSQSSGIVADNGQVYLSGMPLAGKVQVKWGEEENAHCVANYQLPPESQQQLLTQLSAECR

SEQ ID NO: 7585 - protein, 266 aa, Escherichia coli; identical to SEQ ID NO: 1894

SEQ ID NO: 7586 - protein, 237 aa, Escherichia coli; identical to SEQ ID NO: 4356

SEQ ID NO: 7587 - protein, 839 aa, Escherichia coli
MKKISFIHPFLLPGFILLTCSVQAAETVNDYIFDPSLLRDAIPGRISVTNGANDPYFQPGTYDVDIYLNGKYQSTASLDLIRDKGKISVCLPPRLYRAFAVREAYLAALPEKECSNPEYLLKGTSVSVDTASLRVDVIIPQAMLDIRPDDYISPENLTAGSTMGFINYNVNQFYSNYKNADHFESTYLGFNDGINIGKWRFRQQGNFTHNEYGNHWQHTRTWLQRAFPSLRSEISVGDIFSSGGQFNAVSYRGIRLSSDARMLPDSLRGYAPEVRGMAGSNARVSVWQGKQQIYQTTVPPGPFVIDNLSPVSYGGDLNVEVQESDGRHRRFRVPYAILPESLRPGRTDYSFSAGKVGDYTRYNNFVEMTVKRGLTNALTMNGGLRLANNYRSVLAGGVWASELGAFGLNSAFSSADFRNGESSRGWRYELNYSRTFAPTNTTLTFAGYRYSTQGYRDLNDVIVLNNNSIPGSDGSSSEYLQRNRMQLTLNQPLGDLGSLYVSWAQQNYYDHRSHDTQYQIGYGTVLPGNISMNFTMARQYSVMARHSDIRQNLAAQTNEYNEYRKDMHFQINFSIPLSNASDSSYLTLGGSSDNSYNASLSGLMGENNKMSYSININRDQQQRDTAFSGSLNRKTNLMNLTTTASKSSKFSQMSVNAMGAAVLHSGGLSLGNYLSDSFALVEAKGAHGARIMGQGIEIDHNGYALVPSLMPYHYNTIALDSSGSNRQVEVLSSQKTVAPYAGAMVRVKFQTLQGYAVMMKASTNRDENVPMGADVIDANGKTIGTFGQGSNAYLRLNDTKGTLKAVWGDAPGQSCQINYQIPAPKPDAVITYANAVCRF

SEQ ID NO: 7588 - protein, 865 aa, Escherichia coli
MPRFARLTIALGLATAVFPVDAEYYFNPRFLSNDLAESVDLSAFTKGREAPPGTYRVDIYLNDEFMTSRDITFIADDNNAELIPCLSTDLLVSLGIKKSALLDNKEHSAEKHVPDNSACTPLQDRLADASTEFDVGQQHLSLSVPQIYVGRMARGYVSPDLWEEGINAGLLNYSFNGNSINNRSNHNAGKSNYAYLNLQSGINIGSWRLRDNSTWSYYSGSSNSSDSNKWQHINTSAERDIIPLRSRLTVGDSYTDGDIFDSVNFRGLKINSTEAMLPDSQHGFAQVIHGIARGTAQVSVKQNGYDVYQTTVPPGPFTIDDINSAANGGDLQVTIKEADGSIQTLYVPYSSVPVLQRAGYTRYALAMGEYRSGNNLQSSPKFIQGSLMHGLEGNWTPYGGMQIAEDYQAFNLGIGKDLGLFGAFSFDITQANTTLADGTRHSGQSVKSVYSKSFYQTGTNIQVAGYRYSTQGFYNLSDSAYSRMSGYTVKPPTGDTNEQTQFIDYFNLFYSKRGQEQISISQQLGNYGTTFFSASRQSYWNTSRSDQQISFGLNVPFGDITTSLNYSYSNNIWQNDRDHLLAFTLNVPFSHWMRTDSQSAFRNSNASYSMSNDLKGGMTNLSGVYGTLLPDNNLNYSVQVGNTHGGNTSSGTSGYSSLNYRGAYGNTNVGYSRNGDSSQIYYGMSGGIIAHADGITFGQPLGDTMVLVKAPGADNVKIENQTGIHTDWRGYAILPFATEYRENRVALNANSLADNVELDETVVTVIPTHGAIARATFNAQIGGKVLMTLKYGNKSVPFGAIVTHGENKNGSIVAENGQVYLTGLPQSGKLQVSWGNDKNSNCIVDYKLPEVSPGTLLNQQTAICR

SEQ ID NO: 7589 - protein, 765 aa, Escherichia coli
MQFHINSPDINNEKAVLLARDETLGNCLNLTEIIPQASVRYDVNEQRLDIDVPQAWVMKNYQNYVDPSLWENGINAAMLSYNLNGYHSETPGRRNDSIYAAFNGGMNLGAWRLRASGNYNWMTDSGSNYDFKNRYIQRDIASLRSQLILGESYTTGETFDSVSIRGIRLYSDSRMLPPTLASFAPIIHGVANTNAKVTITQGGYKIYETTVPPGAFVIDDLSPSGYGSDLIVTVEESDGSKRTFSQPFSSVVQMLRPGVGRWDISGGQVLKDDIQDEPNLFQASYYYGLNNYLTGYTGIQITDNNYTAGLLGLGLNTSVGAFSFDVTHSNVRIPDDKTYQGQSYRVSWNKLFEETSTSLNIAAYRYSTQNYLGLNDALTLIDEVKHPEQDLEPKSMRNYSRMKNQVTVSINQPLKFEKKDYGSFYLSGSWSDYWASGQNRSNYSIGYSNSASWGSYSVSAQRSWNEDGDTDDSVYLSFTIPIEKLLGTEQRTSGFQSIDTQMSSDFKGNNQLNVSSSGYSDNARLSYSVNTGYTMNKASKDLSYVGGYASYESPWGTLAGSVSANSDNSRQVSLSTDGGFVLHSGGLTFSNDSFSDSDTLAVVQAPGAQGARINYGNSTIDRWGYGVTSALSPYHENRIALDINDLENDVELKSTSAVAVPRQGSVVFADFETVQGQSAIMNITRSDGKNIPFAADIYDEQGNVIGNVGQGGQAFVRGIEQQGNISIKWLEESKPVSCLAHYQQSSEAEKIAQSIILNGIRCQIQ

SEQ ID NO: 7590 - protein, 813 aa, Escherichia coli
MVLTGSGMLCTTANAEEYYFDPIMLETTKSGMQTTDLSRFSKKYAQLPGTYQVDIWLNKKKVSQKKITFTANAEQLLQPQFTVEQLRELGIKVDEIPALAEKDDDSVINSLEQIIPGTAAEFDFNHQRLNLSIPQIALYRDAKGYVSPSRWDDGIPTLFTNYSFTGSDNRYRQGNRSQRQYLNMQNGANFGPWRLRNYSTWTRNDQASSWNTISSYLQRDIKALKSQLLLGESATSGSIFSSYTFTGVQLASDDNMLPNSQRGFAPTVRGIANSSAIVTIRQNGYVIYQSNVPAGAFEINDLYPSSNSGDLEVTIEESDGTQRRFIQPYSSLPMMQRPGHLKYSATAGRYRADANSDSKEPEFAEATAIYGLNNTFTLYGGLLGSEDYYALGIGIGGTLGALGALSMDINRADTQFDNRHSFHGYQWRTQYIKDIPETNTNIAVSYYRYTNDGYFSFDEANTRNWDYNSRQKSEIQFNISQTIFDGVSLYASGSQQDYWGNNDKNRNISVGVSGQQWGIGYSLNYQYSRYTDQNNDRALSLNLSIPLERWLPRSRVSYQMTSQKDRPTQHEMRLDGSLLDDGRLSYSLEQSLDDDNNHNSSLNASYRSPYGTFSAGYSYGNDSSQYNYGVTGGVVIHPHGVTLSQYLGNAFALIDANGASGVRIQNYPGIATDPFGYAVVPYLTTYQENRLSVDTTQLPDNVDLEQTTQFVVPNRGAMVAARFNANIGYRVLVTVSDRNGKPLPFGALASNDETGQQSIVDEGGILYLSGISSKSQSWTVRWGNQADQQCQFAFSTPDSEPTTSVLQGTAQCH

SEQ ID NO: 7591 - protein, 207 aa, Escherichia coli; identical to SEQ ID NO: 2211

SEQ ID NO: 7592 - protein, 866 aa, Escherichia coli
MYRTHRQHSLLSSGGVPSFIGGLVVFVSAAFNAQAETWFDPAFFKDDPSMVADLSRFEKGQKITPGVYRVDIVLNQTIVDTRNVNFVEITPEKGIAACLTTESLDAMGVNTDAFPAFKQLDKQACVPLAEIIPDASVTFNVNKLRLEISVPQIAIKSNARGYVPPERWDEGINALLLGYSFSGANSIHSSADSDSGDSYFLNLNSGVNLGPWRLRNNSTWSRSSGQTAEWKNLSSYLQRAVIPLKGELTVGDDYTAGDFFDSVSFRGVQLASDDNMLPDSLKGFAPVVRGIAKSNAQITIKQNGYTIYQTYVSPGAFEISDLYSTSSSGDLLVEIKEADGSVNSYSVPFSSVPLLQRQGRIKYAVTLAKYRTNSNEQQESKFAQATLQWGGPWGTTWYGGGQYAEYYRAAMFGLGFNLGDFGAISFDVTQAKSTLADQSEHKGQSYRFLYAKTLNQLGTNFQLMGYRYSTSGFYTLSDTMYKHMDGYEFNDGDDEDTPMWSRYYNLFYTKRGKLQVNISQQLGEYGSFYLSGSQQTYWHTDQQDRLLQFGYNTQIKDLSLGVSWNYSKSRGQPDADQVFALNFSLPLNLLLPRSNDSYTRKKNYAWMTSNTSIDNEGHITQNLGLTETLLDDGNLSYSVQQGYNSEGKTANGSASMDYKGAFADARVGYNYSDNGSQQQLNYALSGSLVAHSQGITLGQSLGETNVLIAAPGAENTRVANSTGLKTDWRGYTVVPYATSYRENRIALDAASLKRNVDLENAVVNVVPTKGALVLAEFNAHAGARVLMKTSKQGIPLRFGAIATLDGIQTNSGIIDDDGSLYMSGLPAQGAITVRWGEAPDQICHISYQLTEQQINSAITRMDAICR

SEQ ID NO: 7593 - protein, 834 aa, Escherichia coli; identical to SEQ ID NO: 3095

SEQ ID NO: 7594 - protein, 869 aa, Escherichia coli
MKIPTTTDIPQRYTWCLAGICYSSLAILPSFLSYAESYFNPAFLLENGTSVADLSRFERGNHQPAGVYRVDLWRNDEFIGSQDIVFESTTENTGDKSGGLMPCFNQVLLERIGLNSSAFPELAQQQNNKCINLLKAVPDATINFDFAAMRLNITIPQITLLSSAHGYIPPEEWDEGIPALLLNYNFTGNRGNGNDSYFFSELSGINIGPWRLRNNGSWNYFRGNGYHSEQWNNIGTWVQRAIIPLKSELVMGDGNTGSDIFDGVGFRGVRLYSSDNMYPDSQQGFAPTVRGIARTAAQLTIRQNGFIIYQSYVSPGAFEITDLHPTSSNGDLDVTIDERDGNQQNYTIPYSTVPILQREGRFKFDLTAGDFRSGNSQQSSPFFFQGTALGGLPQEFTAYGGTQLSANYTAFLLGLGRNLGNWGAVSLDVTHARSQLADDSRHEGDSIRFLYAKSMNTFGTNFQLMGYRYSTQGFYTLDDVAYRRMEGYEYDYDYDGEHRDEPIIVNYHNLRFSRKDRLQLNISQSLNDFGSLYISGTHQKYWNTSDSDTWYQVGYTSSWVGISYSLSFSWNESVGIPDNERIVGLNVSVPFNVLTKRRYTRENALDRAYASFNANRNSNGQNSWLAGVGGTLLEGHNLSYHVSQGDTSNNGYTGSATANWQATYGTLGVGYNYDRDQHDVNWQLSGGVVGHENGITLSQPLGDTNVLIKAPGAGGVRIENQTGILTDWRGYAVMPYATVYRYNRIALDTNTMGNSIDVEKNISSVVPTQGALVRANFDTRIGVRALITVTQGGKPVPFGSLVRENSTGITSMVGDDGQVYLSGAPLSGELLVQWGDGANSRCIAHYVLPKQSLQQAVTVISAVCTHPGS

SEQ ID NO: 7595 - protein, 880 aa, Escherichia coli
MPDHSLFRLRILPWCIALAMSGSYSSVWAEDDIQFDSRFLELKGDTKIDLKRFSSQGYVEPGKYNLQVQLNKQPLAEEYDIYWYAGEDDASKSYACLTPELVAQFGLKEDVAKNLQWSHDAKCLKSGQLEGMEIKADLSQSALVISLPQAYLEYTYPDWDPPSRWDDGISGIVADYSINAQTRHEENGGDDSNEISGNGTVGVNLGPWRMRADWQTNYQHTRSNDDDEFSGDETQKKWEWSRYYAWRALPSLKAKLALGEDYLRSDIFDGFNYVGGSVSTDDQMLPPNLRGYAPDISGVAHTTAKVTVSQMGRVIYETQVPAGPFRIQDLGDSVSGTLHIRIEEQNGQVQEYDISTASMPYLTRPGQVRYKIMMGRPQEWGHHVEGEFFSGAEASWGIANGWSLYGGALGDENYQSAALGVGRDLSTFGAVAFDVTHSHTKLDKDTAYGKGSLDGNSFRVSYSKDFDQLNSRVTFAGYRFSEENFMTMSEYLDASDSGMVRTGNDKEMYTATYNQNFRDAGVSVYLNYTRHTYWDREEQTNYNIMLSHYFNMGSIRNVSISMTGYRYEYDNQADKGMYISLSMPWGDNSTVSYNGNYGSGTDSSQVGYFSRVDDATHYQLNVGTSDKHTSVDGYYSHDGSLAQVDLSANYHEGQYTSAGLSLQGGATLTAHGGALHRTQNMGGTRLLIDADGVADVPVEGNGAAVYTNMFGKAVVSDVNNYYRNQAYIDLNRLPENAEATQSVVQATLTEGAIGYRKFAVISGQKAMAVLRLSDGSHPPFGAEVKNDNEQTVGLVDDDGNVYLAGVKPGEHMSVFWSGVAHCDINLPDPLPADLFNGLLLPCQHKGNVAPITSPAVKPAIQEQTQRVTPTEPPTSISVNQ

SEQ ID NO: 7596 - protein, 368 aa, Escherichia coli
MNKTITALTIIMASFAANASVLPETPVPFKSGTGAIDNDTVYIGLGSAGTAWYKLDTQAKDKRWTALAAFPGGPRDQATSAFIDGNLYVFGGIGKNSEGLTQVFNDVHKYNPKTNSWVKLMSHAPMGMAGHVTFVHNGKAYVTGGVNQNIFNGYFEDLNEAGKDSTAIDKINAYYFDKKAEDYFFNKFLLSFDPSTQQWSYAGESPWYGTAGAAVVNKGDKTWLINGEAKPGLRTDAVFELDFTGDNLKWNKLDPVSSPDGVAGGFAGISNDSLIFAGGAGFKGSRENYQNGKNYAHEGLKKSYSADIHLWYNGKWDKSGELSQGRAYGVSLPWNNSLLIIGGETAGGKAVMDSVLISVKDNKVTVQN

SEQ ID NO: 7597 - protein, 816 aa, Escherichia coli; identical to SEQ ID NO: 2817

SEQ ID NO: 7598 - protein, 161 aa, Escherichia coli; identical to SEQ ID NO: 2582

SEQ ID NO: 7599 - protein, 837 aa, Escherichia coli
MMAACTLLYTGNTEARTYSFDASMLKGGGKGVDLTLFEEGAQLPGIYPVDIILNGSRVDSRDMAFRTEKDAEGKTYLKTCLTREMLARYGVMTEEYPELFHGDDGKEAEACAELSVIPQATETYQFASQQLLLSIPQVALRPPLRGIAPEALWDDGIPAFLLNWQANTSRSEYRGYGKSVTDNYWVTLEPGINLGPWRVRNLTTWNRSSGQPGQWESAYIRAERGINSLRSRLTLGEDYTPSDIFDSVPFRGVMLGADESMVPYNQREFAPVVRGIARTQARIEVRQNGYLIDSRTVAPGAFALTDLPLTGSGGDLQVTVQESDGTAQVFTVPYTTPAIALREGYMKYSIAGGEYRSSDDAVEHSPLGQMSVMYGLPWGLTAFGGAQMSSHYQSAALGLGWSMGRLGAVSVDGIHSRGQQKGRDTETGETWRLRYNKSFELTNTDLTAARYQYTSSGFHTLSDVLSTFRNDNFRAYSYSGDRSRRTTLRLNQSLGSLGYMSFYGSRDEFRHNRQKQDSFGMSYGTSWKNISWYVNWSRNYSTNAYYQRGHIEDSINLWMNIPLGQWIGGRDNDINVTTQTQRTTGQNTWYETGLNGRAFDRRLYWDVSERIAPGSENNVDSSRLNLRWFGTYGELAGMYSYSSYIRQMSAGISGGMVLHNEGITLGQKGEDTVALVVAPGVNGASVGSLPGVRTDTRGYTLVNHVSPYQENLITLDPTTFPENVEVSQTDTRVVPTKGAVVRAKFITRVGGRALITLSRSDGSRLPFGAVVTEEGKKGQMPGGAGVVGDNGEVYLSGLDETGQLKVQWGRNSSCRANYRLPEEKEATGIFLVRTVCM

SEQ ID NO: 7600 - protein, 823 aa, Escherichia coli
MTPLASAIVALLLGIEAYAAEETFDTHFMIGGMKDQQVANIRLDDNQPLPGQYDIDIYVNKQWRGKYEIIVKDNPQETCLSIEVIKRLGINSDNFASGKQCLTFEQLVQGGSYTWDIGVFRLDFSVPQAWVEELESGYVPPENWERGINAFYTSYYVSQYYSDYKASGNSKSTYVRFNSGLNLLGWQLHSDASFSKTNNNPGVWKSNTLYLERGFAQLLGTLRVGDMYTSSDIFDSVRFSGVRLFRDMQMLPNSKQNFTPRVQGIAQSNALVTIEQNGFVVYQKEVPPGPFAITDLQLAGGGADLDVSVKEADGSVTTYLVPYAAVPNMLQPGVSKYDFAAGRSHIEGASKQSDFVQAGYQYGFNNLLTLYGGSMVANNYYAFTLGTGWNTRFGAISVDATKSHSKQDNGDVFDGQSYQIAYNKFVSQTSTRFGLAAWRYSSRDYRTFNDHVWANNKDNYRRDENDVYDIADYYQNDFGRKNSFSANMSQSLPEGWGSVSLSTLWRDYWGRSGSSKDYQLSYSNNWRRISYILAASQAYDENHHEEKRFNIFISIPFDWGDDVTTPRRQIYMSNSTTFDDQGFASNNTGLSGTVGSRDQFNYGVNLSYQNQGNETTAGANLTWNAPVATVNGSYSQSSTYRQAGASVSGGIVAWSGGVNLANRLSETFAVMNAPGIKDAYVNGQKYRTTNRNGVVVYDGMTPYRENHLMLDVSQSDSEAELRGNRKIAAPYRGAVVLVNFDTDQRKPWFIKALRADGQPLMFGYEVNDIHGHNIGVVGQGSQLFIRTNEVPPSVNVAIDKQQGLSCTITFGKEIDESRNYICQ

SEQ ID NO: 7601 - protein, 254 aa, Escherichia coli
MKKIAYMLVALSVSCQATVMPQQSRVIFHPGEVKRSLLLVNNEDAPVLVQSWVDLGRPDKKPGEKNFPFVALPAVFRLNKAEKRVITLIRSAQSASLPADRESLYWLNIYEISAVKKNIAQQKLNKFNLAMNTQLKIINRPFRDSYNFRERTQKLKFQTQQMAGKIMLTVINPTPYYFTPGQMNITIGSWQNKVYLGADKAVAPFSDKAFPLTIHSGVLPAGKATLHFSAIDDDGALQYFTYDLNRQKSLRFSG

SEQ ID NO: 7602 - protein, 243 aa, Escherichia coli; identical to SEQ ID NO: 6081

SEQ ID NO: 7603 - protein, 246 aa, Escherichia coli; identical to SEQ ID NO: 3021

SEQ ID NO: 7604 - protein, 208 aa, Escherichia coli; identical to SEQ ID NO: 1949

SEQ ID NO: 7605 - protein, 518 aa, Escherichia coli; identical to SEQ ID NO: 2350

SEQ ID NO: 7606 - protein, 116 aa, Escherichia coli
MKKQIEGMTMKKVLALVVAAAMGLSSAAFAAETATTPAPTATTTKAAPAKTTHHKKQHKAAPAQKAQAAKKHHKNTKAEQKAPEQKAQAAKKHAGKHSHQQPAKTCCTTRSVSFQQ

SEQ ID NO: 7607 - protein, 446 aa, Escherichia coli; identical to SEQ ID NO: 2176

SEQ ID NO: 7608 - protein, 478 aa, Escherichia coli; identical to SEQ ID NO: 2404

SEQ ID NO: 7609 - protein, 351 aa, Escherichia coli; identical to SEQ ID NO: 6097

SEQ ID NO: 7610 - protein, 432 aa, Escherichia coli; identical to SEQ ID NO: 2026

SEQ ID NO: 7611 - protein, 412 aa, Escherichia coli; identical to SEQ ID NO: 3323

SEQ ID NO: 7612 - protein, 255 aa, Escherichia coli; identical to SEQ ID NO: 2977

SEQ ID NO: 7613 - protein, 746 aa, Escherichia coli; identical to SEQ ID NO: 3031

SEQ ID NO: 7614 - protein, 374 aa, Escherichia coli; identical to SEQ ID NO: 2982

SEQ ID NO: 7615 - protein, 760 aa, Escherichia coli; identical to SEQ ID NO: 5980

SEQ ID NO: 7616 - protein, 203 aa, Escherichia coli; identical to SEQ ID NO: 2201

SEQ ID NO: 7617 - protein, 362 aa, Escherichia coli; identical to SEQ ID NO: 2434

SEQ ID NO: 7618 - protein, 118 aa, Escherichia coli [sequence omitted]

SEQ ID NO: 7619 - protein, 517 aa, Escherichia coli; identical to SEQ ID NO: 2462

SEQ ID NO: 7620 - protein, 191 aa, Escherichia coli; identical to SEQ ID NO: 2727

SEQ ID NO: 7621 - protein, 232 aa, Escherichia coli; identical to SEQ ID NO: 2087

SEQ ID NO: 7622 - protein, 541 aa, Escherichia coli; identical to SEQ ID NO: 3377

SEQ ID NO: 7623 - protein, 236 aa, Escherichia coli
MQTTRTPYSISFMATVLLLLLFACHSTVANAAVALGAKRVIYPANQKQVLLPVTNNDPASVYLIQSWIENAGDQKDTQFVITPPLFSMQGKKENTLRIINATNHQLPGDRESLFWVNVKAIPAMEKDQKNENTLQLAIISRIKMFYRPTNLAMAPEEAPAMLRFRRSGSKLTLINPTPYFITVTNMKAGNSNLPNTMVPPKGEVSVDITHAATGDISFQTINDYGALTPRIKATMQ

SEQ ID NO: 7624 - protein, 230 aa, Escherichia coli; identical to SEQ ID NO: 6078

SEQ ID NO: 7625 - protein, 193 aa, Escherichia coli; identical to SEQ ID NO: 2246

SEQ ID NO: 7626 - protein, 332 aa, Escherichia coli; identical to SEQ ID NO: 2701

SEQ ID NO: 7627 - protein, 732 aa, Escherichia coli; identical to SEQ ID NO: 3068

SEQ ID NO: 7628 - protein, 162 aa, Escherichia coli; identical to SEQ ID NO: 1965

SEQ ID NO: 7629 - protein, 784 aa, Escherichia coli; identical to SEQ ID NO: 2244

SEQ ID NO: 7630 - protein, 729 aa, Escherichia coli; identical to SEQ ID NO: 6108

SEQ ID NO: 7631 - protein, 233 aa, Escherichia coli; identical to SEQ ID NO: 3276

SEQ ID NO: 7632 - protein, 241 aa, Escherichia coli; identical to SEQ ID NO: 2922

SEQ ID NO: 7633 - protein, 430 aa, Escherichia coli; identical to SEQ ID NO: 2617

SEQ ID NO: 7634 - protein, 678 aa, Escherichia coli
MVPSTFSRLKAARCLPVVLAALIFAGCGTHTPDQSTAYMQGTAQADSAFYLQQMQQSSDDTRINWQLLAIRALVKEGKTGQAVELFNQLPQELNDSQRREKTLLAVEIKLAQKDFAGAQNLLAKITPADLEQNQQARYWQAKIDASQGRPSIDLLRALIAQEPLLGAKEKQQNIDATWQALSSMTQEQANTLVINADENILQGWLDLQRVWFDNRNDPDMMKAGIADWQKRYPNNPGAKMLPTQLVNVKAFKPASTNKIALLLPLNGQAAVFGCTIQQGFEAAKNIGTQPVAAQVAAAPAADVAEQPQPQTVDGVASPAQASVSDLTGEQPAAQPAPVSTPAATTTAVSAPANPSAELKIYDTSSQPLSQILSQVQQDGASIVVGPLLKNNVEELLKSNTPLNVLALNQPENIENRVNICYFALSPEDEARDAARHIRDQGKQAPLVLIPRSSLGDRVANAFAQEWQKLGGGTVLQQKFGSTSELRAGVNGGSGIALTGTPITPRATTDSGMTTNNPTLQTTPTDDQFTNNGGRVDAVYIVATPGEIAFIKPMIAMRNGSQSGATLYASSRSAQGTAGPDFRLEMEGLQYSEIPMLAGGNLPLMQQALSAVNNDYSLARMYAMGVDAWSLANHFSQMRQVQGFEINGNTGSLTANPDCVINRKLSWLQYQQGQVVPAS

SEQ ID NO: 7635 - protein, 119 aa, Escherichia coli; identical to SEQ ID NO: 2527

SEQ ID NO: 7636 - protein, 224 aa, Escherichia coli; identical to SEQ ID NO: 3115

SEQ ID NO: 7637 - protein, 250 aa, Escherichia coli; identical to SEQ ID NO: 3427

SEQ ID NO: 7638 - protein, 359 aa, Escherichia coli; identical to SEQ ID NO: 2328

SEQ ID NO: 7639 - protein, 200 aa, Escherichia coli; identical to SEQ ID NO: 1784

SEQ ID NO: 7640 - protein, 614 aa, Escherichia coli; identical to SEQ ID NO: 1884

SEQ ID NO: 7641 - protein, 226 aa, Escherichia coli
MIFAVLSLLVAGELQAGVVVGGTRFIFPADKESIAILLTNTSQESWLINSKINRPTRWAGGEVSTVPAPLLAAPPLILLKPGTTGTLRLLRTESDILPVDRETLFELSIASVPSGKVENQSVKVAMRSVFKLFWRPEGLPGDPLEAYQQLRWTRNSQGVQLTNPTPYYINLIQVSVNGKALSNAGVVPPKSQRQTSWCQAIAPCHVAWRAINDYGGLSAKKEQNLP

SEQ ID NO: 7642 - protein, 274 aa, Escherichia coli; identical to SEQ ID NO: 2300

SEQ ID NO: 7643 - protein, 243 aa, Escherichia coli; identical to SEQ ID NO: 3483

SEQ ID NO: 7644 - protein, 338 aa, Escherichia coli
MHSAGQSTKDALKKAAEQTRNAGNRLILLIPKDYKGQGSSLNDLVRTADELGIEVQYDEKNGTAITKQVFGTAEKLIGLTERGVTIFAPQLDKLLQKYQKAGNKLGGSAENIGDNLGKTGSVLSTFQNFLGTALSSMKIDELIKKQKSGSNVSSSELAKASIELINQLVDTAASLNNNVNSFSQQLNKLGSVLSNTKHLNGVGNKLQNLPNLDNIGAGQRNATQACHMGGQDPSRRISQLLRLITQSEGLAEAARLTFSSKGAHSPCVEGVNTAKLQAGRSAELQRLSEELIFGHYQPMPARWGYIPKSNGKLRPLGIPAMRYCSAGHADGDGADMEE

SEQ ID NO: 7645 - protein, 249 aa, Escherichia coli; identical to SEQ ID NO: 3492

SEQ ID NO: 7646 - protein, 700 aa, Escherichia coli; identical to SEQ ID NO: 3128

SEQ ID NO: 7647 - protein, 686 aa, Escherichia coli; identical to SEQ ID NO: 3129

SEQ ID NO: 7648 - protein, 231 aa, Escherichia coli
MLRNITAIIVAFLVINVANASVILNNTRIVIDNAKMEKNVQFTNSGDNPVLVQIQAQENGENDCPPFIALPAVFRMLPGAGQTVKVSLTKRDIPKDRESLFYMDYIEVPSVKKDDQNRNKLYLIIRSRVKVIFRPEGLVFSVNKLHKQLSYEQFGNIVTIKNNSPFYANIRSFYLTGKTGNINYPGSVTVPPYGESRVQVKKVGETYAGLKMTALIINDFGADEKVDIAKK

SEQ ID NO: 7649 - protein, 231 aa, Escherichia coli; identical to SEQ ID NO: 3055

SEQ ID NO: 7650 - protein, 213 aa, Escherichia coli; identical to SEQ ID NO: 2232

SEQ ID NO: 7651 - protein, 747 aa, Escherichia coli; identical to SEQ ID NO: 2072

SEQ ID NO: 7652 - protein, 828 aa, Escherichia coli; identical to SEQ ID NO: 5894

SEQ ID NO: 7653 - protein, 221 aa, Escherichia coli; identical to SEQ ID NO: 3141

SEQ ID NO: 7654 - protein, 641 aa, Escherichia coli; identical to SEQ ID NO: 3104

SEQ ID NO: 7655 - protein, 729 aa, Escherichia coli; identical to SEQ ID NO: 3778

SEQ ID NO: 7656 - protein, 230 aa, Escherichia coli; identical to SEQ ID NO: 3723

SEQ ID NO: 7657 - protein, 631 aa, Escherichia coli; identical to SEQ ID NO: 3058

SEQ ID NO: 7658 - protein, 363 aa, Escherichia coli; identical to SEQ ID NO: 3347

SEQ ID NO: 7659 - protein, 250 aa, Escherichia coli; identical to SEQ ID NO: 3427

SEQ ID NO: 7660 - protein, 224 aa, Escherichia coli; identical to SEQ ID NO: 3165

SEQ ID NO: 7661 - protein, 130 aa, Escherichia coli; identical to SEQ ID NO: 3706

SEQ ID NO: 7662 - protein, 331 aa, Escherichia coli; identical to SEQ ID NO: 2700

SEQ ID NO: 7663 - protein, 776 aa, Escherichia coli
MIFKNVASRAQLASMGLNTASVSGMNLLADDACVPLTSMIHDATAHLDVGQQRLNLTIPQAFMSNRARGYIPPELWDPGINAGLLNYNFSGNSVQNRIGGNSHYAYLNLQSGLNIGAWRLRDNTTWSYNRSDRSSGSKNKWQHINTWLERDIIPLRSRLTLGDGYTQGDIFDGINFRGAQLASDDNMLPDSQRGFAPVIHGIARGTAQVTIKQNGYDIYNSTVPPGPFTINDIYAAGNSGDLQVTIKEADGSTQIFTVPYSSVPLLQREGHTRYSITAGEYRSGNAQQEKPRFFQSTLLHGLPAGWTIYGGTQLADRYRAFNFGIGKNMGALGALSVDMTQANSTLPDDSQHDGQSVRFLYNKSLNESGTNIQLVGYRYSTSGYFNFADTTYSRMNGYNIETQDGVIQVKPKFTDYYNLAYNKRGKLQLTVTQQLGRTSTLYLSGSHQTYWGTSNVDEQFQAGLNTAFEDINWTLSYSLTKNAWQKGRDQMLALNVNIPFSHWLRSDSKSQWRHASASYSMSHDLNGRMTNLAGVYGTLLEDNNLSYSVQTGYAGGGDGNSGSTGYATLNYRGGYGNANIGYSHSDDIKQLYYGVSGGVLAHANGVTLGQPLNETVVLVKAPGAKDAKVENQTGVRTDWRGYAVLPYATEYRENRVALDTNTLADNVDLDNAVANVVPTRGAIVRAEFKARVGIKLLMTLTHNNKPLPFGAMVTSESSQSSGIVADNGQVYLSGMPLAGKVQVKWGEEENAHCVANYQLPPESQQQLLTQLSAECR

SEQ ID NO: 7664 - protein, 203 aa, Escherichia coli; identical to SEQ ID NO: 2201

SEQ ID NO: 7665 - protein, 232 aa, Escherichia coli; identical to SEQ ID NO: 2087

SEQ ID NO: 7666 - protein, 405 aa, Escherichia coli
MTERELSIIRALGEEFSTVLADLQRTFEGKMASQAQAFEEKLTSLSAVLQKHVTVDEVRPVLQAMVDDAVGAIPVPRDGRDYDPDVLQQAVNDAVANIPQPADGKSLTPDDVRPMLEQMVKEAVSHIPVPRDGRDYDPEVLQKAVNDAVANIPQPADGKSLTPDDVRPMLEQMVKEAVSHIPVPRDGRDYDPDVLQKAVNDAVANIPQPADGKSLTPDDVRPMLEQMVKEAVSHIHVPRDGRDYDPDVLQKAVLDAVSALPAPQDGRDATALEILPAIDDQKSFPRGTYATHQGGLWRAYEKTHGMRGWECLVDGVADIDVSMTGERLFSVVVRQSSGQRTEKTFSLPVMLYRGVFRAGETYHPGDTVTWGGSLWHCNSMTEDKPGEAHSSAWTLAAKRGRDAGG

SEQ ID NO: 7667 - protein, 565 aa, Escherichia coli; identical to SEQ ID NO: 2678

SEQ ID NO: 7668 - protein, 243 aa, Escherichia coli
MTFMKGLPLLLLVASLCSHAALQPDRTRIVFNANDKATSLRVDNRSDKLPYLAYSWLENEKGEKSDDLLVALPPIQRLEPKATTQVRIVKQASTTKLPGDRETLFFYNMREIPPAPEKNSDHAVLQVAIQSRIKVFWRPAALRKKAGEKVELQLQVSQQGNQLTLKNPTAYYLTIAYLGRNEKGVLPGFKTVMVAPFSTVNTNIGNYSGSQFYLGYMDDYGALRMTTLNCSGQCHLQAVEAKK

SEQ ID NO: 7669 - protein, 274 aa, Escherichia coli; identical to SEQ ID NO: 3721

SEQ ID NO: 7670 - protein, 700 aa, Escherichia coli; identical to SEQ ID NO: 2926

SEQ ID NO: 7671 - protein, 700 aa, Escherichia coli; identical to SEQ ID NO: 3128

SEQ ID NO: 7672 - protein, 111 aa, Escherichia coli; identical to SEQ ID NO: 3096

SEQ ID NO: 7673 - protein, 231 aa, Escherichia coli; identical to SEQ ID NO: 3055

SEQ ID NO: 7674 - protein, 678 aa, Escherichia coli
MVPSTFSRLKAARCLPVVLAALIFAGCGTHTPDQSTAYMQGTAQADSAFYLQQMQQSSDDTRINWQLLAIRALVKEGKTGQAVELFNQLPQELNDSQRREKTLLAVEIKLAQKDFAGAQNLLAKITPADLEQNQQARYWQAKIDASQGRPSIDLLRALIAQEPLLGAKEKQQNIDATWQALSSMTQEQANTLVINADENILQGWLDLQRVWFDNRNDPDMMKAGIADWQKRYPNNPGAKMLPTQLVNVKAFKPASTNKIALLLPLNGQAAVFGRTIQQGFEAAKNIGTQPVAAQVAAAPAADVAEQPQPQTVDGVASPAQASVSDLTGEQPAAQPAPVSTPAATTTAVSAPANPSAELKIYDTSSQPLSQILSQVQQDGASIVVGPLLKNNVEELLKSNTPLNVLALNQPENIENRVNICYFALSPEDEARDAARHIRDQGKQAPLVLIPRSSLGDRVANAFAQEWQKLGGGTVLQQKFGSTSELRAGVNGGSGIALTGTPITPRATTDSGMTTNNPTLQTTPTDDQFTNNGGRVDAVYIVATPGEIAFIKPMLAMRNGSQSGATLYASSRSAQGTAGPDFRLEMEGLQYSEIPMLAGGNLPLMQQALSAVNNDYSLARMYAMGVDAWSLANHFSQMRQVQGFEINGNTGSLTANPDCVINRKLSWLQYQQGQVVPAS

SEQ ID NO: 7675 - protein, 784 aa, Escherichia coli; identical to SEQ ID NO: 2244

SEQ ID NO: 7676 - protein, 386 aa, Escherichia coli; identical to SEQ ID NO: 3094

SEQ ID NO: 7677 - protein, 118 aa, Escherichia coli [sequence omitted]

SEQ ID NO: 7678 - protein, 826 aa, Escherichia coli; identical to SEQ ID NO: 3563

SEQ ID NO: 7679 - protein, 162 aa, Escherichia coli; identical to SEQ ID NO: 1969

SEQ ID NO: 7680 - protein, 170 aa, Escherichia coli [sequence omitted]

SEQ ID NO: 7681 - protein, 221 aa, Escherichia coli; identical to SEQ ID NO: 3743

SEQ ID NO: 7682 - protein, 203 aa, Escherichia coli; identical to SEQ ID NO: 2009

SEQ ID NO: 7683 - protein, 108 aa, Escherichia coli; identical to SEQ ID NO: 3602

SEQ ID NO: 7684 - protein, 208 aa, Escherichia coli; identical to SEQ ID NO: 1949

SEQ ID NO: 7685 - protein, 237 aa, Escherichia coli; identical to SEQ ID NO: 2816

SEQ ID NO: 7686 - protein, 230 aa, Escherichia coli; identical to SEQ ID NO: 2995

SEQ ID NO: 7687 - protein, 213 aa, Escherichia coli; identical to SEQ ID NO: 2232

SEQ ID NO: 7688 - protein, 203 aa, Escherichia coli; identical to SEQ ID NO: 2201

SEQ ID NO: 7689 - protein, 233 aa, Escherichia coli; identical to SEQ ID NO: 3548

SEQ ID NO: 7690 - protein, 361 aa, Escherichia coli; identical to SEQ ID NO: 3601

SEQ ID NO: 7691 - protein, 224 aa, Escherichia coli; identical to SEQ ID NO: 3578

SEQ ID NO: 7692 - protein, 170 aa, Escherichia coli; identical to SEQ ID NO: 5004

SEQ ID NO: 7693 - protein, 430 aa, Escherichia coli; identical to SEQ ID NO: 2617

SEQ ID NO: 7694 - protein, 241 aa, Escherichia coli; identical to SEQ ID NO: 3582

SEQ ID NO: 7695 - protein, 227 aa, Escherichia coli; identical to SEQ ID NO: 3570

SEQ ID NO: 7696 - protein, 252 aa, Escherichia coli; identical to SEQ ID NO: 3543

SEQ ID NO: 7697 - protein, 266 aa, Escherichia coli; identical to SEQ ID NO: 1892

SEQ ID NO: 7698 - protein, 678 aa, Escherichia coli; identical to SEQ ID NO: 2902

SEQ ID NO: 7699 - protein, 365 aa, Escherichia coli; identical to SEQ ID NO: 3084

SEQ ID NO: 7700 - protein, 311 aa, Escherichia coli
MRLGFKGETQVTDQLTGYGQWEYQIQGNSAENENNSWTRVAFAGLKFQDVGSFDYGRNYGVVYDVTSWTDVLPEFGGDTYGSDNFMQQRGNGFATYRNTDFFGLVDGLNFAVQYQGKNGSVSGEGMTNNGREALRQNGDGVGGSITYDYEGFGIGAAVSSSKRTDDQNSPLYIGNGDRAETYTGGLKYDANNIYLAAQYTQTYNATRVGSLGWANKAQNFEAVAQYQFDFGLRPSLAYLQSKGKNLGVINGRNYDDEDILKYVDVGATYYFNKNMSTYVDYKINLLDDNQFTRDAGINTDNIVALGLVYQF

SEQ ID NO: 7701 - protein, 229 aa, Escherichia coli; identical to SEQ ID NO: 4047

SEQ ID NO: 7702 - protein, 669 aa, Escherichia coli; identical to SEQ ID NO: 3677

SEQ ID NO: 7703 - protein, 729 aa, Escherichia coli; identical to SEQ ID NO: 2948

SEQ ID NO: 7704 - protein, 359 aa, Escherichia coli; identical to SEQ ID NO: 2332

SEQ ID NO: 7705 - protein, 241 aa, Escherichia coli; identical to SEQ ID NO: 2887

SEQ ID NO: 7706 - protein, 826 aa, Escherichia coli
MLRMTPLASAIVALLLGIEAYAAEETFDTHFMIGGMKDQQVANIRLDDNQPLPGQYDIDIYVNKQWSGKYEIIVKDNPQETCLSIEVIKRLGINSDNFASGKQCLTFEQLVQGGSYTWDIGVFRLDFSVPQAWVEELESGYVPPENWERGINAFYTSYYVSQYYSDYKASGNSKSTYVRFNSGLNLLGWQLHSDASFSKTNNNPGVWKSNTLYLERGFAQLLGTLRVGDMYTSSDIFDSVRFSGVRLFRDMQMLPNSKQNFTPRVQGIAQSNALVTIEQNGFVVYQKEVPPGPFAITDLQLAGGGADLDVSVKEADGSVTTYLVPYAAVPNMLQPGVSKYDFAAGRSHIEGASKQSDFVQAGYQYGFNNLLTLYGGSMVANNYYAFTLGTGWNTRIGAISVDATKSHSKQDNGDVFDGQSYQIAYNKFVSQTSTRFGLAAWRYSSRDYRTFNDHVWANNKDNYRRDENDVYDIADYYQNDFGRKNSFSANMSQSLPEGWGSVSLSTLWRDYWGRSGSSKDYQLSYSNNWRRISYILAASQAYDENHHEEKRFNIFISIPFDWGDDVTTPRRQIYMSNSTTFDDQGFASNNTGLSGTVGSRDQFNYGVNLSYQNQGNETTAGANLTWNAPVATVNGSYSQSSTYRQAGASVSGGIVAWSGGVNLANRLSETFAVMNAPGIKDAYVNGQKYRTTNRNGVVVYDGMTPYRENHLMLDVSQSDSEAELRGNRKIAASYRGAVVLVNFDTDQRKPWFIKALRADGQPLMFGYEVNDIHGHNIGVVGQGSQLFIRTNEVPPSVNVAIDKQQGLSCTITFGKEIDESRNYICQ

SEQ ID NO: 7707 - protein, 331 aa, Escherichia coli; identical to SEQ ID NO: 2705

SEQ ID NO: 7708 - protein, 774 aa, Escherichia coli
MTPLRVFRKTTPLVNAIRLSLLPLAGLSFSAFAAQVNIAPGSLDKALNQYAAHSGITISVDASLTRGKQSNGLHGDYDVESGLQQLLDGSGLQVKPLGNNSWTLEPAPAPKEDALTVVGDWLGDARENDVFEHAGARDVIRREDFAKTGATTMREVLNRIPGVSAPENNGTGSHDLAMNFGIRGLNPRLASRSTVLMDGIPVPFAPYGQPQLSLAPVSLGNMDAIDVVRGGGAVRYGPQSVGGVVNFVTRAIPQDFGIEAGVEGQLSPTSSQNNPKETHNLMVGGTADNGFGTALLYSGTRGSDWREHSATRIDDLMLKSKYAPDEVHTFNSLLQYYDGEADMPGGLSRADYDADRWQSTRPYDRFWGRRKLASLGYQFQPDSQHKFNIQGFYTQTLRSGYLEQGKRITLSPRNYWVRGIEPRYSQIFMIGPSAHEVGVGYRYVNESTHEMRYYTATSSGQLPSGSSPYDRDTRSGTEAHAWYLDDKIDIGNWTITPGMRFEHIESYQNNAITGTHEEVSYNAPLPALNVLYHLTDSWNLYANTEGSFGTVQYSQIGKAVQSGNVEPEKARTWELGTRYDDGALTAEMGLFLINFNNQYGSNQTNDTVTARGKTRHTGLETQARYDLGTLTPTLDNVSIYASYAYVNAEIREKGDTYGNLVPFSPKHKGTLGVDYKPGNWTFNLNSDFQSSQFADNANTVKESADGSTGRIPGFMLWGARVAYDFGPQMADLNLAFGVKNIFDQDYFIRSYDDNNKGIYAGQPRTLYMQGSLKF

SEQ ID NO: 7709 - protein, 843 aa, Escherichia coli; identical to SEQ ID NO: 3163

SEQ ID NO: 7710 - protein, 229 aa, Escherichia coli; identical to SEQ ID NO: 3589

SEQ ID NO: 7711 - protein, 784 aa, Escherichia coli; identical to SEQ ID NO: 2240

SEQ ID NO: 7712 - protein, 539 aa, Escherichia coli; identical to SEQ ID NO: 3050

SEQ ID NO: 7713 - protein, 224 aa, Escherichia coli; identical to SEQ ID NO: 6030

SEQ ID NO: 7714 - protein, 593 aa, Escherichia coli
MYPDSQQGFAPTVRGIARTAAQLTIRQNGFIIYQSYVSPGAFEITDLHPTSSNGDLDVTIDERDGNQQNYTIPYSTVPILQREGRFKFDLTAGDFRSGNSQQSSPFFFQGTALGGLPQEFTAYGGTQLSANYTAFLLGLGRNLGNWGTVSLDVTHARSQLADDSRHEGDSIRFLYAKSMNTFGTNFQLMGYRYSTQGFYTLDDVAYRRMEGYEYDYDYDGEHRDEPIIVNYHNLRFSRKDRLQLNISQSLNDFGSLYISGTHQKYWNTSDSDTWYQVGYTSSWVGISYSLSFSWNESVGIPDNERIVGLNVSVPFNVLTKRRYTRENALDRAYASFNANRNSNGQNSWLAGVGGTLLEGHNLSYHVSQGDTSNNGYTGSATANWQAAYGTLGVGYNYDRDQHDVNWQLSGGVVGHENGITLSQPLGDTNVLIKAPGAGGVRIENQTGILTDWRGYAVMPYATVYRYNRIALDTNTMGNSIDVEKNISSVVPTQGALVRANFDTRIGVRALITVTQGRKPVPFGSLVRENSTGITSMVGDDGQVYLSGAPLSGELLVQWGDGANSRCIAHYVLPKQSLQQAVTVISAVCTHPGS

SEQ ID NO: 7715 - protein, 514 aa, Escherichia coli
MCNEKNKFFYFTALFCCSAQAAPSSLEKRLGKNEYFIITKSSPVRAILNDFAANYSIPVFISNSVNDDFSGEIKNEKPMKVLEKLSRLYHLTWYYDENILYIYKTNEISRSIITPTYLDIDSLLKYLRDTISVNKNSCNVRKITTFNSIEVRGVPECIKYITSLSESLDKEAQSKAKNKDVVRVFKLNYASATDITYKYRDQNVVVPGVVSILKTMASNGSLPSTGKGAVERNGNLFDNSVKISADPRLNAVVVKDREITMDIYRQLISELDIEQRQIEISVSIIDVDANDLQQLGVNWSGTLNAGQGSIAFNSSTAQANLSSSVISNANNFMIRVNALQQNSKAKILSQPSIITLNNMQAILDKNVTFYTKVSGEKVASLESITSGTLLRVTPRILDDNSNSLTGKRRERVRLLLDIQDGNQSTNQSNAQDASSILPEVQNSEMTTEATLSAGESLLLGGFIQDKESSSKDGIPLLSDIPVIGNLFSSTTKQKHSVVRLFLIKATPIKSASSE

SEQ ID NO: 7716 - protein, 715 aa, Escherichia coli; identical to SEQ ID NO: 3971

SEQ ID NO: 7717 - protein, 838 aa, Escherichia coli
MPQRHHQGHKRTPKQLALIIKRCLPMVLTGSGMLCTTANAEEYYFDPIMLETTKSGMQTTDLSRFSKKYAQLPGTYQVDIWLNKKKVSQKKITFTANAEQLLQPQFTVEQLRELGIKVDEIPALAEKDDDSVINSLEQIIPGTAAEFDFNHQRLNLSIPQIALYRDARGYVSPSRWDDGIPTLFTNYSFTGSDNRYRQGNRSQRQYLNMQNGANFGPWRLRNYSTWTRNDQASSWNTISSYLQRDIKALKSQLLLGESATSGSIFSSYTFTGVQLASDDNMLPNSQRGFAPTVRGIANSSAIVTIRQNGYVIYQSNVPAGAFEINDLYPSSNSGDLEVTIEESDGTQRRFIQPYSSLPMMQRPGHLKYSATAGRYRADANSDSKEPEFAEATAIYGLNNTFTLYGGLLGSEDYYALGIGIGGTLGALGALSMDINRADTQFDNRHSFHGYQWRTQYIKDIPETNTNIAVSYYRYTNDGYFSFDEANTRNWDYNSRQKSEIQFNISQTIFDGVSLYASGSQQDYWGNNDKNRNISVGVSGQQWGIGYSLNYQYSRYTDQNNDRALSLNLSIPLERWLPRSRVSYQMTSQKDRPTQHEMRLDGSLLDDGRLSYSLEQNLDDDNNHNSSLNASYRSPYGTFSAGYSYGNDSSQYNYGVTGGVVIHPHGVTLSQYLGNAFALIDANGASGVRIQNYPGIATDPFGYAVVPYLTTYQENRLSVDTTQLPDNVDLEQTTQFVVPNRGAMVAARFNANIGYRVLVTVSDRNGKPLPFGALASNDETGQQSIVDEGGILYLSGISSKSQSWTVRWGNQADQQCQFAFSTPDSEPTTSVLQGTAQCH

SEQ ID NO: 7718 - protein, 834 aa, Escherichia coli; identical to SEQ ID NO: 3692

SEQ ID NO: 7719 - protein, 161 aa, Escherichia coli; identical to SEQ ID NO: 2582

SEQ ID NO: 7720 - protein, 478 aa, Escherichia coli; identical to SEQ ID NO: 2404

SEQ ID NO: 7721 - protein, 370 aa, Escherichia coli; identical to SEQ ID NO: 3599

SEQ ID NO: 7722 - protein, 614 aa, Escherichia coli; identical to SEQ ID NO: 3301

SEQ ID NO: 7723 - protein, 869 aa, Escherichia coli; identical to SEQ ID NO: 2903

SEQ ID NO: 7724 - protein, 816 aa, Escherichia coli; identical to SEQ ID NO: 3562

SEQ ID NO: 7725 - protein, 200 aa, Escherichia coli; identical to SEQ ID NO: 1788

SEQ ID NO: 7726 - protein, 816 aa, Escherichia coli
MNIYRLSFVSCLVVAMPCALAVEFNLNVLDKSMRDRIDISLLKEKGVIAPGEYFVSVAVNNNQISNGQKINWHKNDDKTIPCINDLLVDKFGLKPEVRQSLPLINQCVDFSSRPEMLFNFDQANQQLNITIPQAWLAWHSENWTPPSTWKEGVAGVLMDYNLFASSYRPQDGSSSTNLNAYGTAGINTGAWRLRSDYQLNQTDSDDNHEQSGEISRTYLFRPLPQLGSKLTLGETDFSSNIFDGFSYTGAALASDDRMLPWELRGYAPQISGIAQTNATVTISQSGRVIYQKKVPPGPFIIDDLNQSVQGTLDVKVTEEDGRVNNFQVSAASTPFLTRQGQIRYKLAAGQPRPSMSHQTENETFFSNDVSWGMLSNTSLYGGLLLSGDDYHSAAIGIGQNMLWLGALSFDVTWASSHFDTQQDERGLSYRFNYSKQVDATNSTISLAAYRFSDRHFHSYANYLDHKYNDSDAQDEKQTISLSVGQPITPLNLNLYANLLHQTWWNADASTTANITAGFNVDIGDWRDISISTSFNTTHYEDKDRDNQIYLSISLPFGNGGRVGYDMQNSSHSTTHRMSWNDTLDERNSWGMSAGLQSDRPDNGAQVSGNYQHLSSAGEWDISGTYAANDYSSVSSSWSGSFTATQYGAAFHRRSSTNEPRLMVSTDGVADIPVQGNLDYTNHFGIAVVPLISSYQPSTVAVNMNDLPDGVTVAENVIKETWIEGAIGYKSLASRSGKDVNVIIRNASGQFPPLGADIRQDDSGISVGMVGEEGHAWLSGVAENQKFTVVWGDSQHCSLHLPEHMEDTANRLILPCH

SEQ ID NO: 7727 - protein, 111 aa, Escherichia coli; identical to SEQ ID NO: 2911

SEQ ID NO: 7728 - protein, 351 aa, Escherichia coli; identical to SEQ ID NO: 2872

SEQ ID NO: 7729 - protein, 236 aa, Escherichia coli; identical to SEQ ID NO: 3970

SEQ ID NO: 7730 - protein, 366 aa, Escherichia coli; identical to SEQ ID NO: 3520

SEQ ID NO: 7731 - protein, 162 aa, Escherichia coli; identical to SEQ ID NO: 1965

SEQ ID NO: 7732 - protein, 261 aa, Escherichia coli
MDVEYGQYSVILLVEGFPPSHVGTITVYEDSQPGTLNDFLGAMTEDDARPEALRRFEQMVEEAARHAEEAKKNAGEAETSARNAGISASKAEASAANADTSAEDASESARQAAESAASAKKSEEASSSSASEAAQKASESLQSATDAELSKKTAESAAGNASRDATTATEKARESAESAQSAEQSRIAAEEAVNRIPTVVGPPGPKGDPGPAGPQGPKGDKGERGDTGPAGATGERGPAGDAGPAGPQGPKGDRGNGERPV

SEQ ID NO: 7733 - protein, 359 aa, Escherichia coli; identical to SEQ ID NO: 2329

SEQ ID NO: 7734 - protein, 351 aa, Escherichia coli; identical to SEQ ID NO: 3691

SEQ ID NO: 7735 - protein, 230 aa, Escherichia coli; identical to SEQ ID NO: 3348

SEQ ID NO: 7736 - protein, 203 aa, Escherichia coli; identical to SEQ ID NO: 2009

SEQ ID NO: 7737 - protein, 686 aa, Escherichia coli; identical to SEQ ID NO: 3129

SEQ ID NO: 7738 - protein, 840 aa, Escherichia coli; identical to SEQ ID NO: 3591

SEQ ID NO: 7739 - protein, 368 aa, Escherichia coli; identical to SEQ ID NO: 2370

SEQ ID NO: 7740 - protein, 468 aa, Escherichia coli
MNIITTRDEPGTEISAGWGSNSYQNYDVSTQQQLGDKTRVTLLGDYAHTHGYDVVAYGNTGTQAQPDNDGFLSKTLYGALEHNFTDAWSGFVRGYGYDNRTNYDAYYSPGSPLVDTRKLYSQSWDAGLRYNGELIKSQLITSYSHSKDYNYDPHYGRYDSSATLDEMKQYTVQWANNIIIGHGNVGAGVDWQKQSTAPGTAYVKDGYDQRNTGIYLTGLQQVGDFTFEGAARSDDNSQFGRHGTWQTSAGWEFIEGYRFIASYGTSYKAPNLGQLYGFYGNPNLDPEKSKQWEGAFEGLTAGVNWRISGYRNDVSDLIDYDDHTLKYYNEGKARIKGVEATANFDTGPLTHTVSYDYVDARNAITDTPLLRRAKQQVKYQLDWQLYDFDWGITYQYLGTRYDKDYSSYPYQTVKMGGVSLWDLAVAYPVTSHLTVRGKIANLFDKDYETVYGYQTAGREYTLSGSYTF

SEQ ID NO: 7741 - protein, 191 aa, Escherichia coli; identical to SEQ ID NO: 2996

SEQ ID NO: 7742 - protein, 207 aa, Escherichia coli; identical to SEQ ID NO: 2211

SEQ ID NO: 7743 - protein, 514 aa, Escherichia coli
MCNEKNKFFYFTALFCCSAQAAPSSLEKRLGKSEYFIITKSSPVRAILNDFAANYSIPVFISSSVNDDFSGEIKNEKPVKVLEKLSKLYHLTWYYDENILYIYKTNEISRSIITPTYLDIDSLLKYLSDTISVNKNSCNVRKITTFNSIEVRGVPECIKYITSLSESLDKEAQSKAKNKDVVKVFKLNYASATDITYKYRDQNVVVPGVVSILKTMASNGSLPSTGKGAVERSGNLFDNSVTISADPRLNAVVVKDREITMDIYQQLISELDIEQRQIEISVSIIDVDANDLQQLGVNWSGTLNAGQGTIAFNSSTAQANISSSVISNASNFMIRVNALQQNSKAKILSQPSIITLNNMQAILDKNVTFYTKVSGEKVASLESITSGTLLRVTPRILDDSSNSLTGKRRERVRLLLDIQDGNQSTNQSNAQDASSTLPEVQNSEMTTEATLSAGESLLLGGFIQDKESSSKDGIPLLSDIPVIGSLFSSTVKQKHSVVRLFLIKATPIKSASSE

SEQ ID NO: 7744 - protein, 446 aa, Escherichia coli; identical to SEQ ID NO: 2180

SEQ ID NO: 7745 - protein, 747 aa, Escherichia coli; identical to SEQ ID NO: 3670

SEQ ID NO: 7746 - protein, 446 aa, Escherichia coli; identical to SEQ ID NO: 2176

SEQ ID NO: 7747 - protein, 249 aa, Escherichia coli; identical to SEQ ID NO: 3492

SEQ ID NO: 7748 - protein, 746 aa, Escherichia coli; identical to SEQ ID NO: 2949

SEQ ID NO: 7749 - protein, 222 aa, Escherichia coli
MQPDRTRIIFNSKDKATSLRVENRSDKLPYLAYSWIENEKGEKSDEFLVALPPIQRLEPKATSQVRIMKQAATAKLPTDRESLFYYNLREIPPVPEGSEGHAILQVAVQSRIKLFWRPAALRKKMGDHVEQQLQVSQQNNQLTLKTPTGYYLTIAYLGRDEKGVLPGFKSTMVAPFSSVTTSTGSYSGKQFYLGYMDDYGALRMNTLSCQRQCRLQPVENKK

SEQ ID NO: 7750 - protein, 518 aa, Escherichia coli; identical to SEQ ID NO: 2351

SEQ ID NO: 7751 - protein, 170 aa, Escherichia coli; identical to SEQ ID NO: 2565

SEQ ID NO: 7752 - protein, 660 aa, Escherichia coli
MGAFFAGENGNSTTGDAIYMRGADTSNSIYIDGIRDIGSVSRDTFNTEQVEVIKGPSGTDYGRSAPTGSINMISKQPRNDSGIDASASIGSAWFRRGTLDVNQVIGDTTAVRLNVMGEKTHDAGRDKVKNERYGVAPSIAFGLGTANRLYLNYLHVTQHNTPDGGIPTIGLPGYSAPSAGTAALNHSGKVDTHNFYGTDSDYDDSTTDTATMRFEHDINDNTTIRNTTRWSRVKQDYLMTAIMGGASNITQPTSDVNSWTWSRTANTKDVSNKILTNQTNLTSTFYTGSIGHDVSTGVEFTRETQTNYGVNPVTLPAVNIYHPDSSIHPGGLTRNGANANGQTDTFAIYAFDTLQITRDFELNGGIRLDNYHTEYDSATACGGSGRGAITCPTGVAKGSPVTTVDTAKSGNLVNWKAGALYHLTENGNVYINYAVSQQPPGGNNFALAQSGSGNSANRTDFKPQKANTSEIGTKWQVLDKRLLLTAALFRTDIENEVEQNDDGTYSQYGKKRVEGYEISVAGNITPAWQVIGGYTQQKATIKNGKDVAQDGSSSLPYTPEHAFTLWSQYQATDDISVGAGARYIGSMHKGSDGAVGTPAFTEGYWVADAKLGYRVNRNLDFQLNVYNLFDTDYVASINKSGYRYHPGEPRTFLLTANMHF

SEQ ID NO: 7753 - protein, 432 aa, Escherichia coli; identical to SEQ ID NO: 2026

SEQ ID NO: 7754 - protein, 660 aa, Escherichia coli; identical to SEQ ID NO: 4092

SEQ ID NO: 7755 - protein, 721 aa, Escherichia coli
MDEIPALAEKDDDSVINSLEQIIPGTAAEFDFNHQRLNLSIPQIALYRDARGYVSPSRWDDGIPTLFTNYSFTGSDNRYRQGNRSQRQYLNMQNGANFGPWRLRNYSTWTRNDQASSWNTISSYLQRDIKALKSQLLLGESATSGSIFSSYNFTGVQLASDDNMLPNSQRGFAPTVRGIANSSAIVTIRQNGYVIYQSNVPAGAFEINDLYPSSNSGDLEVTIEESDGTQRRFIQPYSSLPMMQRPGHLKYSATAGRYRADANSDSKEPEFAEATAIYGLNNTFTLYGGLLGSEDYYALGIGIGGTLGALGALSMDINRADTQFDNQHSFHGYQWRTQYIKDIPETNTNIAVSYYRYTNDGYFSFDEANTRNWDYNSRQKSEIQFNISQTIFDGVSLYASGSQQDYWGNNEKNRNISVGVSGQQWGIGYSLNYQYSRYTDQNNDRALSLNLSIPLERWLPRSRVSYQMTSQKDRPTQHEMRLDGSLLDDGRLSYSLEQSLDDDNNHNSSVNASYRSPYGTFSAGYSYGNDSSQYNYGVTGGVVIHPHGVTLSQYLGNAFALIDANGASGVRIQNYPGIATDPFGYAVVPYLTTYQENRLSVDTTQLPDNVDLEQTTQFVVPNRGAMVAARFNANIGYRVLVTVSDRNGKPLPFGALASNDDTGQQSIVDEGGILYLSGISSKSQSWTVRWGNQADQQCQFAFSTPDSEPTTSVLQGTAQCH

SEQ ID NO: 7756 - protein, 881 aa, Escherichia coli
MPDHSLFRLRILPWCIALAMSGSYSSVWAEDDIQFDSRFLELKGDTKIDLKRFSSQGYVEPGKYNLQVQLNKQPLAEEYDIYWYAGEDDASKSYACLTPELVAQFGLKEDVAKNLQWSHDAKCLKSGQLEGMEIKADLSQSALVISLPQAYLEYTYPDWDPPSRWDDGISGIVADYSINAQTRHEENGGDDSNEISGNGTVGVNLGPWRMRADWQTNYQHTRSNDDDDEFSGDETQKKWEWSRYYAWRALPSLKAKLALGEDYLRSDIFDGFNYVGGSVSTDDQMLPPNLRGYAPDISGVAHTTAKVTVSQMGRVIYETQVPAGPFRIQDLGDSVSGTLHIRIEEQNGQVQEYDISTASMPYLTRPGQVRYKIMMGRPQEWGHHVEGEFFSGAEASWGIANGWSLYGGTLGDENYQSAALGVGRDLSTFGAVAFDVTHSHTKLDKDTAYGKGSLDGNSFRVSYSKDFDQLNSRVTFAGYRFSEENFMTMSEYLDASDSGMVRTGNDKEMYTATYNQNFRDAGVSVYLNYTRHTYWDREEQTNYNIMLSHYFNMGSIRNVSISMTGYRYEYDNQADKGMYISLSMPWGDNSTVSYNGNYGSGTDSSQVGYFSRVDDATHYQLNVGTSDKHTSVDGYYSHDGSLAQVDLSANYHEGQYTSAGLSLQGGATLTAHGGALHRTQNMGGTRLLIDADGVADVPVEGNGAAVYTNMFGKAVVSDVNNYYRNQAYIDLNRLPENAEATQSVVQATLTEGAIGYRKFAVISGQKAMAVLRLSDGSHPPFGAEVKNDNEQTVGLVDDDGNVYLAGVKPGEHMSVFWSGVAHCDINLPDPLPADLFNGLLLPCQHKGNVAPITSPAVKPAIQEQTQRVTPTEPPTSISVNQ

SEQ ID NO: 7757 - protein, 266 aa, Escherichia coli; identical to SEQ ID NO: 1894

SEQ ID NO: 7758 - protein, 430 aa, Escherichia coli; identical to SEQ ID NO: 2617

SEQ ID NO: 7759 - protein, 274 aa, Escherichia coli; identical to SEQ ID NO: 2304

SEQ ID NO: 7760 - protein, 998 aa, Escherichia coli; identical to SEQ ID NO: 2918

SEQ ID NO: 7761 - protein, 591 aa, Escherichia coli; identical to SEQ ID NO: 3668

SEQ ID NO: 7762 - protein, 860 aa, Escherichia coli; identical to SEQ ID NO: 3544

SEQ ID NO: 7763 - protein, 118 aa, Escherichia coli [sequence omitted]

SEQ ID NO: 7764 - protein, 655 aa, Escherichia coli; identical to SEQ ID NO: 7517

SEQ ID NO: 7765 - protein, 191 aa, Escherichia coli; identical to SEQ ID NO: 2727

SEQ ID NO: 7766 - protein, 368 aa, Escherichia coli; identical to SEQ ID NO: 2371

SEQ ID NO: 7767 - protein, 627 aa, Escherichia coli; identical to SEQ ID NO: 3529

SEQ ID NO: 7768 - protein, 232 aa, Escherichia coli; identical to SEQ ID NO: 2087

SEQ ID NO: 7769 - protein, 472 aa, Escherichia coli
MSTIHTPLTYNEINGKPFGLDYELAKQFADYLGVKLKVTVRQNISQLFDDLDNGNADLLAAGLVYNSERVKNYQPGPTYYSVSQQLVYKVGQYRPRTLGNLTAEQLTVAPGHVVVNDLQTLKETKFPELSWKVDDKKGSAELMEDVIEGKLDYTIADSVAISLFQRVHPELAVALDITDEQPVTWFSPLDGDNTLSAALLDFFNEMNEDGTLARIEEKYLGHGDDFDYVDTRTFLRAVDAVLPQLKPLFEKYAEEIDWRLLAAIAYQESHWDAQATSPTGVRGMMMLTKNTAQSLGITDRTDAEQSISGGVRYLQDMMSKVPESVPENERIWFALAAYNMGYAHMLDARALTAKTKGNPDSWADVKQRLPLLSQKPYYSKLTYGYARGHEAYAYVENIRKYQISLVGYLQEKEKQATEAAMQLAQDYPAVSPTELGKEKFPFLSFLSQSSSNYLTHSPSLLFSRKGSEEKQN

SEQ ID NO: 7770 - protein, 193 aa, Escherichia coli; identical to SEQ ID NO: 2246

SEQ ID NO: 7771 - protein, 224 aa, Escherichia coli; identical to SEQ ID NO: 3115

SEQ ID NO: 7772 - protein, 878 aa, Escherichia coli; identical to SEQ ID NO: 2855

SEQ ID NO: 7773 - protein, 765 aa, Escherichia coli; identical to SEQ ID NO: 4323

SEQ ID NO: 7774 - protein, 208 aa, Escherichia coli; identical to SEQ ID NO: 1949

SEQ ID NO: 7775 - protein, 322 aa, Escherichia coli
MRENDLLTFAVNWKDDVHREKGAPHAAYDRYEDRTWSLASEYQWAAADNVDVVAGISYDWRDSVEAKKHEKDGSITHYDDNNQSAFNWQVMGKYHFVNEDTLALSYYDRKRFPTLKERYTTSKPAYNQIAIVNPQLKPERARGVDLTWNGAFTHDWGFEVSVYYNRVSDAILSHNIDADTIQNQNSGTVDYSGLDAGIKGKISNILDVGLSYALIHADAKRKDIGKITDLPTQTMTAWMTLKPWEPLSVTLSEEARSSSYSNSDGSQKAAGFAVTHIRADYTLGHGFSVNASVNNLFDTQYAYSEGFVEEGRNFWAGVEYTF

SEQ ID NO: 7776 - protein, 432 aa, Escherichia coli; identical to SEQ ID NO: 2026

SEQ ID NO: 7777 - protein, 367 aa, Escherichia coli; identical to SEQ ID NO: 6155

SEQ ID NO: 7778 - protein, 361 aa, Escherichia coli; identical to SEQ ID NO: 3061

SEQ ID NO: 7779 - protein, 539 aa, Escherichia coli
MAAVCGTSGIASLFSQAAFAADSDIADGQTQRFDFSILQSMAHDLAQTAWRGAPRPLPDTLATMTPQAYNSIQYDAEKSLWHNVENRQLDAQFFHMGMGFRRRVRMFSVDPATHLAREIHFRPELFKYNDAGVDTKQLEGQSDLGFAGFRVFKAPELARRDVVSFLGASYFRAVDDTYQYGLSARGLAIDTYTDSKEEFPDFTAFWFDTVKPGATTFTVYALLDSASITGAYKFTIHCEKSQVIMDVENHLYARKDIKQLGIAPMTSMFSCGTNERRMCDTIHPQIHDSDRLSMWRGNGEWICRPLNNPQTLQFNAYTDNNPKGFGLLQLDRDFSHYQDIMGWYNKRPSLWVEPRNKWGKGTIGLMEIPTTGETLDNIVCFWQPEKAVKAGDEFAFQYRLYWSAQPPVHCPLARVMATRTGMGGFPEGWAPGEHYPEKWARRFAVDFVGGDLKAAAPKGIEPVITLSSGEAKQIEILYIEPIDGYRIQFDWYPTSDSTDPVDMRMYLRCQGDAISETWLYQYFPPAPDKRQYVDDRVMS

SEQ ID NO: 7780 - protein, 673 aa, Escherichia coli
MKMTRLYPLALGGLLLPAIANAQTSQQDESTLVVTASKQSSRSASANNVSSTVVSAPELSDAGVTASDKLPRVLPGLNIENSGNMLFSTISLRGVSSAQDFYNPAVTLYVDGVPQLSTNTIQALTDVQSVELLRGPQGTLYGKSAQGGIINIVTQQPDSTPRGYIEGGVSSRDSYRSKFNLSGPIEDGLLYGSVTLLRQVDDGDMINPATGSDDLGGTRASIGNVKLRLAPDDQPWEMGFAASRECTRATQDAYVGWNDIKGRKLSISDGSPDPYMRRCTDSQTLSGKYTTDDWVFNLISAWQQQHYSRTFPSGSLIVNMPQRWNQDVQELRAATLGDARTVDMVFGLYRQNTREKLNSAYDMPTMPYLSSTGYTTAETLAAYSDLTWHLTDRFDIGGGVRFSHDKSSTQYHGSMLGNPFGDQGKSNDDQVLGQLSAGYMLTDDWRVYTRVAQGYKPSGYNIVPTAGLDAKPFVAEKSINYELGTRYETADVTLQAATFYTHTKDMQLYSGPVGMQTLSNAGKADATGVELEAKWRFAPGWSWDINGNVIRSEFTNDSELYHGNRVPFVPRYGAGSSVNGVIDTRYGALMPRLAVNLVGPHYFDGDNQLRQGTYATLDSSLGWQATERMNISVYVDNLFDRRYRTYGYMNGSSAVAQVNMGRTVGINTRIDFF

SEQ ID NO: 7781 - protein, 200 aa, Escherichia coli; identical to SEQ ID NO: 1784

SEQ ID NO: 7782 - protein, 760 aa, Escherichia coli; identical to SEQ ID NO: 2078

SEQ ID NO: 7783 - protein, 191 aa, Escherichia coli; identical to SEQ ID NO: 2727

SEQ ID NO: 7784 - protein, 193 aa, Escherichia coli; identical to SEQ ID NO: 2250

SEQ ID NO: 7785 - protein, 478 aa, Escherichia coli; identical to SEQ ID NO: 2404

SEQ ID NO: 7786 - protein, 747 aa, Escherichia coli; identical to SEQ ID NO: 2954

SEQ ID NO: 7787 - protein, 213 aa, Escherichia coli; identical to SEQ ID NO: 2232

SEQ ID NO: 7788 - protein, 216 aa, Escherichia coli
MAMMVAGRAEAGVALGATRVIYPAGQKQVQLAVTNNDENSTYLIQSWVENADGVKDGRFIVTPPLFAMKGKKENTLRILDATNNQLPQDRESLFWMNVKAIPSMDKSKLTENTLQLAIISRIKLYYRPAKLALPPDQAAEKLRFRRSANSLTLINPTPYYLTVTELNAGARVLENALVPPMGESTVKLPSDAGSNITYRTINDYGALTPKMTGVME

SEQ ID NO: 7789 - protein, 161 aa, Escherichia coli; identical to SEQ ID NO: 2582

SEQ ID NO: 7790 - protein, 746 aa, Escherichia coli; identical to SEQ ID NO: 3031

SEQ ID NO: 7791 - protein, 130 aa, Escherichia coli; identical to SEQ ID NO: 7391

SEQ ID NO: 7792 - protein, 215 aa, Escherichia coli
MPQSSIASYIGDLPPESSNAYEVGAKFELFDGITADIALFDIHKRNVLYTESIGDETIAKTAGRVRSRGVEVDLAGALTENINIIASYGYTDAKVLEDPDYAGKPLPNVPRHTGSLFLTYDIHNMPGNNTLTFGGGGHGVSRRSATNGADYYLPGYFVADAFAAYKMKLQYPVTLQLNVKNLFDKTYYTSSIATNNLGNQIGDPREVQFTVKMEF

SEQ ID NO: 7793 - protein, 224 aa, Escherichia coli; identical to SEQ ID NO: 3604

SEQ ID NO: 7794 - protein, 386 aa, Escherichia coli; identical to SEQ ID NO: 3600

SEQ ID NO: 7795 - protein, 351 aa, Escherichia coli; identical to SEQ ID NO: 3103

SEQ ID NO: 7796 - protein, 430 aa, Escherichia coli; identical to SEQ ID NO: 2617

SEQ ID NO: 7797 - protein, 207 aa, Escherichia coli; identical to SEQ ID NO: 2211

SEQ ID NO: 7798 - protein, 216 aa, Escherichia coli; identical to SEQ ID NO: 3112

SEQ ID NO: 7799 - protein, 816 aa, Escherichia coli; identical to SEQ ID NO: 3172

SEQ ID NO: 7800 - protein, 365 aa, Escherichia coli; identical to SEQ ID NO: 3084

SEQ ID NO: 7801 - protein, 883 aa, Escherichia coli
MTAFRAAFKAYRMHQVLILPRFARLTIALGLATAVFPVDAEYYFNPRFLSNDLAESVDLSAFTKGREAPPGTYRVDIYLNDEFMTSRDITFIADDNNADLIPCLSTDLLVSLGIKKSALLDNKEHSAEKHVPDNSACTPLQDRLADASTEFDVGQQHLSLSVPQIYVGRMARGYVSPELWEEGINAGLLNYSFNGNSINNRSNHNAGKSNYAYLNLQSGINIGSWRLRDNSTWSYNSGSSNSSNSNKWQHINTSAERDIIPLRSRLTVGDSYTDGDIFDSVNFRGLKINSTEAMLPDSQHGFAPVIHGIARGTAQVSVKQNGYDVYQTTVPPGPFTIDDINSAANGGDLQVTIKEADGSIQTLYVPYSSVPVLQRAGYTRYALAMGEYRSGNNLQSSPKFIQGSLMHGLEGNWTPYGGMQIAEDYQAFNLGIGKDLGLFGAFSFDITQANTTLADGTRHSGQSVKSVYSKSFYQTGTNIQVAGYRYSTQGFYNLSDSAYSRMSGYTVKPPTGDTNEQTQFIDYFNLFYSKRGQEQISISQQLGNYGTTFFSASRQSYWNTSRSDQQISFGLNVPFGDITTSLNYSYSNNIWQNDRDHLLAFTLNVPFSHWMRTDSQSAFRNSNASYSMSNDLKGGMTNLSGVYGTLLPDNNLNYSVQVGNTHGGNTSSGTSGYSSLNYRGAYGNTNVGYSRNGDSSQIYYGMSGGIIAHADGITFGQPLGDTMVLVKAPGADNVKIENQTGIHTDWRGYAILPFATEYRENRVALNANSLADNVELDETVVTVIPTHGAIARATFNAQIGGKVLMTLKYGNKSVPFGAIVTHGENKNGSIVAENGQVYLTGLPQSGKLQVSWGNDKNSNCIVDYKLPEVSPGTLLNQQTAICR

SEQ ID NO: 7802 - protein, 230 aa, Escherichia coli; identical to SEQ ID NO: 3348

SEQ ID NO: 7803 - protein, 446 aa, Escherichia coli; identical to SEQ ID NO: 2176

SEQ ID NO: 7804 - protein, 361 aa, Escherichia coli; identical to SEQ ID NO: 3135

SEQ ID NO: 7805 - protein, 816 aa, Escherichia coli; identical to SEQ ID NO: 4456

SEQ ID NO: 7806 - protein, 266 aa, Escherichia coli; identical to SEQ ID NO: 1892

SEQ ID NO: 7807 - protein, 650 aa, Escherichia coli
MSAISCAWPVLAVDDDGETMVVTASSVEQNLKDAPASISVITQEDLQRKPVQNLKDVLKEVPGVQLTNEGDNRKGVSIRGLDSSYTLILVDGKRVNSRNAVFRHNDFDLNWIPVDSIERIEVVRGPMSSLYGSDALGGVVNIITKKIGQKWSGTVTVDTTIQEHRDRGDTYNGQFFTSGPLIDGVLGMKAYGSLAKREKDDPQNSTTTDTGETPRIEGFSSRDGNVEFAWTPNQNHDFTAGYGFDRQDRDSDSLDKNRLERQNYSVSHNGRWDYGTSELKYYGEKVENKNPGNSSPITSESNAVDGKYTLPLTAINQFLTVGGEWRHDKLSDAVNLTGGTSSKTSASQYALFVEDEWRIFEPLALTTGVRMDDHETYGEHWSPRAYLVYNATDTVTVKGGWATAFKAPSLLQLSPDWTSNSCRGACKIVGSPDLKPETSESWELGLYYMGEEGWLEGVESSVTVFRNDVKDRISISRTSDVNAAPGYQNFVGFETGANGRRIPVFSYYNVNKARIQGVETELKIPFNDEWKLSINYTYNDGRDVSNGENKPLSDLPFHTANGTLDWKPLALEDWSFYVSGHYTGQKRADSATAKTPGGYTIWNTGAAWQVTKDVKLRAGVLNLGDKDLSRDDYSYNEDGRRYFMAVDYRF

SEQ ID NO: 7808 - protein, 869 aa, Escherichia coli; identical to SEQ ID NO: 3166

SEQ ID NO: 7809 - protein, 250 aa, Escherichia coli; identical to SEQ ID NO: 3048

SEQ ID NO: 7810 - protein, 230 aa, Escherichia coli; identical to SEQ ID NO: 3019

SEQ ID NO: 7811 - protein, 819 aa, Escherichia coli
MDTVNIYRLSFVSCLVVAMPCALAVEFNLNVLDKSMRDRIDISLLKEKGVIAPGEYFVSVAVNNNQISNGQKINWHKNDDKTIPCINDLLVDKFGLKPEVRQSLPLINQCVDFSSRPEMLFNFDQANQQLNISIPQAWLAWHSENWTPPSTWKEGVAGILMDYNLFASSYRPQDGSSSTNLNAYGTTGINAGAWRLRSDYQLNQTDSDDNHEQSGGISRTYLFRPLPQLGSKLTLGETDFSSNIFDGFSYTGAALASDERMLPWELRGYAPQISGIAQTNATVTISQSGRVIYQKKVPPGPFIIDDLNQSVQGTLDVKVTEEDGRVNNFQVSAASTPFLTRQGQVRYKLAAGQPRPSMSHQTENETFFSNEVSWGMLSNTSLYGGLLLSGDDYHSAAMGIGQNMLWLGALSFDVTWASSHFDTQQDERGLSYRFNYSKQVDATNSTISLAAYRFSDRHFHSYANYLDHKYNDSDAQDEKQTISLSVGQPITPLNLNLYANLLHQTGWNADASTTANITAGFNVDIGDWRDISISTSFNTTHYEDKDRDNQIYLSISLPFGNGGRVGYDMQNSSHSTTHRMSWNDTLDERNSWGMSAGLQSDRPDNGAQVSGNYQHLSSAGEWDISGTYAANDYSSVSSSWSGSFTATQYGAAFHRRSSTNEPRLMVSTDGVADIPVQGNLDYTNHFGIAVVPLISSYQPSTVAVNMNDLPDGVTVAENVIKETWIEGAIGYKSLASRSGKDVNVIIRNASGQFPPLGADIRQDGSGISVGMVGEEGHAWLSGVAENQQFTVVWGDSQHCSLHLPEHMEDTANRLILPCH

SEQ ID NO: 7812 - protein, 863 aa, Escherichia coli; identical to SEQ ID NO: 3113

SEQ ID NO: 7813 - protein, 266 aa, Escherichia coli; identical to SEQ ID NO: 1894

SEQ ID NO: 7814 - protein, 843 aa, Escherichia coli; identical to SEQ ID NO: 3163

SEQ ID NO: 7815 - protein, 883 aa, Escherichia coli; identical to SEQ ID NO: 2822

SEQ ID NO: 7816 - protein, 228 aa, Escherichia coli; identical to SEQ ID NO: 4179

SEQ ID NO: 7817 - protein, 208 aa, Escherichia coli; identical to SEQ ID NO: 1949

SEQ ID NO: 7818 - protein, 765 aa, Escherichia coli
MQFHINSPDINNEKAVLLARDETLGNCLNLTEIIPQASVRYDVNEQRLDIDVPQAWVMKNYQNYVDPSLWENGINAAMLSYNLNGYHSETPGRRNDSIYAAFNGGMNLGAWRLRASGNYNWMTDSGSNYDFKNRYIQRDIASLRSQLILGESYTTGETFDSVSIRGIRLYSDSRMLPPTLASFAPIIHGVANTNAKVTITQGGYKIYETTVPPGAFVIDDLSPSGYGSDLIVTVEESDGSKRTFSQPFSSVVQMLRPGVGRWDISGGQVLKDDIQDEPNLFQASYYYGLNNYLTGYTGIQITDNNYTAGLLGLGLNTSVGAFSFDVTHSNVRIPDDKAYQGQSYRVSWNKLFEETSTSLNIAAYRYSTQNYLGLNDALTLIDEVKHPEQDLEPKSMRNYSRMKNQVTVSINQPLKFEKKDYGSFYLSGSWSDYWASGQNRSNYSIGYSNSASWGSYSVSAQRSWNEDGDTDDSVYLSFTIPIEKLLGTEQRTSGFQSIDTQMSSDFKGNNQLNVSSSGYSDNARVSYSVNTGYTMNKASKDLSYVGGYASYESPWGTLAGSVSANSDNSRQVSLSTDGGFVLHSGGLTFSNDSFSDSDTLAVVQAPGAQGARINYGNSTIDRWGYGVTSALSPYHENRIALDINDLENDVELKSTSAVAVPRQGSVVFADFETVQGQSAIMNITRSDGKNIPFAADIYDEKGNVIGNVGQGGQAFVRGIEQQGNISIKWLEESKPVSCLAHYQQSSEAEKIAQSIILNGIRCQIQ

SEQ ID NO: 7819 - protein, 368 aa, Escherichia coli; identical to SEQ ID NO: 2371

SEQ ID NO: 7820 - protein, 113 aa, Escherichia coli
MEKDQKNENTLQLAIISRIKMFYRPTNLAMAPEEAPAMLRFRRSGSKLTLINPTPYFITVTNMKAGNSNLPNTMVPPKGEVSVDIPHAATGDISFQTINDYGALTPRIKATMQ

SEQ ID NO: 7821 - protein, 715 aa, Escherichia coli; identical to SEQ ID NO: 3971

SEQ ID NO: 7822 - protein, 863 aa, Escherichia coli
MHIRKHRLAGFFVRLFVACAFAVQAPLSSAELYFNPRFLADDPQAVADLSRFENGQELPPGTYRVDIYLNNGYMATRDVTFNTGDSEQGIVPCLTRAQLASMGLNTASVAGMNLLADDACVPLTTMVQDATAHLDVGQQRLNLTIPQAFMSNRARGYIPPELWDPGINAGLLNYNFSGNSVQNRIGGNSHYAYLNLQSGLNIGAWRLRDNTTWSYNSSDRSSGSKNKWQHINTWLERDIIPLRSRLTLGDGYTQGDIFDGINFRGAQLASDDNMLPDSQRGFAPVIHGIARGTAQVTIKQNGYDIYNSTVPPGPFTINDIYAAGNSGDLQVTIKEADGSTQIFTVPYSSVPLLQREGHTRYSITAGEYRSGNAQQEKPRFFQSTLLHGLPAGWTIYGGTQLADRYRAFNFGIGKNMGALGALSVDMTQANSTLPDDSQHDGQSVRFLYNKSLNESGTNIQLVGYRYSTSGYFNFADTTYSRMNGYNIETQDGVIQVKPKFTDYYNLAYNKRGKLQLTVTQQLGRSSTLYLSGSHQTYWGTSNVDEQFQAGLNTAFEDINWTLSYSLTKNAWQKGRDQMLARNVNIPFSHWLRSDSKSQWRHASASYSMSHDLNGRMTNLAGVYGTLLEDNNLSYSVQTGYAGGGDGNSGSTGYATLNYRGGYGNANIGYSHSDDIKQLYYGVSGGVLAHANGVTLGQPLNDTVVLVKAPGAKDAKVENQTGVRTDWRGYAVLPYATEYRENRVALDTNTLADNVDLNNAVANVVPTRGAIVRAEFKARVGIKLLMTLTHNNKPLPFGAMVTSESSQSSGIVADNGQVYLSGMPLAGKVQVKWGEEENAHCVANYQLPPESQQQLLTQLSAECR

SEQ ID NO: 7823 - protein, 729 aa, Escherichia coli; identical to SEQ ID NO: 2948

SEQ ID NO: 7824 - protein, 512 aa, Escherichia coli; identical to SEQ ID NO: 2813

SEQ ID NO: 7825 - protein, 614 aa, Escherichia coli; identical to SEQ ID NO: 1883

SEQ ID NO: 7826 - protein, 243 aa, Escherichia coli; identical to SEQ ID NO: 3561

SEQ ID NO: 7827 - protein, 816 aa, Escherichia coli; identical to SEQ ID NO: 3562

SEQ ID NO: 7828 - protein, 700 aa, Escherichia coli; identical to SEQ ID NO: 2926

SEQ ID NO: 7829 - protein, 432 aa, Escherichia coli; identical to SEQ ID NO: 2026

SEQ ID NO: 7830 - protein, 478 aa, Escherichia coli; identical to SEQ ID NO: 2404

SEQ ID NO: 7831 - protein, 252 aa, Escherichia coli; identical to SEQ ID NO: 3543

SEQ ID NO: 7832 - protein, 89 aa, Escherichia coli; identical to SEQ ID NO: 2833

SEQ ID NO: 7833 - protein, 998 aa, Escherichia coli; identical to SEQ ID NO: 2918

SEQ ID NO: 7834 - protein, 224 aa, Escherichia coli; identical to SEQ ID NO: 3578

SEQ ID NO: 7835 - protein, 840 aa, Escherichia coli; identical to SEQ ID NO: 3591

SEQ ID NO: 7836 - protein, 241 aa, Escherichia coli; identical to SEQ ID NO: 3582

SEQ ID NO: 7837 - protein, 747 aa, Escherichia coli; identical to SEQ ID NO: 2954

SEQ ID NO: 7838 - protein, 161 aa, Escherichia coli; identical to SEQ ID NO: 2582

SEQ ID NO: 7839 - protein, 213 aa, Escherichia coli; identical to SEQ ID NO: 2232

SEQ ID NO: 7840 - protein, 696 aa, Escherichia coli; identical to SEQ ID NO: 4038

SEQ ID NO: 7841 - protein, 659 aa, Escherichia coli; identical to SEQ ID NO: 2942

SEQ ID NO: 7842 - protein, 230 aa, Escherichia coli; identical to SEQ ID NO: 2995

SEQ ID NO: 7843 - protein, 367 aa, Escherichia coli; identical to SEQ ID NO: 2431

SEQ ID NO: 7844 - protein, 869 aa, Escherichia coli; identical to SEQ ID NO: 2903

SEQ ID NO: 7845 - protein, 224 aa, Escherichia coli
MKGLLSLLISSMIFPVHAGMVIFGTRIIYPAEQKEVMVQLMNQGNRSSLMQAWIDDGDTSLPPEKIQVPFMLTPPVVKVAANSGQQIKIKIMPNKLPSNKESIFYLNVLDIPPNSPEDEGKNALKFAMQNRIKLFYRPAGIAPVNKTTFKKLRVSRSGNNVVIKNDSPNWVTISDVKANNVKVNYETIMIAPQESQNVSVKNNNANGWQLTIIDDHGNYISDKI

SEQ ID NO: 7846 - protein, 446 aa, Escherichia coli; identical to SEQ ID NO: 2180

SEQ ID NO: 7847 - protein, 826 aa, Escherichia coli; identical to SEQ ID NO: 3563

SEQ ID NO: 7848 - protein, 784 aa, Escherichia coli; identical to SEQ ID NO: 5933

SEQ ID NO: 7849 - protein, 219 aa, Escherichia coli; identical to SEQ ID NO: 3328

SEQ ID NO: 7850 - protein, 856 aa, Escherichia coli
MAGFFVRLVVACAFAAQAPLSSAELYFNPRFLADDPQAVADLSRFENGQELPPGTYRVDIYLNNGYMATRDVTFNTGDSEQGIVPCLTRAQLASMGLNTASVSGMNLLADDACVPLTSMIHDATAHLDVGQQRLNLTIPQAFMSNRARGYIPPELWDPGINAGLLNYNFSGNSVQNRIGGNSHYAYLNLQSGLNIGAWRLRDNTTWSYNSSDRSSGSKNKWQHINTWLERDIIPLRSRLTLGDGYTQGDIFDGINFRGAQLASDDNMLPDSQRGFAPVIHGIARGTAQVTIKQNGYDIYNSTVPPGPFTINDIYAAGNSGDLQVTIKEADGSTQIFTVPYSSVPLLQREGHTRYSITAGEYRSGNAQQEKPRFFQSTLLHGLPAGWTIYGGTQLADRYRAFNFGIGKNMGALGALSVDMTQANSTLPDDSQHDGQSVRFLYNKSLNESGTNIQLVGYRYSTSGYFNFADTTYSRMNGYNIETQDGVIQVKPKFTDYYNLAYNKRGKLQLTVTQQLGRTSTLYLSGSHQTYWGTSNVDEQFQAGLNTAFEDINWTLSYSLTKNAWQKGRDQMLALNVNIPFSHWLRSDSKSQWRHASASYSMSHDLNGRMTNLAGVYGTLLEDNNLSYSVQTGYAGGGDGNSGSTGYATLNYRGGYGNANIGYSHSDDIKQLYYGVSGGVLAHANGVTLGQPLNETVVLVKAPGAKDAKVENQTGVRTDWRGYAVLPYATEYRENRVALDTNTLADNVDLDNAVANVVPTRGAIVRAEFKARVGIKLLMTLTHNNKPLPFGAMVTSESSQSSGIVADNGQVYLSGMPLAGKVQVKWGEEENAHCIANYQLPPESQQQLLTQLSAECR

SEQ ID NO: 7851 - protein, 700 aa, Escherichia coli; identical to SEQ ID NO: 3128

SEQ ID NO: 7852 - protein, 836 aa, Escherichia coli
MKKNKSTFTINFITYSLMLSLAGVPVYAVDFNTDVLDAADRQNIDFSRFSRAGYIMPGQYQMEIRVNGQDISPSAFQIAFLEPPFSDSDNEKPLPEPCLTPEIVSRMGLTEASQEKVTYWNNGQCADFRQLSGVEIRPNPAEGMLYINMPQAWLEYSDASWLPPSRWDNGIPGLLFDYNINGTVNKPHQGKQSQSLNYNGTAGANFGAWRLRADYQGNLNHTTGSAQGTDSQFTWSRFYMYRAIPRWRANLTLGENYINSEIFSSWRYTGASLESDDRMLPPKLRGYAPQVSGIADTNARVVISQQGRILYDSTVPAGPFTIQDLDSSVRGRLDVEVIEQDGRKKTFQVDTAYVPYLTRPGQVRYKLVSGRSRTYEHTMEGPVFAAGEASWGISNTWSLYGGSIVAGDYNALAVGLGRDLSKFGTVSADVTQSVARIPGYDTKQGKSWRLSYSKRFDEVNTDITFAGYRFSERNYMTMDQYLNARYRNDFTGREKELYTVTLNKNFEDWKASVNLQYSHQTYWDRRTSDYYTLSVNRYFDAFSFKNIALGISASRSKYLNRDNDSAFVRLSVPWGTGTASYSGSMSNDRYTNTVGYSDTLNNGLSSYSLNAGVNSGGGQPSQRQMSAYYNHNGSLTNLSASFSAVENGYSSFGMSASGGATVTMKGAALHAGGMNGGTRLLVDTDGVGGVPVDGGRVYTNRWGIGVVTDVSSYYRNTTSVDLNKLPEDMEATRSVVESVLTEGAIGYREFEVLKGSRLFAVLRMSDNSYPPFGASVTNAKGRELGMVADSGLAWLSGVNPGETLNVGWDGRTQCVVDIPAHPDPAQQLLLPCRQVK

SEQ ID NO: 7853 - protein, 353 aa, Escherichia coli; identical to SEQ ID NO: 3376

SEQ ID NO: 7854 - protein, 250 aa, Escherichia coli; identical to SEQ ID NO: 3048

SEQ ID NO: 7855 - protein, 478 aa, Escherichia coli; identical to SEQ ID NO: 7448

SEQ ID NO: 7856 - protein, 365 aa, Escherichia coli; identical to SEQ ID NO: 3878

SEQ ID NO: 7857 - protein, 774 aa, Escherichia coli
MTPLRVFRKTTPLVNAIRLSLLPLAGLSFSAFAAQVNIAPGSLDKALNQYAAHSGFTLSVDASLTRGKQSNGLHGDYDVESGLQQLLDGSGLQVKPLGNNSWTLEPAPAPKEDALTVVGDWLGDARENDVFEHAGARDVIRREDFAKTGATTMREVLNRIPGVSAPENNGTGSHDLAMNFGIRGLNPRLASRSTVLMDGIPVPFAPYGQPQLSLAPVSLGNMDAIDVVRGGGAVRYGPQSVGGVVNFVTRAIPQDFGIEAGVEGHLSPTSSQNNPKETHNLMVGGTADNGFGTALLYSGTRGSDWREHSATRIDDLMLKSKYAPDEVHTFNSLLQYYDGEADMPGGLSRADYDADRWQSTRPYDRFWGRRKLASLGYQFQPDSQHKFNIQGFYTQTLRSGYLEQGKRITLSPRNYWVRGIEPRYSQIFMIGPSAHEVGVGYRYLNESTHEMRYYTATSSGQLPSGSSPYDRDTRSGTEAHAWYLDDKIDIGNWTITPGMRFEHIESYQNNAITGTHEEVSYNAPLPALNVLYHLTDSWNLYANTEGSFGTVQYSQIGKAVQSGNVEPEKARTWELGTRYDDGALTAEMGLFLINFNNQYDSNQTNDTVTARGKTRHTGLETQARYDLGTLTPTLDNVSIYASYAYVNAEIREKGDTYGNLVPFSPKHKGTLGVDYKPGNWTFNLNSDFQSSQFADNANTVKESADGSTGRIPGFMLWGARVAYDFGPQMADLNLAFGVKNIFDQDYFIRSYNDNNKGIYAGQPRTLYMQGSLKF

SEQ ID NO: 7858 - protein, 760 aa, Escherichia coli; identical to SEQ ID NO: 3923

SEQ ID NO: 7859 - protein, 825 aa, Escherichia coli
MGQNASNIDLSRYSEGNPAIPGMYDVSVYVNDQPIINQSITFIEIEGKKNAQACITLKNLLQFHINSPDINNEKAVLLARDETLGNCLNLTEIIPQASVRYDVNEQRLDIDVPQAWVMKNYQNYVDPSLWENGINAAMLSYNLNGYHSETPGRRNDSIYAAFNGGMNLGAWRLRASGNYNWMTDSGSNYDFKNRYIQRDIASLRSQLILGESYTTGETFDSVSIRGIRLYSDSRMLPPTLASFAPIIHGVANTNAKVTITQGGYKIYETTVPPGAFVIDDLSPSGYGSDLIVTVEESDGSKRTFSQPFSSVVQMLRPGVGRWDISGGQVLKDDIQDETNLFQASYYYGLNNYLTGYTGIQITDNNYTAGLLGLGLNTSVGAFSFDVTHSNVRIPDDKTYQGQSYRVSWNKLFEETSTSLNIAAYRYSTQNYLGLNDALTLIDEVKHPEQDLEPKSMRNYSRMKNQVTVSINQPLKFEKKDYGSFYLSGSWSDYWASGQNRSNYSIGYSNSASWGSYSVSAQRSWNEDGDTDDSVYLSFTIPIEKLLGTEQRTSGFQSIDTQMSSDFKGNNQLNVSSSGYSDNARVSYSVNTGYTMNKASKDLSYVGGYASYESPWGTLAGSVSANSDNSRQVSLSTDGGFVLHSGGLTFSNDSFSDSDTLAVVQAPGAQGARINYGNSTIDRWGYGVTSALSPYHENRIALDINDLENDVELKSTSAVAVPRQGSVVFADFETVQGQSAIMNITRSDGKNIPFAADIYDEQGNVIGNVGQGGQAFVRGIEQQGNISIKWLEESKPVSCLAHYQQSSEAEKIAQSIILNGIRCQIQ

SEQ ID NO: 7860 - protein, 517 aa, Escherichia coli; identical to SEQ ID NO: 2462

SEQ ID NO: 7861 - protein, 729 aa, Escherichia coli; identical to SEQ ID NO: 6108

SEQ ID NO: 7862 - protein, 213 aa, Escherichia coli; identical to SEQ ID NO: 2232

SEQ ID NO: 7863 - protein, 541 aa, Escherichia coli; identical to SEQ ID NO: 3377

SEQ ID NO: 7864 - protein, 233 aa, Escherichia coli; identical to SEQ ID NO: 3276

SEQ ID NO: 7865 - protein, 243 aa, Escherichia coli; identical to SEQ ID NO: 2910

SEQ ID NO: 7866 - protein, 834 aa, Escherichia coli
MYKKLKLTTISELIKNIYCSLSVLIIGCASAYAVEFNKDLIEAEDRENVNLSQFETDGQLPVGKYSLNALINNKRTPIHLDLQWVLIDNQTAVCLTPEQLTLLGFTDEIIEVAQQNLIDGCYPIEKEKQITTYLDKGKMQLSISAPQAWLKYKDANWTPPELWDHGIAGAFLDYNLYASHYAPHQGDNSQNISSYGQAGVNLGAWRLRTDYQYDQSFNNGKSQANNLDFPRIYLFRPIPAINAKLTIGQYDTESSIFDSFHFSGVSLKSDENMLPPDLRGYAPQITGVAQTNAKVTVSQNNRIIYQENVPPGPFAITNLFNTLQGQLDVKVEEEDGQVTQWQVASNSIPYLTRKGQIRYTTAMGKPTSVGGDSLQQPFFWTGEFSWGWLNNVSLYGGSVLTNRDYQSLATGVGFNLNSLGSLSFDVTRSDAQLHNQDKETGYSYRANYSKRFESTGSQLTFAGYRFSDKNFVTMNEYINDTNHYTNYQNEKESYIITFNQYLESLRLNTYVSLARNTYWDASSNVNYSLSLSRDFDIGPLKNVSTSLTFSRINWEEDNQDQLYLNISIPWGTSRTLSYGMQRNQDNKISHTASWYDSSDRNNSWSVSASGDNDEFKDMKASLRASYQHNTENGRLYLSGTSQRDSYYSLNASWNGSFTATRHGAAFHDYSGSADSRFMIDADGAEDIPLNNKRAVTNRYGIGVIPSVSSYITTSLSVDTRNLPENVDIENSVITTTLTEGAIGYAKLDTRKGYQIMGVIRLADGSHPPLGISVKDKTSHKELGLVADGGFVYLNGIQDDSKLTLRWGDKSCFIQPPNSSNLTTGTVILPCISQN

SEQ ID NO: 7867 - protein, 831 aa, Escherichia coli
MQELPMLRMTPLASAIVALLLGIEAYAAEETFDTHFMIGGMKDQQVANIRLDDNQPLPGQYDIDIYVNKQWRGKYEIIVKDNPQETCLSIEVIKRLGINSDNFASGKQCLTFEQLVQGGSYTRDIGVFRLDFSVPQAWVEELESGYVPPENWERGINAFYTSYYVSQYYSDYKASGNSKSTYVRFNSGLNLLGWQLHSDASFSKTNNNPGVWKSNTLYLERGFAQLLGTLRVGDMYTSSDIFDSVRFSGVRLFRDMQMLPNSKQNFTPRVQGIAQSNALVTIEQNGFVVYQKEVPPGPFAITDLQLAGGGADLDVSVKEADGSVTTYLVPYAAVPNMLQPGVSKYDFAAGRSHIEGASKQSDFVQAGYQYGFNNLLTLYGGSMVANNYYAFTLGTGWNTRFGAISVDATKSHSKQDNGDVFDGQSYQIAYNKFVSQTSTRFGLAAWRYSSRDYRTFNDHVWANNKDNYRRDENDVYDIADYYQNDFGRKNSFSANMSQSLPEGWGSVSLSTLWRDYWGRSGSSKDYQLSYSNNWRRISYILAASQAYDENHHEEKRFNIFISIPFDWGDDVTTPRRQIYMSNSTTFDDQGFASNNTGLSGTVGSRDQFNYGVNLSYQNQGNETTAGANLTWNAPVATVNGSYSQSSTYRQAGASVSGGIVAWSGGVNLANRLSETFAVMNAPGIKDAYVNGQKYRTTNRNGVVVYDGMTPYRENHLMLDVSQSDSEAELRGNRKIAAPYRGAVVLVNFDTDQRKPWFIKALRADGQPLMFGYEVNDIHGHNIGVVGQGSQLFIRTNEVPPSVNVAIDKQQGLSCTITFGKEIDESRNYICQ

SEQ ID NO: 7868 - protein, 851 aa, Escherichia coli; identical to SEQ ID NO: 3458

SEQ ID NO: 7869 - protein, 408 aa, Escherichia coli
MSGDSGGQSNGSPKSWAIGSLGRFGNEYSGWFDLQLKQRVYNENGKRVDAVVMMDGNVGQQYSTGWFGDNAGGENFMQFSDMYVTTKGFLPFAPEADFWVGKHGAPKIEIQMLDWKTQRTDAAAGVGLENWKVGPGKIDIALVREDVDDYDRSLQNKQQINTNTIDLRYKDIPLWDKATLMVSGRYVTANESASEKDNQDNNGYYDWKDTWMFGTSLTQKFDKGGFNEFSFLVANNSIASNFGRYAGASPFTTFNGRYYGDHTGGTAVRLTSQGEAYIGDHFIVANAIVYSFGNDIYSYETGAHSDFESIRAVVRPAYIWDQYNQTGVELGYFTQQNKDANSNKFNESGYKTTLFHTFKVNTSMLTSRPEIRFYATYIKALENELDGFTFEDNKDDQFAVGAQAEIWW

SEQ ID NO: 7870 - protein, 813 aa, Escherichia coli
MVLTGSGMLCTTANAEEYYFDPIMLETTKSGMQATELSRFSKKYAQLPGTYQVDIWLNKKKVSQKKITFTANAEQLLQPQFTVEQLRELGIKVDEIPALAEKDDDSVINSLEQIIPGTAAEFDFNHQRLNLSIPQIALYRDARGYVSPSRWDDGIPTLFTNYSFTGSDNRYRQGNRSQRQYLNMQNGANFGPWRLRNYSTWTRNDQASSWNTISSYLQRDIKALKSQLLLGESATSGSIFSSYTFTGVQLASDDNMLPNSQRGFAPTVRGIANSSAIVTIRQNGYVIYQSNVPAGAFEINDLYPSSNSGDLEVTIEESDGTQRRFIQPYSSLPMMQRPGHLKYSATAGRYRADANSDSKEPEFAEATAIYGLNNTFTLYGGLLGSEDYYALGIGIGGTLGALGALSMDINRADTQFDNRHSFHGYQWRTQYIKDIPETNTNIAVSYYRYTNDGYFSFDEANTRNWDYNSRQKSEIQFNISQTIFDGVSLYASGSQQDYWGNNDKNRNISVGVSGQQWGIGYSLNYQYSRYTDQNNDRALSLNLSIPLERWLPRSRVSYQMTSQKDRPTQHEMRLDGSLLDDGRLSYSLEQSLDDDNNHNSSLNASYRSPYGTFSAGYSYGNDSSQYNYGVTGGVVIHPHGVTLSQYLGNAFALIDANGASGVRIQNYPGIATDPFGYAVVPYLTTYQENRLSVDTTQLPDNVDLEQTTQFVVPNRGAMVAARFNANIGYRVLVTVSDRNGKPLPFGALASNDETGQQSIVDEGGILYLSGISSKSQSWTVRWGNQADQQCQFAFSTPDSEPTTSVLQGTAQCH

SEQ ID NO: 7871 - protein, 431 aa, Escherichia coli; identical to SEQ ID NO: 3408

SEQ ID NO: 7872 - protein, 784 aa, Escherichia coli; identical to SEQ ID NO: 2244

SEQ ID NO: 7873 - protein, 851 aa, Escherichia coli; identical to SEQ ID NO: 3458

SEQ ID NO: 7874 - protein, 224 aa, Escherichia coli; identical to SEQ ID NO: 3115

SEQ ID NO: 7875 - protein, 274 aa, Escherichia coli; identical to SEQ ID NO: 3160

SEQ ID NO: 7876 - protein, 359 aa, Escherichia coli; identical to SEQ ID NO: 2332

SEQ ID NO: 7877 - protein, 760 aa, Escherichia coli; identical to SEQ ID NO: 2078

SEQ ID NO: 7878 - protein, 828 aa, Escherichia coli; identical to SEQ ID NO: 2381

SEQ ID NO: 7879 - protein, 203 aa, Escherichia coli; identical to SEQ ID NO: 2009

SEQ ID NO: 7880 - protein, 267 aa, Escherichia coli; identical to SEQ ID NO: 5971

SEQ ID NO: 7881 - protein, 871 aa, Escherichia coli
MHQVLILPRFARLTIALGLATAVFPVDAEYYFNPRFLSNDLAESVDLSAFTKGREAPPGTYRVDIYLNDEFMTSRDITFIADDNNADLIPCLSTDLLVSLGIKKSALLDNKEHSAEKHVPDNSACTPLQDRLADASTEFDVGQQHLSLSVPQIYVGRMARGYVSPELWEEGINAGLLNYSFNGDSINNRSNHNAGKSNYAYLNLQSGINIGSWRLRDNSTWSYNSGSSNSSNSNKWQHINTSAERDIIPLRSRLTVGDSYTDGDIFDSVNFRGLKINSTEAMLPDSQHGFAPVIHGIARGTAQVSVKQNGYDVYQTTVPPGPFTIDDINSAANGGDLQVTIKEADGSIQTLYVPYSSVPVLQRAGYTRYALAMGEYRSGNNLQSSPKFIQGSLMHGLEGNWTPYGGMQIAEDYQAFNLGIGKDLGLFGAFSFDITQANTTLADGTRHSGQSVKSVYSKSFYQTGTNIQVAGYRYSTQGFYNLSDSAYSRMSGYTVKPPTGDTNEQTQFIDYFNLFYSKRGQEQISISQQLGNYGTTFFSANRQSYWNTSRSDQQISFGLNVPFGDITTSLNYSYSNNIWQNDRDHLLAFTLNVPFSHWMRTDSQSAFRNSNASYSMSNDLKGGMTNLSGVYGTLLPDNNLNYSVQVGNTHGGNTSSGTSGYSSLNYRGAYGNTNVGYSRNGDSSQIYYGMSGGIIAHADGITFGQPLGDTMVLVKAPGADNVKIENQTGIHTDWRGYAILPFATEYRENRVALNANSLADNVELDETVVTVIPTHGAIARATFNAQIGGKVLMTLKYGNKSVPFGAIVTHGENKNGSIVAENGQVYLTGLPQSGKLQVSWGKDKNSNCIVEYKLPEVSPGTLLNQQTAICR

SEQ ID NO: 7882 - protein, 191 aa, Escherichia coli; identical to SEQ ID NO: 2727

SEQ ID NO: 7883 - protein, 784 aa, Escherichia coli; identical to SEQ ID NO: 2240

SEQ ID NO: 7884 - protein, 518 aa, Escherichia coli; identical to SEQ ID NO: 2351

SEQ ID NO: 7885 - protein, 118 aa, Escherichia coli [sequence omitted]

SEQ ID NO: 7886 - protein, 162 aa, Escherichia coli; identical to SEQ ID NO: 1973

SEQ ID NO: 7887 - protein, 161 aa, Escherichia coli; identical to SEQ ID NO: 2582

SEQ ID NO: 7888 - protein, 575 aa, Escherichia coli
MTVSQMGRVIYETQVPAGPFRIQDLGDSVSGTLHIRIEEQNGQVQEYDISTASMPYLTRPGQVRYKIMMGRPQEWGHHVEGEFFSGAEASWGIANGWSLYGGALGDENYQSAALGVGRDLSTFGAVAFDVTHSHTKLDKDTAYGKGSLDGNSFRVSYSKDFDQLNSRVTFAGYRFSEENFMTMSEYLDASDSGMVRTGNDKEMYTATYNQNFRDAGVSVYLNYTRHTYWDREEQTNYNIMLSHYFNMGSIRNVSISMTGYRYEYDNREDKGMYISLSMPWGDNSTVSYNGNYGSGTDSSQVGYFSRVDDATHYQLNVGTSDKHTSVDGYYSHDGSLAQVDLSANYHEGQYTSAGLSLQGGATLTAHGGALHRTQNMGGTRLLIDADGVADVPVEGNGAAVYTNMFGKAVVSDVNNYYRNQAYIDLNRLPENAEATQSVVQATLTEGAIGYRKFAVISGQKAMAVLRLSDGSHPPFGAEVKNDNEQTVGLVDDDGNVYLAGVKPGEHMSVFWSGVAHCDINLPDPLPADLFNGLLLPCQHKGNVAPVVPDDIKPVIQEQTQQVTPTNPPVSVSANQ

SEQ ID NO: 7889 - protein, 524 aa, Escherichia coli
MSSLYGSDALGGVVNIITKKIGQKWSGTVTVDTTIQEHRDRGDTYNGQFFTSGPLIDGVLGMKAYGSLAKREKDDPQNSTTTDTGETPRIEGFSSRDGNVEFAWTPNQNHDFTAGYGFDRQDRDSDSLDKNRLERQNYSVSHNGRWDYGTSELKYYGEKVENKNPGNSSPITSESNAVDGKYTLPLTAINQFLTVGGEWRHDKLSDAVNLTGGTSSKTSASQYALFVEDEWRIFEPLALTTGVRMDDHETYGEHWSPRAYLVYNATDTVTVKGGWATAFKAPSLLQLSPDWTSNSCRGACKIVGSPDLKPETSESWELGLYYMGEEGWLEGVESSVTVFRNDVKDRISISRTSDVNAAPGYQNFVGFETGANGRRIPVFSYYNVNKARIQGVETELKIPFNDEWKLSINYTYNDGRDVSNGENKPLSDLPFHTANGTLDWKPLALEDWSFYVSGHYTGQKRADSATAKTPGGYTIWNTGAAWQVTKDVKLRAGVLNLGDKDLSRDDYSYNEDGRRYFMAVDYRF

SEQ ID NO: 7890 - protein, 368 aa, Escherichia coli; identical to SEQ ID NO: 3177

SEQ ID NO: 7891 - protein, 170 aa, Escherichia coli [sequence omitted]

SEQ ID NO: 7892 - protein, 266 aa, Escherichia coli; identical to SEQ ID NO: 3102

SEQ ID NO: 7893 - protein, 161 aa, Escherichia coli; identical to SEQ ID NO: 2582

SEQ ID NO: 7894 - protein, 614 aa, Escherichia coli; identical to SEQ ID NO: 1888

SEQ ID NO: 7895 - protein, 826 aa, Escherichia coli; identical to SEQ ID NO: 3078

SEQ ID NO: 7896 - protein, 237 aa, Escherichia coli; identical to SEQ ID NO: 3022

SEQ ID NO: 7897 - protein, 746 aa, Escherichia coli; identical to SEQ ID NO: 2949

SEQ ID NO: 7898 - protein, 880 aa, Escherichia coli; identical to SEQ ID NO: 3110

SEQ ID NO: 7899 - protein, 518 aa, Escherichia coli; identical to SEQ ID NO: 2349

SEQ ID NO: 7900 - protein, 367 aa, Escherichia coli; identical to SEQ ID NO: 3105

SEQ ID NO: 7901 - protein, 200 aa, Escherichia coli; identical to SEQ ID NO: 1784

SEQ ID NO: 7902 - protein, 678 aa, Escherichia coli; identical to SEQ ID NO: 3014

SEQ ID NO: 7903 - protein, 252 aa, Escherichia coli; identical to SEQ ID NO: 3400

SEQ ID NO: 7904 - protein, 193 aa, Escherichia coli; identical to SEQ ID NO: 2246

SEQ ID NO: 7905 - protein, 243 aa, Escherichia coli; identical to SEQ ID NO: 3159

SEQ ID NO: 7906 - protein, 331 aa, Escherichia coli; identical to SEQ ID NO: 2700

SEQ ID NO: 7907 - protein, 203 aa, Escherichia coli; identical to SEQ ID NO: 2201

SEQ ID NO: 7908 - protein, 539 aa, Escherichia coli
MAAVCGTSGIASLFSQAAFAADSDIADGQTQRFDFSILQSMAHDLAQTAWRGAPRPLPDTLATMTPQAYNSIQYDAEKSLWHNVENRQLDAQFFHMGMGFRRRVRMFSVDPATHLAREIHFRPELFKYNDAGVDTKQLEGQSDLGFAGFRVFKAPELARRDVVSFLGASYFRAVDDTYQYGLSARGLAIDTYTDSKEEFPDFTAFWFDTVKPGATTFTVYALLDSASITGAYKFTIHCEKSQVIMDVENHLYARKDIKQLGIAPMTSMFSCGTNERRMCDTIHPQIHDSDRLSMWRGNGEWICRPLNNPQKLQFNAYTDNNPKGFGLLQLDRDFSHYQDIMGWYNKRPSLWVEPRNKWGKGTIGLMEIPTTGETLDNIVCFWQPEKAVKAGDEFAFQYRLYWSAQPPVHCPLARVMATRTGMGGFPEGWAPGEHYPEKWARRFAVDFVGGDLKAAAPKGIGPVITLSSGEAKQIEILYIEPIDGYRIQFDWYPTSDSTDPVDMRMYLRCQGDAISETWLYQYFPPAPDKRQYVDDRVMS

SEQ ID NO: 7909 - protein, 249 aa, Escherichia coli; identical to SEQ ID NO: 3492

SEQ ID NO: 7910 - protein, 359 aa, Escherichia coli; identical to SEQ ID NO: 2328

SEQ ID NO: 7911 - protein, 120 aa, Escherichia coli; identical to SEQ ID NO: 3147

SEQ ID NO: 7912 - protein, 232 aa, Escherichia coli; identical to SEQ ID NO: 2087

SEQ ID NO: 7913 - protein, 686 aa, Escherichia coli; identical to SEQ ID NO: 3129

SEQ ID NO: 7914 - protein, 729 aa, Escherichia coli; identical to SEQ ID NO: 2948

SEQ ID NO: 7915 - protein, 231 aa, Escherichia coli; identical to SEQ ID NO: 3055

SEQ ID NO: 7916 - protein, 203 aa, Escherichia coli; identical to SEQ ID NO: 2009

SEQ ID NO: 7917 - protein, 565 aa, Escherichia coli; identical to SEQ ID NO: 3091

SEQ ID NO: 7918 - protein, 386 aa, Escherichia coli; identical to SEQ ID NO: 3094

SEQ ID NO: 7919 - protein, 672 aa, Escherichia coli
MIVSAAPQVVSELDTPAAVSVVDGEEMRLATPRINLSESLTGVPGLQVQNRQNYAQDLQLSIRGFGSRSTYGIRGIRLYVDGIPATMPDGQGQTSNIDLSSVQNVEVLRGPFSALYGNASGGVMNVTTQTGQQPPTIEASSYYGSFGSWRYGLKATGATGDGTQPGDVDYTVSTTRFTTHGYRDHSGAQKNLANAKLGVRIDEASKLSLIFNSVDIKADDPGGLTKAEWKANPQQAPRAEQYDTRKTIKQTQAGLRYERSLSAQDDMSVMMYAGERETTQYQSIPMAPQLNPSHAGGVITLQRHYQGIDSRWTHRGELGVPVTFTTGLNYENMSENRKGYNNFRLNSGMPEYGQKGELRRDERNLMWNIDPYLQTQWQLSEKLSLDAGVRYSSVWFDSNDHYVTPGNGDDSGDASYHKWLPAGSLKYAMTDAWNIYLAAGRGFETPTINELSYRADGQSGMNFGLKPSTNDTIEIGSKTRIGDGLLSLALFQTDTDDEIVVDSSSGGRTTYKNAGKTRRQGAELAWDQRFAGDFRVNASWTWLDATYRSNVCNEQDCNGNRMPGIARNMGFASIGYVPEDGWYAGTEARYMGDIMADDENTAKAPSYTLVGLFTGYKYNYHNLTVDLFGRVDNLFDKEYVGSVIVNESNGRYYEPSPGRNYGVGMNIAWRFE

SEQ ID NO: 7920 - protein, 231 aa, Escherichia coli
MSKRTFAVIITLLCSFCIGQALAGGIVLQRTRVIYDASRKEAALPVANKGAETPYLLQSWVDNIDGTSRAPFIITPPLFRLEAGDDSSLRIIKTADNLPENKESLFYINVRAIPAKKKSDDVNANELTLVFKTRIKMFYRPAHLKGRVNDAWTSLEFKRSDHSLNIYNPTEYYVVFAGLAVDKTDLTSKIEYIAPGEHKQLLLPASGGKNVKWAAINDYGGSSGTETRPLQ

SEQ ID NO: 7921 - protein, 863 aa, Escherichia coli; identical to SEQ ID NO: 3959

SEQ ID NO: 7922 - protein, 193 aa, Escherichia coli; identical to SEQ ID NO: 2250

SEQ ID NO: 7923 - protein, 860 aa, Escherichia coli
MSGSYVNAWAENEIQFDSRFLELKGDTKIDLKRFSSQGYVEPGKYNLQVQLNKQPLTEEYDIYWYASENDASKTYACLTPELVAQFGLKEDVAKKLQWIHDGKCLKPGQLEGIDIKADLSQSALVISLPQAYLEYTDINWDPPSRWDDGISGLIADYSITAQTRHEENGGDDSNEISGNGTVGVNLGAWRLRADWQTDYLHSKSNDDDVINGDDTQKNWEWSRYYAWRALPSLKAKLGLGEDYLNSDIFDGFNYVGGSISTDDQMLPPNLRGYAPDISGVAHTTAKVTVSQLGRVIYETQVPAGPFRIQDLGDSVSGTLHIRIEEQNGQVQEYDINTASMPFLTRPGQVRYKLMMGRPQEWGHHVEGGFFSGGEASWGIANGWSLYGGALADEHYQSAALGVGRDLSVFGAVAFDITHSHTRLDKETAYGKGSLDGNSFRLSYSKDFDELNSRVTFAGYRFSEENFMTMSEYLDASDSEMVRTGNDKEMYTATYNQNFRDAGVSVYLNYTRHTYWDRDEQTNYNVMLSHYFNLGSIRNMSISMTGYRYEYDNQADKGVYISLSMPWGDSSTISYNGNYGSGSDSSQVGYFSRVDDATHYQLNVGTSDNHSSVDGYYSHDGSLAQVDLSANYHEGQYTSAGISLQGGATLTAQGGALHRTQNMGGTRLLIDADGVAGVPVEGNGAAVYTNMFGKAVVADVNNYYRNQAYIDLNNLPENAEATQSVVQATLTEGAIGYRKFSVISGQKAMAVLRLQDGSYPPFGAEVKNDSAQNVGLVDDDGNVYLAGVKPGEHMIVSWGGVAHCDIHLPDPLPADLFNGLLLPCQQTGAISPSMPHEIKPVIQEQTQQVMPTEAPVSVSAN

SEQ ID NO: 7924 - protein, 832 aa, Escherichia coli
MAEPFSGAWQQGVKADPEAVLSFHAVFACISLISQDIAKMRLRLMQTDAHGIRRETRRGDIARLCRRPNAQQNRIQFFELWLNAKLRHGNTVVLKIRNARGQIKELRILDWSRVEPLVADDGEVFYRITPDRNCGITEAVTVPAREVIHDRFNCFFHPLIGLPPVYAAGLAATQGHHIQENSTSFFRNGGRPSGVIEIPGSITEENAKKLKSNWDSGYTGENAGKTAILSNGAKYNPTTFSPVDAQTVEQLKMTAEIVCSVFRVPAYKIGVGQPPSSDNVEALEQQYYSQCLQTLIESIELLLDEALETGENESTEFDVTTLLRMDSERRMKTLGDAVKNTLLTPNEARKRENLPPLAGGDALYLQQQNYSLEALSRRDAREDPFASAGKTVSSQLPDGASDGNKAISETEHDAVKAMFRGDTEKMTERELSIIRALGEEFSTVLADLQRTFEEKIAAQAQTFEEKLASQSVVLQKCVTGDDVRPMLEQMVKEAVSHIPVPRDGRDYDPDVLQKAVNDAVANIPVPADGKSITPDDVRPMLEQMVKEAVSHIPVPRDGRDYDPDVLQKAVNDAVAKIPVPADGKSITPDDVHPMLEQMVKEAVSHIPVPRDGRDYDPDVLQKAVNDAVAKIPVPADGKSITPDDVHPMLEQMVKEAVSHIPVPRDGRDYDPDVLQKAVLEAVSALPAPQDGRDATALEILPAIDDQKSFPRGSYATHQGGLWRAYEKTYGMRGWECLVDGVADIDVSMTDERLFSVVIRQSSGQCTEKTFSLPVMLYRGVFRAGKTYHPGDTVTWGGSLWHCNSMTGDKPGEAHSSAWTLAAKRGRDAGGGK

SEQ ID NO: 7925 - protein, 274 aa, Escherichia coli; identical to SEQ ID NO: 2304

SEQ ID NO: 7926 - protein, 203 aa, Escherichia coli; identical to SEQ ID NO: 2201

SEQ ID NO: 7927 - protein, 120 aa, Escherichia coli
MYAETRNMTPYGNVGIANKTQNFEAVAQYQFDFGLRPSLAYVYSKGKDLGGNDYNNNGHQEYVDQDLVNYVEIGATYYFNKNFSTYVDYKINLLDKDDDFYDNNGIATDDVVGVGLVYQF

SEQ ID NO: 7928 - protein, 331 aa, Escherichia coli; identical to SEQ ID NO: 2700

SEQ ID NO: 7929 - protein, 111 aa, Escherichia coli; identical to SEQ ID NO: 3096

SEQ ID NO: 7930 - protein, 360 aa, Escherichia coli
MMKKYLALALIAPLLISCSTTKKGDTYNEAWVKDTNGFDILMGQFAHNIENIWGFKEVVIAGPKDYVKYTDQYQTRSHINFDDGTITIETIAGTEPAAHLRRAIIKTLLMGDDPSSVDLYSDVDDITISKEPFLYGQVVDNTGQPIRWEGRASNFADYLLKNRLKSRSNGLRIIYSVTINMVPNHLDKRAHKYLGMVRQASRKYGVDESLILAIMQTESSFNPYAVSRSDALGLMQVVQHTAGKDVFRSQGKSGTPSRSFLFDPASNIDTGTAYLAMLNNVYLGGIDNPTSRRYAVTTAYNGGAGSVLRVFSNDKIQAANIINTMTPGDVYQTLTTRHPSAESRRYLYKVNTAQKSYRRR

SEQ ID NO: 7931 - protein, 746 aa, Escherichia coli; identical to SEQ ID NO: 3031

SEQ ID NO: 7932 - protein, 660 aa, Escherichia coli; identical to SEQ ID NO: 4092

SEQ ID NO: 7933 - protein, 747 aa, Escherichia coli; identical to SEQ ID NO: 2072

SEQ ID NO: 7934 - protein, 834 aa, Escherichia coli; identical to SEQ ID NO: 3095

SEQ ID NO: 7935 - protein, 517 aa, Escherichia coli; identical to SEQ ID NO: 2462

SEQ ID NO: 7936 - protein, 233 aa, Escherichia coli; identical to SEQ ID NO: 3548

SEQ ID NO: 7937 - protein, 838 aa, Escherichia coli; identical to SEQ ID NO: 3764

SEQ ID NO: 7938 - protein, 243 aa, Escherichia coli; identical to SEQ ID NO: 2910

SEQ ID NO: 7939 - protein, 747 aa, Escherichia coli; identical to SEQ ID NO: 2072

SEQ ID NO: 7940 - protein, 236 aa, Escherichia coli
MTNTWNRLALLIFAVLSLLVAGELQAGVVVGGTRFIFPADRESISILLTNTSQESWLINSKINRPTRWAGGEASTVPAPLLAAPPLILLKPGTTGTLRLLRTESDILPVDRETLFELSIASVPSGKVENQSVKVAIRSVFKLFWRPEGLPGDPLEAYQQLRWTWNSQGVQLTNPTPYYINLIQVSVNGKALSNAGVVPPKSQRQTSWCQAIAPCHVAWRAINDYGGLSAKKEQNLP

SEQ ID NO: 7941 - protein, 224 aa, Escherichia coli; identical to SEQ ID NO: 3165

SEQ ID NO: 7942 - protein, 230 aa, Escherichia coli; identical to SEQ ID NO: 4191

SEQ ID NO: 7943 - protein, 820 aa, Escherichia coli
MKIPTTTDIPQRYTWCLAGICYSSLAILPSFLSYAESYFNPAFLLENGTSVADLSRFERGNHQPARVYRVDLWRNDEFIGSQDIVFESTTENTGDKSGGLMPCFNQVLLERIGLNSSAFPELAQQQNNKCINLLKAVPDATINFDFAAMRLNITIPQIALLSSAHGYIPPEEWDEGIPALLLNYNFTGNRGNGNDSYFFSELSGINIGPWRLRNNGSWNYFRGNGYHSEQWNNIGTWVQRAIIPLKSELVMGDGNTGSDIFDGVGFRGIRLYSSDNMYPDSQQGFAPTVRGIARTAAQLTIRQNGFIIYQSYVSPGAFEITDLHPTSSNGDLDVTIDERDGNQQNYTIPYSTVPILQREGRFKFDLTAGDFRSGNSQQSSPFFFQGTALGGLPQEFTAYGGTQLSANYTAFLLGLGRNLGNWGAVSLDVTHARSQLADDSRHEGDSIRFLYAKSMNTFGTNFQLMGYRYSTQGFYTLDDVAYRRMEGYEYDYDYDGEHRDEPIIVNYHNLRFSRKDRLQLNISQSLNDFGSLYISGTHQKYWNTSDSDTWYQVGYTSSWVGISYSLSFSWNESVGIPDNERIVGLNVSVPFNVLTKRRYTRENALDRAYASFNANRNSNGQNSWLAGVGGTLLEGHNLSYHVSQGDTSNNGYTGSATANWQAAYATLGVGYNYDRDQHDVNWQLSGGVVGHENGITLSQPLGDTNVLIKAPGAGGVRIENQTGILTDWRGYAVMPYATVYRYNRIALDTNTMGNSIDVEKNISSVVPTQGALVRANFDTRIGVRALITVTQGGKPVPFGSLVRENSIGITSMWVMTGKFI

SEQ ID NO: 7944 - protein, 274 aa, Escherichia coli; identical to SEQ ID NO: 2300

SEQ ID NO: 7945 - protein, 366 aa, Escherichia coli; identical to SEQ ID NO: 3520

SEQ ID NO: 7946 - protein, 236 aa, Escherichia coli; identical to SEQ ID NO: 3970

SEQ ID NO: 7947 - protein, 111 aa, Escherichia coli; identical to SEQ ID NO: 3096

SEQ ID NO: 7948 - protein, 207 aa, Escherichia coli; identical to SEQ ID NO: 2211

SEQ ID NO: 7949 - protein, 554 aa, Escherichia coli
MALIPACIFLCFAALSVQAEETPVTPQPPDILLGPLFNDVQNAKLFPDQKTFADAVPNSDPLMILADYRMQQNQSGFDLLHFVNVNFTLPKEGEKYVPPEGQSLREHIDGLWPVLTRSTENTEKWDSLLPLPEPYVVPGGRFREVYYWDSYFTMLGLAESGHWDKVADMVANFAHEIDTYGHIPNGNRSYYLSRSQPPFFALMVELLAQHEGDAALKQYLPQMQKEYAYWMDGVENLQAGQQEKRVVKLQDGTLLNRYWDDRDTPRPESWVEDIATAKSNPNRPATEIYRDLRSAAASGWDFSSRWMDNPHQLNTLRTTSIVPVDLNSLMFKMEKILARASKAAGDNAMANQYETLANARQKGIEKYMWNDQQGWYADYDLKSHKVRNQLTAAALFPLYVNAAAKDRANKMATATKTHLLQPGGLNTTSVKSGQQWDAPNGWAPLQWVATEGLQNYGQKEVAMDISWHFLTNVQHTYDREKKLVEKYDVSTTGTGGGGGEYPLQDGFGWTNGVTLKMLDLICPKEQPCDNVPATRPTVKSATTQPSTKEAQPTP

SEQ ID NO: 7950 - protein, 368 aa, Escherichia coli; identical to SEQ ID NO: 2370

SEQ ID NO: 7951 - protein, 237 aa, Escherichia coli; identical to SEQ ID NO: 2816

SEQ ID NO: 7952 - protein, 122 aa, Escherichia coli; identical to SEQ ID NO: 2915

SEQ ID NO: 7953 - protein, 207 aa, Escherichia coli; identical to SEQ ID NO: 2211

SEQ ID NO: 7954 - protein, 111 aa, Escherichia coli; identical to SEQ ID NO: 2911

SEQ ID NO: 7955 - protein, 122 aa, Escherichia coli; identical to SEQ ID NO: 2915

SEQ ID NO: 7956 - protein, 191 aa, Escherichia coli; identical to SEQ ID NO: 2727

SEQ ID NO: 7957 - protein, 130 aa, Escherichia coli; identical to SEQ ID NO: 3706

SEQ ID NO: 7958 - protein, 374 aa, Escherichia coli; identical to SEQ ID NO: 2982

SEQ ID NO: 7959 - protein, 412 aa, Escherichia coli; identical to SEQ ID NO: 2908

SEQ ID NO: 7960 - protein, 200 aa, Escherichia coli; identical to SEQ ID NO: 1788

SEQ ID NO: 7961 - protein, 432 aa, Escherichia coli; identical to SEQ ID NO: 2026

SEQ ID NO: 7962 - protein, 614 aa, Escherichia coli; identical to SEQ ID NO: 3301

SEQ ID NO: 7963 - protein, 241 aa, Escherichia coli; identical to SEQ ID NO: 2851

SEQ ID NO: 7964 - protein, 213 aa, Escherichia coli; identical to SEQ ID NO: 2232

SEQ ID NO: 7965 - protein, 760 aa, Escherichia coli; identical to SEQ ID NO: 3114

SEQ ID NO: 7966 - protein, 386 aa, Escherichia coli; identical to SEQ ID NO: 3072

SEQ ID NO: 7967 - protein, 746 aa, Escherichia coli; identical to SEQ ID NO: 3108

SEQ ID NO: 7968 - protein, 89 aa, Escherichia coli; identical to SEQ ID NO: 2812

SEQ ID NO: 7969 - protein, 678 aa, Escherichia coli; identical to SEQ ID NO: 2902

SEQ ID NO: 7970 - protein, 229 aa, Escherichia coli; identical to SEQ ID NO: 4047

SEQ ID NO: 7971 - protein, 169 aa, Escherichia coli; identical to SEQ ID NO: 3373

SEQ ID NO: 7972 - protein, 518 aa, Escherichia coli; identical to SEQ ID NO: 2349

SEQ ID NO: 7973 - protein, 539 aa, Escherichia coli
MAAVCGTSGIASLFSQAAFAADSDIADGQTQRFDFSILQSMAHDLAQTAWRGAPRPLPDTLATMTPQAYNSIQYDAEKSLWHNVENRQLDAQFFHMGMGFRRRVRMFSVDPATHLARDIHFRPELFKYNDAGVDTKQLEGQSDLGFAGFRVFKAPELARRDVVSFLGASYFRAVDDTYQYGLSARGLAIDTYTDSKEEFPDFTAFWFDTVKPGATTFTVYALLDSASITGAYKFTIHCEKSQVIMDVENHLYARKDIKQLGIAPMTSMFSCGTNERRMCDTIHPQIHDSDRLSMWRGNGEWICRPLNNPQKLQFNAYTDNNPKGFGLLQLDRDFSHYQDIMGWYNKRPSLWVEPRNKWGKGTIGLMEIPTTGETLDNIVCFWQPEKAVKAGDEFAFQYRLYWSAQPPVHCPLARVMATRTGMGGFPEGWAPGEHYPEKWARRFAVDFVGGDLKAAAPKGIEPVITLSSGEAKQIEILYIEPIDGYRIQFDWYPTSDSTDPVDMRMYLRCQGDAISETWLYQYFPPAPDKRQYVDDRVMS

SEQ ID NO: 7974 - protein, 227 aa, Escherichia coli; identical to SEQ ID NO: 3570

SEQ ID NO: 7975 - protein, 351 aa, Escherichia coli; identical to SEQ ID NO: 2872

SEQ ID NO: 7976 - protein, 235 aa, Escherichia coli; identical to SEQ ID NO: 4365

SEQ ID NO: 7977 - protein, 113 aa, Escherichia coli; identical to SEQ ID NO: 7820

SEQ ID NO: 7978 - protein, 231 aa, Escherichia coli
MSKRTFAMIFTLLCSFCIGQALAGGIVLQRTRVIYDASRKEAALPVANKGAETPYLLQSWVDNIDGTSRAPFIITPPLIRLEAGDDSSLRIIKTADNLPENKESLFYINVRAIPAKKKSDDVNANELTLVFKTQIKMFYRPAHLKGRVSDAWKSLEFKRSDHSLNIYNPTEYYVVFAGLAVDKADLTSKIEYIAPGEHKQLPLPASGGKNVKWAAINDYGGSSGTETRPLQ

SEQ ID NO: 7979 - protein, 162 aa, Escherichia coli; identical to SEQ ID NO: 1969

SEQ ID NO: 7980 - protein, 446 aa, Escherichia coli; identical to SEQ ID NO: 2176

SEQ ID NO: 7981 - protein, 208 aa, Escherichia coli; identical to SEQ ID NO: 1949

SEQ ID NO: 7982 - protein, 204 aa, Escherichia coli; identical to SEQ ID NO: 2957

SEQ ID NO: 7983 - protein, 232 aa, Escherichia coli; identical to SEQ ID NO: 2087

SEQ ID NO: 7984 - protein, 224 aa, Escherichia coli; identical to SEQ ID NO: 3115

SEQ ID NO: 7985 - protein, 229 aa, Escherichia coli; identical to SEQ ID NO: 3589

SEQ ID NO: 7986 - protein, 567 aa, Escherichia coli; identical to SEQ ID NO: 3518

SEQ ID NO: 7987 - protein, 230 aa, Escherichia coli; identical to SEQ ID NO: 3348

SEQ ID NO: 7988 - protein, 430 aa, Escherichia coli; identical to SEQ ID NO: 2617

SEQ ID NO: 7989 - protein, 673 aa, Escherichia coli
MKMTRLYPLALGGLLLPAIANAQTSQQDESTLVVTASKQSSRSASANNVSSTVVSAPELSDAGVTASDKLPRVLPGLNIENSGNMLFSTISLRGVSSAQDFYNPAVTLYVDGVPQLSTNTIQALTDVQSVELLRGPQGTLYGKSAQGGIINIVTQQPDSTPRGYIEGGVSSRDSYRSKFNLSGPIQDGLLYGSVTLLRQVDDGDMINPATGSDDLGGTRASIGNVKLRLAPDDQPWEMGFAASRECTRATQDAYVGWNDIKGRKLSISDGSPDPYMRRCTDSQTLSGKYTTDDWVFNLISAWQQQHYSRTFPSGSLIVNMPQRWNQNVQELRAATLGDARTVDMVFGLYRQNTREKLNSAYDMPTMPYLSSTGYTTAETLAAYSDLTWHLTDRFDIGGGVRFSHDKSSTQYHGSMLGNPFGDQGKSNDDQVLGQLSAGYMLTDDWRVYTRVAQGYKPSGYNIVPTAGLDAKPFVAEKSINYELGTRYETADVTLQAATFYTHTKDMQLYSGPVGMQTLSNAGKADATGVELEAKWRFAPGWSWDINGNVIRSEFTNDSELYHGNRVPFVPRYGAGSSVNGVIDTRYGALMPRLAVNLVGPHYFDGDNQLRQGTYATLDSSLGWQATERMNISVYVDNLFDRRYRTYGYMNGSSAVAQVNMGRTVGINTRIDFF

SEQ ID NO: 7990 - protein, 245 aa, Escherichia coli
MKMTFMKGLPLLLLVASLCSHAALQPDRTRIVFNANDKATSLRVDNRSDKLPYLAYSWLENEKGEKSDDLLVPLPPIQRLEPKATTQVRIVKQASTTKLPGDRETLFFYNMREIPPAPEKNSDHAVLQVAIQSRIKVFWRPAALRKKAGEKVELQLQVSQQGNQLTLKNPTAYYLTIAYLGRNEKGVLPGFKTVMVAPFSTVNTNTGNYSGSQFYLGYMDDYGALRMTTLNCSGQCHLQAVEAKK

SEQ ID NO: 7991 - protein, 362 aa, Escherichia coli; identical to SEQ ID NO: 2998

SEQ ID NO: 7992 - protein, 208 aa, Escherichia coli
MKKIWLALAGLVLAFSASAAQYEDGKQYTTLEKPVAGAPQVLEFFSFFCPHCYQFEEVLHISDNVKKKLPEGVKMTKYHVNFMGGDLGKDLTQAWAVAMALGVEDKVTVPLFEGVQKTQTIRSASDIRDVFINTGIKGEEYDAAWNSFVVKSLVAQQEKAAADVQLRGVPAMFVNGKYQLNPQGMDTSNMDVFVQQYADTVKYLSEKK

SEQ ID NO: 7993 - protein, 405 aa, Escherichia coli
MKIIITREYIMKRKVLAMLVPALLVAGAANAAEVYNKDGNKLDLYGKVAGLHYFSDDAGSDGDMSYARIGFKGETQIADQFTGYGQWEFNIGANGPESDKGNTATRLAFAGLGFGQNGTFDYGRNYGVVYDIEAWTDMLPEFGGDTYAGADNFMNGRANGVATYRNNGFFGQVDGLNFALQYQGNNEDDGLFGQEGSGNGNGRKLAKENGDGFGMSTSYDFDFGLSLGAAYSNSDRTDNQVHKGTHNTRYGDRFDATAGGETAEAWTVGAKYDANNVYLAAMYAETRNMTGYGDADAIANKTQNFEVVAQYQFDFGLRPSIAYLQSKGKDLGGVNSDNFDSQGNHHYTNKDLVKYVDIGMTYYFNKNISTYVDYKINLLDNDDDFYKENGIATDDIVAVGLVYQF

SEQ ID NO: 7994 - protein, 713 aa, Escherichia coli
MAKFTPSFSGIKGRALFSLLFAAPMIHATDTATTKDGETITVTADANTATEATDGYQPLSTSTATLTDMPMLDIPQVVNTVSDQVLENQNATTLDEALYNVSNVVQTNTLGGTQDAFVRRGFGANRDGSIMTNGLRTVLPRSFNAATERVEVLKGPASTLYGILDPGGLINVVTKRPEKTFHGSVSATSSSFGGGTGQLDITGPIEGTQLAYRLTGEVQDEDYWRNFGKERSTFIAPSLTWFGDNATVTMLYSHRDYKTPFDRGTIFDLTTKQPVNVDRKIRFDEPFNITDGQSDLAQLNAEYHLNSQWTARFDYSYSQDKYSDNQARVTAYDATTGTLTRRVDATQGSTQRMHSTRADLQGNVDIAGFYNEILGGVSYEYYDLLRTDMIRCKNAKDFNIYNPVYGNTSKCTTVSASDSDQTIKQESYSAYAQDALYLTDNWIAVAGIRYQYYTQYAGKGRPFNVNTDSRDEQWTPKLGLVYKLTPSVSLFANYSQTFMPQSSIASYIGDLPPESSNAYEVGAKFELFDGITADIALFDIHKRNVLYTESIGDETIAKTAGRVRSRGVEVDLAGALTENINIIASYGYTDAKVLEDPDYAGKPLPNVPHHTGSLFLTYDIHNMPGNNTLTFGGGGHGVSRRSATNGADYYLPGYFVADAFAAYKMKLQYPVTLQLNVKNLFDKTYYTSSIATNNLGNQIGDPREVQFTVKMEF

SEQ ID NO: 7995 - protein, 650 aa, Escherichia coli; identical to SEQ ID NO: 3057

SEQ ID NO: 7996 - protein, 432 aa, Escherichia coli; identical to SEQ ID NO: 2026

SEQ ID NO: 7997 - protein, 241 aa, Escherichia coli; identical to SEQ ID NO: 2887

SEQ ID NO: 7998 - protein, 362 aa, Escherichia coli; identical to SEQ ID NO: 2434

SEQ ID NO: 7999 - protein, 331 aa, Escherichia coli; identical to SEQ ID NO: 2705

SEQ ID NO: 8000 - protein, 368 aa, Escherichia coli; identical to SEQ ID NO: 4616

SEQ ID NO: 8001 - protein, 222 aa, Escherichia coli
MGSPDLKPETSESWELGLYYMGEEGWLEGVESSVTVFRNDVKDRISISRTSDVNAAPGYQNFVGFETGANGRRIPVFSYYNVNKARIQGVETELKIPFNDEWKLSFNYTYNDGRDVSNGENKPLSDLPFHTANGTLDWKPLALEDWSFYVSGHYTGQKRADSATAKTPGGYTIWNTGAAWQVTKDVKLRAGVLNLGDKDLSRDDYSYNEDGRRYFMAVDYRF

SEQ ID NO: 8002 - protein, 446 aa, Escherichia coli; identical to SEQ ID NO: 2176

SEQ ID NO: 8003 - protein, 237 aa, Escherichia coli; identical to SEQ ID NO: 6498

SEQ ID NO: 8004 - protein, 250 aa, Escherichia coli; identical to SEQ ID NO: 3048

SEQ ID NO: 8005 - protein, 258 aa, Escherichia coli; identical to SEQ ID NO: 2060

SEQ ID NO: 8006 - protein, 119 aa, Escherichia coli; identical to SEQ ID NO: 2526

SEQ ID NO: 8007 - protein, 73 aa, Escherichia coli
MAGKREMVIITFKSGETFQVEVPGSQHIDSQKKAIERMKDTLRITYLTETKIDKLCVWNNKTPNSIAAISMKN

SEQ ID NO: 8008 - protein, 430 aa, Escherichia coli; identical to SEQ ID NO: 2617

SEQ ID NO: 8009 - protein, 224 aa, Escherichia coli; identical to SEQ ID NO: 3165

SEQ ID NO: 8010 - protein, 130 aa, Escherichia coli; identical to SEQ ID NO: 7440

SEQ ID NO: 8011 - protein, 816 aa, Escherichia coli; identical to SEQ ID NO: 6500

SEQ ID NO: 8012 - protein, 565 aa, Escherichia coli; identical to SEQ ID NO: 6494

SEQ ID NO: 8013 - protein, 834 aa, Escherichia coli; identical to SEQ ID NO: 7303

SEQ ID NO: 8014 - protein, 249 aa, Escherichia coli; identical to SEQ ID NO: 3492

SEQ ID NO: 8015 - protein, 729 aa, Escherichia coli; identical to SEQ ID NO: 6527

SEQ ID NO: 8016 - protein, 360 aa, Escherichia coli; identical to SEQ ID NO: 3062

SEQ ID NO: 8017 - protein, 678 aa, Escherichia coli; identical to SEQ ID NO: 6490

SEQ ID NO: 8018 - protein, 539 aa, Escherichia coli; identical to SEQ ID NO: 3050

SEQ ID NO: 8019 - protein, 236 aa, Escherichia coli; identical to SEQ ID NO: 3286

SEQ ID NO: 8020 - protein, 243 aa, Escherichia coli; identical to SEQ ID NO: 6517

SEQ ID NO: 8021 - protein, 266 aa, Escherichia coli; identical to SEQ ID NO: 1894

SEQ ID NO: 8022 - protein, 826 aa, Escherichia coli; identical to SEQ ID NO: 6475

SEQ ID NO: 8023 - protein, 429 aa, Escherichia coli
MPQRHHQGHKRTPKQLALIIKRCLPMVLTGSGMLCITANAEEYYFDPIMLETTKSGMQTTDLSRFSKKYAQLPGTYQVDIWLNKKKVSQKKITFTANAEQLLQPQFTVEQLRELGIKVDEIPALAEKDDDSVINSLEQIIPGTAAEFDFNHQRLNLSIPQIALYRDARGYVSPSRWDDGIPTLFTNYSFTGSDNRYRQGNRSQRQYLNMQNGANFGPWRLRNYSTWTRNDQTSSWNTISSYLQRDIKALKSQLLLGESATSGSIFSSYTFTGVQLASDDNMLPNSQRGFAPTVRGIANSSAIVTIRQNGYVIYQSNVPAGAFEINDLYPSSNSGDLEVTIEESDGTQRRFIQPYSSLPMMQRPGHLKYSATAGRYRADANSDSKEPEFAEATAIYGLNNTFTLYSGLLGSEDYYALGIGIGGTLGRLAP

SEQ ID NO: 8024 - protein, 200 aa, Escherichia coli; identical to SEQ ID NO: 1784

SEQ ID NO: 8025 - protein, 863 aa, Escherichia coli
MHIRKHRLAGFFVRLFVACAFAAQAPLSSAELYFNPRFLADDPQAVADLSRFENGQELPPGTYRVDIYLNNGYMATRDVTFNTGDSEQGIVPCLTRAQLASMGLNTASVSGMNLLADDACVPLTSMIHDATAHLDVGQQRLNLTIPQAFMSNRARGYIPPELWDPGINAGLLNYNFSGNSVQNRIGGNSHYAYLNLQSGLNIGAWRLRDNTTWSYNSSDSSSGSKNKWQHINTWLERDIIPLRSRLTLGDGYTQGDIFDGINFRGAQLASDDNMLPDSQRGFAPVIHGIARGTAQVTIKQNGYDIYNSTVPPGPFTINDIYAAGNSGDLQVTIKEADGSTQIFTVPYSSVPLLQREGHTRYSITAGEYRSGNAQQEKPRFFQSTLLHGLPAGWTIYGGTQLADRYRAFNFGIGKNMGALGALSVDMTQANSTLPDDSQHDGQSVRFLYNKSLNESGTNIQLVGYRYSTSGYFNFADTTYSRMNGYNIETQDGVIQVKPKFTDYYNLAYNKRGKLQLTVTQQLGRTLTLYLSGSHQTYWGTSNVDEQFQAGLNTAFEDINWTLSYSLTKNAWQKGRDQMLALNVNIPFSHWLRSDSKSQWRHASASYSMSHDLNGRMTNLVGVYGTLLEDNNLSYSVQTGYAGGGDGNSGSTGYATLNYRGGYGNANIGYSHSDDIKQLYYGVSGGVLAHANGVTLGQPLNDTVVLVKAPGAKDAKVENQTGVRTDWRGYAVLPYATEYRENRVALDTNTLADNVDLDNAVANVVPTRGAIVRAEFKARVGIKLLMTLTHNNKPLPFGAMVTSESSQSSGIVADNGQVYLSGMPLAGKVQVKWGEEENAHCVANYQLPPESQQQLLTQLSAECR

SEQ ID NO: 8026 - protein, 729 aa, Escherichia coli; identical to SEQ ID NO: 5961

SEQ ID NO: 8027 - protein, 170 aa, Escherichia coli [sequence omitted]

SEQ ID NO: 8028 - protein, 760 aa, Escherichia coli; identical to SEQ ID NO: 6506

SEQ ID NO: 8029 - protein, 246 aa, Escherichia coli; identical to SEQ ID NO: 3021

SEQ ID NO: 8030 - protein, 478 aa, Escherichia coli; identical to SEQ ID NO: 5942

SEQ ID NO: 8031 - protein, 359 aa, Escherichia coli; identical to SEQ ID NO: 2329

SEQ ID NO: 8032 - protein, 614 aa, Escherichia coli; identical to SEQ ID NO: 1884

SEQ ID NO: 8033 - protein, 615 aa, Escherichia coli; identical to SEQ ID NO: 3785

SEQ ID NO: 8034 - protein, 367 aa, Escherichia coli; identical to SEQ ID NO: 4285

SEQ ID NO: 8035 - protein, 650 aa, Escherichia coli
MKGLNKITCCLLAALLMPCAGHAENEQYGANFNNADIRQFVEIVGQHLGKTILIDPSVQGTISVRSNDTFSQQEYYQFFLSILDLYGYSVITLDNGFLKVVRSANVKTSPGMIADSSRPGVGDELVTRIVPLENVPARDLAPLLRQMMDAGSVGNVVHYEPSNVLILTGRASTINKLIEVIKRVDVIGTEKQQIIHLEYASAEDLAEILNQLISESHGKSQMPALLSAKIVADKRTNSLIISGPEKARQRITSLLKSLDVEESEEGNTRVYYLKYAKATNLVEVLTGVSEKLKDEKGNARKPSSSGAMDNVAITADEQTNSLVITADQSVQEKLATVIARLDIRRAQVLVEAIIVEVQDGNGLNLGVQWANKNVGAQQFTNTGLPIFNAAQGVADYKKNGGITSANPAWDMFSAYNGMAAGFFNGDWGVLLTALASNNKNDILATPSIVTLDNKLASFNVGQDVPVLSGSQTTSGDNVFNTVERKTVGTKLKVTPQVNEGDAVLLEIEQEVSSVDSSSNSTLGPTFNTRTIQNAVLVKTGETVVLGGLLDDFSKEQVSKVPLLGDIPLVGQLFRYTSTERAKRNLMVFIRPTIIRDDDVYHSLSKEKYTRYRQEQQQRIDGKSKALVGSEDLPVLDENTFNSHAPAPSSR

SEQ ID NO: 8036 - protein, 162 aa, Escherichia coli; identical to SEQ ID NO: 1965

SEQ ID NO: 8037 - protein, 851 aa, Escherichia coli; identical to SEQ ID NO: 5907

SEQ ID NO: 8038 - protein, 673 aa, Escherichia coli; identical to SEQ ID NO: 2919

SEQ ID NO: 8039 - protein, 118 aa, Escherichia coli [sequence omitted]

SEQ ID NO: 8040 - protein, 746 aa, Escherichia coli; identical to SEQ ID NO: 4389

SEQ ID NO: 8041 - protein, 111 aa, Escherichia coli; identical to SEQ ID NO: 3096

SEQ ID NO: 8042 - protein, 820 aa, Escherichia coli; identical to SEQ ID NO: 5921

SEQ ID NO: 8043 - protein, 331 aa, Escherichia coli; identical to SEQ ID NO: 6460

SEQ ID NO: 8044 - protein, 208 aa, Escherichia coli; identical to SEQ ID NO: 1949

SEQ ID NO: 8045 - protein, 203 aa, Escherichia coli; identical to SEQ ID NO: 2201

SEQ ID NO: 8046 - protein, 191 aa, Escherichia coli; identical to SEQ ID NO: 2727

SEQ ID NO: 8047 - protein, 903 aa, Escherichia coli; identical to SEQ ID NO: 6467

SEQ ID NO: 8048 - protein, 161 aa, Escherichia coli; identical to SEQ ID NO: 2582

SEQ ID NO: 8049 - protein, 351 aa, Escherichia coli; identical to SEQ ID NO: 2872

SEQ ID NO: 8050 - protein, 207 aa, Escherichia coli; identical to SEQ ID NO: 5917

SEQ ID NO: 8051 - protein, 232 aa, Escherichia coli; identical to SEQ ID NO: 2087

SEQ ID NO: 8052 - protein, 45 aa, Escherichia coli; identical to SEQ ID NO: 6471

SEQ ID NO: 8053 - protein, 121 aa, Escherichia coli
MDAILSVQGASAPVKKKSFFSKFTRLNMLRLARAVIPAAVMMMFFPQLAMAAGSSGQDLMQSGNSTVKATFGKDSSVVKWVVLAEVLVGAVMYMMTKNVKFLAGFAIISVFIAVGMAVVGL

SEQ ID NO: 8054 - protein, 224 aa, Escherichia coli; identical to SEQ ID NO: 3035

SEQ ID NO: 8055 - protein, 386 aa, Escherichia coli; identical to SEQ ID NO: 6520

SEQ ID NO: 8056 - protein, 774 aa, Escherichia coli; identical to SEQ ID NO: 6495

SEQ ID NO: 8057 - protein, 218 aa, Escherichia coli; identical to SEQ ID NO: 6511

SEQ ID NO: 8058 - protein, 784 aa, Escherichia coli; identical to SEQ ID NO: 5933

SEQ ID NO: 8059 - protein, 203 aa, Escherichia coli; identical to SEQ ID NO: 2009

SEQ ID NO: 8060 - protein, 370 aa, Escherichia coli; identical to SEQ ID NO: 6529

SEQ ID NO: 8061 - protein, 518 aa, Escherichia coli; identical to SEQ ID NO: 2349

SEQ ID NO: 8062 - protein, 361 aa, Escherichia coli; identical to SEQ ID NO: 3061

SEQ ID NO: 8063 - protein, 765 aa, Escherichia coli; identical to SEQ ID NO: 7320

SEQ ID NO: 8064 - protein, 193 aa, Escherichia coli; identical to SEQ ID NO: 2246

SEQ ID NO: 8065 - protein, 230 aa, Escherichia coli; identical to SEQ ID NO: 3019

SEQ ID NO: 8066 - protein, 1024 aa, Escherichia coli; identical to SEQ ID NO: 7367

SEQ ID NO: 8067 - protein, 274 aa, Escherichia coli; identical to SEQ ID NO: 6497

SEQ ID NO: 8068 - protein, 871 aa, Escherichia coli; identical to SEQ ID NO: 6513

SEQ ID NO: 8069 - protein, 432 aa, Escherichia coli; identical to SEQ ID NO: 2026

SEQ ID NO: 8070 - protein, 243 aa, Escherichia coli; identical to SEQ ID NO: 3483

SEQ ID NO: 8071 - protein, 213 aa, Escherichia coli; identical to SEQ ID NO: 2232

SEQ ID NO: 8072 - protein, 881 aa, Escherichia coli; identical to SEQ ID NO: 6485

SEQ ID NO: 8073 - protein, 700 aa, Escherichia coli; identical to SEQ ID NO: 5975

SEQ ID NO: 8074 - protein, 119 aa, Escherichia coli
MNLSLFKGGRPASVKNRAWHYCQMAWRGVCSQKALSRLAALSPLLLLGMGQMAHATDLLAGGKDDVKATFGADSFVIMCIYIAEIVIGVATYIRTKNLLILLGLVVVIVFTTVGLTFVS

SEQ ID NO: 8075 - protein, 241 aa, Escherichia coli; identical to SEQ ID NO: 2922

SEQ ID NO: 8076 - protein, 231 aa, Escherichia coli; identical to SEQ ID NO: 5923

SEQ ID NO: 8077 - protein, 203 aa, Escherichia coli; identical to SEQ ID NO: 2009

SEQ ID NO: 8078 - protein, 784 aa, Escherichia coli; identical to SEQ ID NO: 2244

SEQ ID NO: 8079 - protein, 565 aa, Escherichia coli; identical to SEQ ID NO: 2678

SEQ ID NO: 8080 - protein, 834 aa, Escherichia coli
MYKKLKLTTISELIKNIYCSLSVLIIGCASAYAVEFNKDLIEAEDRENVNLSQFETDGQLPVGKYSLNALINNKRTPIHLDLQWVLIDNQTAVCLTPEQLTLLGFTDEIIEVAQQNLIDGCYPIEKEKQITTYLDKGKMQLSISAPQAWLKYKDANWTPPELWDHGIAGAFLDYNLYASHYAPHQGDNSQNISSYGQAGVNLGAWRLRTDYQYDQSFNNGKSQANNLDFPRIYLFRPIPAINAKLTIGQYDTESSIFDSFHFSGVSLKSDENMLPPDLRGYAPQITGVAQTNAKVTVSQNNRIIYQENVPPGPFAITNLFNTLQGQLDVKVEEEDGQVTQWQVASDSIPYLTRKGQIRYTTAMGKPTSVGGDSLQQPFFWTGEFSWGWLNNVSLYGGSVLTNRDYQSLAAGVGFNLNSLGSLSFDVTRSDAQLHNQDKETGYSYRANYSKRFESTGSQLTFAGYRFSDKNFVTMNEYINDTNHYTNYQNEKESYIVTFNQYLESLRLNTYVSLARNTYWDASSNVNYSLSLSRDFDIGPLKNVSTSLTFSRINWEEDNQDQLYLNISIPWGTSRTLSYGMQRNQDNKISHTASWYDSSDRNNSWSVSASGDNDEFKDMKASLRASYQHNTENGRLYLSGTSQRDSYYSLNASWNGSFTATRHGAAFHDYSGSADSRFMIDADGAEDIPLNNKRAVTNRYGIGVIPSVSSYITTSLSVDTRNLPENVDIENSVITTTLTEGAIGYAKLDTRKGYQIMGVIRLADGSHPPLGISVKDKTSHKELGLVADGGFVYLNGIQDDSKLTLRWGDKSCFIQPPNSSNLTTGTVILPCISQN

SEQ ID NO: 8081 - protein, 700 aa, Escherichia coli
MKIFSVRQTVLPALLVLSPVVFAADEQTMIVSAAPQVVSELDTPAAVSVVDGEEMRLATSRINLSESLTGVPGLQVQNRQNYAQDLQLSIRGFGSRSTYGIRGIRLYVDGIPATMPDGQGQTSNIDLSSVQNVEVLRGPFSALYGNASGGVMNVTTQTGQQPPTIEASSYYGSFGSWRYGLKATGATGDGTQPGDVDYTVSTTRFTTHGYRDHSGAQKNLANAKLGVRIDEASKLSLIFNSVDIKADDPGGLTKAEWKANPQQAPRAEQYDTRKTIKQTQAGLRYERSLSAQDDMSVMMYAGERETTQYQSIPMAPQLNPSHAGGVITLQRHYQGIDSRWTHRGELGVPVTFTTGLNYENMSENRKGYNNFRLNSGMPEYGQKGELRRDERNLMWNIDPYLQTQWQLSEKLSLDAGVRYSSVWFDSNDHYVTPGNGDDSGDASYHKWLPAGSLKYAMTDAWNIYLAAGRGFETPTINELSYRADGQSGMNFGLKPSTNDTIEIGSKTRIGDGLLSLALFQTDTDDEIVVDSSSGGRTTYKNAGKTRRQGAELAWDQRFAGDFRVNASWTWLDATYRSNVCNEQDCNGNRMPGIARNMGFASIGYVPEDGWYAGTEARYMGDIMADDENTAKAPSYTLVGLFTGYKYNYHNLTVDLFGRVDNLFDKEYVGSVIVNESNGRYYEPSPGRNYGVGMNIAWRFE

SEQ ID NO: 8082 - protein, 231 aa, Escherichia coli; identical to SEQ ID NO: 3055

SEQ ID NO: 8083 - protein, 412 aa, Escherichia coli; identical to SEQ ID NO: 4058

SEQ ID NO: 8084 - protein, 118 aa, Escherichia coli [sequence omitted]

SEQ ID NO: 8085 - protein, 208 aa, Escherichia coli; identical to SEQ ID NO: 1949

SEQ ID NO: 8086 - protein, 170 aa, Escherichia coli
MSGILTRWRQFGKRYFWPHLLLGMVAASLGLPALSNAAEPNAPAKATTRNHEPSAKVNFGQLALLEANTRRPNSNYSVDYWHQHAIRMVIRHLSFAMAPQTLPVAEESLPLQAQHLALLDTLSALLTQEGTPSEKGYRIDYAHFTPQAKFSTPVWISQAQGIRAGPQRLT

SEQ ID NO: 8087 - protein, 230 aa, Escherichia coli
MAFSSSSIADIVISGTRVIYKSDQKSVNVRLENKGNNPLLVQSWLDTGYDNAEPGSITVPFTATPPVSRIDAKRGQTIKLMYTASTSLPKDRESVFWFNVLEVPPKPDAEKVANQSLLQLAFRTRIKLFYRPDGLKGNPSEAPLALKWFWSGSEGKASLRVTNPTPYYVSFSSGDLEASGKRYPIDVKMIAPFSDEVMKVTGLNGKASSAKVHFYAINDFGGAIEGNASL

SEQ ID NO: 8088 - protein, 368 aa, Escherichia coli; identical to SEQ ID NO: 7478

SEQ ID NO: 8089 - protein, 365 aa, Escherichia coli; identical to SEQ ID NO: 3878

SEQ ID NO: 8090 - protein, 746 aa, Escherichia coli; identical to SEQ ID NO: 7482

SEQ ID NO: 8091 - protein, 826 aa, Escherichia coli; identical to SEQ ID NO: 7491

SEQ ID NO: 8092 - protein, 224 aa, Escherichia coli; identical to SEQ ID NO: 3115

SEQ ID NO: 8093 - protein, 193 aa, Escherichia coli; identical to SEQ ID NO: 2246

SEQ ID NO: 8094 - protein, 162 aa, Escherichia coli; identical to SEQ ID NO: 1973

SEQ ID NO: 8095 - protein, 200 aa, Escherichia coli; identical to SEQ ID NO: 1784

SEQ ID NO: 8096 - protein, 430 aa, Escherichia coli; identical to SEQ ID NO: 2617

SEQ ID NO: 8097 - protein, 331 aa, Escherichia coli; identical to SEQ ID NO: 2700

SEQ ID NO: 8098 - protein, 760 aa, Escherichia coli; identical to SEQ ID NO: 3923

SEQ ID NO: 8099 - protein, 765 aa, Escherichia coli; identical to SEQ ID NO: 7498

SEQ ID NO: 8100 - protein, 203 aa, Escherichia coli; identical to SEQ ID NO: 2201

SEQ ID NO: 8101 - protein, 49 aa, Escherichia coli
MNYFEVGATYYFNKNMSTYVDYIINQIDSDNKLGVGSDDTVAVGIVYQF

SEQ ID NO: 8102 - protein, 204 aa, Escherichia coli; identical to SEQ ID NO: 7477

SEQ ID NO: 8103 - protein, 591 aa, Escherichia coli; identical to SEQ ID NO: 4273

SEQ ID NO: 8104 - protein, 191 aa, Escherichia coli; identical to SEQ ID NO: 2727

SEQ ID NO: 8105 - protein, 232 aa, Escherichia coli; identical to SEQ ID NO: 2087

SEQ ID NO: 8106 - protein, 729 aa, Escherichia coli; identical to SEQ ID NO: 2948

SEQ ID NO: 8107 - protein, 432 aa, Escherichia coli; identical to SEQ ID NO: 2026

SEQ ID NO: 8108 - protein, 112 aa, Escherichia coli
MLLRPSKKKSFFSKFTRLNMLRLARAVIPAAVLMMFFPQLAMAAQGQDLMASGNTTVKATFGKDSSVVKWVVLAEVLVGAVMYMMTKNVKFLAGFAIISVFIAVGMAVVGLK

SEQ ID NO: 8109 - protein, 359 aa, Escherichia coli; identical to SEQ ID NO: 2328

SEQ ID NO: 8110 - protein, 226 aa, Escherichia coli; identical to SEQ ID NO: 3085

SEQ ID NO: 8111 - protein, 161 aa, Escherichia coli; identical to SEQ ID NO: 2582

SEQ ID NO: 8112 - protein, 274 aa, Escherichia coli; identical to SEQ ID NO: 3471

SEQ ID NO: 8113 - protein, 478 aa, Escherichia coli; identical to SEQ ID NO: 7448

SEQ ID NO: 8114 - protein, 213 aa, Escherichia coli; identical to SEQ ID NO: 2232

SEQ ID NO: 8115 - protein, 250 aa, Escherichia coli; identical to SEQ ID NO: 3048

SEQ ID NO: 8116 - protein, 856 aa, Escherichia coli; identical to SEQ ID NO: 6509

SEQ ID NO: 8117 - protein, 747 aa, Escherichia coli; identical to SEQ ID NO: 2072

SEQ ID NO: 8118 - protein, 551 aa, Escherichia coli; identical to SEQ ID NO: 2446

SEQ ID NO: 8119 - protein, 207 aa, Escherichia coli; identical to SEQ ID NO: 2211

SEQ ID NO: 8120 - protein, 111 aa, Escherichia coli; identical to SEQ ID NO: 7471

SEQ ID NO: 8121 - protein, 446 aa, Escherichia coli; identical to SEQ ID NO: 5547

SEQ ID NO: 8122 - protein, 351 aa, Escherichia coli; identical to SEQ ID NO: 2872

SEQ ID NO: 8123 - protein, 243 aa, Escherichia coli; identical to SEQ ID NO: 3483

SEQ ID NO: 8124 - protein, 662 aa, Escherichia coli
MVPSTFSRLKAARCLPVVLAALIFAGCGTHTPDQSTAYMQGTTQADSAFYLQQMQQSSDDTRINWQLLAIRALVKEGKTGQAVELFNQLPQELNDSQRREKTLLAVEIKLAQKDFAGAQNLLAKITPADLEQNQQARYWQAKIDASQGRPSIDLLRALIAQEPLLGAKEKQQNIDATWQALSSMTQEQANTLVINADENILQGWLDLQRVWFDNRNDPDMMKAGIADWQKRYPNNPGAKMLPTQLVNVKAFKPASTNKIALLLPLNGQAAVFGRTIQQGFEAAKNIGTQPVAAQVAAAPAADVAEQPQPQTVDGVASPAQASVSDLTGEQPAAQPAPVSTPAATTTAVSAPANPSAELKIYDTSSQPLSQILSQVQQDGASIVVGPLLKNNVEELLKSNTPLNVLALNQPENIENRVNICYFALSPEDEARDAARHIRDQGKQAPLVLIPRSSLGDRVANAFAQEWQKLGGGTVLQQKFGSTSELRAGVNGGSGIALTGTPITPRATTDDQFTNNGGRVDAVYIVATPGEIAFIKPMIAMRNGSQSGATLYASSRSAQGTAGPDFRLEMEGLQYSEIPMLAGGNLPLMQQALSAVNNDYSLARMYAMGVDAWSLANHFSQMRQVQGFEINGNTGSLTANPDCVINRKLSWLQYQQGQVVPAS

SEQ ID NO: 8125 - protein, 641 aa, Escherichia coli
MLAVDDDGETMVVTASSVEQNLKDAPASISVITQEDLQRKPVQNLKDVLKEVPGVQLTNEGDNRKGVSIRGLDSSYTLILVDGKRVNSRNAVFRHNDFDLNWIPVDSIERIEVVRGPMSSLYGSDALGGVVNIITKKIGQKWSGTVTVDTTIQEHRDRGDTYNGQFFTSGPLIDGVLGMKAYGSLAKREKDDPQNSTTTDTGETPRIEGFSSRDGNVEFAWTPNQNHDFTAGYGFDRQDRDSDSLDKNRLERQNYSVSHNGRWDYGTSELKYYGEKVENKNPGNSSPITSESNTVDGKYTLSLTAINQFLTVGGEWRHDKLSDAVNLTGGTSSKTSASQYALFVEDEWRIFEPLALTTGVRMDDHETYGEHWSPRAYLVYNATDTVTVKGGWATAFKAPSLLQLSPDWTSNSCRGACKIVGSPDLKPETSESWELGLYYMGEEGWLEGVESSVTVFRNDVKDRISISRTSDVNAAPGYQNFVGFETGANGRRIPVFSYYNVNKARIQGLETELKIPFNDEWKLSINYIYNDGRDVSNGENKPLSDLPFHTANGTLDWKPLALEDWSFYVSGHYTGQKRADSATAKTPGGYTIWNTGAAWQVTKDVKLRAGVLNLGDKDLSRDDYSYNEDGRRYFMAVDYRF

SEQ ID NO: 8126 - protein, 518 aa, Escherichia coli; identical to SEQ ID NO: 2349

SEQ ID NO: 8127 - protein, 241 aa, Escherichia coli; identical to SEQ ID NO: 2922

SEQ ID NO: 8128 - protein, 249 aa, Escherichia coli; identical to SEQ ID NO: 3492

SEQ ID NO: 8129 - protein, 266 aa, Escherichia coli; identical to SEQ ID NO: 1894

SEQ ID NO: 8130 - protein, 774 aa, Escherichia coli; identical to SEQ ID NO: 7443

SEQ ID NO: 8131 - protein, 820 aa, Escherichia coli
MKIPTTTDIPQRYTWCLAGICYSSLAILLSFLSYAESYFNPAFLLENGTSVADLSRFERGNHQPAGVYRVDLWRNDEFIGSQDIVFESTTENTGDKSGGLMPCFNQVLLERIGLNSSAFPELAQQQNNKCINLLKAVPDATINFDFAAMRLNITIPQITLLSSAHGYIPPEEWDEGIPALLLNYNFTGNRGNGNDSYFFSELSGINIGPWRLRNNGSWNYFRGNGYHSEQWNNIGTWVQRAIIPLKSELVMGDGNTGSDIFDGVGFRGVRLYSSDNMYPDSQQGFAPTVRGIARTAAQLTIRQNGFIIYQSYVSPGAFEITDLHPTSSNGDLDVTIDERDGNQQNYTIPYSTVPILQREGRFKFDLTAGDFRSGNSQQSSPFFFQGTALGGLPQEFTAYGGTQLSANYTAFLLGLGRNLGNWGAVSLDVTHARSQLADDSRHEGDSIRFLYAKSMNTFGTNFQLMGYRYSTQGFYTLDDVAYRRMEGYEYDYDYDGEHRDEPIIVNYHNLRFSRKDRLQLNISQSLNDFGSLYISGTHQKYWNTSDSDTWYQVGYTSSWVGISYSLSFSWNESVGIPDNERIVGLNVSVPFNVLTKRRYTRENALDRAYASFNANRNSNGQNSWLAGVGGTLLEGHNLSYHVSQGDTSNNGYTGSATANWQAAYATLGVGYNYDRDQHDVNWQLSGGVVGHENGITLSQPLGDTNVLIKAPGAGGVRIENQTGILTDWRGYAVMPYATVYRYNRIALDTNTMGNSIDVEKNISSVVPTQGALVRANFDTRIGVRALITVTQGGKPVPFGSLVRENSIGITSMWVMTGKFI

SEQ ID NO: 8132 - protein, 880 aa, Escherichia coli; identical to SEQ ID NO: 3110

SEQ ID NO: 8133 - protein, 230 aa, Escherichia coli
MMTKIKLLMLIIFYLIISASAHAAGGIALGATRIIYPADAKQTAVWIRNSHTKERFLVNSWIENSSGVKEKSFIITPPLFVSEPKSENTLRIIYTGPPLAADRESLFWMNVKTIPSVDKNALNGRNVLQLAILSRMKLFLRPIQLQELPAEAPDTLKFSRSGNYINVHNPSPFYVTLVNLQVGSQKLGNAMAAPRVSSQIPLPSGVQGKLKFQTVNDYGSVTPVREVNLN

SEQ ID NO: 8134 - protein, 367 aa, Escherichia coli; identical to SEQ ID NO: 4285

SEQ ID NO: 8135 - protein, 838 aa, Escherichia coli
MPQRHHQGHKRTPKQLALIIKRCLPMVLTGSGMLCTTANAEEYYFDPIMLETTKSGMQTTDLSRFSKKYAQLPGTYQVDIWLNKKKVSQKKITFTANAEQLLQPQFTVEQLRELGIKVDEIPALAEKDDDSVINSLEQIIPGTAAEFDFNHQRLNLSIPQIALYRDARGYVSPSRWDDGIPTLFTNYSFTGSDNRYRQGNRSQRQYLNMQNGANFGPWRLRNYSTWTRNDQASSWNTISSYLQRDIKALKSQLLLGESATSGSIFSSYTFTGVQLASDDNMLPNSQRGFAPTVRGIANSSAIVTIRQNGYVIYQSNVPAGAFEINDLYPSSNSGDLEVTIEESDGTQRRFIQPYSSLPMMQRPGHLKYSATAGRYRADANSDSKEPEFAEATAIYGLNNTFTLYGGLLGSEDYYALGIGIGGTLGALGALSMDINRADTQFDNQHSFHGYQWRTQYIKDIPETNTNIAVSYYRYTNDGYFSFNEANTRNWNYNSRQKSEIQFNISQTIFDGVSLYASGSQQDYWGNNEKNRNISVGVSGQQWGIGYSLNYQYSRYTDQNNDRALYLNLSIPLERWLPRSRVSYQMTSQKDRPTQHEMRLDGSLLDDGRLSYSLEQSLDDDNNHNSSLNASYRSPYGTFSAGYSYGNDSSQYNYGVTGGVVIHPHGVTLSQYLGNAFALIDANGASGVRIQNYPGIATDPFGYAVVPYLTTYQENRLSVDTTQLPDNVDLEQTTQFVVPNRGAMVAARFNANIGYRVLVTVSDRNGKPLPFGALASNDETGQQSIVDEGGILYLSGISSKSQSWTVRWGNQADQQCQFAFSTPDSEPTTSVLQGTAQCH

SEQ ID NO: 8136 - protein, 658 aa, Escherichia coli; identical to SEQ ID NO: 7476

SEQ ID NO: 8137 - protein, 614 aa, Escherichia coli; identical to SEQ ID NO: 1884

SEQ ID NO: 8138 - protein, 514 aa, Escherichia coli
MCNEKNKFFIFTALFCCSAQAAPSSLEKRLGKNEYFIITKSSPVRAILNDFAANYSIPVFISNSVNDDFSGEIKNEKPMKVLEKLSRLYHLTWYYDENILYIYKTNEISRSIITPTYLDIDSLLKYLRDTISVNKNSCNVRKITTFNSIEVRGVPECIKYITSLSESLDKEAQSKAKNKDVVRVFKLNYASATDITYKYRDQNVVVPGVVSILKTMASNGSLPSTGKGAVERNGNLFDNSVKISADPRLNAVVVKDREITMDIYRQLISELDIEQRQIEISVSIIDVDANDLQQLGVNWSGTLNAGQGSIAFNSSTAQANLSSSVISNANNFMIRVNALQQNSKAKILSQPSIITLNNMQAILDKNVTFYTKVSGEKVASLESITSGTLLRVTPRILDDNSNSLTGKRRERVRLLLDIQDGNQSTNQSNAQDASSILPEVQNSEMTTEATLSAGESLLLGGFIQDKESSSKDGIPLLSDIPVIGNLFSSTTKQKHSVVRLFLIKATPIKSASSE

SEQ ID NO: 8139 - protein, 828 aa, Escherichia coli; identical to SEQ ID NO: 2380

SEQ ID NO: 8140 - protein, 162 aa, Escherichia coli; identical to SEQ ID NO: 1965

SEQ ID NO: 8141 - protein, 774 aa, Escherichia coli; identical to SEQ ID NO: 3018

SEQ ID NO: 8142 - protein, 747 aa, Escherichia coli; identical to SEQ ID NO: 2072

SEQ ID NO: 8143 - protein, 359 aa, Escherichia coli; identical to SEQ ID NO: 2328

SEQ ID NO: 8144 - protein, 230 aa, Escherichia coli; identical to SEQ ID NO: 3019

SEQ ID NO: 8145 - protein, 869 aa, Escherichia coli; identical to SEQ ID NO: 3012

SEQ ID NO: 8146 - protein, 696 aa, Escherichia coli; identical to SEQ ID NO: 3314

SEQ ID NO: 8147 - protein, 191 aa, Escherichia coli; identical to SEQ ID NO: 2727

SEQ ID NO: 8148 - protein, 837 aa, Escherichia coli; identical to SEQ ID NO: 4687

SEQ ID NO: 8149 - protein, 249 aa, Escherichia coli; identical to SEQ ID NO: 3028

SEQ ID NO: 8150 - protein, 430 aa, Escherichia coli; identical to SEQ ID NO: 2617

SEQ ID NO: 8151 - protein, 203 aa, Escherichia coli; identical to SEQ ID NO: 2009

SEQ ID NO: 8152 - protein, 207 aa, Escherichia coli; identical to SEQ ID NO: 2211

SEQ ID NO: 8153 - protein, 360 aa, Escherichia coli; identical to SEQ ID NO: 3032

SEQ ID NO: 8154 - protein, 331 aa, Escherichia coli; identical to SEQ ID NO: 2700

SEQ ID NO: 8155 - protein, 233 aa, Escherichia coli; identical to SEQ ID NO: 3276

SEQ ID NO: 8156 - protein, 102 aa, Escherichia coli; identical to SEQ ID NO: 1824

SEQ ID NO: 8157 - protein, 402 aa, Escherichia coli; identical to SEQ ID NO: 4768

SEQ ID NO: 8158 - protein, 228 aa, Escherichia coli; identical to SEQ ID NO: 3034

SEQ ID NO: 8159 - protein, 118 aa, Escherichia coli [sequence omitted]

SEQ ID NO: 8160 - protein, 243 aa, Escherichia coli; identical to SEQ ID NO: 2910

SEQ ID NO: 8161 - protein, 673 aa, Escherichia coli; identical to SEQ ID NO: 3295

SEQ ID NO: 8162 - protein, 274 aa, Escherichia coli; identical to SEQ ID NO: 2303

SEQ ID NO: 8163 - protein, 614 aa, Escherichia coli; identical to SEQ ID NO: 3301

SEQ ID NO: 8164 - protein, 478 aa, Escherichia coli; identical to SEQ ID NO: 2404

SEQ ID NO: 8165 - protein, 880 aa, Escherichia coli; identical to SEQ ID NO: 3008

SEQ ID NO: 8166 - protein, 678 aa, Escherichia coli; identical to SEQ ID NO: 3014

SEQ ID NO: 8167 - protein, 866 aa, Escherichia coli; identical to SEQ ID NO: 3025

SEQ ID NO: 8168 - protein, 208 aa, Escherichia coli; identical to SEQ ID NO: 1949

SEQ ID NO: 8169 - protein, 446 aa, Escherichia coli; identical to SEQ ID NO: 2179

SEQ ID NO: 8170 - protein, 746 aa, Escherichia coli; identical to SEQ ID NO: 3031

SEQ ID NO: 8171 - protein, 794 aa, Escherichia coli; identical to SEQ ID NO: 4850

SEQ ID NO: 8172 - protein, 236 aa, Escherichia coli; identical to SEQ ID NO: 3286

SEQ ID NO: 8173 - protein, 89 aa, Escherichia coli; identical to SEQ ID NO: 2810

SEQ ID NO: 8174 - protein, 246 aa, Escherichia coli; identical to SEQ ID NO: 3021

SEQ ID NO: 8175 - protein, 700 aa, Escherichia coli; identical to SEQ ID NO: 3047

SEQ ID NO: 8176 - protein, 203 aa, Escherichia coli; identical to SEQ ID NO: 2201

SEQ ID NO: 8177 - protein, 843 aa, Escherichia coli; identical to SEQ ID NO: 3042

SEQ ID NO: 8178 - protein, 229 aa, Escherichia coli; identical to SEQ ID NO: 3277

SEQ ID NO: 8179 - protein, 686 aa, Escherichia coli; identical to SEQ ID NO: 3015

SEQ ID NO: 8180 - protein, 224 aa, Escherichia coli; identical to SEQ ID NO: 3035

SEQ ID NO: 8181 - protein, 732 aa, Escherichia coli; identical to SEQ ID NO: 4926

SEQ ID NO: 8182 - protein, 193 aa, Escherichia coli; identical to SEQ ID NO: 2246

SEQ ID NO: 8183 - protein, 200 aa, Escherichia coli; identical to SEQ ID NO: 1784

SEQ ID NO: 8184 - protein, 367 aa, Escherichia coli; identical to SEQ ID NO: 3016

SEQ ID NO: 8185 - protein, 565 aa, Escherichia coli; identical to SEQ ID NO: 2669

SEQ ID NO: 8186 - protein, 518 aa, Escherichia coli; identical to SEQ ID NO: 2349

SEQ ID NO: 8187 - protein, 232 aa, Escherichia coli; identical to SEQ ID NO: 2087

SEQ ID NO: 8188 - protein, 838 aa, Escherichia coli; identical to SEQ ID NO: 3041

SEQ ID NO: 8189 - protein, 266 aa, Escherichia coli; identical to SEQ ID NO: 1894

SEQ ID NO: 8190 - protein, 351 aa, Escherichia coli; identical to SEQ ID NO: 3010

SEQ ID NO: 8191 - protein, 432 aa, Escherichia coli; identical to SEQ ID NO: 2026

SEQ ID NO: 8192 - protein, 883 aa, Escherichia coli; identical to SEQ ID NO: 4713

SEQ ID NO: 8193 - protein, 760 aa, Escherichia coli; identical to SEQ ID NO: 3026

SEQ ID NO: 8194 - protein, 198 aa, Escherichia coli; identical to SEQ ID NO: 5083

SEQ ID NO: 8195 - protein, 237 aa, Escherichia coli; identical to SEQ ID NO: 3022

SEQ ID NO: 8196 - protein, 729 aa, Escherichia coli; identical to SEQ ID NO: 3052

SEQ ID NO: 8197 - protein, 539 aa, Escherichia coli; identical to SEQ ID NO: 3050

SEQ ID NO: 8198 - protein, 161 aa, Escherichia coli; identical to SEQ ID NO: 2582

SEQ ID NO: 8199 - protein, 362 aa, Escherichia coli; identical to SEQ ID NO: 2434

SEQ ID NO: 8200 - protein, 231 aa, Escherichia coli; identical to SEQ ID NO: 3055

SEQ ID NO: 8201 - protein, 663 aa, Escherichia coli; identical to SEQ ID NO: 1910

SEQ ID NO: 8202 - protein, 866 aa, Escherichia coli; identical to SEQ ID NO: 4866

SEQ ID NO: 8203 - protein, 213 aa, Escherichia coli; identical to SEQ ID NO: 2232

SEQ ID NO: 8204 - protein, 826 aa, Escherichia coli; identical to SEQ ID NO: 3256

SEQ ID NO: 8205 - protein, 784 aa, Escherichia coli; identical to SEQ ID NO: 2244

SEQ ID NO: 8206 - protein, 250 aa, Escherichia coli; identical to SEQ ID NO: 3048

SEQ ID NO: 8207 - protein, 738 aa, Escherichia coli; identical to SEQ ID NO: 3227

SEQ ID NO: 8208 - protein, 161 aa, Escherichia coli; identical to SEQ ID NO: 2582

SEQ ID NO: 8209 - protein, 810 aa, Escherichia coli
MGRCYYFLYSFPGYAEETFDTHFMIGGMRGEKVSEYRFDNKQPLPGNYELDFYVNHQWRGKKDITIPESPAKPCLPKVLLTTLGVKTDNLNTEDNCILLDEAVHGGQYQWDISEHRLNLTIPQAYINELERGYVPPESWDRGIDAFYTSYNLSQYRSYDSNNNSNTASYGRFNSGLNLFSWQLHSDASYSKPDDMKGKWQSNTLYLERGWSQILSTVQIGENYTSSLIFDSLRFSGIRLFRDMQMLPDSMQSFTPLVQGVAQSNALITVSQNGYIIYQKEVPPGPFTIADLQLSGSGADLDVSIKEADGSVRSFLVPYSSVPNMLQPGVSNFDFIAGRSKIYGVKNQEDFLEANYIYGLNNLLTLYGSTILSDNYNAITLGNGWNTPLGAISFDATRSSSKLNNDITHEGTSYQVAYNKYLVQTATRFSVAAWRYASQDYRTFSDHLYENDKHNHQSEYDDFYDIGRKNSLSANIMQPLSNNLGNVSLSALWRNYWGRSGNAKDYQFSYSNSWQRISYTFSASQSYDENDKEEERFNLFISIPFYWGDDITKTRHQINLSNSTSFSKDGYSSNNTGVTGIAGEHDQLNYGIYVNQQQQNNDTSLGTNLSWRTPIAIIDGSYSHSKNTWQSGGSISSGLVVWPGGINITNQLSDTFAILDAPGLEGAHINGQKYNRTNSKGQVVYDLMIPHRENHLVLDIANSESETELQGNRQIIAPYRGAVSYVQFTTDQRKPWYIQALRPDGSPLTFGYDVLDLQENNIGVVGQGSRLFIRVDEIPTGIKVALNDEQNLFCTITFQHVIDENKTYICQ

SEQ ID NO: 8210 - protein, 888 aa, Escherichia coli
MIGMGLVCSALPALAMEAWNNQQGGNKYQVIFDGKIYENAWWVSSTNCPGKAKANDATNPWRLKRTATAAEISQFGNTLSCEKSGSSSSSNSNTPASNTPANGGSATPAQGTVPSNSSVVAWNKQQGGQTWYVVFNGAVYKNAWWVASSNCPGDAKSNDASNPWRYVRAATATEISETSNPQSCTSAPQPSPDVKPAPDVKPAPDVQPAPADKSNDNYAVVAWKGQEGSSTWYVIYNGGIYKNAWWVGAANCPGDAKENDASNPWRYVRAATATEISQYGNPGSCSVKPDNNGGAVTPVDPTPETPVTPTPDNSEPSTPADSVNDYSLQAWSGQEGSEIYHVIFNGNVYKNAWWVGSKDCPRGTSAENSNNPWRLERTATAAELSQYGNPTTCEIDNGGVIVADGFQASKAYSADSIVDYNDAHYKTSVDQDAWGFVPGGDNPWKKYEPAKAWSASTVYVKGDRVVVDGQAYEALFWTQSDNPALVANQNATGSNSRPWKPLGKAQSYSNEELNNAPQFNPETLYASDTLIRFNGVNYISQSKVQKVSPSDSNPWRVFVDWTGTKERVGTPKKAWPKHVYAPYVDFTLNTIPDLAALAKNHNVNHFTLAFVVSKDANTCLPTWGTAYGMQNYAQYSKIKALREAGGDVMLSIGGANNAPLAASCKNVDDLMQHYYDIVDNLNLKVLDFDIEGTWVADQASIERRNLAVKKVQDKWKSEGKDIAIWYTLPILPTGLTPEGMNVLSDAKAKGVELAGVNVMTMDYGNAICQSANTEGQNIHGKCATSAIANLHSQLKGLHPNKSDAEIDAMMGTTPMVGVNDVQGEVFYLSDARLVMQDAQKRNLGMVGIWSIARDLPGGTNLSPEFHGLTKEQAPKYAFSEIFAPFTKQ

SEQ ID NO: 8211 - protein, 208 aa, Escherichia coli; identical to SEQ ID NO: 1949

SEQ ID NO: 8212 - protein, 760 aa, Escherichia coli; identical to SEQ ID NO: 2080

SEQ ID NO: 8213 - protein, 361 aa, Escherichia coli; identical to SEQ ID NO: 3061

SEQ ID NO: 8214 - protein, 351 aa, Escherichia coli; identical to SEQ ID NO: 4530

SEQ ID NO: 8215 - protein, 203 aa, Escherichia coli; identical to SEQ ID NO: 2015

SEQ ID NO: 8216 - protein, 231 aa, Escherichia coli; identical to SEQ ID NO: 2794

SEQ ID NO: 8217 - protein, 162 aa, Escherichia coli; identical to SEQ ID NO: 1973

SEQ ID NO: 8218 - protein, 367 aa, Escherichia coli; identical to SEQ ID NO: 2433

SEQ ID NO: 8219 - protein, 233 aa, Escherichia coli; identical to SEQ ID NO: 2006

SEQ ID NO: 8220 - protein, 862 aa, Escherichia coli; identical to SEQ ID NO: 5294

SEQ ID NO: 8221 - protein, 432 aa, Escherichia coli; identical to SEQ ID NO: 2026

SEQ ID NO: 8222 - protein, 242 aa, Escherichia coli; identical to SEQ ID NO: 2697

SEQ ID NO: 8223 - protein, 128 aa, Escherichia coli; identical to SEQ ID NO: 3240

SEQ ID NO: 8224 - protein, 191 aa, Escherichia coli; identical to SEQ ID NO: 2727

SEQ ID NO: 8225 - protein, 729 aa, Escherichia coli; identical to SEQ ID NO: 2074

SEQ ID NO: 8226 - protein, 213 aa, Escherichia coli
MTKMSRYALITALAMFLAGCVGQREPAPVEEVKPAPEQPAEPQQPVPTVPSVPTIPQQPGPIEHEDQTAPPAPHIRYYDWNGAMQPMVSKMLGADGVTAGSVLLVDSVNNRTNGSLNAAEATETLRNALANNGKFTLVSAQQLSMAKQQLGLSPQDSLGTRSKAIGIARNVGAHYVLYSSASGNVNAPTLQMQLMLVQTGEIIWSGKGAVSQQ

SEQ ID NO: 8227 - protein, 207 aa, Escherichia coli; identical to SEQ ID NO: 2211

SEQ ID NO: 8228 - protein, 856 aa, Escherichia coli; identical to SEQ ID NO: 6509

SEQ ID NO: 8229 - protein, 187 aa, Escherichia coli
MNQSKNASLIQAWIDDGNTTIAPEKIQVLFILTPPVSRVAGGSGQQLKIRKMPNNLPHNKESLFYLNVLDIPPNNPQNAGKNKIKLAFQNRIKLLWRPSGIAPVDKKSLSQLNIKKKNNAISINNETANWITVTTIKAQNVKVNNESILLPPFSNNDITLKNNHASEYELTVVDDYGNNIHSKIAAR

SEQ ID NO: 8230 - protein, 784 aa, Escherichia coli
MKKRIPTLLATMIATALYSQQGLAADLASQCMLGVPSYDRPLVQGDTNDLPVTINADHAKGDYPDDAVFTGSVDIMQGNSRLQADEVQLHQKEAPGQPEPVRTVDALGNVHYDDNQVILKGPKGWANLNTKDTNVWEGDYQMVGRQGRGKADLMKQRGENRYTILDNGSFTSCLPGSDTWSVVGSEIIHDREEQVAEIWNARFKVGPVPIFYSPYLQLPVGDKRRSGFLIPNAKYTTTNYFEFYLPYYWNIAPNMDATITPHYMHRRGNIMWENEFRYLSQAGAGLMELDYLPSDKVYEDEHPNDDSSRRWLFYWNHSGVMDQVWRFNVDYTKVSDPSYFNDFDNKYGSSTDGYATQKFSVGYAVQNFNATVSTKQFQVFSEQNTSSYSAEPQLDVNYYQNDVGPFDTRIYGQAVHFVNTRDDMPEATRVHLEPTINLPLSNNWGSINTEAKLLATHYQQTNLDWYNSRNTTKLDESVNRVMPQFKVDGKMVFERDMEMLAPGYTQTLEPRAQYLYVPYRDQSDIYNYDSSLLQSDYSGLFRDRTYGGLDRIASANQVTTGVTSRIYDDAAVERFNISVGQIYYFTESRTGDDNITWENDDKTGSLVWAGDTYWRISERWGLRGGIQYDTRLDNVATSNSSIEYRRDEDRLVQLNYRYASPEYIQATLPKYYSTAEQYKNGISQIGAVASWPIADRWSIVGAYYYDTNANKQADSMLGVQYSSCCYAIRVGYERKLNGWDNDKQHAVYDNAIGFNIELRGLSSNYGLGTQEMLRSNILPYQNTL

SEQ ID NO: 8231 - protein, 446 aa, Escherichia coli [sequence omitted]

SEQ ID NO: 8232 - protein, 865 aa, Escherichia coli
MTIEYTKNYHHLTRIATFCALLYCNTAFSAELVEYDHTFLMGQNASNIDLSRYSEGNPAIPGVYDVSVYVNDQPIINQSITFVAIEGKKNAQACITLKNLLQFHINSPDINNEKAVLLARDETLGNCLNLTEIIPQASVRYDVNDQRLDIDVPQAWVMKNYQNYVDPSLWENGINAAMLSYNLNGYHSETPGRKNESIYAAFNGGMNLGAWRLRASGNYNWMTDSGSNYDFKNRYVQRDIASLRSQLILGESYTTGETFDSVSIRGIRLYSDSRMLPPTLASFAPIIHGVANTNAKVTITQGGYKIYETTVPPGAFVIDDLSPSGYGSDLIVTIEESDGSKRTFSQPFSSVVQMLRPGVGRWDISGGQVLKDDIQDEPNLFQASYYYGLNNYLTGYTGIQITDNNYTAGLLGLGLNTSVGAFSFDVTHSNVRIPDDKTYQGQSYRVSWNKLFEETSTSLNIAAYRYSTQNYLGLNDALTLIDEVKHPEQDLEPKFMRNYSRMKNQVTVSINQPLKFEKKDYGSFYLSGSWSDYWASGQNRSNYSIGYSNSTSWGSYSVSAQRSWNEDGDTDDSVYLSFTIPIEKLLGTEQRTSGFQSIDTQISSDFKGNNQLNVSSSGYSDNARVSYSVNTGYTMNKASKDLSYVGGYASYESPWGTLAGSISANSDNSRQVSLSTDGGFVLHSGGLTFSNDSFSDSDTLAVVQAPGAQGARINYGNSTIDRWGYGVTSALSPYHENRIALDINDLENDVELKSTSAVAVPRQGSVVFADFETVQGQSAIMNITRSDGKNIPFAADIYDEQGNVIGNVGQGGQAFVRGIEQQGNISIKWLEQSKPVSCLAHYQQSPEAEKIAQSIILNGIRCQIQ

SEQ ID NO: 8233 - protein, 747 aa, Escherichia coli; identical to SEQ ID NO: 2072

SEQ ID NO: 8234 - protein, 249 aa, Escherichia coli; identical to SEQ ID NO: 2793

SEQ ID NO: 8235 - protein, 230 aa, Escherichia coli; identical to SEQ ID NO: 3222

SEQ ID NO: 8236 - protein, 650 aa, Escherichia coli; identical to SEQ ID NO: 2146

SEQ ID NO: 8237 - protein, 746 aa, Escherichia coli
MNKKIHSLALLVNLGIYGVAQAQEPTDTPVSHDDTIVVTAAEQNLQAPGVSTITADEIRKNPVARDVSEIIRTMPGVNLTGNSTSGQRGNNRQIDIRGMGPENTLILIDGKPVSSRNSVRQGWRGERDTRGDTSWVPPEMIERIEVLRGPAAARYGNGAAGGVVNIITKKGSGEWHGSWDAYFNAPEHKEEGATKRTNFSLTGPLGDEFSFRLYGNLDKTQADAWDINQGHQSARAGTYATTLPAGREGVINKDINGVVRWDFAPLQSLELEAGYSRQGNLYAGDTQNTNSDSYTRSKYGDETNRLYRQNYALTWNGGWDNGVTTSNWVQYEHTRNSRIPEGLAGGTEGKFNEKATQDFVDIDLDDVMLHSEVNLPIDFLVNQTLTLGTEWNQQRMKDLSSNTQALTGTNTGGAIDGVSTTDRSPYSKAEIFSLFAENNMELTDSTIVTPGLRFDHHSIVGNNWSPALNISQGLGDDFTLKMGIARAYKAPSLYQTNPNYILYSKGQGCYASAGGCYLQGNDDLKAETSINKEIGLEFKRDGWLAGVTWFRNDYRNKIEAGYVAVGQNAVGTDLYQWDNVPKAVVEGLEGSLNVPVSETVMLTNNITYMLKSENKTTGDRLSIIPEYTLNSTLSWQAREDLSMQTTFTWYGKQQPKKYNYKGQPAVGPETKEISPYSIVGLSATWDVTKNVSLTGGVDNLFDKRLWRAGNAQTTGDLAGANYIAGAGAYTYNEPGRTWYMSVNTHF

SEQ ID NO: 8238 - protein, 818 aa, Escherichia coli
MDTVNIYRLSFVSCLVMAMPCAMAVEFNLNVLDKSMRDRIDISLLKEKGVIAPGEYFVSVAVNNNKISNGQKINWQKKGDKTIPCINDSLVDKFGLKPDIRQSLPQIDRCIDFSSRPEMLFNFDQANQQLNISIPQAWLAWHSENWAPPSTWKEGVAGVLMDYNLFASSYRPQDGSSSTNLNAYGTAGINAGAWRLRSDYQLNKTDSEDNHDQSGGISRTYLFRPLPQLGSKLTLGETDFSSNIFDGFSYTGAALASDDRMLPWELRGYAPQISGIAQTNATVTISQSGRVIYQKKVPPGPFIIDDLNQSVQGTLDVKVTEEDGRVNNFQVSAASTPFLTRQGQVRYKLAAGQPRPSMSHQTENETFFSNEVSWGMLSNTSLYGGLLISDDDYHSAAMGIGQNMLWLGALSFDVTWASSHFDTQQDERGLSYRFNYSKQVDATNSTISLAAYRFSDRHFHSYANYLDHKYNDSDAQDEKQTISLSVGQPITPLNLNLYANLLHQTWWNADASTTANITAGFNVDIGDWRDISISTSFNTTHYEDKDRDNQIYLSISLPFGNGGRVGYDMQNSSHSTIHRMSWNDTLDERNSWGMSAGLQSDRPDNGAQVSGNYQHLSSAGEWDISGTYAASDYSSVSSSWSGSFTATQYGAAFHRRSSTNEPRLMVSTDGVADIPVQGNLDYTNHFGIAVVPLISSYQPSTVAVNMNDLPDGVTVAENVIKETWIEGAIGYKSLASRSGKDVNVIIRNASGQFPPLGADIRQDDSGISVGMVGEEGHAWLSGVAENQLFTVVWGEQSCIIHLPERLEDTTKRLILPCH

SEQ ID NO: 8239 - protein, 200 aa, Escherichia coli; identical to SEQ ID NO: 1793

SEQ ID NO: 8240 - protein, 266 aa, Escherichia coli; identical to SEQ ID NO: 1894

SEQ ID NO: 8241 - protein, 721 aa, Escherichia coli; identical to SEQ ID NO: 3265

SEQ ID NO: 8242 - protein, 517 aa, Escherichia coli; identical to SEQ ID NO: 3116

SEQ ID NO: 8243 - protein, 274 aa, Escherichia coli; identical to SEQ ID NO: 2309

SEQ ID NO: 8244 - protein, 774 aa, Escherichia coli
MTPLRVFRKTTPLVNTIRLSLLPLAGLSFSAFAAQVNIAPGSLDKALNQYAAHSGFTLSVDASLTRGKQSNGLHGDYDVESGLQQLLDGSGLQVKPLGNNSWTLEPAPAPKEDALTVVGDWLGDARENDVFEHAGARDVIRREDFAKTGATTMREVLNRIPGVSAPENNGTGSHDLAMNFGIRGLNPRLASRSTVLMDGIPVPFAPYGQPQLSLAPVSLGNMDAIDVVRGGGAVRYGPQSVGGVVNFVTRAIPQDFGIEAGVEGQLSPTSSQNNPKETHNLMVGGTADNGFGTALLYSGTRGSDWREHSATRIDDLMLKSKYAPDEVHTFNSLLQYYDGEADMPGGLSRADYDADRWQSTRPYDRFWGRRKLASLGYQFQPDSQHKFNIQGFYTQTLRSGYLEQGKRITLSPRNYWVRGIEPRYSQIFMIGPSAHEVGVGYRYLNESTHEMRYYTATSSGQLPSGSSPYDRDTRSGTEAHAWYLDDKIDIGNWTITPGMRFEHIESYQNNAITGTHEEVSYNAPLPALNVLYHLTDSWNLYANTEGSFGTVQYSQIGKAVQSGNVEPEKARTWELGTRYDDGALTAEMGLFLINFNNQYDSNQTNDTVTARGKTRHTGLETQARYDLGTITPTLDNVSIYASYAYVNAEIREKGDTYGNLVPFSPKHKGTLGVDYKPGNWTFNLNSDFQSSQFADNANTVKESADGSTGRIPGFMLWGARVAYDFGPQMADLNLAFGVKNIFDQDYFIRSYDDNNKGIYAGQPRTLYMQGSLKF

SEQ ID NO: 8245 - protein, 562 aa, Escherichia coli
MLPPDLRGYAPQITGVAQTNAKVTVSQNNRIIYQENVPPGPFAITNLFNTLQGQLDVKVEEEDGRVTQWQVASNSIPYLTRKGQIRYTTAMGKPTSVGGDSLQQPFFWTGEFSWGWLNNVSLYGGSVLTNRDYQSLAAGVGFNLNSLGSLSFDVTRSDAQLHNQDKETGYSYRANYSKRFESTGSQLTFAGYRFSDKNFVTMNEYINDTNHYTNYQNEKESYIVTFNQYLESLRLNTYVSLARNTYWDASSNVNYSLSLSRDFDIGPLKNVSTSLTFSRINWEEDNQDQLYLNISIPWGTSRTLSYGMQRNQDNEISHTASWYDSSDRNNSWSVSASGDNDEFKDMKASLRASYQHNTENGRLYLSGTSQRDSYYSLNASWNGSFTATRHGAAFHDYSGSADSRFMIDADGTEDIPLNNKRAVTNRYGIGVIPSVSSYITTSLSVDTRNLPENVDIENSVITTTLTEGAIGYAKLDTRKGYQIIGVIRLADGSHPPLGISVKDETSHKELGLVADGGFVYLNGIQDDNKLALRWGDKSCFIQPPNSSNLTTGTAILPCISQN

SEQ ID NO: 8246 - protein, 630 aa, Escherichia coli
MRLNITIPQIALLSSAHGYIPPEEWDEGIPALLLNYNFTGNRGNGNDSYFFSELSGINIGPWRLRNNGSWNYFRGNGYHSEQWNNIGTWVQRAIIPLKSELVMGDGNTGSDIFDGVGFRGVRLYSSDNMYPDSQQGFAPTVRGIARTAAQLTIRQNGFIIYQSYVSPGAFEITDLHPTSSNGDLDVTIDERDGNQQNYTIPYSTVPILQREGRFKFDLTAGDFRSGNSQQSSPFFFQGTALGGLPQEFTAYGGTQLSANYTAFLLGLGRNLGNWGAVSLDVTHARSQLADASRHEGDSIRFLYAKSMNTFGTNFQLMGYRYSTQGFYTLDDVAYRRMEGYEYDYDGEHRDEPIIVNYHNLRFSRKDRLQLNVSQSLNDFGSLYISGTHQKYWNTSDSDTWYQVGYTSSWVGISYSLSFSWNESVGIPDNERIVGLNVSVPFNVLTKRRYTRENALDRAYASFNANRNSNGQNSWLAGVGGTLLEGHNLSYHVSQGDTSNNGYTGSATANWQAAYGTLGGGYNYDRDQHDVNWQLSGGVVGHENGITLSQPLGDTNVLIKAPGAGGVRIENQTGILTDWRGYAVMLYATVYRYNRIALDTNTMGNSIDVEKILAALCRRKARWFVPILIPA

SEQ ID NO: 8247 - protein, 591 aa, Escherichia coli
MPSFIGGLVVFVSAAFNAQAETWFDPAFFKDDPSMVADLSRFEKGQKITPGVYRVDIVLNQTIVDTRNVNFVEITPEKGIAACLTTESLDAMGVNTDAFPAFKQLDKQACVPLAEIIPDASVTFNVNKLRLEISVPQIAIKSNARGYVPPERWDEGINALLLGYSFSGANSIHSSADSDSGDSYFLNLNSGVNLGPWRLRNNSTWSRSSGQTAEWKNLSSYLQRAVIPLKGELTVGDDYTAGDFFDSVSFRGVQLASDDNMLPDSLKGFAPVVRGIAKSNAQITIKQNGYTIYQTYVSPGAFEISDLYSTSSSGDLLVEIKEADGSVNSYSVPFSSVPLLQRQGRIKYAVTLAKYRTNSNEQQESKFAQATLQWGGPWGTTWYGGGQYAEYYRAAMFGLGFNLGDFGAISFDATQAKSTLADQSEHKGQSYRFLYAKTLNHLGTNFQLMGYRYSTSGFYTLSDTMYKHMDGYEFNDGDDEDTPMWSRYYNLFYTKRGKLQVNISQQLGEYGSFYLSGSQQTYWHTDQQDRLLQFGYNTQIKDLSLGISWNYSKSRGQPDADQVFALNFSLPLNLLLPRSNDSYTRKKITPG

SEQ ID NO: 8248 - protein, 678 aa, Escherichia coli; identical to SEQ ID NO: 2231

SEQ ID NO: 8249 - protein, 565 aa, Escherichia coli; identical to SEQ ID NO: 2669

SEQ ID NO: 8250 - protein, 700 aa, Escherichia coli; identical to SEQ ID NO: 2784

SEQ ID NO: 8251 - protein, 249 aa, Escherichia coli
MRYLNTKNIIAAGVLLSCMNSIAWGAIIPDRTRIIMNESDKGEALKLTNQSKKLPYLAQTWIEDTKGNKSRDFIVTVPPMVRLNPNEQIQIRMITQEKIAQLPKDRETLFYFNVREIPPKTDKKNVMQVTMQHALKLFWRPKAIELEDDGVMTYEKVEIIRRNDGSIRFNNKMPYHVTLGYIGTNGVTMLPQTQSLMVLPFSHADTQFKNVPSNFQVGYINDFGGLSFYEINCPTVNNSCNVSVAKRDK

SEQ ID NO: 8252 - protein, 331 aa, Escherichia coli; identical to SEQ ID NO: 2705

SEQ ID NO: 8253 - protein, 232 aa, Escherichia coli; identical to SEQ ID NO: 2087

SEQ ID NO: 8254 - protein, 641 aa, Escherichia coli
MLAVDDDGETMVVTASSVEQNLKDAPASISVITQEDLQRKPVQNLKDVLKEVPGVQLTNEGDNRKGVSIRGLDSSYTLILVDGKRVNSRNAVFRHNDFDLNWIPVDSIERIEVVRGPMSSLYGSDALGGVVNIITKKIGQKWSGTVTVDTTIQEYRDRGDTYNGQFFTSGPLIDGVLGMKAYGSLAKREKDDPQNSTTTDTGETPRIEGFSSRDGNVEFAWTPNQNHDFTAGYGFDRQDRDSDSLDKNRLERQNYSVSHNGRWDYGTSELKYYGEKVENKNPGNSSPITSESNTVDGKYTLPLTAINQFLTVGGEWRHDKLSDAVNLTGGTSSKTSASQYALFVEDEWRIFEPLALTTGVRMDDHETYGEHWSPRAYLVYNATDTVTVKGGWATAFKAPSLLQLSPDWTSNSCRGACKIVGSPDLKPETSESWELGLYYMGEEGWLEGVESSVTVFRNDVKDRISISRTSDVNAAPGYQNFVGFETGANGRRIPVFSYYNVNKARIQGVETELKIPFNDEWKLSINYTYNDGRDVSNGENKPLSDLPFHTANGTLDWKPLALEDWSFYVSGHYTGQKRADSATAKTPGGYTIWNTGAAWQVTKDVKLRAGVLNLGDKDLSRDDYSYNEDGRRYFMAVDYRF

SEQ ID NO: 8255 - protein, 118 aa, Escherichia coli [sequence omitted]

SEQ ID NO: 8256 - protein, 614 aa, Escherichia coli; identical to SEQ ID NO: 1888

SEQ ID NO: 8257 - protein, 250 aa, Escherichia coli; identical to SEQ ID NO: 2761

SEQ ID NO: 8258 - protein, 102 aa, Escherichia coli; identical to SEQ ID NO: 1829

SEQ ID NO: 8259 - protein, 430 aa, Escherichia coli; identical to SEQ ID NO: 2617

SEQ ID NO: 8260 - protein, 170 aa, Escherichia coli [sequence omitted]

SEQ ID NO: 8261 - protein, 386 aa, Escherichia coli; identical to SEQ ID NO: 3072

SEQ ID NO: 8262 - protein, 203 aa, Escherichia coli; identical to SEQ ID NO: 2201

SEQ ID NO: 8263 - protein, 828 aa, Escherichia coli; identical to SEQ ID NO: 2386

SEQ ID NO: 8264 - protein, 541 aa, Escherichia coli; identical to SEQ ID NO: 4657

SEQ ID NO: 8265 - protein, 193 aa, Escherichia coli; identical to SEQ ID NO: 2246

SEQ ID NO: 8266 - protein, 229 aa, Escherichia coli
MTKIKLLMLIIFYLIISASAHAAGGIALGATRIIYPADAKQTAVWIRNSHTNERFLVNSWIENSSGVKEKSFIITPPLFVSEPKSENTLRIIYTGPPLAADRESLFWMNVKTIPSVDKNALNGRNVLQLAILSRMKLFLRPIQLQELPAEAPDTLKFSRSGNYINVHNPSPFYVTLVNLQVGSQKLGNAMAAPRVNSQIPLPSGVQGKLKFQTVNDYGSVTPVREVNLN

SEQ ID NO: 8267 - protein, 518 aa, Escherichia coli; identical to SEQ ID NO: 2349

SEQ ID NO: 8268 - protein, 170 aa, Escherichia coli
MGGKCRWCKGWSFYRDATSVCDEGKKENTLRILDATNNQLPQDRESLFWMNVKAIPSMDKSKLTENTLQLAIISRIKLYYRPAKLALPPDQAAEKLRFRRSANSLTLINPTPYYLTVTELNAGTRVLENALVPPMGESTVKLPSDAGSNITYRTINDYGALTPKMTGVME

SEQ ID NO: 8269 - protein, 866 aa, Escherichia coli; identical to SEQ ID NO: 3025

SEQ ID NO: 8270 - protein, 161 aa, Escherichia coli; identical to SEQ ID NO: 2582

SEQ ID NO: 8271 - protein, 866 aa, Escherichia coli; identical to SEQ ID NO: 4866

SEQ ID NO: 8272 - protein, 237 aa, Escherichia coli; identical to SEQ ID NO: 3022

SEQ ID NO: 8273 - protein, 826 aa, Escherichia coli; identical to SEQ ID NO: 3256

SEQ ID NO: 8274 - protein, 883 aa, Escherichia coli; identical to SEQ ID NO: 4713

SEQ ID NO: 8275 - protein, 880 aa, Escherichia coli; identical to SEQ ID NO: 3008

SEQ ID NO: 8276 - protein, 266 aa, Escherichia coli; identical to SEQ ID NO: 1894

SEQ ID NO: 8277 - protein, 794 aa, Escherichia coli; identical to SEQ ID NO: 4850

SEQ ID NO: 8278 - protein, 843 aa, Escherichia coli; identical to SEQ ID NO: 3042

SEQ ID NO: 8279 - protein, 207 aa, Escherichia coli; identical to SEQ ID NO: 2211

SEQ ID NO: 8280 - protein, 838 aa, Escherichia coli; identical to SEQ ID NO: 3041

SEQ ID NO: 8281 - protein, 869 aa, Escherichia coli; identical to SEQ ID NO: 3012

SEQ ID NO: 8282 - protein, 837 aa, Escherichia coli; identical to SEQ ID NO: 4687

SEQ ID NO: 8283 - protein, 246 aa, Escherichia coli; identical to SEQ ID NO: 3021

SEQ ID NO: 8284 - protein, 747 aa, Escherichia coli; identical to SEQ ID NO: 2072

SEQ ID NO: 8285 - protein, 678 aa, Escherichia coli; identical to SEQ ID NO: 3014

SEQ ID NO: 8286 - protein, 430 aa, Escherichia coli; identical to SEQ ID NO: 2617

SEQ ID NO: 8287 - protein, 760 aa, Escherichia coli; identical to SEQ ID NO: 3026

SEQ ID NO: 8288 - protein, 89 aa, Escherichia coli; identical to SEQ ID NO: 2810

SEQ ID NO: 8289 - protein, 402 aa, Escherichia coli; identical to SEQ ID NO: 4768

SEQ ID NO: 8290 - protein, 228 aa, Escherichia coli; identical to SEQ ID NO: 3034

SEQ ID NO: 8291 - protein, 360 aa, Escherichia coli; identical to SEQ ID NO: 3032

SEQ ID NO: 8292 - protein, 565 aa, Escherichia coli; identical to SEQ ID NO: 2669

SEQ ID NO: 8293 - protein, 200 aa, Escherichia coli; identical to SEQ ID NO: 1784

SEQ ID NO: 8294 - protein, 614 aa, Escherichia coli; identical to SEQ ID NO: 3301

SEQ ID NO: 8295 - protein, 224 aa, Escherichia coli; identical to SEQ ID NO: 3035

SEQ ID NO: 8296 - protein, 663 aa, Escherichia coli; identical to SEQ ID NO: 1910

SEQ ID NO: 8297 - protein, 732 aa, Escherichia coli; identical to SEQ ID NO: 4926

SEQ ID NO: 8298 - protein, 828 aa, Escherichia coli; identical to SEQ ID NO: 2380

SEQ ID NO: 8299 - protein, 518 aa, Escherichia coli; identical to SEQ ID NO: 2349

SEQ ID NO: 8300 - protein, 774 aa, Escherichia coli; identical to SEQ ID NO: 3018

SEQ ID NO: 8301 - protein, 784 aa, Escherichia coli; identical to SEQ ID NO: 2244

SEQ ID NO: 8302 - protein, 274 aa, Escherichia coli; identical to SEQ ID NO: 2303

SEQ ID NO: 8303 - protein, 673 aa, Escherichia coli; identical to SEQ ID NO: 3295

SEQ ID NO: 8304 - protein, 231 aa, Escherichia coli; identical to SEQ ID NO: 3055

SEQ ID NO: 8305 - protein, 250 aa, Escherichia coli; identical to SEQ ID NO: 3048

SEQ ID NO: 8306 - protein, 203 aa, Escherichia coli; identical to SEQ ID NO: 2009

SEQ ID NO: 8307 - protein, 213 aa, Escherichia coli; identical to SEQ ID NO: 2232

SEQ ID NO: 8308 - protein, 209 aa, Escherichia coli; identical to SEQ ID NO: 4977

SEQ ID NO: 8309 - protein, 102 aa, Escherichia coli; identical to SEQ ID NO: 1824

SEQ ID NO: 8310 - protein, 233 aa, Escherichia coli; identical to SEQ ID NO: 3276

SEQ ID NO: 8311 - protein, 362 aa, Escherichia coli; identical to SEQ ID NO: 2434

SEQ ID NO: 8312 - protein, 232 aa, Escherichia coli; identical to SEQ ID NO: 2087

SEQ ID NO: 8313 - protein, 432 aa, Escherichia coli; identical to SEQ ID NO: 2026

SEQ ID NO: 8314 - protein, 193 aa, Escherichia coli; identical to SEQ ID NO: 2246

SEQ ID NO: 8315 - protein, 696 aa, Escherichia coli; identical to SEQ ID NO: 3314

SEQ ID NO: 8316 - protein, 478 aa, Escherichia coli; identical to SEQ ID NO: 2404

SEQ ID NO: 8317 - protein, 746 aa, Escherichia coli; identical to SEQ ID NO: 3031

SEQ ID NO: 8318 - protein, 351 aa, Escherichia coli; identical to SEQ ID NO: 3010

SEQ ID NO: 8319 - protein, 118 aa, Escherichia coli [sequence omitted]

SEQ ID NO: 8320 - protein, 229 aa, Escherichia coli; identical to SEQ ID NO: 3277

SEQ ID NO: 8321 - protein, 191 aa, Escherichia coli; identical to SEQ ID NO: 2727

SEQ ID NO: 8322 - protein, 162 aa, Escherichia coli; identical to SEQ ID NO: 1965

SEQ ID NO: 8323 - protein, 236 aa, Escherichia coli; identical to SEQ ID NO: 3286

SEQ ID NO: 8324 - protein, 243 aa, Escherichia coli; identical to SEQ ID NO: 2910

SEQ ID NO: 8325 - protein, 446 aa, Escherichia coli; identical to SEQ ID NO: 2179

SEQ ID NO: 8326 - protein, 208 aa, Escherichia coli; identical to SEQ ID NO: 1949

SEQ ID NO: 8327 - protein, 729 aa, Escherichia coli; identical to SEQ ID NO: 3052

SEQ ID NO: 8328 - protein, 539 aa, Escherichia coli; identical to SEQ ID NO: 3050

SEQ ID NO: 8329 - protein, 249 aa, Escherichia coli; identical to SEQ ID NO: 3028

SEQ ID NO: 8330 - protein, 367 aa, Escherichia coli; identical to SEQ ID NO: 3016

SEQ ID NO: 8331 - protein, 686 aa, Escherichia coli; identical to SEQ ID NO: 3015

SEQ ID NO: 8332 - protein, 230 aa, Escherichia coli; identical to SEQ ID NO: 3019

SEQ ID NO: 8333 - protein, 203 aa, Escherichia coli; identical to SEQ ID NO: 2201

SEQ ID NO: 8334 - protein, 359 aa, Escherichia coli; identical to SEQ ID NO: 2328

SEQ ID NO: 8335 - protein, 331 aa, Escherichia coli; identical to SEQ ID NO: 2700

SEQ ID NO: 8336 - protein, 700 aa, Escherichia coli; identical to SEQ ID NO: 3047

SEQ ID NO: 8337 - protein, 784 aa, Escherichia coli; identical to SEQ ID NO: 2244

SEQ ID NO: 8338 - protein, 866 aa, Escherichia coli
MTIKPTKNYHNHLTRIATFCALLYCNSAFCAEPVEYDHTFLMGQNASNIDLSRYSEGNPAIPGMYDVSVYVNDQPIINQSITFIEIEGKKNAQACITLKNLLQFHINSPDINNEKAVLLARDETLGNCLNLTEIIPQASVRYDVNEQRLDIDVPQAWVMKNYQNYVDPSLWENGINAAMLSYNLNGYHSETPGRRNDSIYAAFNGGMNLGAWRLRASGNYNWMTDSGSNYDFKNRYIQRDIASLRSQLILGESYTTGETFDSVSIRGIRLYSDSRMLPPTLASFAPIIHGVANTNAKVTITQGGYKIYETTVPPGAFVIDDLSPSGYGSDLIVTVEESDGSKRTFSQPFSSVVQMLRPGVGRWDISGGQVLKDDIQDEPNLFQASYYYGLNNYLTGYTGIQITDNNYTAGLLGLGLNTSVGAFSFDVTHSNVRIPDDKTYQGQSYRVSWNKLFEETSTSLNIAAYRYSTQNYLGLNDALTLIDEVKHPEQDLEPKSMRNYSRMKNQVTVSINQPLKFEKKDYGSFYLSGSWSDYWASGQNRSNYSIGYSNSASWGSYSVSAQRSWNEDGDTDDSVYLSFTIPIEKLLGTEQRTSGFQSIDTQMSSDFKGNNQLNVSSSGYSDNARVSYSVNTGYTMNKASKDLSYVGGYASYESPWGSLAGSVSANSDNSRQVSLSTDGGFVLHSGGLTFSNDSFSDSDTLAVVQAPGAQGARINYGNSTIDRWGYGVTSALSPYHENRIALDINDLENDVELKSTSAVAVPRQGSVVFADFETVQGQSAIMNITRSDGKNIPFAADIYDEQGNVIGNVGQGGQAFVRGIEQQGNISIKWLEESKPVSCLAHYQQSSEAEKIAQSIILNGIRCQIQ

SEQ ID NO: 8339 - protein, 351 aa, Escherichia coli; identical to SEQ ID NO: 2872

SEQ ID NO: 8340 - protein, 208 aa, Escherichia coli; identical to SEQ ID NO: 1949

SEQ ID NO: 8341 - protein, 446 aa, Escherichia coli; identical to SEQ ID NO: 5547

SEQ ID NO: 8342 - protein, 230 aa, Escherichia coli; identical to SEQ ID NO: 3019

SEQ ID NO: 8343 - protein, 274 aa, Escherichia coli; identical to SEQ ID NO: 3471

SEQ ID NO: 8344 - protein, 250 aa, Escherichia coli; identical to SEQ ID NO: 3048

SEQ ID NO: 8345 - protein, 241 aa, Escherichia coli; identical to SEQ ID NO: 2922

SEQ ID NO: 8346 - protein, 856 aa, Escherichia coli
MAGFFVRLFVACAFAAQAPLSSAELYFNPRFLADDPQAVADLSRFENGQELPPGTYRVDIYLNNGYMATRDVTFNTGDSEQGIVPCLTRAQLASMGLNTASVSGMNLLADDACVPLTTMIQDATAHLDVGQQRLNLTIPQAFMSNRARGYIPPELWDPGINAGLLNYNFSGNSVQNRIGGNSHYAYLNLQSGLNIGAWRLRDNTTWSYNSSDRSSGSKNKWQHINTWLERDIIPLRSRLTLGDGYTQGDIFDGINFRGAQLASDDNMLPDSQRGFAPVIHGIARGTAQVTIKQNGYDIYNSTVPPGPFTINDIYAAGNSGDLQVTIKEADGSTQIFTVPYSLVPLLQREGHTRYSITAGEYRSGNAQQEKPRFFQSTLLHGLPAGWTIYGGTQLADRYRAFNFGIGKNMGALGALSVDMTQANSTLPDDSQHDGQSVRFLYNKSLNESGTNIQLVGYRYSTSGYFNFADTTYSRMNGYNIETQDGVIQVKPKFTDYYNLAYNKRGKLQLTVTQQLGRTSTLYLSGSHQTYWGTSNVDEQFQAGLNTAFEDINWTLSYSLTKNAWQKGRDQMLALNVNIPFSHWLRSDSKSQWRHASASYSMSHDLNGRMTNLAGVYGTLLEDNNLSYSVQTGYAGGGDGNSGSTGYATLNYRGGYGNANIGYSHSDDIKQLYYGVSGGVLAHANGVTLGQPLNDTVVLVKAPGAKDAKVENQTGVRTDWRGYAVLPYATEYRENRVALDTNTLADNVDLDNAVANVVPTRGAIVRAEFKARVGIKLLMTLTHNNKPLPFGAMVTSESSQSSGIVADNGQVYLSGMPLAGKVQVKWGEEENAHCVANYQLPPESQQQLLTQLSAECR

SEQ ID NO: 8347 - protein, 243 aa, Escherichia coli; identical to SEQ ID NO: 3483

SEQ ID NO: 8348 - protein, 760 aa, Escherichia coli; identical to SEQ ID NO: 3923

SEQ ID NO: 8349 - protein, 185 aa, Escherichia coli
MLEQMVKEAVSHIPAPRDGRDYDPEVLKQAVLEAVNALPAPQDGRDATALEVLPAIDDQKSFPRGTYATHLGGLWRAYEKTHGMRGWECLVDGVADIDVSMTDERLFSVVIRQSSGQCTEKTFSLPVMLYRGVFRAGETYHPGDTVTWGGSLWHCNSMTGDKPGEAHSSGWTLAAKRGRDAGGGK

SEQ ID NO: 8350 - protein, 591 aa, Escherichia coli; identical to SEQ ID NO: 4273

SEQ ID NO: 8351 - protein, 998 aa, Escherichia coli
MTVNKIKNIFNNATLTTKSAFNTASSSVRSAGKKLILLIPDNYEAQGVGINELVKAADELGIEIHRTERDDTAIANQFFGAAEKVVGLTERGVAIFAPQLDKLLQKYQKVGSKIGGTAENVGNNLGKAGTVLSALQNFTGIALSGMALDELLRKQREGEDISQNDIAKSSIELINQLVDTVSSINSTVDSFSEQLNQLGSFLSSKPRLSSVGGKLQNLPDLGSLGDGLDVVSGILSAVSASFILGNSDAHTGTKAAAGIELTTQVLGNVGKAVSQYILAQRMAQGLSTTAASAGLITSAVMLAISPLSFLAAADKFERAKQLESYSERFKKLNYEGDALLAAFHKETGAIDAALTTINTVLSSVSAGVSAASSASLIGAPISMLVSALTGTISGILEASKQAMFEHVAEKFAARINEWEKEHGKNYFENGYDARHAAFLEDSLSLLADFSRQHAVERAVAITQQHWDEKIGELAGITRNADRSQSGKAYINYLENGGLLEAQPKEFTQQVFDPQKGTIDLSTGNVSSVLTFITPTFTPGEEVRERKQSGKYEYMTSLIVNGKDTWSVKGIKNHKGVYDYSKLIQFVEKNNKHYQARIISELGDKDDVVYSGAGSSEVFAGEGHDTVSYNKTDVGKLTIDATGASKPGEYIVSKNMYGDVKVLQEVVKEQEVSVGKRTEKIQYRDFEFRTGGIPYDVIDNLHSVEELIGGKHDDEFKGGKFNDIFHGADGNDYIEGNYGNDRLYGDDGDDYISGGQGDDQLFGGSGNDKLSGGDGNNYLTGGSGNDELQAHGAYNILSGGTGDDKLYGGGGIDLLDGGEGNDYLNGGFGNDIYVYRQNYGHHTIADEGGKGDRLHLSDISFDDIAFKRVGNDLIMNKAINGVLSFNESNDVNGITFKNWFAKDASGADNHLVEVITDKDGREIKVDKIPHNNNERSGYIKASNIASEKNMVNITSVANDINKIISSVSGFDSGDERLASLYNLSLHQNNTHSTTLTTTV

SEQ ID NO: 8352 - protein, 359 aa, Escherichia coli; identical to SEQ ID NO: 2328

SEQ ID NO: 8353 - protein, 213 aa, Escherichia coli; identical to SEQ ID NO: 2232

SEQ ID NO: 8354 - protein, 432 aa, Escherichia coli; identical to SEQ ID NO: 2026

SEQ ID NO: 8355 - protein, 207 aa, Escherichia coli; identical to SEQ ID NO: 2211

SEQ ID NO: 8356 - protein, 514 aa, Escherichia coli; identical to SEQ ID NO: 8138

SEQ ID NO: 8357 - protein, 834 aa, Escherichia coli; identical to SEQ ID NO: 3095

SEQ ID NO: 8358 - protein, 662 aa, Escherichia coli; identical to SEQ ID NO: 8124

SEQ ID NO: 8359 - protein, 111 aa, Escherichia coli; identical to SEQ ID NO: 7471

SEQ ID NO: 8360 - protein, 118 aa, Escherichia coli [sequence omitted]

SEQ ID NO: 8361 - protein, 224 aa, Escherichia coli; identical to SEQ ID NO: 3165

SEQ ID NO: 8362 - protein, 614 aa, Escherichia coli; identical to SEQ ID NO: 1884

SEQ ID NO: 8363 - protein, 161 aa, Escherichia coli; identical to SEQ ID NO: 2582

SEQ ID NO: 8364 - protein, 430 aa, Escherichia coli; identical to SEQ ID NO: 2617

SEQ ID NO: 8365 - protein, 236 aa, Escherichia coli; identical to SEQ ID NO: 3482

SEQ ID NO: 8366 - protein, 200 aa, Escherichia coli; identical to SEQ ID NO: 1784

SEQ ID NO: 8367 - protein, 747 aa, Escherichia coli; identical to SEQ ID NO: 2072

SEQ ID NO: 8368 - protein, 659 aa, Escherichia coli
MDYNLFASSYRPQDGSSSTNLNAYGTAGINTGAWRLRSDYQLNQTDSDDNHEQSGEISRTYLFRPLPQLGSKLTLGETDFSSNIFDGFSYTGAALASDDRMLPWELRGYAPQISGIAQTNATVTISQSGRVIYQKKVPPGPFIIDDLNQSVQGTLDVKVTEEDGRVNNFQVSAASTPFLTRQGQVRYKLAAGQPRPSMSHQTENETFFSNEVSWGMLSNTSLYGGLLLSGDDYHSAAMGIGQNMLWLGALSFDVTWASSHFDTQQDERGLSYRFNYSKQVDATNSTISLAAYRFSDRHFHSYANYLDHKYNDSDAQDEKQTISLSVGQPITPLNLNLYANLLHQTWWNADASTTANITAGFNVDIGDWRDISISTSFNTTHYEDKDRDNQIYLSISLPFGNGGRVGYDMQNSSHSTTHRMSWNDTLDERNSWGMSAGLQSDRPDNGAQVSGNYQHLSSAGEWDISGTYAANDYSSVSSSWSGSFTATQYGAAFHRRSSTNEPRLMVSTDGVADIPVQGNLDYTNHFGIAVVPLISSYQPSTVAVNMNDLPDGVTVAENVIKETWIEGAIGYKSLASRSGKDVNVIIRNASGQFPPLGADIRQDDSGISVGMVGEEGHAWLSGVAENQKFTVVWGDSQHCSLHLPEHMEDTANRLILPCH

SEQ ID NO: 8369 - protein, 518 aa, Escherichia coli; identical to SEQ ID NO: 2349

SEQ ID NO: 8370 - protein, 721 aa, Escherichia coli; identical to SEQ ID NO: 7494

SEQ ID NO: 8371 - protein, 249 aa, Escherichia coli; identical to SEQ ID NO: 3492

SEQ ID NO: 8372 - protein, 266 aa, Escherichia coli; identical to SEQ ID NO: 1894

SEQ ID NO: 8373 - protein, 565 aa, Escherichia coli; identical to SEQ ID NO: 2678

SEQ ID NO: 8374 - protein, 224 aa, Escherichia coli
MKGLLSLLIFSMVLPAHAGIVIYGTRIIYPAEIKEVMVQLMNQGNRSSLLQAWIDDGDTSLPPEKIQVPFMLTPPVAKIGANSGQQVKIKIMPNKLPTNKESIFYLNVLDIPPNSPEQEGKNALKFAMQNRIKLFYRPAGIAPVNKATFKKLLVNRSDNGLVIKNDSANWVTISDVKANNVKVNYETIMIAPLESQSVNVKSNNANNWYLTIIDDHGNYISDKI

SEQ ID NO: 8375 - protein, 386 aa, Escherichia coli; identical to SEQ ID NO: 3094

SEQ ID NO: 8376 - protein, 331 aa, Escherichia coli; identical to SEQ ID NO: 2700

SEQ ID NO: 8377 - protein, 229 aa, Escherichia coli; identical to SEQ ID NO: 3277

SEQ ID NO: 8378 - protein, 729 aa, Escherichia coli; identical to SEQ ID NO: 2948

SEQ ID NO: 8379 - protein, 843 aa, Escherichia coli; identical to SEQ ID NO: 3163

SEQ ID NO: 8380 - protein, 203 aa, Escherichia coli; identical to SEQ ID NO: 2201

SEQ ID NO: 8381 - protein, 368 aa, Escherichia coli; identical to SEQ ID NO: 3872

SEQ ID NO: 8382 - protein, 246 aa, Escherichia coli; identical to SEQ ID NO: 3021

SEQ ID NO: 8383 - protein, 700 aa, Escherichia coli; identical to SEQ ID NO: 8081

SEQ ID NO: 8384 - protein, 193 aa, Escherichia coli; identical to SEQ ID NO: 2246

SEQ ID NO: 8385 - protein, 232 aa, Escherichia coli; identical to SEQ ID NO: 2087

SEQ ID NO: 8386 - protein, 170 aa, Escherichia coli [sequence omitted]

SEQ ID NO: 8387 - protein, 191 aa, Escherichia coli; identical to SEQ ID NO: 2727

SEQ ID NO: 8388 - protein, 162 aa, Escherichia coli; identical to SEQ ID NO: 1973

SEQ ID NO: 8389 - protein, 367 aa, Escherichia coli; identical to SEQ ID NO: 4285

SEQ ID NO: 8390 - protein, 89 aa, Escherichia coli; identical to SEQ ID NO: 2833

SEQ ID NO: 8391 - protein, 365 aa, Escherichia coli; identical to SEQ ID NO: 3878

SEQ ID NO: 8392 - protein, 270 aa, Escherichia coli
MPERRRRQRGMPAYQPVRQKRALQMLTLQQGRHRSQPGRRQKVQPQQSSQRMRPRPRLLRPLKKPVSHHKVQQKLNCQERRQKVQPVMQPGMATTATEKRPGVQQKATQSAEQSRIAAEEAVNRIPTVVGPPGPKGEQGPAGPQGPKGDKGERGDTGPVGATGERGPAGDAGPAGPQGPKGDRGERGETDLTGNAGPQGPKGDTGAAGPAGPQGPKGETGAAGPVGATGPQGPKGDPGETQIRFVWGRRALLRQTAMAGSRIQMVRSSPD

SEQ ID NO: 8393 - protein, 203 aa, Escherichia coli; identical to SEQ ID NO: 2009

SEQ ID NO: 8394 - protein, 820 aa, Escherichia coli; identical to SEQ ID NO: 8131

SEQ ID NO: 8395 - protein, 539 aa, Escherichia coli; identical to SEQ ID NO: 3050

SEQ ID NO: 8396 - protein, 478 aa, Escherichia coli; identical to SEQ ID NO: 7448

SEQ ID NO: 8397 - protein, 361 aa, Escherichia coli; identical to SEQ ID NO: 3061

SEQ ID NO: 8398 - protein, 746 aa, Escherichia coli
MNKKIHSLALLVNLGIYGVAQAQEPTDTPVSHDDTIVVTAAEQNLQAPGVSTITADEIRKNPVARDVSEIIRTMPGVNLTGNSTSGQRGNNRQIDIRGMGPENTLILIDGKPVSSRNSVRQGWRGERDTRGDTSWVPPEMIERIEVLRGPAAARYGNGAAGGVVNIITKKGSGEWHGSWDAYFNAPEHKEEGATKRTNFSLTGPLGDEFSFRLYGNLDKTQADAWDINQGHQSARAGTYVTTLPAGREGVINKDINGVVRWDFAPLQSLELEAGYSRQGNLYAGDTQNTNSDAYTRSKYGDETNRLYRQNYALTWNGGWDNGVTTSNWVQYEHTRNSRIPEGLAGGTEGKFNEKATQDFVDIDLDDVMLHSEVNLPIDFLVNQTLTLGTEWNQQRMKDLSSNTQALTGANTGGAIDGVSATDRSPYSKAEIFSLFAENNMELTDSTIVTPGLRFDHHSIVGNNWSPALNISQGLGDDFTLKMGIARAYKAPSLYQTNPNYILYSKGQGCYASAGGCYLQGNDDLKAETSINKEIGLEFKRDGWLAGVTWFRNDYRNKIEAGYVAVGQNAVGTDLYQWDNVPKAVVEGLEGSLNVPVSETVMWTNNITYMLKSKNKTTGDRLSIIPEYTLNSTLSWQAREDLSMQTTFTWYGKQQPKKYNYKGQPAVGPETKEISPYSIVGLSATWDVTKNVSLTGGVDNLFDKRLWRAGNAQTTGDLAGANYIAGAGAYTYNEPGRTWYMSVNTHF

SEQ ID NO: 8399 - protein, 826 aa, Escherichia coli; identical to SEQ ID NO: 7491

SEQ ID NO: 8400 - protein, 231 aa, Escherichia coli; identical to SEQ ID NO: 3055

SEQ ID NO: 8401 - protein, 650 aa, Escherichia coli
MSAISCAWPVLAVDDDGETMVVTASSVEQNLKDAPASISVITQEDLQRKPVQNLKDVLKEVPGVQLTNEGDNRKGVSIRGLDSSYTLILVDGKRVNSRNAVFRHNDFDLNWIPVDSIERIEVVRGPMSSLYGSDALGGVVNIITKKIGQKWSGTVTVDTTIQEHRDRGDTYNGQFFTSGPLIDGVLGMKAYGSLAKREKDDPQNSTTTDTGETPRIEGFSSRDGNVEFAWTPNQNHDFTAGYGFDRQDRDSDSLDKNRLERQNYSVSHNGRWDYGTSELKYYGEKVENKNPGNSSPITSESNTVDGKYTLPLTAINQFLTVGGEWRHDKLSDAVNLTGGTSSKTSASQYALFVEDEWRIFEPLALTTGVRMDDHETYGEHWSPRAYLVYNATDTVTVKGGWATAFKAPSLLQLSPDWTSNSCRGACKIVGSPDLKPETSESWELGLYYMGEEGWLEGVESSVTVFRNDVKDRISISRTSDVNAAPGYQNFVGFETGANGRRIPVFSYYNVNKARIQGVETELKIPFNDEWKLSINYTYNDGRDVSNGENKPLSDLPFHTANGTLDWKPLALEDWSFYVSGQYTGQKRADSATAKTPGGYTIWNTGAAWQVTKDVKLRAGVLNLGDKDLSRDDYSYNEDGRRYFMAVDYRF

SEQ ID NO: 8402 - protein, 880 aa, Escherichia coli; identical to SEQ ID NO: 3110

SEQ ID NO: 8403 - protein, 883 aa, Escherichia coli; identical to SEQ ID NO: 4713

SEQ ID NO: 8404 - protein, 746 aa, Escherichia coli; identical to SEQ ID NO: 3031

SEQ ID NO: 8405 - protein, 228 aa, Escherichia coli; identical to SEQ ID NO: 3034

SEQ ID NO: 8406 - protein, 224 aa, Escherichia coli; identical to SEQ ID NO: 3115

SEQ ID NO: 8407 - protein, 161 aa, Escherichia coli; identical to SEQ ID NO: 2582

SEQ ID NO: 8408 - protein, 266 aa, Escherichia coli; identical to SEQ ID NO: 1894

SEQ ID NO: 8409 - protein, 231 aa, Escherichia coli; identical to SEQ ID NO: 3055

SEQ ID NO: 8410 - protein, 784 aa, Escherichia coli; identical to SEQ ID NO: 2244

SEQ ID NO: 8411 - protein, 161 aa, Escherichia coli; identical to SEQ ID NO: 2582

SEQ ID NO: 8412 - protein, 213 aa, Escherichia coli; identical to SEQ ID NO: 2232

SEQ ID NO: 8413 - protein, 386 aa, Escherichia coli; identical to SEQ ID NO: 3094

SEQ ID NO: 8414 - protein, 837 aa, Escherichia coli
MDQMYKKLKLTTISELIKNIYCSLSVIIIGCASAYAVEFNKDLIEAEDRENVNLSQFETDGQLPVGKYSLSTLINNKRTPIHLDLQWVLIDNQTAVCVTPEQLTLLGFTDEFIEKTQQNLIDGCYPIEKEKQITTYLDKGKMQLSISAPQAWLKYKDANWTPPELWNHGIAGAFLDYNLYASHYAPHQGDNSQNISSYGQAGVNLGAWRLRTDYQYDQSFNNGKSQATNLDFPRIYLFRPIPAMNAKLTIGQYDTESSIFDSFHFSGISLKSDENMLPPDLRGYAPQITGVAQTNAKVTVSQNNRIIYQENVPPGPFAITNLFNTLQGQLDVKVEEEDGRVTQWQVASNSIPYLTRKGQIRYTTAMGKPTSVGGDSLQQPFFWTGEFSWGWLNNVSLYGGSVLTNRDYQSLAAGVGFNLNSLGSLSFDVTRSDAQLHNQDKETGYSYRANYSKRFESTGSQLTFAGYRFSDKNFVTMNEYINDTNHYTNYQNEKESYIVTFNQYLESLRLNTYVSLARNTYWDASSNVNYSLSLSRDFDIGPLKNVSTSLTFSRINWEEDNQDQLYLNISIPWGTSRTLSYGMQRNQDNEISHTASWYDSSDRNNSWSVSASGDNDEFKDMKASLRASYQHNTENGRLYLSGTSQRDSYYSLNASWNGSFTATRHGAAFHDYSGSADSRFMIDADGTEDIPLNNKRAVTNRYGIGVIPSVSSYITTSLSVDTRNLPENVDIENSVITTTLTEGAIGYAKLDTRKGYQIIGVIRLADGSHPPLGISVKDETSHKELGLVADGGFVYLNGIQDDNKLALRWGDKSCFIQPPNSSNLTTGTAILPCISQN

SEQ ID NO: 8415 - protein, 751 aa, Escherichia coli; identical to SEQ ID NO: 4697

SEQ ID NO: 8416 - protein, 237 aa, Escherichia coli; identical to SEQ ID NO: 3022

SEQ ID NO: 8417 - protein, 224 aa, Escherichia coli; identical to SEQ ID NO: 3165

SEQ ID NO: 8418 - protein, 551 aa, Escherichia coli
MDRRRFIKGSMAMAAVCGTSGIASLFSQAAFAADSDIADGQTQRFDFSILQSMAHDLAQTAWRGAPRPLPDTLATMTPQAYNSIQYDAEKSLWHNVENRQLDAQFFHMGMGFRRRVRMFSVDPATHLAREIHFRPELFKYNDAGVDTKQLEGQSDLGFAGFRVFKAPELARRDVVSFLGASYFRAVDDTYQYGLSARGLAIDTYTDSKEEFPDFTAFWFDTVKPGATTFTVYALLDSASITGAYKFTIHCEKSQVIMDVENHLYARKDIKQLGIAPMTSMFSCGTNERRMCDTIHPQIHDSDRLSMWRGNGEWICRPLNNPQTLQFNAYTDNNPKGFGLLQLDRDFSHYQDIMGWYNKRPSLWVEPRNKWGKGTIGLMEIPTTGETLDNIVCFWQPEKAVKAGDEFAFQYRLYWSAQPPVHCPLARVMATRTGMGGFPEGWAPGEHYPEKWARRFAVDFVGGDLKAAAPKGIEPVITLSSGEAKQIEILYIEPIDGYRIQFDWYPTSDSTDPVDMRMYLRCQGDAISETWLYQYFPPAPDKRQYVDDRVMS

SEQ ID NO: 8419 - protein, 869 aa, Escherichia coli
MKIPTTTDIPQRYTWCLAGICYSSLAILPSFLSYAESYFNPAFLLENGTSVADLSRFERGNHQPAGVYRVDLWRNDEFIGSQDIVFESTTENTGDKSGGLMPCFNQVLLERISLNSSAFPELAQQQNNKCINLLKAVPDATINFDFAAMRLNITIPQIALLSSAHGYIPPEEWDEGIPALLLNYNFTGNRGNGNDSYFFSELSGINIGPWRLRNNGSWNYFRGNGYHSEQWNNIGTWVQRAIIPLKSELVMGDGNTGSDIFDGVGFRGIRLYSSDNMYPDSQQGFAPTVRGIARTAAQLTIRQNGFIIYQSYVSPGAFEITDLHPTSSNGDLDVTIDERDGNQQNYTIPYSTVPILQREGRFKFDLTAGDFRSGNSQQSSPFFFQGTALGGLPQEFTAYGGTQLSANYTAFLLGLGRNLGNWGTVSLDVTHARSQLADDSRHEGDSIRFLYAKSMNTFGTNFQLMGYRYSTQGFYTLDDVAYRRMEGYEYDYDYDGEHRDEPIIVNYHNLRFSRKDRLQLNISQSLNDFGSLYISGTHQKYWNTSDSDTWYQVGYTSSWVGISYSLSFSWNESVGIPDNERIVGLNVSVPFNVLTKRRYTRENALDRAYASFNANRNSNGQNSWLAGVGGTLLEGHNLSYHVSQGDTSNNGYTGSATANWQAAYGTLGVGYNYDRDQHDVNWQLSGGVVGHENGITLSQPLGDTNVLIKAPGAGGVRIENQTGILTDWRGYAVMPYATVYRYNRIALDTNTMGNSIDVEKNISSVVPTQGALVRANFDTRIGVRALITVTQGRKPVPFGSLVRENSTGITSMVGDDGQVYLSGAPLSGELLVQWGDGANSRCIAHYVLPKQSLQQAVTVISAVCTHPGS

SEQ ID NO: 8420 - protein, 816 aa, Escherichia coli; identical to SEQ ID NO: 7726

SEQ ID NO: 8421 - protein, 412 aa, Escherichia coli; identical to SEQ ID NO: 4058

SEQ ID NO: 8422 - protein, 826 aa, Escherichia coli; identical to SEQ ID NO: 3336

SEQ ID NO: 8423 - protein, 161 aa, Escherichia coli; identical to SEQ ID NO: 2582

SEQ ID NO: 8424 - protein, 232 aa, Escherichia coli; identical to SEQ ID NO: 2087

SEQ ID NO: 8425 - protein, 760 aa, Escherichia coli; identical to SEQ ID NO: 3026

SEQ ID NO: 8426 - protein, 363 aa, Escherichia coli; identical to SEQ ID NO: 3347

SEQ ID NO: 8427 - protein, 237 aa, Escherichia coli; identical to SEQ ID NO: 1814

SEQ ID NO: 8428 - protein, 274 aa, Escherichia coli; identical to SEQ ID NO: 3721

SEQ ID NO: 8429 - protein, 614 aa, Escherichia coli; identical to SEQ ID NO: 3301

SEQ ID NO: 8430 - protein, 840 aa, Escherichia coli; identical to SEQ ID NO: 6560

SEQ ID NO: 8431 - protein, 565 aa, Escherichia coli; identical to SEQ ID NO: 2678

SEQ ID NO: 8432 - protein, 512 aa, Escherichia coli; identical to SEQ ID NO: 2974

SEQ ID NO: 8433 - protein, 838 aa, Escherichia coli; identical to SEQ ID NO: 7717

SEQ ID NO: 8434 - protein, 478 aa, Escherichia coli; identical to SEQ ID NO: 2404

SEQ ID NO: 8435 - protein, 880 aa, Escherichia coli; identical to SEQ ID NO: 3456

SEQ ID NO: 8436 - protein, 203 aa, Escherichia coli; identical to SEQ ID NO: 2201

SEQ ID NO: 8437 - protein, 230 aa, Escherichia coli; identical to SEQ ID NO: 3723

SEQ ID NO: 8438 - protein, 360 aa, Escherichia coli; identical to SEQ ID NO: 3694

SEQ ID NO: 8439 - protein, 760 aa, Escherichia coli
MENNRNFPASEFHSLTFFAGLCIGITPVAQALAAEGQTNADDTLVVEASTPSLYAPQQSADPKFSRPVADTTRTMTVISEQVIKDQGATNLTDALKNVPGVGAFFAGENGNSTTGDAIYMRGADTSNSIYIDGIRDIGSVSRDTFNTEQVEVIKGPSGTDYGRSAPTGSINMISKRPRNDSGIDASASIGSAWFRRGTLDVNQVIGDTTAVRLNVMGEKTHDAGRDKVKNERYGVAPSIAFGLGTANRLYLNYLHVTQHNTPDGGIPTIGLPGYSAPSAGTAALNHSGKVDTHNFYGTDSDYDDSTTDTATMRFEHDINDNTTIRNTTRWSRVKQDYLMTAIMGGASNITQPTSDVNSWTWSRTANTKDVSNKILTNQTNLTSTFYTGSIGHDVSTGVEFTRETQTNYGVNPVTLPAVNIYHPDSSIHPGGLTRNGANANGQTDTFAIYAFDTLQITRDFELNGGIRLDNYHTEYDSATACGGSGRGAITCPTGVAKGSPVTTVDTAKSGNLVNWKAGALYHLTENGNVYINYAVSQQPPGGNNFALAQSGSGNSANRTDFKPQKANTSEIGTKWQVLDKRLLLTAALFRTDIENEVEQNDDGTYSQYGKKRVEGYEISVAGNITPAWQVIGGYTQQKATIKNGKDVAQDGSSSLPYTPEHAFTLWSQYQATDDISVGAGARYIGSMHKGSDGAVGTPAFTEGYWVADAKLGYRVNRNLDFQLNVYNLFDTDYVASINKSGYRYHPGEPRTFLLTANMHF

SEQ ID NO: 8440 - protein, 368 aa, Escherichia coli; identical to SEQ ID NO: 2371

SEQ ID NO: 8441 - protein, 518 aa, Escherichia coli; identical to SEQ ID NO: 2349

SEQ ID NO: 8442 - protein, 883 aa, Escherichia coli
MTAFRAAFKAYRMHHVLLLPRFARLTFALGLATAVFPVEAEYYFNPRFLSNDLAESVDLSAFAKGREAPPGTYRVDIYLNDEFMTTRDVTFVADENNADLTPCLSTDLLVSLGIKKSALLANKDHLAGKNVPDNNACTPLQDRLADASTEFDVGQQHLSLSVPQIYVGRMARGYVSPDLWEEGINAGLLNYSFNGNSINNRSNHNASKTNYAYLNLQSGINIGSWRLRDNSTWSYNSGSNNPSDSNKWQHINTSAERDIIPLRSRLTVGDSYTDGDIFESVNFRGLKINSTEAMLPDSQHGFAPVIHGIARGTAQVSVKQNGYDVYQTTVPPGPFTIDDINSATNGGDLQVTIKEADGSIQTLYVPYSSVPVLQRVGYTRYALALGEYRSGNNLQSSPKFIQGSVMHGLEGNWTPYGGMQIAEDYQAFNVGIGKDLGLLGAFSVDITQANTTLADDTRHSGQSVKSVYSKSFYQTGTNIQIAGYRYSTQGFYNLSDSAYSRMSGYTVKPPTGDTNEQIQFIDYFNLYYSKRGQEQISISQQLGNYGTTFFSASRQSYWNTSRSDQQISFGLNVPFGDITTSLNYSYSSNIWQNDRDHLLAFTLNVPFSHWMRTDSQSAFRNSNASYSMSNDLKGSMTNLSGVYGTLLPDNNLNYSVQVGNTRGGNASSGTSGYSSLNYRGAYGNTNVGYSRNGDSNQIYYGMSGGIIAHADGVTFGQPMGDTMVLVKAPGAENVKIENQTGIHTDWRGYAILPFATEYRENRVALNANSLADNVELDETVVTVIPTHGAIARATFNAQIGGKVLMTLKYGNKPVPFGAIVTHGDNNNGSIVAENGQVYLTGLPQSGKLQVSWGNNANAKCIVNYKLPEVSPGNLLSQQTAVCR

SEQ ID NO: 8443 - protein, 237 aa, Escherichia coli
MRKITQAISAVCLLFALNSSAVALASSPSPLNPGTNVARLAEQAPIHWVSVVQIENSLAGRPPMAVGFDIDDTVLFSSPGFWRGKKTFSPESEDYLKNPVFWEKMNNGWDEFSIPKEVARQLIDMHVRRGDAIFFVTGRSPTKTETVSKTLADNFHIPATNMNPVIFAGDKPGQNTKSQWLQDKNIRIFYGDSDNDITAAREVGARGIRILRASNSTYKPLPQAGAFGEEVIVNSEY

SEQ ID NO: 8444 - protein, 869 aa, Escherichia coli; identical to SEQ ID NO: 3352

SEQ ID NO: 8445 - protein, 868 aa, Escherichia coli; identical to SEQ ID NO: 3390

SEQ ID NO: 8446 - protein, 208 aa, Escherichia coli; identical to SEQ ID NO: 1949

SEQ ID NO: 8447 - protein, 331 aa, Escherichia coli; identical to SEQ ID NO: 2700

SEQ ID NO: 8448 - protein, 373 aa, Escherichia coli
MPDHSLFRLRILPWCIALAMSGSYSSVWAEDDIQFDSRFLELKGDTKIDLKRFSSQGYVEPGKYNLQVQLNKQPLAEEYDIYWYAGEDDASKSYACLTPELVAQFGLKEDVAKNLQWSHDAKCLKSGQLEGMEIKADLSQSALVISLPQAYLEYTYPDWDPPSRWDDGISGIVADYSINAQTRHEENGGDDSNEISGNGTVGVNLGPWRMRADWQTNYQHTRSNDDDDEFSGDETQKKWEWSRYYAWRALPSLKAKLALGEDYLRSDIFDGFNYVGGSVSTDDQMLPPNLRGYAPDISGVAHTTAKVTVSQMGRVIYETQVPAGPFRIQDLGDSVSGTLHIRIEEQNGQVQEYDISTASMPYLTRPVRFAIRS

SEQ ID NO: 8449 - protein, 203 aa, Escherichia coli; identical to SEQ ID NO: 2201

SEQ ID NO: 8450 - protein, 673 aa, Escherichia coli; identical to SEQ ID NO: 7780

SEQ ID NO: 8451 - protein, 851 aa, Escherichia coli
MPSFIGGLVVFVSAVFTAQAETWFDPAFFKDDPSMVADLSRFEKGQKITPGVYRVDIVLNQTIVDTRNVNFVEITPEKGIAACLTTENLDAMGMNTDAFPAFKQLDKQACAPLAEIIPDASVTFNVNKLRLEISVPQIAIKSNARGYVPPERWDEGINALLLGYSFSGANSIHSSTDSDSTDSYFLNLNSGVNLGPWRLRNYSTWSRSSGQTAEWKNLSSYLQRAVIPLKGELTVGDDYTAGDFFDSVSFRGVQLASDDNMLPDSLKGFAPLVRGIAKSNAQITIKQNGYTIYQTYVSPGAFEISDLYSTSSSGDLLVEIKESDGSVNSYSVPFSSVPLLQRQGRIKYAVTLAKYRTNSNDQQESKFAQATLQWGGPWGTTWYGGGQYAEYYRAAMFGLGFNLGDFGAISFDATQAKSTLADQSEHKGQSYRFLYAKTLNHLGTNFQLMGYRYSTSGFYTLSDTMYKHMDGYEFNDGDDEDMPLWSRYYNLFYTKRGKLQVNISQQLGEYGSFYLSGSQQTYWHTDQQDRLLQFGFNTQIKDLSLGVSWNYSKSRGQPDADQVFALNFSLPLNLLLPRSNDSYTRKKNYAWMTSNTSIDNEGHTTQNLGLTETLLDDGNLSYSVQQGYNSEGKTANGSASMDYKGAFADARVGYNYSDNGSQQQLNYALSGSLVAHSQGITLGQSLGETNVLIAAPGAENTRVANSTGLKTDWRGYTVVPYATSYRENRIVLDAASLKRNVDLENAVVNVVPTKGALVLAEFNAHAGARVLMKTLKQGIPLPFGAIATLDGIQTNSGIIDDDGSLYMSGLPAQGAITVRWGEAPDQICHISYELTEQQINAAITRMNAICR

SEQ ID NO: 8452 - protein, 266 aa, Escherichia coli; identical to SEQ ID NO: 1894

SEQ ID NO: 8453 - protein, 191 aa, Escherichia coli; identical to SEQ ID NO: 2727

SEQ ID NO: 8454 - protein, 243 aa, Escherichia coli
MSRKSCLIRLFKTIVSCKLFTAIILSVFLGQPALTYAGVVIGGTRVVYLSNNADKSISVFSKEEKIPYLIQAWVDPFNKEDKSKAPFTVIPPVSRLEPSQEKILRIIHTKGVSLPDDRESVFWLNIKNIPPSASNKATNSLEIAVKTRIKLFWRPANIRLIPEDAAPKVKWRREGRNLIAENPNPIHISVMDVIVDGHDVPLNMIRPFETLTLPLPANSAGGQMTWRFINDYGAVSDPIKMTL

SEQ ID NO: 8455 - protein, 229 aa, Escherichia coli; identical to SEQ ID NO: 3277

SEQ ID NO: 8456 - protein, 432 aa, Escherichia coli; identical to SEQ ID NO: 2026

SEQ ID NO: 8457 - protein, 746 aa, Escherichia coli; identical to SEQ ID NO: 3031

SEQ ID NO: 8458 - protein, 446 aa, Escherichia coli; identical to SEQ ID NO: 2176

SEQ ID NO: 8459 - protein, 193 aa, Escherichia coli; identical to SEQ ID NO: 2246

SEQ ID NO: 8460 - protein, 800 aa, Escherichia coli
MFFRRAALALAVSAAFASVTGIAGEKLDMSFIQGGAGVNPEIWAALSGSYAPGRYLVDLSLNGKEVGKQILDVTPQDSNELCLTEAWLTKAGIYVSADYFREGYDATRQCYVLTKALSVKVDFDVSTQSLALSIPQKGLMKMPENVEWDYGTSAFRVNYNANANTGRNNTSAFGSADLKANIGRWVVSSSATASGGDSGDNSTTINMFTATRAIRALSADLAVGKTSTGDSLLGSTGTYGVSLSRNNSMKPGNLGYTPVFSGIANGPSRVTLTQNGRLLHSEMVPAGPFSITDVPLYTSGDVTMKITGEDGREQVQNFPLSVMAGQLSPGQHEFSVAAGLPDDDSDLKGGVFAASYGYGLDGLTLRTGGVFNQDWQGVSAGAVLGLSYLGAVSADGAYATVKYRDGSRSGNKVQLSWSKQLDMTNTGLRVSWSQQSEEYEDMSSFDPTDLWSQSNHGRRTKDEWNAGVSQPVGGLFSLSVSGWQRSYYPASTTGSYRYSDDNGKDTGITGTLSTQIKGVSLNLGWSGSRNTRGENNWSASASVSVPFTLFDRRYSSSTSVSTSKDGGTGFSTGVSGSLNDRFSYGLGGGRDSGGGVSSYLNASYSGDRAYLNGALNHSQSVGTSGSVSVSGSVLAIPAAKDIMFSRTTGDTVAVVSVKDTPGVKVTSGDGQTDSDGNLVVPLNSYDWNTVTIDAGTLPLSTELMNTSQKVVPTDKAVVWMPFDALKIKRYLLQVKLRDGEFVPGGTWARDSKNTPLGFVSSNGVLMINTVDAPGDITLGQCRIPAARLQDTEKLQEITCE

SEQ ID NO: 8461 - protein, 361 aa, Escherichia coli; identical to SEQ ID NO: 3061

SEQ ID NO: 8462 - protein, 747 aa, Escherichia coli; identical to SEQ ID NO: 3670

SEQ ID NO: 8463 - protein, 678 aa, Escherichia coli; identical to SEQ ID NO: 3014

SEQ ID NO: 8464 - protein, 213 aa, Escherichia coli; identical to SEQ ID NO: 2232

SEQ ID NO: 8465 - protein, 118 aa, Escherichia coli [sequence omitted]

SEQ ID NO: 8466 - protein, 784 aa, Escherichia coli; identical to SEQ ID NO: 2244

SEQ ID NO: 8467 - protein, 686 aa, Escherichia coli; identical to SEQ ID NO: 3129

SEQ ID NO: 8468 - protein, 241 aa, Escherichia coli
MSNKNVNVRKSQEITFCLLAGILMFMAMMVAGRAEAGVPLGATRVIYPAGQKQVQLAVTNNDENSTYLIQSWVENADGVKDGRFIVTPPLFAMKGKKENTLRILDATNNQLPQDRESLFWMNVKAIPSMDKSKLTENTLQLAIISRIKLYYRPAKLALPPDQAAEKLRFRRSANSLTLINPTPYYLTVTELNAGARVLENALVPPMGESTVKLPSDAGSNITYRTINDYGALTPKMTGVME

SEQ ID NO: 8469 - protein, 331 aa, Escherichia coli; identical to SEQ ID NO: 2700

SEQ ID NO: 8470 - protein, 866 aa, Escherichia coli; identical to SEQ ID NO: 3025

SEQ ID NO: 8471 - protein, 119 aa, Escherichia coli; identical to SEQ ID NO: 2841

SEQ ID NO: 8472 - protein, 228 aa, Escherichia coli; identical to SEQ ID NO: 3034

SEQ ID NO: 8473 - protein, 838 aa, Escherichia coli; identical to SEQ ID NO: 3041

SEQ ID NO: 8474 - protein, 816 aa, Escherichia coli; identical to SEQ ID NO: 4689

SEQ ID NO: 8475 - protein, 221 aa, Escherichia coli; identical to SEQ ID NO: 3743

SEQ ID NO: 8476 - protein, 446 aa, Escherichia coli; identical to SEQ ID NO: 2176

SEQ ID NO: 8477 - protein, 250 aa, Escherichia coli; identical to SEQ ID NO: 3427

SEQ ID NO: 8478 - protein, 363 aa, Escherichia coli; identical to SEQ ID NO: 3347

SEQ ID NO: 8479 - protein, 729 aa, Escherichia coli; identical to SEQ ID NO: 3778

SEQ ID NO: 8480 - protein, 111 aa, Escherichia coli; identical to SEQ ID NO: 3096

SEQ ID NO: 8481 - protein, 266 aa, Escherichia coli
MAKSLFRALVALSFLAPLWLNAAPRVITLSPANTELAFAAGITPVGVSSYSDYPPQAQKIEQVSTWQGMNLERIVALKPDLVIAWRGGNAERQVDQLASLGIKVMWVDATSIEQIANALRQLAPWSPQPDKAEQAAQSLLDQYAQLKAQYADKSKKRVFLQFGINPPFTSGKESIQNQVLEVCGGENIFKDSRVPWPQVSREQVLARSPQAIVITGGPDQIPKIKQYWGEQLKIPVIPLTSDWFERASPRIILAAQQLCNALSQVD

SEQ ID NO: 8482 - protein, 170 aa, Escherichia coli [sequence omitted]

SEQ ID NO: 8483 - protein, 216 aa, Escherichia coli
MAMMVAGRAEAGVPLGATRVIYPAGQKQVQLAVTNNDENSTYLIQSWVENADGVKDGRFIVTPPLFAMKGKKENTLRILDATNNQLPQDRESLFWMNVKAIPSMDKSKLTENTLQLAIISRIKLYYRPAKLALPPDQAAEKLRFRRSANSLTLINPTPYYLTVTELNAGARVLENALVPPMGESTVKLPSDAGSNITYRTINDYGALTPKMTGVME

SEQ ID NO: 8484 - protein, 826 aa, Escherichia coli; identical to SEQ ID NO: 2758

SEQ ID NO: 8485 - protein, 878 aa, Escherichia coli; identical to SEQ ID NO: 3345

SEQ ID NO: 8486 - protein, 207 aa, Escherichia coli; identical to SEQ ID NO: 2211

SEQ ID NO: 8487 - protein, 200 aa, Escherichia coli; identical to SEQ ID NO: 1784

SEQ ID NO: 8488 - protein, 591 aa, Escherichia coli
MPSFIGGLVVFVSAAFNAQAETWFDPAFFKDDPSMVADLSRFEKGQKITPGVYRVDIVLNQTIVDTRNVNFVEITPEKGIAACLTTESLDAMGVNTDAFPAFKQLDKQACVPLAEIIPDASVTFNVNKLRLEISVPQIAIKSNARGYVPPERWDEGINALLLGYSFSGANSIHSSADSDSGDSYFLNLNSGVNLGPWRLRNNSTWSRSSGQTAEWKNLSSYLQRAVIPLKGELTVGDDYTAGDFFDSVSFRGVQLASDDNMLPDCLKGFAPVVRGIAKSNAQITIKQNGYTIYQTYVSPGAFEISDLYSTSSSGDLLVEIKEADGSVNSYSVPFSSVPLLQRQGRIKYAVTLAKYRTNSNEQQESKFAQATLQWGGPWGTTWYGGGQYAEYYRAAMFGLGFNLGDFGAISFDATQAKSTLADQSEHKGQSYRFLYAKTLNQLGTNFQLMGYRYSTSGFYTLSDTMYKHMDGYEFNDGDDEDTPMWSRYYNLFYTKRGKLQVNISQQLGEYGSFYLSGSQQTYWHTDQQDRLLQFGYNTQIKDLSLGGSWNYSKSRGQPDADQVFALNFSLPLNLLLPRSNDSYTRKKITPG

SEQ ID NO: 8489 - protein, 866 aa, Escherichia coli
MSRKIIKTHNNKLTYIASFCALLLSPCAISAEHVEYDNTFLMGQDASNIDLSRYTEGNPTLPGVYDVSVYVNDQPVISQNISFITLEGKKNAQACITLKNLLQFHINQPDIKDENAILLQREEELGDCLDLGNVIPQASVHYDVNDQRLDINVPQAWVMKNYQNYVDPSLWENGINAAMLSYNVNAYHSEIPDRKNDSVYAAFNGGINLGAWRLRATGNYNWMTDAGTNYDFQNRYLQRDLASLRSQLVVGESYTTGETFDSVSIRGVRLYSDSRMLPPTLASFAPIIHGVANTNAKVTITQGGYKIYETTVPPGAFVIDDVSPSGYGSDLIVTIEESDGTKRTFSQPFSSVVQMLRPGVGRWDISAGKILKDDIQNEPNLFQASYYYGLNNLLTGYTGIQITDNNYTAGLLGLGLNTTYGAFSVDVTHSDVQIPDDKTYRGQSYRLSWNKLFEDTRTSLNIAAYRYSTQNYLGLNDALTLIDEVKHPEQDLEPKNMRNYSRMKNQVTVSINQPLKYGKEDYGSFYLSGSWSDYWASGQNNTNYSLGYSNSASWGSYSISAQRSRDQDGDNEDSIYLSFSIPIEKLLGTEHRNSGFQTIDTQLSSDFDGSNQLSISSSGFSDDNRISYSVNTGYSMMKSSDDLSYIGGYASYESPWGTLASSVSASSDNSRQISFNTDGGFVLHSGGLTFSNDSFSDSDTLAVIQAPGAKGARINYGNSTVDRWGYGVTNALSPYHENRIALDINGLENDVELKSTSAVAVPRQGSVVFAGFETVQGQSAIMNIKRTDGKNIPFAADIYDENGNIIGNVGQGGQAFVRGIEQQGNIRINWLDEGKPVTCLAHYQQSAAPEKIAQSIILNGISCQIK

SEQ ID NO: 8490 - protein, 332 aa, Escherichia coli; identical to SEQ ID NO: 2703

SEQ ID NO: 8491 - protein, 760 aa, Escherichia coli; identical to SEQ ID NO: 3443

SEQ ID NO: 8492 - protein, 362 aa, Escherichia coli; identical to SEQ ID NO: 2827

SEQ ID NO: 8493 - protein, 266 aa, Escherichia coli; identical to SEQ ID NO: 3338

SEQ ID NO: 8494 - protein, 244 aa, Escherichia coli; identical to SEQ ID NO: 3395

SEQ ID NO: 8495 - protein, 784 aa, Escherichia coli; identical to SEQ ID NO: 3401

SEQ ID NO: 8496 - protein, 517 aa, Escherichia coli; identical to SEQ ID NO: 2462

SEQ ID NO: 8497 - protein, 232 aa, Escherichia coli; identical to SEQ ID NO: 2087

SEQ ID NO: 8498 - protein, 729 aa, Escherichia coli; identical to SEQ ID NO: 3384

SEQ ID NO: 8499 - protein, 270 aa, Escherichia coli
MQMLPDSMQSFTPLVQGIAQSNALITVSQNGYIIYQKEVPPGPFTIADLQLSGSGSDLDVSIKEADGSVRSFLVPYSSVPNMLQPGVSNFDFIAGRSKIYGVKNQEDFLEANYIYGLNNLLTLYGGTILSDNYNAITLGNGWNTPLGAISFDATRSSSKLNNDITHEGTSYQVAYNKYLVQTATRFSVAAWRYASQDYRTFSDHLYENDKHNHHSEYDDFYDIGRKNSLSANIMQPLSTGIKIALNDEQNLFCTITFKNVIDENKTYICQ

SEQ ID NO: 8500 - protein, 208 aa, Escherichia coli
MKKIWLALAGLVLAFSASAAQYEDGKQYTTLEKPVAGAPQVLEFFSFFCPHCYQFEEVLHISDNVKKKLPEGVKMTKYHVNFMGGDVGKDLTQAWAVAMALGVEDKVTVPLFEGVQKTQTIRSASDIRDVFINAGIKGEEYDAAWNSFVVKSLVAQQEKAAADVQLRGVPAMFVNGKYQLNPQGMDTSNMDVFVQQYANTVKYLSEKK

SEQ ID NO: 8501 - protein, 259 aa, Escherichia coli
MIKHVLLFFVFISFSVSANDFFRADSRTPDEIRRAGGLLPRGQQEAYERGTPININLYEHARGTVTGNTRYNDGYVSTTTTLRQAHLIGQNILGSYNEYYIYVVAPAPNLFDVNGVLGRYSPYPSENEFAALGGIPLSQIIGWYRVSFGAIEGGMQRNRDYRGDLFRGLTVAPNEDGYQLAGFPSNFPAWREMPWSTFAPEQCVPNNKEFKGGVCISATNVLSKYDLMNFKKLLKRRLALTFFMSEDDFIGVHGERDEL

SEQ ID NO: 8502 - protein, 123 aa, Escherichia coli; identical to SEQ ID NO: 1958

SEQ ID NO: 8503 - protein, 367 aa, Escherichia coli; identical to SEQ ID NO: 2433

SEQ ID NO: 8504 - protein, 567 aa, Escherichia coli
MKIKLRITIILISVLCIFNGLLTPGAYAAAANGYVANKENLRSFFETVSSYAGKPTIVSKLAMKKQISGNFDLTEPYALIERLSAQMGLIWYDDGKAIYIYDSSEMRNALINLRKVSTNEFNNFLKKSGLYNSRYEIKGGGNGTFYVSGPPVYVDLVVNAAKLMEQNSDGIEIGRNKVGIIHLVNTFVNDRTYELRGEKIVIPGMAKVLSTLLNNNIKQSTGVNVLSEISSRQQLKNVSRMPPFPGAEEDDDLQVEKIISTAGAPETDDIQIIAYPDTNSLLVKGTVSQVDFIEKLVATLDIPKRHIELSLWIIDIDKTDLEQLGADWSGTIKIGSSLSASFNNSGSISTLDGTQFIATIQALAQKRRAAVVARPVVLTQENIPAIFDNNRTFYTKLVGERTAELDEVTYGTMISVLPRFASRNQIELLLNIEDGNEINSDKTNVDDLPQVGRTLISTIARVPQGKSLLIGGYTRDTNTYESRKIPILGSIPFIGKLFGYEGTNANNIVRVFLIEPREIDERMMNNANEAAVDARAITQQMAKNKEINDELLQKWIKTYLNREVVGG

SEQ ID NO: 8505 - protein, 530 aa, Escherichia coli
MGDGNTGSDIFDGVGFRGVRLYSSDNMYPDSQQGFAPTVRGIARTAAQLTIRQNGFIIYQSYVSPGAFEITDLHPTSSNGDLDVTIDERDGNQQNYTIPYSTVPILQREGRFKFDLTAGDFRSGNSQQSSPFFFQGTALGGLPQEFTAYGGTQLSANYTAFLLGLGRNLGNWGAVSLDVTHARSQLADDSRHEGDSIRFLYAKSMNTFGTNFQLMGYRYSTQGFYTLDDVAYRRMEGYEYDYDYDGEHRDEPIIVNYHNLRFSRKDRLQLNISQSLNDFGSLYISGTHQKYWNTSDSDTWYQVGYTSSWVGISYSLSFSWNESVGIPDNERIVGLNVSVPFNVLTKRRYTRENALDRAYASFNANRNSNGQNSWLAGVGGTLLEGHNLSYHVSQGDTSNNGYTGSATANWQAAYGTLGVGYNYDRDQHDVNWQLSGGVVGHENGITLSQPLGDTNVLIKAPGAGGVRIENQTGILTDWRGYAVMPYATVYRYNRIALDTNTMGNSIDVEKILAALCRRKARWFVPILIPA

SEQ ID NO: 8506 - protein, 746 aa, Escherichia coli
MNKKIHSLALLVNLGIYGVAQAQEPTDTPVSHDDTIVVTAAEQNLQAPGVSTITADEIRKNPVARDVSEIIRTMPGVNLTGNSTSGQRGNNRQIDIRGMGPENTLILIDGKPVSSRNSVRQGWRGERDTRGDTSWVPPEMIERIEVLRGPAAARYGNGAAGGVVNIITKKGSGEWHGSWDAYFNAPEHKEEGATKRTNFSLTGPLGDEFSFRLYGNLDKTQADAWDINQGHQSARAGTYATTLPAGREGVINKDINGVVRWDFAPLQSLELEAGYSRQGNLYAGDTQNTNSDSYTRSKYGDETNRLYRQNYALTWNGGWDNGVTTSNWVQYEHTRNSRIPEGLAGGTEGKFNEKATQDFVDIDLDDVMLHSEVNLPIDFLVNQTLTLGTEWNQQRMKDLSSNTQALTGTNTGGAIDGVSTTDRSPYSKAEIFSLFAENNMELTDSTIVTPGLRFDHHSIVGNNWSPALNISQGLGDDFTLKMGIARAYKAPSLYQTNPNYILYSKGQGCYASAGGCYLQGNDDLKAETSINKEIGLEFKRDGWLAGVTWFRNDYRNKIEAGYVAVGQNAVGTDLYQWDNVPKAVVEGLEGSLNVPVSETVMWTNNITYMLKSENKTTGDRLSIIPEYTLNSTLSWQAREDLSMQTTFTWYGKQQPKKYNYKGQPAVGPETKEISPYSIVGLSATWNVTKNVSLTGGVDNLFDKRLWRAGNAQTTGDLAGANYIAGAGAYTYNEPGRTWYMSVNTHF

SEQ ID NO: 8507 - protein, 193 aa, Escherichia coli; identical to SEQ ID NO: 2246

SEQ ID NO: 8508 - protein, 208 aa, Escherichia coli; identical to SEQ ID NO: 1949

SEQ ID NO: 8509 - protein, 815 aa, Escherichia coli
MNIYRLSFVSCLVMAMPCALAVEFNLNVLDKSMRDRIDISLLKEKGVIAPGEYFVSVAVNNNQISNGQKINWQKKGDKTIPCINDSLVDKFGLKPDIRQSLPQIDRCIDFSSRPEMLFNFDQANQQLNISIPQAWLAWHSENWAPPSTWKEGVAGVLMDYNLFASNYRPQDGSSSTNLNAYGTTGINAGSWRLRSDYQLNNTDSEDSHEQSGGISRTYLFRPLPQLGSKLTLGETDFSSNIFDGFSYTGAALASDDRMLPWELRGYAPQISGIAQTNATVTISQSGRVIYQKKVPPGPFIIDDLNQSVQGTLDVKVTEEDGRVNNFQVSAASTPFLTRQGQVRYKLAAGQPRPSMSHQTENETFFSNEVSWGMLSNTSLYGGMLLSGDDYHSAAMGIGQNMLWLGALSFDVTWASSHFDTQQDERGLSYRFNYSKQVDATNSTISLAAYRFSDRHFHSYANYLDHKYNDSDAQDEKQTISLSVGQPITPLNLNLYANLLHQTRWNADASTTANITAGFNVDIGDWRDISISTSFNTTHYEDKDRDNQIYLSISLPFGNGGRVGYDMQNSSHSTIHRMSWNDTLDERNSWGMSAGLQSDRPDNGAQVSGNYQHLSSAGEWDISGTYAANDYSSVSSSWSGSFTATQYGAAFHRRSSTNEPRLMVSTDGVADIPVQGNLDYTNHFGIAVVPLISSYQPSTVAVNMNDLPDGVTVAENVIKETWIEGAIGYKSLASRSGKDVNVIIRNASGQYPPLGADIRQDDSGISVGMVGEEGHAWLSGVAENQLFTVVWGEQSCIIHLPERLEDTTKRLILPCH

SEQ ID NO: 8510 - protein, 840 aa, Escherichia coli; identical to SEQ ID NO: 3335

SEQ ID NO: 8511 - protein, 366 aa, Escherichia coli; identical to SEQ ID NO: 3360

SEQ ID NO: 8512 - protein, 539 aa, Escherichia coli; identical to SEQ ID NO: 3050

SEQ ID NO: 8513 - protein, 359 aa, Escherichia coli; identical to SEQ ID NO: 2328

SEQ ID NO: 8514 - protein, 360 aa, Escherichia coli; identical to SEQ ID NO: 3032

SEQ ID NO: 8515 - protein, 232 aa, Escherichia coli; identical to SEQ ID NO: 2087

SEQ ID NO: 8516 - protein, 729 aa, Escherichia coli; identical to SEQ ID NO: 3052

SEQ ID NO: 8517 - protein, 837 aa, Escherichia coli; identical to SEQ ID NO: 4687

SEQ ID NO: 8518 - protein, 249 aa, Escherichia coli; identical to SEQ ID NO: 3028

SEQ ID NO: 8519 - protein, 678 aa, Escherichia coli
MVPSTFSRLKAARCLPVVLAALIFAGCGTHTPDQSTAYMQGTAQADSAFYLQQMQQSSDDTRINWQLLAIRALVKEGKTGQAVELFNQLPQELNDAQRREKTLLAVEIKLAQKDFAGAQNLLAKITPADLEQNQQARYWQAKIDASQGRPSIDLLRALIAQEPLLGAKEKQQNIDATWQALSSMTQEQANTLVINADENILQGWLDLQRVWFDNRNDPDMMKAGIADWQKRYPNNPGAKMLPTQLVNVKAFKPASTNKIALLLPLNGQAAVFGRTIQQGFEAAKNIGTQPVAAQVAAAPAADVAEQPQPQTVDGVASPAQASVSDLTGEQPAAQPVPVSAPATSTAAVSAPANPSAELKIYDTSSQPLSQILSQVQQDGASIVIGPLLKNNVEELLKSNTPLNVLALNQPENIENRVNICYFALSPEDEARDAARHIRDQGKQAPLVLIPRSSLGDRVANAFAQEWQKLGGGTVLQQKFGSTSELRAGVNGGSGIALTGSPITLRATTDSGMTTNNPTLQTTPTDDQFTNNGGRVDAVYIVATPGEIAFIKPMIAMRNGSQSGATLYASSRSAQGTAGPDFRLEMEGLQYSEIPMLAGGNLPLMQQALSAVNNDYSLARMYAMGVDAWSLANHFSQMRQVQGFEINGNTGSLTANPDCVINRNLSWLQYQQGQVVPVS

SEQ ID NO: 8520 - protein, 806 aa, Escherichia coli
MLCTTANAEEYYFDPIMLETTKSGMQTTDLSRFSKKYAQLSGTYQVDIWLNKKKVSQKKITFTANAEQLLQPQFTVEQLRELGIKVDEIPALAEKDDDSVINSLEQIIPGTAAEFDFNHQQLNLSIPQIALYRDARGYVSPSRWDDGIPTLFTNYSFTGSDNRYRQGNRSQRQYLNMQNGANFGPWRLRNYSTWTRNDQTSSWNTISSYLQRDIKALKSQLLLGESATSGSIFSSYTFTGVQLASDDNMLPNSQRGFAPTVRGIANSSAIVTIRQNGYVIYQSNVSAGAFEINDLYPSSNSGDLEVTIEESDGTQRRFIQPYSSLPMMQRPGHLKYSATAGRYRADANSDSKEPEFAEATAIYGLNNTFTLYGGLLGSEDYYALGIGIGGTLGALGALSMDINRADTQFDNQHSFHGYQWRTQYIKDIPETNTNIAVSYYRYTNDGYFSFNEANTRNWDYNSRQKSEIQFNISQTIFDGVSLYASGSQQDYWGNNDKNRNISVGVSGQQWGVGYSLNYQYSRYTDQNNDRALSLNLSIPLERWLPRSRVSYQMTSQKDRPTQHEMRLDGSLLDDGRLSYSLEQSLDNDNNHNSSLNASYRSPYGTFSAGYSYGNDSSQYNYGVTGGVVIHPHGVTLSQYLGNAFALIDANGASGVRIQNYPGIATDPFGYAVVPYLTTYQENRLSVDTTQLPDNVDLEQTTQFVVPNRGAMVAARFNANIGYRVLVTVSDRNGKPLPFGALASNDDTGQQSIVDEGGILYLSGISSKSQSWTVRWGNQADQQCQFAFSTPDSEPTTSVLQGTAQCH

SEQ ID NO: 8521 - protein, 412 aa, Escherichia coli
MKQWIAALLLMLIPGVQAAKPQKVTLMVDDVPVAQVLQALAEQEKLNLVVSPDVSGTVSLHLTDVPWKQALQTVVKSAGLITRQEGNILSVHSVAWQNDNIARQEAEQARAQANLPLENRSITLQYADAGELAKAGEKLLSAKGSMTVDKRTNRLLLRDNKAALSALEQWVAQMDLPVGQVELSAHIVTINEKSLRELGVKWTLADAQQAGGVGQVTTLGSDLSVATATTHVGFNIGRINGRLLDLELSALEQKQQLDIIASPRLLASHLQPASIKQGSEIPYQVSSGESGATSVEFKEAVLGMEVTPTVLQKGRIRLKLHISQNVPGQVLQQADGEVLAIDKQEIETQVEVKSGETLALGGIFTRKNKSGQDSVPLLGDIPWFGQLFRHDGKEDERRELVVFITPRLVSSE

SEQ ID NO: 8522 - protein, 700 aa, Escherichia coli; identical to SEQ ID NO: 3425

SEQ ID NO: 8523 - protein, 360 aa, Escherichia coli; identical to SEQ ID NO: 3354

SEQ ID NO: 8524 - protein, 122 aa, Escherichia coli; identical to SEQ ID NO: 2915

SEQ ID NO: 8525 - protein, 253 aa, Escherichia coli
MSKRNAVMTFFTNRVTKVLGMTLALMMTCQSAMASLAADQTRYIFRGDKDSLTITVTNNDRERTFGGQAWVDNIVEKDTRPTFVVTPSFFKVKPNGQQTLRIIMASDHLPKDKESVYWLNLQDIPPALEGSGIAVALRTKLKLFYRPKALLEGRKGAEEGISLQSRPDGRIMLVNTTPYIFAIGSLLDGNGKKIATDNETAQKLLMFMPGDEVQVKGNVVKVDSLNDWGSLQTWTINQKKLAVPEVTKADTAE

SEQ ID NO: 8526 - protein, 72 aa, Escherichia coli
MKKLMLAIFISVLSFPSFSQKAESVDSSKEKITLDTKKCNVVKNNSEKKSENMNNTFYCCELCCNPACAGCY

SEQ ID NO: 8527 - protein, 397 aa, Escherichia coli
MKRKVLAMLVPALLVAGAANAAEVYNKDGNKLDFYGKVAGLHYFSDNSGADGDMSYARIGFKGETQIADQFTGYGQWEYNLQANGTEGDGDNSATRLAFAGLGFGQNGTFDYGRNYGVVYDIEAWTDMLPEFGGDTYAGADNFMNGRTNGVATYRNNGFFGQVDGLNFALQYQGNNESGGPFGQEGSGSGDGRSLSKENGDGFGMSTSYDFDFGLSLGAAYSNSDRSDRQVGVGLNDRNHSNRNAGGETAEAWTVGAKYDANNVYLAAMYAETRNMTPYGGGEFDNGESRSAIANKTQNFEVVAQYQFDFGLRPSIAYLQSKGKDLGGWAHDGNGDPRYTNKDLVKYVEVGATYYFNKNMSTYVDYKINLLDNDDDFYEANGIATDDIVAVGLVYQF

SEQ ID NO: 8528 - protein, 236 aa, Escherichia coli; identical to SEQ ID NO: 3418

SEQ ID NO: 8529 - protein, 851 aa, Escherichia coli; identical to SEQ ID NO: 4440

SEQ ID NO: 8530 - protein, 161 aa, Escherichia coli
MPAPLLAAPPLILLKPGTTGTLRLLRTESDILPVDRETLFELSIASVPSGKVENQSVKVAMRSVFKLFWRPEGLPGDPLEAYQQLRWTRNSQGVQLTNPTPYYINLIQVSVNGKALSNVGVVPPKSQRQTSWCQAIAPCHVAWRAINDYGGLSAKKEQNLP

SEQ ID NO: 8531 - protein, 828 aa, Escherichia coli; identical to SEQ ID NO: 2388

SEQ ID NO: 8532 - protein, 162 aa, Escherichia coli; identical to SEQ ID NO: 1967

SEQ ID NO: 8533 - protein, 446 aa, Escherichia coli; identical to SEQ ID NO: 3394

SEQ ID NO: 8534 - protein, 178 aa, Escherichia coli; identical to SEQ ID NO: 7111

SEQ ID NO: 8535 - protein, 729 aa, Escherichia coli
MLSTQFNRDNQYQAITKPSLLAGCIALALLPSAAFAAPATEETVIVEGSATAPDDGENDYSVTSTSAGTKMQMTQRDIPQSVTIVSQQRMEDQQLQTLGEVMENTLGISKSQADSDRALYYSRGFQIDNYMVDGIPTYFESRWNLGDALSDMALFERVEVVRGATGLMTGTGNPSAAINMVRKHATSREFKGDVSAEYGSWNKERYVADLQSPLTEDGKIRARIVGGYQNNDSWLDRYNSEKTFFSGIVDADLGDLTTLSAGYEYQRIDVNSPTWGGLPRWNTDGSSNSYDRARSTAPDWAYNDKEINKVFMTLKQQFADTWQATLNATHSEVEFDSKMMYVDAYVNKADGMLVGPYSNYGPGFDYVGGTGWNSGKRKVDALDLFADGSYELFGRQHNLMFGGSYSKQNNRYFSSWANIFPDKIGSFYNFNGNFPQTDWSPQSLAQDDTTHMKSLYAATRVTLADPLHLILGARYTNWRVDTLTYSMEKNHTTPYAGLVFDINDNWSTYASYTSIFQPQNDRDSSGKYLAPITGNNYELGLKSDWMNSRLTTTLAIFRIEQDNVAQSTGTPIPGSNGETAYKAVDGTVSKGVEFELNGAITDNWQLTFGATRYIAEDNEGNAVNPNLPRTTVKMFTSYRLPVMPELTVGGGVNWQNRVYTDTVTPYGTFRAEQGSYALVDLFTRYQVTKNFSLQGNVNNLFDKTYDTNVEGSIVYGTPRNFSITGTYQF

SEQ ID NO: 8536 - protein, 274 aa, Escherichia coli; identical to SEQ ID NO: 3435

SEQ ID NO: 8537 - protein, 249 aa, Escherichia coli; identical to SEQ ID NO: 3445

SEQ ID NO: 8538 - protein, 203 aa, Escherichia coli; identical to SEQ ID NO: 2015

SEQ ID NO: 8539 - protein, 368 aa, Escherichia coli; identical to SEQ ID NO: 3330

SEQ ID NO: 8540 - protein, 241 aa, Escherichia coli
MSNKNVNVRKLQEITFCLLAGILMIMAMMAAGRAEAGVALGATRVIYPAGQKQVQLAVTNNDENSTYLIQSWVENADGVKDGRFIVTPPLFAMKGKKENTLRILDATNNQLPQDRESLFWMNVKAIPSMDKSKLTENTLQLAIISRIKLYYRPAKLALPPDQAAEKLRFRRSANSLTLINPTPYYLTVTELNAGTRVLENALVPPMGESTVKLPSDAGSNITYRTINDYGALTPKMTGVMV

SEQ ID NO: 8541 - protein, 440 aa, Escherichia coli
MSYLNLRLYQRNTQCLHIRKHRLAGFFVRLFVACAFAAQAPLSSAELYFNPRFLADDPQAVADLSRFENGQELPPGTYRVDIYLNNGYMATRDVTFNTGDSEQGIVPCLTRAQLASMGLNTASVSGMNLLADDACVPLTTMIHDATAHLDVGQQRLNLTIPQAFMSNRARGYIPPELWDPGINAGLLNYNFSGNSVQNRIGGNSHYAYLNLQSGLNIGAWRLRDNTTWSYNSSDSSSGSKNKWQHINSWLERDIIPLRSRLTLGDGYTQGDIFDGINFRGAQLASDDNMLPDSQRGFAPVIHGIARGTAQVTIKQNGYDIYNSTVPPGPFTINDIYAAGNSGDLQVTIKEADGSTQIFTVPYSSVPLLQREGHTRYSITAGEYRSGNAQQEKTRFFQSTLLHGLPAGWTIYGGTQLVDRYRAFNFGIGKNMGHWALCLWI

SEQ ID NO: 8542 - protein, 618 aa, Escherichia coli; identical to SEQ ID NO: 3398

SEQ ID NO: 8543 - protein, 412 aa, Escherichia coli
MKQWIAALLLMLIPGVQAAKPQKVTLMVDDVPVAQVLQALAEQEKLNLVVSPDVSGTVSLHLTDVPWKQALQTVVKSAGLITRQEGNILSVHSIAWQNNNIARQEAEQARAQANLPLENRSITLQYADAGELAKAGEKLLSAKGSMTVDKRTNRLLLRDNKTALSALEQWVAQMDLPVGQVELSAHIVTINEKSLRELGVKWTLADAQHAGGVGQVTTLGSDLSVATATTHVGFNIGRINGRLLDLELSALEQKQQLDIIASPRLLASHLQPASIKQGSEIPYQVSSGESGATSVEFKEAVLGMEVTPTVLQKGRIRLKLHISQNVPGQVLQQADGEVLAIDKQEIETQVEVKSGETLALGGIFTRKNKSGQDSVPLLGDIPLFGQLFRHDGKEDERRELVVFITPRLVSSE

SEQ ID NO: 8544 - protein, 331 aa, Escherichia coli; identical to SEQ ID NO: 2700

SEQ ID NO: 8545 - protein, 231 aa, Escherichia coli; identical to SEQ ID NO: 3055

SEQ ID NO: 8546 - protein, 362 aa, Escherichia coli; identical to SEQ ID NO: 2434

SEQ ID NO: 8547 - protein, 233 aa, Escherichia coli; identical to SEQ ID NO: 3276

SEQ ID NO: 8548 - protein, 653 aa, Escherichia coli; identical to SEQ ID NO: 4758

SEQ ID NO: 8549 - protein, 89 aa, Escherichia coli; identical to SEQ ID NO: 2810

SEQ ID NO: 8550 - protein, 407 aa, Escherichia coli; identical to SEQ ID NO: 6407

SEQ ID NO: 8551 - protein, 111 aa, Escherichia coli; identical to SEQ ID NO: 3096

SEQ ID NO: 8552 - protein, 866 aa, Escherichia coli
MYRTHRQHSLLSSGGVPSFIGGLVVFVSAAFNAQAETWFDPAFFKDDPSMVADLSRFEKGQKITPGVYRVDIVLNQTIVDTRNVNFVEITPEKGIAACLTTESLDAMGVNTDAFPAFKQLDKQACVPLAEIIPDASVTFNVNKLRLEISVPQIAIKSNARGYVPPERWDEGINALLLGYSFSGANSIHSSADSDSGDSYFLNLNSGVNLGPWRLRNNSTWSRSSGQTAEWKNLSSYLQRAVIPLKGELTVGDDYTAGDFFDSVSFRGVQLASDDNMLPDSLKGFAPVVRGIAKSNAQITIKQNGYTIYQTYVSPGAFEISDLYSTSSSGDLLVEIKEADGSVNSYSVPFSSVPLLQRQGRIKYAVTLAKYRTNSNEQQESKFAQATLQWGGPWGTTWYGGGQYAEYYRAAMFGLGFNLGDFGAISFDATQAKSTLADQSEHKGQSYRFLYAKTLNQLGTNFQLMGYRYSTSGFYTLSDTMYKHMDGYEFNDGDDEDTPMWSRYYNLFYTKRGKLQVNISQQLGEYGSFYLSGSQQTYWHTDQQDRLLQFGYNTQIKDLSLGGSWNYSKSRGQPDADQVFALNFSLPLNLLLPRSNDSYTRKKNYAWMTSNTSIDNEGHITQNLGLTETLLDDGNLSYSVQQGYNSEGKTANGSASMDYKGAFADARVGYNYSDNGSQQQLNYALSGSLVAHSQGITLGQSLGETNVLIAAPGAENTRVANSTGLKTDWRGYTVVPYATSYRENRIALDAASLKRNVDLENAVVNVVPTKGALVLAEFNAHAGARVLMKTSKQGIPLRFGAIATLDGIQTNSGIIDDDGSLYMSGLPAQGAITVRWGEAPDQICHISYQLTEQQINSAITRMDAICR

SEQ ID NO: 8553 - protein, 774 aa, Escherichia coli
MTPLRVFRKTTPLVNAIRLSLLPLAGLSFSAFAAQVNIAPGSLDKALNQYAAHSGITLSVDASLTRGKQSNGLHGDYDVESGLQQLLDGSGLQVKPLGNNSWTLEPALAPKEDALTVVGDWLGDARENDVFEHAGARDVIRREDFAKTGATTMREVLNRIPGVSAPENNGTGSHDLAMNFGIRGLNPRLASRSTVLMDGIPVPFAPYGQPQLSLAPVSLGNMDAIDVVRGGGAVRYGPQSVGGVVNFVTRAIPQDFGIEAGVEGQLSPTSSQNNPKETHNLMVGGTADNGFGTALLYSGTRGSDWREHSATRIDDLMLKSKYAPDEVHTFNSLLQYYDGEADMPGGLSRADYDADRWQSTRSYDRFWGRRKLASLGYQFQPDSQHKFNIQGFYTQTLRSGYLEQGKRITLSPRNYWVRGIEPRYSQIFMIGPSAHEVGVGYRYVNESTHEMRYYTATSSGQLPSGSSPYDRDTRSGTEAHAWYLDDKIDIGNWTITPGMRFEHIESYQNNAITGTHEEVSYNAPLPALNVLYHLTDSWNLYANTEGSFGTVQYSQIGKAVQSGNVEPEKARTWELGTRYDDGALTAEMGLFLINFNNQYGSNQTNDTVTARGKTRHTGLETQARYDLGTLTPTLDNVSIYASYAYVNAEIREKGDTYGNLVPFSPKHKGTLGVDYKPGNWTFNLNSDFQSSQFADNANTVKESADGSTGRIPGFMLWGARVAYDFGPQMADLNLAFGVKNIFDQDYFIRSYDDNNKGIYAGQPRTLYMQGSLKF

SEQ ID NO: 8554 - protein, 102 aa, Escherichia coli; identical to SEQ ID NO: 1824

SEQ ID NO: 8555 - protein, 300 aa, Escherichia coli; identical to SEQ ID NO: 4800

SEQ ID NO: 8556 - protein, 120 aa, Escherichia coli; identical to SEQ ID NO: 3383

SEQ ID NO: 8557 - protein, 843 aa, Escherichia coli; identical to SEQ ID NO: 3042

SEQ ID NO: 8558 - protein, 866 aa, Escherichia coli; identical to SEQ ID NO: 3688

SEQ ID NO: 8559 - protein, 230 aa, Escherichia coli; identical to SEQ ID NO: 3348

SEQ ID NO: 8560 - protein, 161 aa, Escherichia coli; identical to SEQ ID NO: 2582

SEQ ID NO: 8561 - protein, 232 aa, Escherichia coli; identical to SEQ ID NO: 2087

SEQ ID NO: 8562 - protein, 359 aa, Escherichia coli; identical to SEQ ID NO: 2329

SEQ ID NO: 8563 - protein, 351 aa, Escherichia coli; identical to SEQ ID NO: 3691

SEQ ID NO: 8564 - protein, 162 aa, Escherichia coli; identical to SEQ ID NO: 1965

SEQ ID NO: 8565 - protein, 478 aa, Escherichia coli; identical to SEQ ID NO: 2404

SEQ ID NO: 8566 - protein, 208 aa, Escherichia coli; identical to SEQ ID NO: 1949

SEQ ID NO: 8567 - protein, 446 aa, Escherichia coli; identical to SEQ ID NO: 2179

SEQ ID NO: 8568 - protein, 673 aa, Escherichia coli; identical to SEQ ID NO: 3295

SEQ ID NO: 8569 - protein, 523 aa, Escherichia coli; identical to SEQ ID NO: 3879

SEQ ID NO: 8570 - protein, 200 aa, Escherichia coli; identical to SEQ ID NO: 1784

SEQ ID NO: 8571 - protein, 373 aa, Escherichia coli; identical to SEQ ID NO: 8448

SEQ ID NO: 8572 - protein, 834 aa, Escherichia coli; identical to SEQ ID NO: 3692

SEQ ID NO: 8573 - protein, 231 aa, Escherichia coli; identical to SEQ ID NO: 7365

SEQ ID NO: 8574 - protein, 402 aa, Escherichia coli; identical to SEQ ID NO: 4768

SEQ ID NO: 8575 - protein, 243 aa, Escherichia coli; identical to SEQ ID NO: 3483

SEQ ID NO: 8576 - protein, 207 aa, Escherichia coli; identical to SEQ ID NO: 2211

SEQ ID NO: 8577 - protein, 826 aa, Escherichia coli; identical to SEQ ID NO: 3256

SEQ ID NO: 8578 - protein, 663 aa, Escherichia coli; identical to SEQ ID NO: 1910

SEQ ID NO: 8579 - protein, 162 aa, Escherichia coli; identical to SEQ ID NO: 1965

SEQ ID NO: 8580 - protein, 266 aa, Escherichia coli; identical to SEQ ID NO: 1894

SEQ ID NO: 8581 - protein, 161 aa, Escherichia coli; identical to SEQ ID NO: 2582

SEQ ID NO: 8582 - protein, 672 aa, Escherichia coli; identical to SEQ ID NO: 7919

SEQ ID NO: 8583 - protein, 224 aa, Escherichia coli
MIITLLCSFCIGQALAGGIVLQRTRVIYDASRKEAALPVANKGAETPYLLQSWVDNIDGTSRAPFIITPPLFRLEAGDDSSLRIIKTADNLPENKESLFYINVRAIPAKKKSDDVNANELTLVFKTRIKMFYRPAHLKGRVNDAWTSLEFKRSDHSLNIYNPTEYYVVFAGLAVDKTDLTSKIEYIAPGEHKQLPLPASGGKNVKWAAINDYGGSSGTETRPLQ

SEQ ID NO: 8584 - protein, 838 aa, Escherichia coli; identical to SEQ ID NO: 7717

SEQ ID NO: 8585 - protein, 243 aa, Escherichia coli; identical to SEQ ID NO: 7668

SEQ ID NO: 8586 - protein, 430 aa, Escherichia coli; identical to SEQ ID NO: 2617

SEQ ID NO: 8587 - protein, 368 aa, Escherichia coli; identical to SEQ ID NO: 2371

SEQ ID NO: 8588 - protein, 243 aa, Escherichia coli; identical to SEQ ID NO: 8454

SEQ ID NO: 8589 - protein, 208 aa, Escherichia coli; identical to SEQ ID NO: 1949

SEQ ID NO: 8590 - protein, 614 aa, Escherichia coli; identical to SEQ ID NO: 3301

SEQ ID NO: 8591 - protein, 224 aa, Escherichia coli; identical to SEQ ID NO: 3165

SEQ ID NO: 8592 - protein, 696 aa, Escherichia coli; identical to SEQ ID NO: 3314

SEQ ID NO: 8593 - protein, 432 aa, Escherichia coli; identical to SEQ ID NO: 2026

SEQ ID NO: 8594 - protein, 191 aa, Escherichia coli; identical to SEQ ID NO: 2727

SEQ ID NO: 8595 - protein, 826 aa, Escherichia coli
MLRMTPLASAIVALLLGIEAYAAEETFDTHFMIGGMKDQQVANIRLDDNQPLPGQYDIDIYVNKQWRGKYEIIVKDNPQETCLSIEVIKRLGINSDNFASGKQCLTFEQLVQGGSYTWDIGVFRLDFSVPQAWVEELESGYVPPENWERGINAFYTSYYVSQYYSDYKASGNSKSTYVRFNSGLNLLGWQLHSDASFSKTNNNPGVWKSNTLYLERGFAQLLGTLRVGDMYTSSDIFDSVRFSGVRLFRDMQMLPNSKQNFTPRVQGIAQSNALVTIEQNGFVVYQKEVPPGPFAITDLQLAGGGADLDVSVKEADGSVTTYLVPYAAVLNMLQPGVSKYDFAAGRSHIEGASKQSDFVQAGYQYGFNNLLTLYGGSMVANNYYAFTLGTGWNTRIGAISVDATKSHSKQDNGDVFDGQSYQIAYNKFVSQTSTRFGLAAWRYSSRDYRTFNDHVWANNKDNYRRDENDVYDIADYYQNDFGRKNSFSANMSQSLPEGWGSVSLSTLWRDYWGRSGSSKDYQLSYSNNWRRISYILAASQAYDENHHEEKRFNIFISIPFDWGDDVTTPRRQIYMSNSTTFDDQGFASNNTGLSGTVGSRDQFNYGVNLSYQNQGNETTAGANLTWNAPVATVNGSYSQSSTYRQAGASVSGGIVAWSGGVNLANRLSETFAVMNAPGIKDAYVNGQKYRTTNRNGVVVYDGMTPYRENHLMLDVSQSDSEAELRGNRKIAASYRGAVVLVNFDTDQRKPWFIKALRADGQPLMFGYEVNDIHGHNIGVVGQGSQLFIRTNEVPPSVNVAIDKQQGLSCTITFGKEIDESRNYICQ

SEQ ID NO: 8596 - protein, 203 aa, Escherichia coli; identical to SEQ ID NO: 2009

SEQ ID NO: 8597 - protein, 359 aa, Escherichia coli; identical to SEQ ID NO: 2329

SEQ ID NO: 8598 - protein, 765 aa, Escherichia coli
MQFHINSPDINNEKAVLLARDETLGNCLNLTEIIPQASVRYDVNEQRLDIDVPQAWVMKNYQNYVDPSLWENGINAAMLSYNLNGYHSETPGRRNDSIYAAFNGGMNLGAWRLRASGNYNWMTDSGSNYDFKNRYIQRDIASLRSQLILGESYTTGETFDSVSIRGIRLYSDSRMLPPTLASFAPIIHGVANTNAKVTITQGGYKIYETTVPPGAFLIDDLSPSGYGSDLIVTVEESDGSKRTFSQPFSSVVQMLRPGVGRWDISGGQVLKDDIQDEPNLFQASYYYGLNNYLTGYTGIQITDNNYTAGLLGLGLNTSVGAFSFDVTHSNVRIPDDKTYQGQSYRVSWNKLFEETSTSLNIAAYRYSTQNYLGLNDALTLIDEVKHPEQDLEPKSMRNYSRMKNQVTVSINQPLKFEKKDYGSFYLSGSWSDYWASGQNRSNYSIGYSNSASWGSYSVSAQRSWNEDGDTDDSVYLSFTIPIEKLLGTEQRTSGFQSIDTQMSSDFKGNNQLNVSSSGYSDNARVSYSVNTGYTMNKASKDLSYVGGYASYESPWGTLAGSVSANSDNSRQVSLSTDGGFVLHSGGLTFSNDSFSDSDTLAVVQAPGAQGARINYGNSTIDRWGYGVTSALSPYHENRIALDINDLENDVELKSTSAVAVPRQGSVVFADFETVQGQSAIMNITRSDGKNIPFAADIYDEQGNVIGNVGQGGQAFVRGIEQQGNISIKWLEESKPVSCLAHYQQSSEAEKIAQSIILNGIRCQIQ

SEQ ID NO: 8599 - protein, 221 aa, Escherichia coli; identical to SEQ ID NO: 3743

SEQ ID NO: 8600 - protein, 351 aa, Escherichia coli; identical to SEQ ID NO: 3691

SEQ ID NO: 8601 - protein, 249 aa, Escherichia coli; identical to SEQ ID NO: 3492

SEQ ID NO: 8602 - protein, 514 aa, Escherichia coli; identical to SEQ ID NO: 8138

SEQ ID NO: 8603 - protein, 650 aa, Escherichia coli
MSAISCAWPVLAVDDDGETMVVTASSVEQNLKDAPASISVITQEDLQRKPVQNLKDVLKEVPGVQLTNEGDNRKGVSIRGLDSSYTLILVDGKRVNSRNAVFRHNDFDLNWIPVDSIERIEVVRGPMSSLYGSDALGGVVNIITKKIGQKWSGTVTVDTTIQEHRDRGDTYNGQFFTSGPLIDGVLGMKAYGSLAKREKDDPQNSTTTDTGETPRIEGFSSRDGNVEFAWTPNQNHDFTAGYGFDRQDRDSDSLDKNRLERQNYSVSHNGRWDYGTSELKYYGEKVENKNPGNSSPITSESNTVDGKYTLPLTAINQFLTVGGEWRHDKLSDAVNLTGGTSSKTSASQYALFVEDEWRIFEPLALTTGVRMDDHETYGEHWSPRAYLVYNATDTVTVKGGWATAFKAPSLLQLSPDWTSNSCRGACKIVGSPDLKPETSESWELGLYYMGEEGWLEGVESSVTVFRNDVKDRISISRTSDVNAAPGYQNFVGFETGANGRRIPVFSYYNVNKARIQGVETELKIPFNDEWKLSINYTYNDGRDVSNGENKPLSDLPFHTANGTLDWKPLALEDWSFYVSGHYTGQKRADSATAKTPGGYTIWNTGAAWQVTKDVKLRAGVLNLGDKDLSRDDYSYNEDGRRYFMAVDYRF

SEQ ID NO: 8604 - protein, 373 aa, Escherichia coli
MAVKISGVLKDGTGKPVENCTIQLKARRTSSTVVVNTVASENPDEAGRYSMDVEYGQYSVILLVEGFPPSHAGTITVYEDSQPGTLNDFLGAMSEDDVRPEALRRFELMVEEVARHAEEAKKNAGEAETSARNAGISASQAEESAANADTSAGEASESARQAAESAASAKQSEDASSSSASAAAQKASESSQSAAEAELSRKTAESAAGNAARDATTATEKARESAESAQSAEQSRIAAEEAVNRIPTVVGPPGPKGEQGPAGPQGPKGDKGERGDTGPVGATGERGPAGDAGPAGPQGPKGDRGERGETGLTGNAGPQGPKGDTGAAGPAGPQGPKGETGAAGPVGATGPQGPKGDPGETQIRFTSGAGEHY

SEQ ID NO: 8605 - protein, 162 aa, Escherichia coli; identical to SEQ ID NO: 1965

SEQ ID NO: 8606 - protein, 362 aa, Escherichia coli; identical to SEQ ID NO: 2434

SEQ ID NO: 8607 - protein, 551 aa, Escherichia coli; identical to SEQ ID NO: 2446

SEQ ID NO: 8608 - protein, 203 aa, Escherichia coli; identical to SEQ ID NO: 2201

SEQ ID NO: 8609 - protein, 431 aa, Escherichia coli; identical to SEQ ID NO: 3408

SEQ ID NO: 8610 - protein, 230 aa, Escherichia coli; identical to SEQ ID NO: 3392

SEQ ID NO: 8611 - protein, 203 aa, Escherichia coli; identical to SEQ ID NO: 2009

SEQ ID NO: 8612 - protein, 678 aa, Escherichia coli
MVPSTFSRLKAARCLPVVLAALIFAGCGTHTPDQSTAYMQGTAQADSAFYLQQMQQSSDDTRINWQLLAIRALVKEGKTGQAVELFNQLPQELNDSQRREKTLLAVEIKLAQKDFAGAQNLLAKITPADLEQNQQARYWQAKIDASQGRPSIDLLRALIAQEPLLGAKEKQQNIDATWQALSSMTQEQANTLVINADENILQGWLDLQRVWFDNRNDPDMMKAGIADWQKRYPNNPGAKMLPTQLVNVKAFKPASTNKIALLLPLNGQAAVFGRTIQQGFEAAKNIGTQPVAAQVAAAPAADVAEQPQPQTVDGVASPAQASVSDLTGEQPAAQPAPVSTPAATTTAVSAPANPSAELKIYDTSSQPLSQILSQVQQDGASIVVGPLLKNNVEELLKSNTPLNMLALNQPENIENRVNICYFALSPEDEARDAARHIRDQGKQAPLVLIPRSSLGDRVANAFAQEWQKLGGGTVLQQKFGSTSELRAGVNGGSGIALTGTPITPRATTDSGMTTNNPTLQTTPTDDQFTNNGGRVDAVYIVATPGEIAFIKPMIAMRNGSQSGATLYASSRSAQGTAGPDFRLEMEGLQYSEIPMLAGGNLPLMQQALSAVNNDYSLARMYAMGVDAWSLANHFSQMRQVQGFEINGNTGSLTANPDCVINRKLSWLQYQQGQVVPAS

SEQ ID NO: 8613 - protein, 230 aa, Escherichia coli; identical to SEQ ID NO: 3348

SEQ ID NO: 8614 - protein, 518 aa, Escherichia coli; identical to SEQ ID NO: 2349

SEQ ID NO: 8615 - protein, 224 aa, Escherichia coli; identical to SEQ ID NO: 3115

SEQ ID NO: 8616 - protein, 631 aa, Escherichia coli; identical to SEQ ID NO: 3058

SEQ ID NO: 8617 - protein, 274 aa, Escherichia coli; identical to SEQ ID NO: 3721

SEQ ID NO: 8618 - protein, 700 aa, Escherichia coli; identical to SEQ ID NO: 3128

SEQ ID NO: 8619 - protein, 360 aa, Escherichia coli; identical to SEQ ID NO: 3354

SEQ ID NO: 8620 - protein, 869 aa, Escherichia coli; identical to SEQ ID NO: 3012

SEQ ID NO: 8621 - protein, 118 aa, Escherichia coli [sequence omitted]

SEQ ID NO: 8622 - protein, 223 aa, Escherichia coli
MMLIIFYLIISASAHAAGGIALGATRIIYPADAKQTAVWIRNSHTNERFLVNSWIENSSGVKEKSFIITPPLFVSEPKSENTLRIIYTGPPLAADRESLFWMNVKTIPSVDKNALNGRNVLQLAILSRMKLFLRLIQLQELPAEAPDTLKFSRSGNYINVHNPSPFYVTLVNLQVGSQKLGNAMAAPRVNSQIPLPSGVQGKLKFQTVNDYGSVTPVREVNLN

SEQ ID NO: 8623 - protein, 619 aa, Escherichia coli
MGDGNTGSDIFDGVGFRGIRLYSSDNMYPDSQQGFAPTVRGIARTAAQLTIRQNGFIIYQSYVSPGAFEITDLHPTSSNGDLDVTIDERDGNQQNYTIPYSTVPILQREGRFKFDLTAGDFRSGNSQQSSPFFFQGTALGGLPQEFTAYGGTQLSANYTAFLLGLGRNLGNWGTVSLDVTHARSQLADDSRHEGDSIRFLYAKSMNTFGTNFQLMGYRYSTQGFYTLDDVAYRRMEGYEYDYDYDGEHRDEPIIVNYHNLRFSRKDRLQLNISQSLNDFGSLYISGTHQKYWNTSDSDTWYQVGYTSSWVGISYSLSFSWNESVGIPDNERIVGLNVSVPFNVLTKRRYTRENALDRAYASFNANRNSNGQNSWLAGVGGTLLEGHNLSYHVSQGDTSNNGYTGSATANWQAAYGTLGVGYNYDRDQHDVNWQLSGGVVGHENGITLSQPLGDTNVLIKAPGAGGVRIENQTGILTDWRGYAVMPYATVYRYNRIALDTNTMGNSIDVEKNISSVVPTQGALVRANFDTRIGVRALITVTQGRKPVPFGSLVRENSTGITSMVGDDGQVYLSGAPLSGELLVQWGDGANSRCIAHYVLPKQSLQQAVTVISAVCTHPGS

SEQ ID NO: 8624 - protein, 250 aa, Escherichia coli; identical to SEQ ID NO: 3427

SEQ ID NO: 8625 - protein, 776 aa, Escherichia coli; identical to SEQ ID NO: 7663

SEQ ID NO: 8626 - protein, 234 aa, Escherichia coli
MLLVASLCSHAALQPDRTRIVFNANDKATSLRVDNRSDKLPYLAYSWLENEKGEKSDDLLVALPPIQRLEPKATTQVRIVKQASTTKLPGDRETLFFYNMREIPPAPEKNSDHAVLQVAIQSRIKVFWRPAALRKKAGEKVELQLQVSQQGNQLTLKNPTAYYLTIAYLGRNEKGVLPGFKTVMVAPFSTVNTNIGNYSGSQFYLGYMDDYGALRMTTLNCSGQCHLQAVEAKK

SEQ ID NO: 8627 - protein, 843 aa, Escherichia coli
MHWMHLPLYHYRAHFSFSLLALTIASSLPAYGGKFNPKFLENVQGIDQHIDLSVYDSPVGQQIPGKYRVSVFVNEEKMASRTLDFSTASEAKRKASGESLMPCLSRVQLEEMGVRVDSFPALKMSPPEACVAFDEIIPQATSRFDFNTQTLHLSFPQAAMMMTARGTVDPSRWDEGIPALLLDYSFSGSNGRNEGTGSSSDSTSDSYYLNLRSGLNVGPWRLRNNSIWNRTDGKNQWDNVGTSLNRAIIPLKSQITLGDTATPGEIFDSVQMRGALLASDDEMLPDSQRGFAPVVRGIAKSNAEVSIEQNGYVIYRTFVQPGAFEINDLYATSGSGDLTVIIKEADGSEQRFIQPFSAVAIFQREGYLKYSLAAGEYRAGNYDSDKPHFGQFTAMYGLPWGMTAYGGALLSADYNALALGLGKNFGTIGAVSVDVTQAKSQLRNNEKEEGQSYRFLYSKSFEGGTDLRLLGYKYSTSGYYTFQEATDVRSDADSDYRRYHKRSQIQGNITQQLGDYGSVYFNMTQQDYWNVDGKENSLSAGYHGHIGRVNYSVAYTWTRSPEWEEDDRLWSFSVSIPLGGAWSSYRMTTDQNGKTSQQASVSGTLLEDRNLSYNVQQGYTSNGVGYSGSVNMGYMGGSGNIDVGYNYSKDNQQVNYGVRGGVIVHSEGITLSQPLGESLAIVSAPGARGGHVVNSSGVEVDWMGNAVVPYLTPYRETIVELRSDTLGQNVELQEAFQKVVPTRGAVVCSRFDTRVGYRVLMSLKQANGNAVPFGATAALIDESKPASSIVGEEGQLYISGMPEEGELQVSWGNEQAQRCRVPFRLPENKDNAAIVMVNAVCEK

SEQ ID NO: 8628 - protein, 816 aa, Escherichia coli; identical to SEQ ID NO: 7726

SEQ ID NO: 8629 - protein, 430 aa, Escherichia coli; identical to SEQ ID NO: 2617

SEQ ID NO: 8630 - protein, 729 aa, Escherichia coli; identical to SEQ ID NO: 3778

SEQ ID NO: 8631 - protein, 478 aa, Escherichia coli; identical to SEQ ID NO: 2404

SEQ ID NO: 8632 - protein, 673 aa, Escherichia coli; identical to SEQ ID NO: 7780

SEQ ID NO: 8633 - protein, 207 aa, Escherichia coli; identical to SEQ ID NO: 2211

SEQ ID NO: 8634 - protein, 446 aa, Escherichia coli; identical to SEQ ID NO: 2176

SEQ ID NO: 8635 - protein, 478 aa, Escherichia coli
MTRIKINARRIFSLLIPFFFFTSVHAEQTAAPTKPVTVEAKNETFAPQHPDQYLSWKATSEQSERVDALAEDPRLVILWAGYPFSRDYNKPRGHAFAVTDVRETLRTGAPKNAEDGPLPMACWSCKSPDVARLIQKDGEDGYFHGKWARGGPEIVNNLGCADCHNTASPEFAKGKPELTLSRPYAARAMEAIGKPFEKAGRFDQQSMVCGQCHVEYYFDGKNKAVKFPWDDGMKVENMEQYYDKIAFSDWTNSLSKTPMLKAQHPEYETWTVGIHGKNNVTCIDCHMPKVQNAEGKLYTDHKIGNPFDNFAQTCANCHTQDKAALQKVVAERKQSINDLKIKVEDQLVHAHFEAKAALDAGATEAEMKPIQDDIRHAQWRWDLAIASHGIHMHAPEEGLRMLGTAMDKAADARTKLARLLATKGITHEIQIPDISTKEKAQQAIGLNMEQIKAEKQDFIKTVIPQWEEQARKNGLLSQ

SEQ ID NO: 8636 - protein, 834 aa, Escherichia coli; identical to SEQ ID NO: 3692

SEQ ID NO: 8637 - protein, 747 aa, Escherichia coli; identical to SEQ ID NO: 3670

SEQ ID NO: 8638 - protein, 539 aa, Escherichia coli; identical to SEQ ID NO: 7779

SEQ ID NO: 8639 - protein, 170 aa, Escherichia coli [sequence omitted]

SEQ ID NO: 8640 - protein, 878 aa, Escherichia coli; identical to SEQ ID NO: 3331

SEQ ID NO: 8641 - protein, 213 aa, Escherichia coli; identical to SEQ ID NO: 2232

SEQ ID NO: 8642 - protein, 230 aa, Escherichia coli
MMTKIKLLMLIIFYLIISASDHAAGGIALGATRIIYPADAKQTAVWIRNSHTNERFLVNSWIENSSGVKEKSFIITPPLFVSEPKSENTLRIIYTGPPLAADRESLFWMNVKTIPSVDKNALNGRNVLQLAILSRMKLFLRPIQLQELPAEAPDTLKFSRSGNYINVHNPSPFYVTLVNLQVGSQKLGNAMAAPRVNSQIPLPSGVQGNLKFQTVNDYGSVTPVREVNLN

SEQ ID NO: 8643 - protein, 715 aa, Escherichia coli
MLYNIPCRIYILSTLSLCISGIVSTATATSSETKISNEETLVVTTNRSASNLWESPATIQVIDQQTLHNSTNASIADNLQDIPGVEITDNSLAGRKQIRIRGEASSRVLILIDGQEVTYQRAGDNYGVGLLIDESALERVEIVKGPYSVLYGSQAIGGIVNFITKKGGNKLASGVVKAVYNSATAGWEESIAVQGSIGGFDYRINGSYSDQGNRDTPDGRLPNTNYRNNSQGVWLGYNSGNHRFGLSLDRYRLATQTYYEDPDGSYEAFSVKIPKLEREKVGVFYDTDVDGDYLKKIHFDAYEQTIQRQFANEVKTTQPVPSPMIQALTVHNKTDTHDKQYTQAVTLQSHFSLPANNELVTGAQYKQDRVNQRSGGMTSSKSLTGFINKETRTRSYYESEQSTVSLFTQNDWQFADHWTWTMGVRQYWLSSKLTRGDGVSYTAGIISDTSLARESASDHEMVTSTSLRYSGFDNLELRAAFAQGYVFPTLSQLFMQTSAGGSVTYGNPDLKAEHSNNFELGARYNGNQWLIDSAVYYSEAKDYIASLICDGSIVCNGNTNSSRSSYYYYDNIDRAKTWGLEISAEYNGWVFSPYISGNLIRRQYETSTLKTTNTGEPAINGRIGLKHTLVMGQANIISDVFIRAASSAKDDSNGTETNVPGWATLNFAVNTEFGNEDQYRINLALNNLTDKRYRTAHETIPAAGFNAAIGFVWNF

SEQ ID NO: 8644 - protein, 432 aa, Escherichia coli; identical to SEQ ID NO: 2026

SEQ ID NO: 8645 - protein, 828 aa, Escherichia coli; identical to SEQ ID NO: 2380

SEQ ID NO: 8646 - protein, 774 aa, Escherichia coli; identical to SEQ ID NO: 4771

SEQ ID NO: 8647 - protein, 360 aa, Escherichia coli; identical to SEQ ID NO: 3694

SEQ ID NO: 8648 - protein, 361 aa, Escherichia coli; identical to SEQ ID NO: 3061

SEQ ID NO: 8649 - protein, 881 aa, Escherichia coli
MPDHSLFRLRILPWCIALAMSGSYSSVWAEDDIQFDSRFLELKGDTKIDLKRFSSQGYVEPGKYNLQVQLNKQPLAEEYDIYWYAGEDDVSKSYACLTPELVAQFGLKEDVAKNLQWSHDGKCLKPGQLEGMEIKADLSQSALVISLPQAYLEYTWPDWDPPSRWDDGISGIIADYSITAQTRHEENGGDDSNEISGNGTVGVNLGPWRMRADWQTNYQHTRSNDDDDEFGGDDTQKKWEWSRYYAWRALPSLKAKLALGEDYLNSDIFDGFNYVGGSVSTDDQMLPPNLRGYAPDISGVAHTTAKVTVSQMGRVIYETQVPAGPFRIQDLGDSVSGTLHIRIEEQNGQVQEYDISTASMPYLTRPGQVRYKIMMGRPQEWGHHVEGGFFSGAKASWGIANGWSLYGGALGDENYQSAALGVGRDLSTFGAVAFDVTHSHTKLDKDTAYGKGSLDGNSFRVSYSKDFDQLNSRVTFAGYRFSEENFMTMSEYLDASDSEMVRTGNDKEMYTATYNQNFRDAGVSVYLNYTRHTYWDREEQTNYNIMLSHYFNMGSIRNMSVSLTGYRYEYDNRADKGMYISLSMPWGDNSTVSYNGNYGSGTDSSQVGYFSRVDDATHYQLNIGTSDKHTSVDGYYSHDGSLAQVDLSANYHEGQYTSAGLSLQGGATLTTHGGALHRTQNMGGTRLLIDADGVADVPVEGNGAAVYTNMFGKAVVSDVNNYYRNQAYIDLNKLPENAEATQSVVQATLTEGAIGYRKFAVISGQKAMAVLRLQDGSHPPFGAEVKNDNEQTVGLVDDDGSVYLAGVKPGEYMSVFWSGVAHCDINLPDPLPADLFNGLLLPCQHKGNVAPVVPDDIKPVIQEQTQQVTPTDPPVSVSANQ

SEQ ID NO: 8650 - protein, 207 aa, Escherichia coli; identical to SEQ ID NO: 3334

SEQ ID NO: 8651 - protein, 473 aa, Escherichia coli
MSGNIGANPPTFTPGEEVRERKQSGKYEYMTSLIVNGKDTWSVKGLKSHKGVYDYSNLIQFVEKDNKYHQAKIISELGDKNDIVYSGSGSSEVFAGEGHDTVSYNKTDAGKLTIDATGASKPGEYIVSKNMYGDVKVLQEVVNEQEVSVGKRTEKIQYRDFEFRAGGISYDVIDKLHSVEELIGGKHDDEFKGGKFNDIFHGADGNDYIEGNYGNDRLYGDDGDDYISGGQGDDQLFGGSGNDKLSGGDGNNYLTGGSGNDELQAHGAYNILSGGTGDDKLYGGGIDLLDGGEGNDYLNGGFGNDIYVYRQNYGHHTIADEGGKGDRLHLSDISFDDIAFKKVGNDLIMNKAINGVLSFNESNDVNGITFKNWFAKDASGADNHLVEIITDKDGREIKSDNIPHKNNDWSGYIKASSIASEKNMVNITSVANDINKIISSVSGLDSGDERLASLYNLALHQNNTHSTILTTTV

SEQ ID NO: 8652 - protein, 274 aa, Escherichia coli; identical to SEQ ID NO: 2303

SEQ ID NO: 8653 - protein, 897 aa, Escherichia coli
MKLNIFTKSMIGMGLVCSALPALAMEAWNNQQGGNKYQVIFDGKIYENAWWVSSTNCPGKAKANDATNPWRLKRTATAAEISQFGNTLSCEKSGSSSSSNSNTPASNTPANGGSATPAQGTVPSNSSVVAWNKQQGGQTWYVVFNGAVYKNAWWVASSNCPGDAKSNDASNPWRYVRAATATEISETSNPQSCTSAPQPSPDVKPAPDVKPAPDVQPAPADKSNDNYAVVAWKGQEGSSTWYVIYNGGIYKNAWWVGAANCPGDAKENDASNPWRYVRAATATEISQYGNPGSCSVKPDNNGGAVTPVDPTPETPVTPTPDNSEPSTPADSVNDYSLQAWSGQEGSEIYHVIFNGNVYKNAWWVGSKDCPRGTSAENSNNPWRLERTATAAELSQYGNPTTCEIDNGGVIVADGFQASKAYSADSIVDYNDAHYKTSVDQDAWGFVPGGDNPWKKYEPAKAWSASTVYVKGDRVVVDGQAYEALFWTQSDNPALVANQNATGSNSRPWKPLGKAQSYSNEELNNAPQFNPETLYASDTLIRFNGVNYISQSKVQKVSPSDSNPWRVFVDWTGTKERVGTPKKAWPKHVYAPYVDFTLNTIPDLAALAKNHNVNHFTLAFVVSKDANTCLPTWGTAYGMQNYAQYSKIKALREAGGDVMLSIGGANNAPLAASCKNVDDLMQHYYDIVDNLNLKVLDFDIEGTWVADQASIERRNLAVKKVQDKWKSEGKDIAIWYTLPILPTGLTPEGMNVLSDAKAKGVELAGVNVMTMDYGNAICQSANTEGQNIHGKCATSAIANLHSQLKGLHPNKSDAEIDAMMGTTPMIGVNDVQGEVFYLSDARLVMQDAQKRNLGMVGIWSIARDLPGGTNLSPEFHGLTKEQAPKYAFSEIFAPFTKQ

SEQ ID NO: 8654 - protein, 213 aa, Escherichia coli; identical to SEQ ID NO: 2232

SEQ ID NO: 8655 - protein, 193 aa, Escherichia coli; identical to SEQ ID NO: 2246

SEQ ID NO: 8656 - protein, 826 aa, Escherichia coli; identical to SEQ ID NO: 3700

SEQ ID NO: 8657 - protein, 776 aa, Escherichia coli; identical to SEQ ID NO: 7663

SEQ ID NO: 8658 - protein, 226 aa, Escherichia coli; identical to SEQ ID NO: 3085

SEQ ID NO: 8659 - protein, 229 aa, Escherichia coli
MTLSIFAVLSLLVAGELQAGVVVGGTRFIFPAHRESISISLTNTSQESWLINSKINRSTRWAGGEASTVPVPLLAAPPLVFLKPSTTGTLRLLRTESDMLPVDRETLFELNIASVPSGKVENQNVKVAMRSVFKLFWRPEGLPGDPLEAYQQLRWSRNSQGLQLTNPTPYYINLIQVSVNGKALSNAGVVPPKSQRQTSWCQAIAPCHVAWRAINDYGGLSAKKEQDLP

SEQ ID NO: 8660 - protein, 686 aa, Escherichia coli; identical to SEQ ID NO: 3454

SEQ ID NO: 8661 - protein, 200 aa, Escherichia coli; identical to SEQ ID NO: 1784

SEQ ID NO: 8662 - protein, 241 aa, Escherichia coli
MSNKNVNVRKSQEITFCLLAGILMFMAMMVAGRAEAGVALGATRVIYPAGQKQVQLAVTNNDENSTYLIQSWVENADGVKDGRFIVTPPLFAMKGKKENALRILDATNNQLPQDRESLFWMNVKAIPSMDKSKLTENTLQLAIISRIKLYYRPAKLALPPDQAAEKLRFRRSANSLTLINPTPYYLTVTELNAGARVLENALVPPMGESTVKLPSDAGSNITYRTINDYGALTPKMTGIME

SEQ ID NO: 8663 - protein, 236 aa, Escherichia coli; identical to SEQ ID NO: 3286

SEQ ID NO: 8664 - protein, 246 aa, Escherichia coli; identical to SEQ ID NO: 3021

SEQ ID NO: 8665 - protein, 193 aa, Escherichia coli; identical to SEQ ID NO: 2246

SEQ ID NO: 8666 - protein, 430 aa, Escherichia coli; identical to SEQ ID NO: 2617

SEQ ID NO: 8667 - protein, 250 aa, Escherichia coli; identical to SEQ ID NO: 3048

SEQ ID NO: 8668 - protein, 518 aa, Escherichia coli; identical to SEQ ID NO: 2349

SEQ ID NO: 8669 - protein, 111 aa, Escherichia coli; identical to SEQ ID NO: 3419

SEQ ID NO: 8670 - protein, 239 aa, Escherichia coli
MAAIPWRPFNLRGIKMKGLLSLLIFSMVLPAHAGIVIYGTRIIYPAENKEVMVQLMNQGNRSSLLQAWIDDGDTSLPPEKIQVPFMLTPPVAKIGENSGQQVKIKIMPNKLPTNKESIFYLNVLDIPPNSPEQEGKNALKFAMQNRIKLFYRPAGIAPVNKATFKKLLVNRSGNGLVIKNDSANWVTISDVKANNVKVNYETIMIAPLESQSVNVKSNNANNWHLTIIDDHGNYISDKI

SEQ ID NO: 8671 - protein, 565 aa, Escherichia coli; identical to SEQ ID NO: 2669

SEQ ID NO: 8672 - protein, 539 aa, Escherichia coli
MTVNKIKNIFSNATSTTKSAFNTASSNVRTAGKKLILLIPDDYEAQGVGINELVKAADELGIEIHRTERDDTAIANQFFGTAEKVLGLTERGVAIFAPQLDKLLQKYQNVGSKIGGTAENVGNNLGKAGTVLSALHNFTGIALSGMALDELLRKQRGGEDISQNDIAKNSIELINHLVDTVSSINSTVDSFSEQLNQLGSFLSSKPSLSSVGGKLQNLPDLGPLGDGLDVISGILSAVSASFILGNSDAHTGTKAAAGIELTTQVLGNVGKAVSQYILAQRMAQGLSTTAASAGLITSAVMLAISPLSFLAIADKFERAKQLEAYSERFKKLNYEGDALLAAFHKETGAIDAALTTINTVLSSVSAGVSAASSASLIGAPISMLVSALTGTISGILEASKQAMFEHVADKFAARINEWEKEHGKNYFENGYDARHAAFLEDSLSLLADFSRQHAVERAVAITQQHWDEKIGELAGITRNADRSQSGKAYINYLENGGLLEDQPKEFTQQVFDPQKGTIDLSTGNVSSVLTFVTPTRLAP

SEQ ID NO: 8673 - protein, 700 aa, Escherichia coli; identical to SEQ ID NO: 2784

SEQ ID NO: 8674 - protein, 243 aa, Escherichia coli; identical to SEQ ID NO: 3432

SEQ ID NO: 8675 - protein, 224 aa, Escherichia coli; identical to SEQ ID NO: 3437

SEQ ID NO: 8676 - protein, 191 aa, Escherichia coli; identical to SEQ ID NO: 2727

SEQ ID NO: 8677 - protein, 478 aa, Escherichia coli; identical to SEQ ID NO: 2404

SEQ ID NO: 8678 - protein, 230 aa, Escherichia coli; identical to SEQ ID NO: 3019

SEQ ID NO: 8679 - protein, 191 aa, Escherichia coli; identical to SEQ ID NO: 2727

SEQ ID NO: 8680 - protein, 351 aa, Escherichia coli; identical to SEQ ID NO: 3448

SEQ ID NO: 8681 - protein, 242 aa, Escherichia coli; identical to SEQ ID NO: 2697

SEQ ID NO: 8682 - protein, 125 aa, Escherichia coli; identical to SEQ ID NO: 3236

SEQ ID NO: 8683 - protein, 229 aa, Escherichia coli; identical to SEQ ID NO: 3277

SEQ ID NO: 8684 - protein, 760 aa, Escherichia coli; identical to SEQ ID NO: 2080

SEQ ID NO: 8685 - protein, 731 aa, Escherichia coli
MARSKTAQPKHSLRKIAVVVATAVSGMSVYAQAAVEPKEDTITVTAAPAPQESAWGPAATIAAKHSATATKTDTPIEKTPQSISVVTREEMDIKQPATVKEALDYTPSVFSTRGSSTTYDVVSIRGFTTPSTVNTNQYLDGLKLQGDNYSEASIDPYFLERVELLRGPVSVLYGKSHPGGVVSMVSKRPSTDPIKEIQFKMGTDNLWQTGFDFSDAIDDDGVWSYRLTGLGRSQDAQQKYAKTTRYAVAPSFSWRPDDKTDLTFLSNFQSDPDAGYYGWLPRQGTVVPYQDANGSWHKLPTDFNEGEKDNKMSRRQQLIGYSFAHEFNDTFTVRQNLRYTRIHTLYDAVYGNSYIAPAQISRAYVRSDEDLNSFTVDTQLQSNFATGAVAHTLLTGVDYLRMRNDIDANYGTADPISMQDPQYGNANININFPYAVINRQEQTGLYIQDQSEWNKWVLTLGGRYDFAKTSTYTRSTSSLDEINDQQFTWRGGINYLFDNGISPYFSYSESFEPVSGATKEGKPFDPSRGKQYEAGVKYVPKDTPVTVTASVFQLTKDKNLTADPSNILFSVQGGEIRSRGFEIEAKAALNANINVTAAYNYTDAEYTKDTLYKGKRPAEVPRNMASLWADYTFRETALSGLSFGAGARYFGDTSSFYTTGEKANQTFNVGGYTLVDAMIKYDLARFGMPGSSVGVNVNNLFDREYVSSCYRDYACYWGAERQVVATATFRF

SEQ ID NO: 8686 - protein, 136 aa, Escherichia coli
MPNNLPHNKESLFYLNVIDIPPNNPQNAGKNKIKLALQNRIKLFWRPEGVAPVDKKSLSQLNIKKKDNAISINNETANWITVTTIKAQNVKVNNESILLPPFSNNDITLKNNNASEYELTVVDDYGNNINSKIAAK

SEQ ID NO: 8687 - protein, 367 aa, Escherichia coli; identical to SEQ ID NO: 3343

SEQ ID NO: 8688 - protein, 518 aa, Escherichia coli; identical to SEQ ID NO: 3346

SEQ ID NO: 8689 - protein, 700 aa, Escherichia coli; identical to SEQ ID NO: 3047

SEQ ID NO: 8690 - protein, 551 aa, Escherichia coli; identical to SEQ ID NO: 2446

SEQ ID NO: 8691 - protein, 678 aa, Escherichia coli; identical to SEQ ID NO: 3014

SEQ ID NO: 8692 - protein, 331 aa, Escherichia coli; identical to SEQ ID NO: 2705

SEQ ID NO: 8693 - protein, 654 aa, Escherichia coli
MDCVMKGLNKITCCLLAALLMPCAGHAENEQYGANFNNADIRQFVEIVGQQLGKTILIDPSVQGTISVRSNDTFSQQEYYQFFLSILDLYGYSVITLDNGFLKVVRSANVKTSPGMIADSSRPGVGDELVTRIVPLENVPARDLAPLLRQMMDAGSVGNVVHYEPSNVLILTGRASTINKLIEVIKRVDVIGTEKQQIIHLEYASAEDLAEILNQLISESHGKSQMPALLSAKIVADKRTNSLIISGPEKARQRITSLLKSLDVEESEEGNTRVYYLKYAKATNLVEVLTGVSEKLKDEKGNARKPSSSGAMDNVAITADEQTNSLVITADQSVQEKLATVIARLDIRRAQVLVEAIIVEVQDGNGLNLGVQWANKNVGAQQFTNTGLPIFNAAQGVADYKKNGGITSANPAWDMFSAYNGMAAGFFNGDWGVLLTALASNNKNDILATPSIVTLDNKLASFNVGQDVPVLSGSQTTSGDNVFNTVERKTVGTKLKVTPQVNEGDAVLLEIEQEVSSVDSSSNSTLGPTFNTRTIQNAVLVKTGETVVLGGLLDDFSKEQVSKVPLLGDIPLVGQLFRYTSTERAKRNLMVFIRPTIIRDDDVYRSLSKEKYTRYRQEQQQRIDGKSKALVGSEDLPVLDENTFNSHAPAPSSR

SEQ ID NO: 8694 - protein, 210 aa, Escherichia coli; identical to SEQ ID NO: 3423

SEQ ID NO: 8695 - protein, 130 aa, Escherichia coli; identical to SEQ ID NO: 3184

SEQ ID NO: 8696 - protein, 118 aa, Escherichia coli [sequence omitted]

SEQ ID NO: 8697 - protein, 614 aa, Escherichia coli; identical to SEQ ID NO: 3301

SEQ ID NO: 8698 - protein, 351 aa, Escherichia coli; identical to SEQ ID NO: 3010

SEQ ID NO: 8699 - protein, 746 aa, Escherichia coli; identical to SEQ ID NO: 3031

SEQ ID NO: 8700 - protein, 351 aa, Escherichia coli; identical to SEQ ID NO: 2519

SEQ ID NO: 8701 - protein, 58 aa, Escherichia coli
MREDKLKYLLEIYRENERKIKELEQIKSHISQLEVAVLRINNLKVREDIDSLLKSYNY

SEQ ID NO: 8702 - protein, 228 aa, Escherichia coli; identical to SEQ ID NO: 3034

SEQ ID NO: 8703 - protein, 784 aa, Escherichia coli; identical to SEQ ID NO: 2244

SEQ ID NO: 8704 - protein, 614 aa, Escherichia coli; identical to SEQ ID NO: 3341

SEQ ID NO: 8705 - protein, 224 aa, Escherichia coli; identical to SEQ ID NO: 3358

SEQ ID NO: 8706 - protein, 732 aa, Escherichia coli; identical to SEQ ID NO: 4926

SEQ ID NO: 8707 - protein, 231 aa, Escherichia coli; identical to SEQ ID NO: 2794

SEQ ID NO: 8708 - protein, 828 aa, Escherichia coli; identical to SEQ ID NO: 2386

SEQ ID NO: 8709 - protein, 250 aa, Escherichia coli; identical to SEQ ID NO: 2761

SEQ ID NO: 8710 - protein, 746 aa, Escherichia coli; identical to SEQ ID NO: 3391

SEQ ID NO: 8711 - protein, 372 aa, Escherichia coli
MAKNKLGRLGNESDTYGELELGSEVYKKDDVSFYLDSMVSMVSDGSNDNETTLNDDAQFGLRQLNLQIKGLIPGDPNAVIWGGKRYYQRHDLHIIDTKYWNISGSGAGVENYTLGPGAVSLAWIRGDANDVDYRVDGDSNVNINYIDLRYAGWKPWAGSWTEFGIDYAMPNTTKKQDSYGGLYDADNGVMLTGEISQDMLGGYNKTVLQYANKGLAQNMVSQGGGWYDMWNYVNDATGYRVINTGLIPITEKFSINHVLTWGSADDITDYTDKTRMLSLVARGQYQFTDYVRLIGEVGGFYQKDSYNNGTSYKQAGEKYTIALGLADGPDFMSRPELRIFASYLNDSEDGKPFEDQTANNTWNFGVQVEAWW

SEQ ID NO: 8712 - protein, 224 aa, Escherichia coli
MTVSLTTILLSCSSAWAAGKGGIGLAATRLVYSEGEEQISLGVRNTSPDVPYLIQSWVMTPDNKKSADFIITPPLFVLNPANENLLRIMYIGAPLAKDRETLFFTSVRAVPSTTKRKEGNTLKIATQSVIKLFWRPKGLAYPLGEAPAKLRCTSSADMVTVSNPTPYFITLTDLKIGGKVVKNQMISPFDKYQFSLPKGAKNSSVTYRTINDYGAETPQLNCKS

SEQ ID NO: 8713 - protein, 614 aa, Escherichia coli; identical to SEQ ID NO: 1888

SEQ ID NO: 8714 - protein, 274 aa, Escherichia coli; identical to SEQ ID NO: 2309

SEQ ID NO: 8715 - protein, 678 aa, Escherichia coli; identical to SEQ ID NO: 3452

SEQ ID NO: 8716 - protein, 565 aa, Escherichia coli; identical to SEQ ID NO: 3362

SEQ ID NO: 8717 - protein, 517 aa, Escherichia coli; identical to SEQ ID NO: 3116

SEQ ID NO: 8718 - protein, 659 aa, Escherichia coli
MFRLNPFVRVGLCLSAISCAWPVLAVDDDGETMVVTASSVEQNLKDAPASISVITQEDLQRKPVQNLKDVLKEVPGVQLTNEGDNRKGVSIRGLDSSYTLILVDGKRVNSRNAVFRHNDFDLNWIPVDSIERIEVVRGPMSSLYGSDALGGVVNIITKKIGQKWSGTVTVDTTIQEHRDRGDTYNGQFFTSGPLIDGVLGMKAYGSLAKREKDDPQNSTTTDTGETPRIEGFSSRDGNVEFAWTPNQNHDFTAGYGFDRQDRDSDSLDKNRLERQNYSVSHNGRWDYGTSELKYYGEKVENKNPGNSSPITSESNTVDGKYTLPLTAINQFVTVGGEWRHDKLSDAVNLTGGTSSKTSASQYALFVEDEWRIFEPLALTTGVRMDDHETYGEHWSPRAYLVYNATDTVTVKGGWATAFKAPSLLQLSPDWTSNSCRGACKIVGSSDLKPETSESWELGLYYMGEEGWLEGVESSVTVFRNDVKDRISISRTSDVNAAPGYQNFVGFTADGVPVFSYYNVNKARIQGVETELKIPFNDEWKLSINYTYNDGRDVSNGENKPLSDLPFHTANGTLDWKPLALEDWSFYVSGHYTGQKRADSATAKTPGGYTIWNTGAAWQVTKDVKLRAGVLNLGDKDLSRDDYSYNEDGRRYFMAVDYRF

SEQ ID NO: 8719 - protein, 203 aa, Escherichia coli; identical to SEQ ID NO: 2201

SEQ ID NO: 8720 - protein, 224 aa, Escherichia coli; identical to SEQ ID NO: 3035

SEQ ID NO: 8721 - protein, 518 aa, Escherichia coli; identical to SEQ ID NO: 2349

SEQ ID NO: 8722 - protein, 200 aa, Escherichia coli; identical to SEQ ID NO: 1793

SEQ ID NO: 8723 - protein, 241 aa, Escherichia coli
MLKMFILFLISFSWYANATDFVYRVDSRPPEEIFRDGFRSHGFNRNLQQHLRGDSCAAGSRDSAFIATTTSLIETYNIARQYYSSSGFHGRLYRYRIRANNIFYPIQPSVNYLTQRGITFSGFERIMMREQNEIVAVEHIPGENIVEAVELTYDRFNSQVSDGPGTTNARYVPGSTFVNPGVIPQLVVPTVSVRERINAFGSLISACFALKGVRRDGLNKRATYYEPEFYDARGVLKEIIK

SEQ ID NO: 8724 - protein, 203 aa, Escherichia coli; identical to SEQ ID NO: 2201

SEQ ID NO: 8725 - protein, 784 aa, Escherichia coli; identical to SEQ ID NO: 2244

SEQ ID NO: 8726 - protein, 432 aa, Escherichia coli; identical to SEQ ID NO: 2026

SEQ ID NO: 8727 - protein, 246 aa, Escherichia coli
MFLNAKHTAALCFAACMSLSTSAIADIVISGTRVIYKSDQKSVNVRLENKGNNPLLVQSWLDTGDDSAEPGSIKVPFTATPPVSRIDAKRSQTIKLMYTASSPLPKDRESVFWFNVLEVPPQPDADKVANQSLLQLAFRTRIKLFYRPEGLNGLPTDAPAALKWSWTTSAGKTALRVANPTPYHVSFSSGDLVANGKTYPLDVKMVAPLSEETFYIKGMSGKASSAKVHFFAINDFGGAIEGNASL

SEQ ID NO: 8728 - protein, 162 aa, Escherichia coli; identical to SEQ ID NO: 1973

SEQ ID NO: 8729 - protein, 360 aa, Escherichia coli; identical to SEQ ID NO: 3062

SEQ ID NO: 8730 - protein, 385 aa, Escherichia coli
MNIYRAVTSFFNNSSKKGLTMKKLTVAISAVAASVLMAMSAQAAEIYNKDSNKLDLYGKVNAKHYFSSNDADDGDTTYARLGFKGETQINDQLTGFGQWEYEFKGNRAESQGSSKDKTRLAFAGLKFGDYGSIDYGRNYGVAYDIGAWTDVLPEFGGDTWTQTDVFMTGRTTGVATYRNNDFFGLVDGLNFAAQYQGKNDRSDFDNYTEGNGDGFGFSATYEYEGFGIGATYAKSDRTDTQVNAGKVLPEVFASGKNAEVWAAGLKYDANNIYLATTYSETQNMTVFADHFVANKAQNFEAVAQYQFDFGLRPSVAYLQSKGKDLGVWGDQDLVKYVDVGATYYFNKNMSTFVDYKINLLDKNDFTKALSVSTDDIVAVGLVYQF

SEQ ID NO: 8731 - protein, 232 aa, Escherichia coli; identical to SEQ ID NO: 2087

SEQ ID NO: 8732 - protein, 760 aa, Escherichia coli; identical to SEQ ID NO: 3026

SEQ ID NO: 8733 - protein, 243 aa, Escherichia coli; identical to SEQ ID NO: 2910

SEQ ID NO: 8734 - protein, 432 aa, Escherichia coli; identical to SEQ ID NO: 2026

SEQ ID NO: 8735 - protein, 663 aa, Escherichia coli; identical to SEQ ID NO: 1910

SEQ ID NO: 8736 - protein, 656 aa, Escherichia coli; identical to SEQ ID NO: 3449

SEQ ID NO: 8737 - protein, 430 aa, Escherichia coli; identical to SEQ ID NO: 2617

SEQ ID NO: 8738 - protein, 249 aa, Escherichia coli
MKKMKSLLTVTGMICLLGFCNFAQATVSPDRTRIIFNASNKSATVRLTNQSKIDPYLAQSWIEDASGKKTRDYISTLPPMERIEANEQVQIRLMALSALNNLPQDRETLFYYNVREIPPRAKEQNVMQIAMQSRLKLFWRPKSIELKEGEMVPLQKLTITHSAAGLTLNNPTPYHITVGYIGTNGKTLMPGTDSIMVTPFGTATQQIKNLPTTFLLGFVGDYGGLEMFKIDCNSVQSLCQATPAKKGKL

SEQ ID NO: 8739 - protein, 193 aa, Escherichia coli; identical to SEQ ID NO: 2246

SEQ ID NO: 8740 - protein, 565 aa, Escherichia coli; identical to SEQ ID NO: 2669

SEQ ID NO: 8741 - protein, 119 aa, Escherichia coli
MDAVLSVQGASAPVKKKSFFSKFTRLNMLRLVRAVIPAAVLMMFFPQAALAAGGQDLMQSGNDTVKATFGKDSSIVKWVVLAEVLVGAVMYMMTKNVKFLAGFAIISVFIAIGMTVVGL

SEQ ID NO: 8742 - protein, 213 aa, Escherichia coli; identical to SEQ ID NO: 2232

SEQ ID NO: 8743 - protein, 367 aa, Escherichia coli; identical to SEQ ID NO: 3016

SEQ ID NO: 8744 - protein, 200 aa, Escherichia coli
MLAFCRSSLKSKKYFIILLVLAAIAGLGTHAAWSSNGLPRIDNKTLARLAQQHTVVVLFRHAERCDRSTNQCLSDKTGITVKGTQDARELGNAFSADIPDFDLYSSNTVRTIQSATWFSAGKKLTVDKRLLQCGNEIYSAIKDLQSKAPDKNIVIFTHNHCLTYIAKDKCDATFKPDYLDGLVMHVEKGKVYLDGEFVNH

SEQ ID NO: 8745 - protein, 747 aa, Escherichia coli
MARSKTAQPKHSLRKIAVVVATAVSGMSVYAQAAVEPKEDTITVTAAPAPQESAWGPAATIAARQSATGTKTDTPIQKVPQSISVVTAEEMALHQPKSVKEALSYTPGVSVGTRGASNTYDHLIIRGFAAEGQSQNNYLNGLKLQGNFYNDAVIDPYMLERAEIMRGPVSVLYGKSSPGGLLNMVSKRPTTEPLKEIQFKAGTDSLFQTGFDFSDALDDDGVYSYRLTGIARSANAQQKGAEEQRYAIAPAFTWRPDDKTNFTFLSYFQNEPETGYYGWLPKEGTVEPLPNGKRLPTDFNEGAKNNTYSRNEKMVGYSFDHEFNDTFTVRQNLRFAENKTSQNSVYGYGVCSDPANAYSKQCAALAPADKGHYLARKYVVDDEKLQNFSVDTQLQSKFATGDIDHTLLTGVDFMRMRNDINAWFGYDDSVPLLDLYNPVNTDFDFNAKDPANSGPYRILNKQKQTGVYVQDQAQWDKVLVTLGGRYDWADQESHNRVEGTTDKRDDKQFTWRGGVNYLFDNGVTPYFSYSESFEPSSQVGKDGNIFAPSKGKQYEVGVKYVPEDRPIVVTGAVYNLTKTNNLMADPEGSFFSVEGGEIRARGVEIEAKAALSASVNVVGSYTYTDAEYTTDTTYKGNTPAQVPKHMASLWADYTFFEGPLSGLTLGTGGRFTGSSYGDPANSFKVGSYTVVDALVRYDLARVGMAGSNVALHVNNLFDREYVASCFNTYGCFWGAERQVVATATFRF

SEQ ID NO: 8746 - protein, 686 aa, Escherichia coli; identical to SEQ ID NO: 3015

SEQ ID NO: 8747 - protein, 747 aa, Escherichia coli; identical to SEQ ID NO: 2072

SEQ ID NO: 8748 - protein, 859 aa, Escherichia coli; identical to SEQ ID NO: 5113

SEQ ID NO: 8749 - protein, 199 aa, Escherichia coli; identical to SEQ ID NO: 5136

SEQ ID NO: 8750 - protein, 274 aa, Escherichia coli; identical to SEQ ID NO: 2891

SEQ ID NO: 8751 - protein, 860 aa, Escherichia coli; identical to SEQ ID NO: 3544

SEQ ID NO: 8752 - protein, 243 aa, Escherichia coli; identical to SEQ ID NO: 4409

SEQ ID NO: 8753 - protein, 879 aa, Escherichia coli; identical to SEQ ID NO: 5138

SEQ ID NO: 8754 - protein, 351 aa, Escherichia coli; identical to SEQ ID NO: 4688

SEQ ID NO: 8755 - protein, 678 aa, Escherichia coli; identical to SEQ ID NO: 2902

SEQ ID NO: 8756 - protein, 231 aa, Escherichia coli; identical to SEQ ID NO: 2868

SEQ ID NO: 8757 - protein, 816 aa, Escherichia coli
MNIYRLSVLSCLAMVTPPALTAEFNLNVLDKSIRDSVDISLLNQKGVVAPGDYFVSVTVNNNKISNGQQIRWQKSGDKIIPCINESLIELFGLKSDFRKKLPAIKECVDFSVFPEIIFTFDQANQQLNITIPQAWLAWHSENWTPPSTWNNGIPGFLMDYNLFASTYRPQSGSSSNNLNAYGTTGLNTGAWRLRSDYQLSQSDSGDNREQSGAISRTYLFRPLPQIGSRLTLGETDFSSNIFDGFSYTGAALASDDRMLPWELRGYAPQISGIAQTNATVTISHSGRVIYQKKVPPGPFIIDDLNQSVQGTLDVKVSEEDGRVNNFQVSAASTPFLTRQGQVRYKLAAGRPRSSMSHHTEDETFISHEVSWGMLSNTSLYGGMLLAGDDYRSGALGIGQNMLWMGALSFDVTWADSHFDTQQDEQGYSYRFNYSKQVDATNSTISLAAYRFSDRHFHSYANYIDHKYNDADAQDEKQTISLSFGQPITLLNLNLYANILHQSWWNADTSTTANITVGFNVDIGDWKDISVSTSFNTTHYEDKDRDNQIYFSISLPIGESGRLGYDMQNNSNTTTHRMSWNDTLDERNSWGMSAGIQSDRPDNGAQVSGNYQHLSSAGEWDLTGTYAANDYTSASASWSGSFTATQHGAAFHRRSSTNEPRLMVSTDGVGDIPIQGNIDYTNRFGIAVVPFVSSYQPTTVAVNMNDLPDGVTVSENVVKETWTEGAIGFKSLASRAGKDLNVIISDANGHFPPLGADVRQAEGGVSVGMVGENGHAWLSGVDENQQFTVHWGDQKTCAIHLPEHLEDVTKRLILPCH

SEQ ID NO: 8758 - protein, 430 aa, Escherichia coli; identical to SEQ ID NO: 2617

SEQ ID NO: 8759 - protein, 518 aa, Escherichia coli; identical to SEQ ID NO: 2349

SEQ ID NO: 8760 - protein, 567 aa, Escherichia coli; identical to SEQ ID NO: 6969

SEQ ID NO: 8761 - protein, 130 aa, Escherichia coli; identical to SEQ ID NO: 3184

SEQ ID NO: 8762 - protein, 238 aa, Escherichia coli
MVKKTVSALFVSTLLASAPAFADIIISGTRIIYNADKKDVNVRLENKGNRPLLIQNWLDTGDDNADPSQIKVPFTATPPVSRVEPKRGQTVKVMYTGATALPKDRESVYWFNVLEVPPKPKDAEADKNLLQLAFRTRIKLFYRLSGLQGEPAEAPAKITWKLNNAQLQANNPTPYYVSFNEVKLESGGKTYNVNSSMVTPFSQASFGVTGLPGSVSSGKVVFKAINDFGGNIDGSATF

SEQ ID NO: 8763 - protein, 478 aa, Escherichia coli
MTRIKINARRIFSLLIPFFFFTSVHAEQTAAPAKPVTVEAKNETFAPQHPDQYLSWKATSEQSERVDALAEDPRLVILWAGYPFSRDYNKPRGHAFAVTDVRETLRTGAPKNAEDGPLPMACWSCKSPDVARLIQKDGEDGYFHGKWARGGPEIVNNLGCADCHNTASPEFAKGKPELTLSRPYAARAMEAIGKPFEKAGRFDQQSMVCGQCHVEYYFDGKNKAVKFPWDDGMKVENMEQYYDKIAFSDWTNSLSKTPMLKAQHPEYETWTAGIHGKNNVTCIDCHMPKVQNAEGKLYTDHKIGNPFDNFAQTCANCHTQDKAVLQKVVAERKQSINDLKIKVEDQLVHAHFEAKAALDAGATEAEMKPIQDDIRHAQWRWDLAIASHGIHMHAPEEGLRMLGTAMDKAADARTKLARLLATKGITHEIQIPDISTKEKAQQAIGLNMEQIKAEKQDFIKTVIPQWEEQARKNGLLSQ

SEQ ID NO: 8764 - protein, 209 aa, Escherichia coli; identical to SEQ ID NO: 3547

SEQ ID NO: 8765 - protein, 361 aa, Escherichia coli; identical to SEQ ID NO: 3601

SEQ ID NO: 8766 - protein, 731 aa, Escherichia coli; identical to SEQ ID NO: 6297

SEQ ID NO: 8767 - protein, 266 aa, Escherichia coli; identical to SEQ ID NO: 5141

SEQ ID NO: 8768 - protein, 359 aa, Escherichia coli; identical to SEQ ID NO: 6995

SEQ ID NO: 8769 - protein, 232 aa, Escherichia coli; identical to SEQ ID NO: 2087

SEQ ID NO: 8770 - protein, 213 aa, Escherichia coli; identical to SEQ ID NO: 2232

SEQ ID NO: 8771 - protein, 229 aa, Escherichia coli; identical to SEQ ID NO: 5424

SEQ ID NO: 8772 - protein, 233 aa, Escherichia coli; identical to SEQ ID NO: 3548

SEQ ID NO: 8773 - protein, 232 aa, Escherichia coli; identical to SEQ ID NO: 2087

SEQ ID NO: 8774 - protein, 213 aa, Escherichia coli; identical to SEQ ID NO: 2232

SEQ ID NO: 8775 - protein, 798 aa, Escherichia coli
MYINDQPIMSQSIAFTVIEGKKNAQACITQKNLLQFHISSPDKNSGKAILLKRDDDLGDCLNLAEMISQSSIRYDVNDQRLDIDVPQAWIMKNYQNYVDPSLWENGINAAMLSYNLNGYHSESPGRTNDSIYAAFNGGINLGAWRLRASGNYNWMTNVHSDYDFQNRYLQRDLASLRSQLVIGESYTTGETFDSVSIRGIRLYSDSRMLPPVLASFAPIIHGVANTNAKVTVMQNGYKIYETTVPPGAFAIDDLSPSGYGSDLIVTIEEADGTKRTFSQPFSSVVQMLRPGVGRWDISAGQVLKDSIQDEPNLFQASYYYGLNNYLTGYTGIQLTDNNYTAGLLGLGMNTPVGAFSVDVTHSNVSIPDDKTYQGQSYRISWNKLFENTSTSLNIAAYRYSTQHYLGLNDALTLIDEVEHPEQDLEPKSMRNYSRMKNQVTVSINQPLKFEKKDYGSFYLSGSWSDYWASGQNSTNYSIGYSNSASWGSYSISAQRSLNEDGQTDDSIYLSFTIPIENLLDTDHRSSGFQSIDTQLNSDFKGNNQLNISSSGYSDTNRISYSVNTGYMMNKSSDDLSYIGGHASYESPWGTLSGSASASSDNSRQFSLNTDGGFVLHSGGLTFSNDSFSDSDTLAVIQAPGAKGARINYGNSTVDRWSYGVTSALSPYHENRIALDINDLENDVELKSTSTVAIPRQGAVVFADFETVQGQSAIMNIVRSDGKNIPFAEDIYDEQNNIIGNVGQGGQAFVHGIEQEENIRITWIEEGKPVSCFAHYQQNTASEKIAQSIILNGLRCQIQ

SEQ ID NO: 8776 - protein, 246 aa, Escherichia coli
MFFNTKHTAALCLASCMAFSSSAIADIVISGTQVVYKSEQKSFNVRLENKGNNPLLVQSWLDTGDDNAEPGSITVPFTATPPVSRIDAKRGQTIKLMYTASSALPKDRESVFWFNVLEVPPKPDAAKASNQSLLQLAFRTRIKLFYRPEGLSGMPSDAPLALKWSWATSEGKAALRVDNPTPYYVSFSSGDLEANGKRYPLDMTMIAPFSNDVIKVNGMSGRTSSAKVHFFAINDFGGSIEGNANL

SEQ ID NO: 8777 - protein, 838 aa, Escherichia coli; identical to SEQ ID NO: 2916

SEQ ID NO: 8778 - protein, 446 aa, Escherichia coli; identical to SEQ ID NO: 2177

SEQ ID NO: 8779 - protein, 207 aa, Escherichia coli; identical to SEQ ID NO: 2211

SEQ ID NO: 8780 - protein, 207 aa, Escherichia coli; identical to SEQ ID NO: 2211

SEQ ID NO: 8781 - protein, 237 aa, Escherichia coli; identical to SEQ ID NO: 2816

SEQ ID NO: 8782 - protein, 641 aa, Escherichia coli; identical to SEQ ID NO: 6206

SEQ ID NO: 8783 - protein, 237 aa, Escherichia coli; identical to SEQ ID NO: 3793

SEQ ID NO: 8784 - protein, 331 aa, Escherichia coli; identical to SEQ ID NO: 2705

SEQ ID NO: 8785 - protein, 760 aa, Escherichia coli; identical to SEQ ID NO: 2078

SEQ ID NO: 8786 - protein, 359 aa, Escherichia coli; identical to SEQ ID NO: 2332

SEQ ID NO: 8787 - protein, 432 aa, Escherichia coli; identical to SEQ ID NO: 2026

SEQ ID NO: 8788 - protein, 371 aa, Escherichia coli; identical to SEQ ID NO: 5126

SEQ ID NO: 8789 - protein, 208 aa, Escherichia coli; identical to SEQ ID NO: 1949

SEQ ID NO: 8790 - protein, 108 aa, Escherichia coli; identical to SEQ ID NO: 3602

SEQ ID NO: 8791 - protein, 196 aa, Escherichia coli
MPIFVEVKKYFIILLALAAIAGLGTHAAWSSNGLPRIDNKTLARLAQQHPVVVLFRHAERCDRSTNQCLSDKTGITVKGTQDARELGNAFSADIPDFDLYSSNTVRTIQSATWFSAGKKLTVDKRFLQCGNEIYSAIKDLQRKAPDKNIVIFTHNHCLTYIAKDKRDATFKPDYLDGLVMHVEKGKVYLDGEFVNH

SEQ ID NO: 8792 - protein, 249 aa, Escherichia coli; identical to SEQ ID NO: 5120

SEQ ID NO: 8793 - protein, 686 aa, Escherichia coli; identical to SEQ ID NO: 3015

SEQ ID NO: 8794 - protein, 700 aa, Escherichia coli; identical to SEQ ID NO: 2926

SEQ ID NO: 8795 - protein, 366 aa, Escherichia coli; identical to SEQ ID NO: 5499

SEQ ID NO: 8796 - protein, 236 aa, Escherichia coli; identical to SEQ ID NO: 3970

SEQ ID NO: 8797 - protein, 430 aa, Escherichia coli; identical to SEQ ID NO: 2617

SEQ ID NO: 8798 - protein, 774 aa, Escherichia coli; identical to SEQ ID NO: 3426

SEQ ID NO: 8799 - protein, 856 aa, Escherichia coli; identical to SEQ ID NO: 5125

SEQ ID NO: 8800 - protein, 713 aa, Escherichia coli; identical to SEQ ID NO: 3523

SEQ ID NO: 8801 - protein, 857 aa, Escherichia coli; identical to SEQ ID NO: 7004

SEQ ID NO: 8802 - protein, 700 aa, Escherichia coli
MKIVFVRQTVLPALLVLSPVVFAADEQTMIVSAAPQVVSELDTPAAVSVVDGEEMRLATPRINLSESLTGVPGLQVQNRQNYAQDLQLSIRGFGSRSTYGIRGIRLYVDGIPATMPDGQGQTSNIDLSSVQNVEVLRGPFSALYGNASGGVMNVTTQTGQQPPTIEASSYYGSFGSWRYGLKATGATGDGTQPGDVDYTVSTTRFTTHGYRDHSGAQKNLANAKLGVRIDDASKLSLIFNSVDIKADDPGGLTKAEWKANPQQAPRAEQYDTRKTIKQTQAGLRYERSLSSRDDMSVMMYAGERETTQYQSIPMAPQLNPSHAGSVITLQRHDQGIDSRWTHRGELGVPVTFTTGLNYENMSENRKGYNNFRLNSGMPEYGQKGELRRDERNLMWNIDPYLQTQWQLSEKLSLDAGVRYSSVWFDSNDHYVTPGNGDDSGDASYHKWLPAGSLKYAMTDAWNIYLAAGRGFETPTINELSYRADGQSGMNFGLKPSTNDTIEIGSKTRIGDGLLSLALFQTDTDDEIVVDSSSGGRTTYKNAGKTRRQGAELAWDQRFAGDFRVNASWTWLDATYRSNVCNEQDCNGNRMPGIARNMGFASIGYVPEDGWYAGMEARYMGDIMADDENTAKAPSYTLVGLFTGYKYNYHNLTVDLFGRVDNLFDKEYVGSVIVNESNGRYYEPAPGRNYGVGVNIAWRFE

SEQ ID NO: 8803 - protein, 366 aa, Escherichia coli; identical to SEQ ID NO: 3520

SEQ ID NO: 8804 - protein, 236 aa, Escherichia coli; identical to SEQ ID NO: 3970

SEQ ID NO: 8805 - protein, 660 aa, Escherichia coli
MGAFFAGENGNSTTGDAIYMRGADTSNSIYIDGIRDIGSVSRDTFNTEQVEVIKGPSGTDYGRSAPTGSINMISKQPRNDSGIDASASIGSAWFRRGTLDVNQVIGDTTAVRLNVMGEKTHDAGRNKVKNERYGVAPSVAFGLGTANRLYLNYLHVTQHNTPDGGIPTIGLPGYSAPSAGTAALNHSGKVDTHNFYGTDSDYDDSTTDTATMRFEHDINDNTTIRNTTRWSRVKQDYLMTAIMGGASNITQPTSDVNSWTWSRTANTKDVSNKILTNQTNLTSTFYTGAIGHDVSTGVEFTRETQTNYGVNPVTLPAVNIYHPDSSIHPGGLTRNGANANGQTDTFAIYAFDTLQITRDFELNGGIRLDNYHTEYDSATACGGSGRGAITCPAGVAKGSPVTTVDTAKSGNLVNWKAGALYHLTENGNVYINYAVSQQPPGGNNFALAQSGSGNSANRTDFKPQKANTSEIGTKWQVLDKRLLLTAALFRTDIENEVEQNDDGTYSQYGKKRVEGYEISVAGNITPAWQMIGGYTQQKATIKNGKDVAQDGSSSLPYTPEHAFTLWSQYQATDDISVGAGARYIGSMHKGSDGAVGTPAFTEGYWVADAKLGYRVNRNLDFQLNVYNLFDTDYVASINKSGYRYHPGEPRTFLLTANMHF

SEQ ID NO: 8806 - protein, 395 aa, Escherichia coli; identical to SEQ ID NO: 6994

SEQ ID NO: 8807 - protein, 355 aa, Escherichia coli; identical to SEQ ID NO: 5115

SEQ ID NO: 8808 - protein, 368 aa, Escherichia coli; identical to SEQ ID NO: 2370

SEQ ID NO: 8809 - protein, 170 aa, Escherichia coli; identical to SEQ ID NO: 2565

SEQ ID NO: 8810 - protein, 227 aa, Escherichia coli; identical to SEQ ID NO: 3570

SEQ ID NO: 8811 - protein, 111 aa, Escherichia coli; identical to SEQ ID NO: 2911

SEQ ID NO: 8812 - protein, 232 aa, Escherichia coli; identical to SEQ ID NO: 2087

SEQ ID NO: 8813 - protein, 213 aa, Escherichia coli; identical to SEQ ID NO: 2232

SEQ ID NO: 8814 - protein, 816 aa, Escherichia coli; identical to SEQ ID NO: 3562

SEQ ID NO: 8815 - protein, 368 aa, Escherichia coli; identical to SEQ ID NO: 2370

SEQ ID NO: 8816 - protein, 747 aa, Escherichia coli; identical to SEQ ID NO: 2954

SEQ ID NO: 8817 - protein, 266 aa, Escherichia coli; identical to SEQ ID NO: 1894

SEQ ID NO: 8818 - protein, 161 aa, Escherichia coli; identical to SEQ ID NO: 2582

SEQ ID NO: 8819 - protein, 351 aa, Escherichia coli; identical to SEQ ID NO: 6970

SEQ ID NO: 8820 - protein, 203 aa, Escherichia coli; identical to SEQ ID NO: 2007

SEQ ID NO: 8821 - protein, 656 aa, Escherichia coli; identical to SEQ ID NO: 5108

SEQ ID NO: 8822 - protein, 207 aa, Escherichia coli; identical to SEQ ID NO: 2212

SEQ ID NO: 8823 - protein, 478 aa, Escherichia coli; identical to SEQ ID NO: 2404

SEQ ID NO: 8824 - protein, 161 aa, Escherichia coli; identical to SEQ ID NO: 2582

SEQ ID NO: 8825 - protein, 241 aa, Escherichia coli; identical to SEQ ID NO: 2890

SEQ ID NO: 8826 - protein, 203 aa, Escherichia coli; identical to SEQ ID NO: 2201

SEQ ID NO: 8827 - protein, 747 aa, Escherichia coli
MARSKTAQPKHSLRKIAVVVATAVSGMSVYAQAAVEPKEDTITVTAAPAPQESAWGPAATIAARQSATGTKTDTPIQKVPQSISVVTAEEMALHQPKSVKEALSYTPGVSVGTRGASNTYDHLIIRGFAAEGQSQNNYLNGLKLQGNFYNDAVIDPYMLERAEIMRGPVSVLYGKSSPGGLLNMVSKRPTTEPLKEVQFKAGTDSLFQTGFDFSDALDDDGVYSYRLTGLARSANAQQKGSEEQRYAIAPAFTWRPDDKTNFTFLSYFQNEPETGYYGWLPKEGTVEPLPNGKRLPTDFNEGAKNNTYSRNEKMVGYSFDHEFNDTFTVRQNLRFAENKTSQNSVYGYGVCSDPANAYSKQCAALAPADKDHYLARKYVVDDEKLQNFSVDTQLQSKFATGDIDHTLLTGVDFMRMRNDINAWFGYDDSVPLLDLYNPVNTDFDFNAKDPANSGPYRILNKQKQTGVYVQDQAQWDKVLVTLGGRYDWADQESLNRVAGTTDKRDDKQFTWRGGVNYLFDNGVTPYFSYSESFEPSSQVGKDGNIFAPSKGKQYEVGVKYVPEDRPIVVTGAVYNLTKTNNLMADPEGSFFSVEGGEIRARGVEIEAKAALSASVNVVGSYTYTDAEYTTDTTYKGNTPAQVPKHMASLWADYTFFDGPLSGLTLGTGGRYTGSSYGDPANSFKVGSYTVVDALVRYDLARVGMAGSNVALHVNNLFDREYVASCFNTYGCFWGAERQVVATATFRF

SEQ ID NO: 8828 - protein, 660 aa, Escherichia coli; identical to SEQ ID NO: 4092

SEQ ID NO: 8829 - protein, 713 aa, Escherichia coli; identical to SEQ ID NO: 6243

SEQ ID NO: 8830 - protein, 461 aa, Escherichia coli
MLRTTRWVAAIIFLYSFPGYAEETFDTHFMIGGMKGEKVSEYHFDNKQPLPGNYELDFYVNNQWRGKQDITIPESPVKPCLPKVLLTKLGVKTGNLNTEDNCILLDKAVHGGQYQWDISEHRLNLTVPQAYINELERGYVPPESWDRGIDAFYTSYNLSQYRSYDSNNNSNTASYGRFNSGLNLFSWQLHSDASYSKPDDMKGTWQSNTLYLEHGWSQILSTVQIGENYTSSLIFDSLRFSGIRLFRDMQMLPDSMQSFTPLVQGVAQSNALITVSQNGYIIYQKEVPPGPFTIADLQLSGSGSDLDVSIKEADGSVRSFLVPYSSVPNMLQPGISNFDFIAGRSKIYGVKNQEDFLEANYIYGLNNLLTLYGGTILSDNYNAITLGNGWNTPLGAISFDATRSSSKLNNDITHEGTSYQVAYNKYLVQTATRFSVAAWRYASQDYRTLDLPLYFQTSVIT

SEQ ID NO: 8831 - protein, 227 aa, Escherichia coli; identical to SEQ ID NO: 3570

SEQ ID NO: 8832 - protein, 125 aa, Escherichia coli; identical to SEQ ID NO: 6182

SEQ ID NO: 8833 - protein, 367 aa, Escherichia coli; identical to SEQ ID NO: 2431

SEQ ID NO: 8834 - protein, 94 aa, Escherichia coli; identical to SEQ ID NO: 7120

SEQ ID NO: 8835 - protein, 224 aa, Escherichia coli; identical to SEQ ID NO: 3578

SEQ ID NO: 8836 - protein, 430 aa, Escherichia coli; identical to SEQ ID NO: 6998

SEQ ID NO: 8837 - protein, 614 aa, Escherichia coli; identical to SEQ ID NO: 4469

SEQ ID NO: 8838 - protein, 252 aa, Escherichia coli; identical to SEQ ID NO: 5502

SEQ ID NO: 8839 - protein, 860 aa, Escherichia coli; identical to SEQ ID NO: 7103

SEQ ID NO: 8840 - protein, 700 aa, Escherichia coli; identical to SEQ ID NO: 5110

SEQ ID NO: 8841 - protein, 871 aa, Escherichia coli; identical to SEQ ID NO: 6388

SEQ ID NO: 8842 - protein, 539 aa, Escherichia coli; identical to SEQ ID NO: 5109

SEQ ID NO: 8843 - protein, 746 aa, Escherichia coli; identical to SEQ ID NO: 5132

SEQ ID NO: 8844 - protein, 161 aa, Escherichia coli; identical to SEQ ID NO: 2582

SEQ ID NO: 8845 - protein, 208 aa, Escherichia coli; identical to SEQ ID NO: 1949

SEQ ID NO: 8846 - protein, 118 aa, Escherichia coli [sequence omitted]

SEQ ID NO: 8847 - protein, 224 aa, Escherichia coli; identical to SEQ ID NO: 3115

SEQ ID NO: 8848 - protein, 627 aa, Escherichia coli; identical to SEQ ID NO: 3529

SEQ ID NO: 8849 - protein, 660 aa, Escherichia coli; identical to SEQ ID NO: 6291

SEQ ID NO: 8850 - protein, 230 aa, Escherichia coli; identical to SEQ ID NO: 2995

SEQ ID NO: 8851 - protein, 203 aa, Escherichia coli; identical to SEQ ID NO: 2201

SEQ ID NO: 8852 - protein, 517 aa, Escherichia coli; identical to SEQ ID NO: 2462

SEQ ID NO: 8853 - protein, 729 aa, Escherichia coli; identical to SEQ ID NO: 5131

SEQ ID NO: 8854 - protein, 613 aa, Escherichia coli
MFWRDMTLSIWRKKTTGLKTKKRLLPLMLAAALCSSPVWAEEATFTANFKDTDLKSFIETVGANLNKTIIMGPGVQGKVSIRTMTPLNERQYYQLFLNLLEAQGYAVVPMENDVLKVVKSSAAKVEPLPLVGEGSDNYAGDEMVTKVVPVRNVSVRELAPILRQMIDSAGSGNVVNYDPSNVIMLTGRASVVERLTEVIQRVDHAGNRTEEVIPLDNASASEIARVLESLTKNSGENQPATLKSQIVADERTNSVIVSGDPATRDKMRRLIRRLDSEMERSGNSQVFYLKYSKAEDLVDVLKQVSGTLTAAKEEAEGTVGSGREVVSIAASKHSNALIVTAPQDIMQSLQSVIEQLDIRRAQVHVEALIVEVAEGSNINFGVQWGSKDAGLMQFANGTQIPIGTLGAAISAAKPQKGSTVISENGATTINPDTNGDLSTLAQLLSGFSGTAVGVVKGDWMALVQAVKNDSSSNVLSTPSITTLDNQEAFFMVGQDVPVLTGSTVGSNNSNPFNTVERKKVGIMLKVTPQINEGNAVQMVIEQEVSKVEGQTSLDVVFGERKLKTTVLANDGELIVLGGLMDDQAGESVAKVPLLGDIPLIGNLFKSTADKKKT

SEQ ID NO: 8855 - protein, 111 aa, Escherichia coli; identical to SEQ ID NO: 5097

SEQ ID NO: 8856 - protein, 746 aa, Escherichia coli; identical to SEQ ID NO: 2949

SEQ ID NO: 8857 - protein, 193 aa, Escherichia coli; identical to SEQ ID NO: 2250

SEQ ID NO: 8858 - protein, 518 aa, Escherichia coli; identical to SEQ ID NO: 2349

SEQ ID NO: 8859 - protein, 760 aa, Escherichia coli; identical to SEQ ID NO: 2078

SEQ ID NO: 8860 - protein, 241 aa, Escherichia coli
MFPLVKKTVSALFVSTLLASAPAFADIIISGTRIIYNADKKDVNVRLENKGNRPLLIQNWLDTGDDNADPSQIKVPFTATPPVSRVEPKRGQTVKVMYTGATALPKDRESVYWFNVLEVPPKPKDAEADKNLLQLAFRTRIKLFYRPSGLQGEPAEAPAKITWKLNNAQLQANNPTPYYVSFNEVKLESGGKTYNVNSSMVTPFSQASFGVTGLPGSVSSGKVVFKAINDFGGNIDGSATF

SEQ ID NO: 8861 - protein, 274 aa, Escherichia coli; identical to SEQ ID NO: 2891

SEQ ID NO: 8862 - protein, 840 aa, Escherichia coli; identical to SEQ ID NO: 3591

SEQ ID NO: 8863 - protein, 715 aa, Escherichia coli; identical to SEQ ID NO: 6954

SEQ ID NO: 8864 - protein, 331 aa, Escherichia coli; identical to SEQ ID NO: 2705

SEQ ID NO: 8865 - protein, 394 aa, Escherichia coli
MKRKVLAMLVPALLVAGAANAAEIYNKDGNKLDLYGKVAGLHYFSDDASSDGDMSYARIGFKGETQIADQFTGYGQWEFNIGANGPESDKGNTATRLAFAGFGFGQNGTFDYGRNYGVVYDVEAWTDMLPEFGGDTYAGADNFMNGRANSVATYRNNGFFGQVDGLNFALQYQGNNEKSGLFDQEGSGNGNGRKLAKENGDGYGMSTSYDFDFGLSLGAAYSNSDRTDNQVHKGTHNTRYGDRFDATAGGETAEAWTVGAKYDANNVYLAAMYAETRNMTGYGDADAIANKTQNFEVVAQYQFDFGLRPSIAYLQSKGKDLGGVNSDNFDSQGNHHYTNKDLVKYVDIGMTYYFNKNMSTYVDYKINLLDNDDFYKENGIATDDIVAVGLVYQF

SEQ ID NO: 8866 - protein, 407 aa, Escherichia coli; identical to SEQ ID NO: 6407

SEQ ID NO: 8867 - protein, 162 aa, Escherichia coli; identical to SEQ ID NO: 1965

SEQ ID NO: 8868 - protein, 226 aa, Escherichia coli; identical to SEQ ID NO: 7160

SEQ ID NO: 8869 - protein, 565 aa, Escherichia coli; identical to SEQ ID NO: 5118

SEQ ID NO: 8870 - protein, 170 aa, Escherichia coli; identical to SEQ ID NO: 2565

SEQ ID NO: 8871 - protein, 237 aa, Escherichia coli; identical to SEQ ID NO: 2816

SEQ ID NO: 8872 - protein, 368 aa, Escherichia coli; identical to SEQ ID NO: 5102

SEQ ID NO: 8873 - protein, 165 aa, Escherichia coli; identical to SEQ ID NO: 5130

SEQ ID NO: 8874 - protein, 143 aa, Escherichia coli
MKGLLSLLIFSMVLPAHAGIVIYGTRIIYPAENKEVMVQLMNQGNRSSLLQAWIDDGDTSLPPEKIQVPFMLTPPVAKIGANSGQQVKIKIMPNKLPTNKESIFYLNVLDIPPNSPEQEGKNALKFAMQNRIKLFTGRRVLLR

SEQ ID NO: 8875 - protein, 252 aa, Escherichia coli; identical to SEQ ID NO: 5502

SEQ ID NO: 8876 - protein, 361 aa, Escherichia coli
MKRNILAVIVPALLVAGTANAAEIYNKDGNKVDLYGKAVGLHYFSKGNGENSYGGNGDMTYARLGFKGETQINSDLTGYGQWEYNFQGNNSEGADAQTGNKTRLAFAGLKYADVGSFDYGRNYGVVYDALGYTDMLPEFGGDTAYSDDFFVGRVGGVATYRNSNFFGLVDGLNFAVQYLGKNERDTARRSNGDGVGGSISYEYEGFGIVGAYGAADRTNLQEAQLLGNGKKAEQWATGLKYDANNIYLAANYGETRNATPITNKFTNISGFANKTQDVLLVAQYQFDFGLRPSIAYTKSKAKDVEGIGDVDLVNYFEVGATYYFNKNMSTYVDYIINQIDSDNKLGVASDDTVAVGIVYQF

SEQ ID NO: 8877 - protein, 869 aa, Escherichia coli; identical to SEQ ID NO: 6956

SEQ ID NO: 8878 - protein, 229 aa, Escherichia coli
MTKIKLLMLIIFYLIISASVHAAGGIALGATRIIYPADAKQTAVWIRNSHTNERFLVNSWIENSSGVKEKSFIITPPLFVSEPKSENTLRIIYTGPPLAADRESLFWMNVKTIPSVDKNALNGRNVLQLAILSLMKLFLRPIQLQELPAEAPDTLKFSRSGNYINVHNPSPFYVTLVNLQVGSQKLGNAMAAPRVNSQIPLPSGVQGKLKFQTVNDYGSVTPVREVNLN

SEQ ID NO: 8879 - protein, 678 aa, Escherichia coli; identical to SEQ ID NO: 6376

SEQ ID NO: 8880 - protein, 445 aa, Escherichia coli; identical to SEQ ID NO: 4474

SEQ ID NO: 8881 - protein, 826 aa, Escherichia coli; identical to SEQ ID NO: 5098

SEQ ID NO: 8882 - protein, 630 aa, Escherichia coli; identical to SEQ ID NO: 7127

SEQ ID NO: 8883 - protein, 166 aa, Escherichia coli
MVGPPGPKGEQGPAGPQGPKGDKGERGDTGPVGATGERGPAGDAGPAGPQGPKGDRGERGETGLTGNAGPQGPKGDTGAAGPAGPQGPKGETGAAGPVGATGPQGPKGDPGETQIRFRLGPASIIETNSNGWFPGTDGALITGLTFLPPKMPHGFRVFSAFAGQVW

SEQ ID NO: 8884 - protein, 241 aa, Escherichia coli; identical to SEQ ID NO: 2887

SEQ ID NO: 8885 - protein, 386 aa, Escherichia coli; identical to SEQ ID NO: 3600

SEQ ID NO: 8886 - protein, 614 aa, Escherichia coli; identical to SEQ ID NO: 4469

SEQ ID NO: 8887 - protein, 351 aa, Escherichia coli; identical to SEQ ID NO: 2872

SEQ ID NO: 8888 - protein, 162 aa, Escherichia coli; identical to SEQ ID NO: 1969

SEQ ID NO: 8889 - protein, 857 aa, Escherichia coli
MSRKTVSRTFSSFSISVVAVAVASTFSAHAGKFNPKFLEDVQGVGQHVDLTMFEKGQEQQLPGIYRVSVYVNEQRMETRTLEFKEATEAQRKAMGESLVPCLSRTQLAEMGVRVESFPALNLVSAEACVPFDEIIPLASSHFDFSEQKLVLSFPQAAMHQVARGTVPESLWDEGIPALLLDYSFSGSNSEYDSTGSSSSYVDDNGTVHHDDGKDTLKSDSYYLNLRSGLNLGAWRLRNYSTWSHSGGKAQWDNIGTSLSRAIIPFKAQLTMGDTATAGDIFDSVQMRGAMLASDEEMLPDSQRGFAPIVRGIAKSNAEVSIEQNGYVIYRTYVQPGAFEINDLYPTANSGDLTVIIKEADGSEQRFIQPFSSVPIFQREGHLKYSFAAGEYQAGNYDSASPRFGQLDLIYGLPWGMTAYGGVLISNNYNAFALGIGKNFGYIGAISIDVTQAKSELNNDRDSQGQSYRFLYSKSFESGTDFRLAGYRYSTSGFYTFQEATDVRSDADSDYNRYHKRSEIQGNLTQQLGAYGSVYLNLTQQDYWNDAGKQNTVSAGYNGRIGKVSYSIAYSWNKSPEWDESDRLWSFNISVPLGRAWSNYRVTTDQDGRTNQQVGVSGTLLEDRNLSYSVQEGYASNGVGNSGNANVGYQGGSGNVNVGYSYGKDYRQLNYSVRGGVIVHSEGVTLSQPLGETMTLISVPGARNARVVNNGGVQVDWMGNAIVPYAMPYRENEISLRSDSLGDDVDVENAFQKVVPTRGAIVRARFDTRVGYRVLMTLLRSAGSPVPFGATATLITDKQNEVSSIVGEEGQLYISGMPEEGRVLIKWGNDASQQCVAPYKLSLELKQGGIIPVSANCQ

SEQ ID NO: 8890 - protein, 216 aa, Escherichia coli
MAMMVAGRAEAGVALGATRIIYPAGQKQVQLAVTNNDENSTYLIQSWVENADGVKDGRFIVTPPLFAMKGKKENTLRILDATNNQLPQDRESLFWMNVKAIPSMDKSKLTENTLQLAIISRIKLYYRPAKLALPPDQAAEKLRFRRSANSLTLINPTLYYLTVTELNAGARVLENALVPPMGESTVKLPSDAGSNITYRTINDYGALTPKMTGVME

SEQ ID NO: 8891 - protein, 229 aa, Escherichia coli
MMKSKFVALALSLFLSQSVLAGGVGLSSTRVIYDCSKKEASLTVQNKSKTEEFLIQSWVDDAAGSKKTPFIITPPLFKLDPEKNNILRIVNITPGLPQDRESVYWVNVKAIPSKSDDSENKNVLQIAVRTRIKLFYRPAGLKGDVKTAPNELRFTRNGNQLRVDNPTVFNITFNQFFANDKEIEKAGMVPAKGALNITLPAGVGSVSKIKYNTINDFGSSAEMITKNVD

SEQ ID NO: 8892 - protein, 656 aa, Escherichia coli; identical to SEQ ID NO: 6440

SEQ ID NO: 8893 - protein, 729 aa, Escherichia coli; identical to SEQ ID NO: 2948

SEQ ID NO: 8894 - protein, 567 aa, Escherichia coli
MKIKLRITIILISVLCIFNGLLTPGAYAAAANGYVANKENLRSFFETVSSYAGKPTIVSKLAMKKQISGNFDLTEPYALIERLSAQMGLIWYDDGKAIYIYDSSEMRNALINLRKVSTNEFNNFLKKSGLYNSRYEIKGDGNGTFYVSGPPVYVDLVVNAAKLMEQNSDGIEIGRNKVGIIHLVNTFVNDRTYELRGEKIVIPSMAKVLSTLLNNNIKQSTGVNVLSEISSRQQLKNVSRMPPFPGAEEDDDLQVEKIISTAGAPETDDIQIIAYPDTNSLLVKGTVSQVDFIEKLVATLDIPKRHIELSLWIIDIDKTDLEQLGADWSGTIKIGSSLSASFNNSGSISTLDGTQFIATIQALAQKRRAAVVARPVVLTQENIPAIFDNNRTFYTKLVGERTAELDEVTYGTMISVLPRFAARNQIELLLNIEDGNEINSDKTNVDDLPQVGRTLISTIARVPQGKSLLIGGYTRDTNTYESRKIPILGSIPFIGKLFGYEGTNANNIVRVFLIEPREIDERMMNNANEAAVDARAITQQMAKNKEINDELLQKWIKTYLNREVVGG

SEQ ID NO: 8895 - protein, 118 aa, Escherichia coli [sequence omitted]

SEQ ID NO: 8896 - protein, 193 aa, Escherichia coli; identical to SEQ ID NO: 2246

SEQ ID NO: 8897 - protein, 472 aa, Escherichia coli; identical to SEQ ID NO: 3900

SEQ ID NO: 8898 - protein, 266 aa, Escherichia coli; identical to SEQ ID NO: 1894

SEQ ID NO: 8899 - protein, 224 aa, Escherichia coli
MTVSLTAILLSCSSTWAAGKGGVELAATRLVYSEGEEQISLGVRNTSPDVPYLIQSWVMTPDNKKSADFIITPPLFVLNPANENLLRIMYIGAPLAKDRETLFFTSVRAVPSTTKREEGNTLKIATQSVIKLFWRPKGLAYPLGEAPAKLRCTSSADMVTVSNPTPYFITLTDLKIGGKLVKNQMISPFDKYQFSLPKGAKNSSVTYRTINDYGAETPQLNCKS

SEQ ID NO: 8900 - protein, 869 aa, Escherichia coli
MKIPTTTDIPQRYTWCLAGICYSSLAILPSFLSYAESYFNPAFLLENGTSVADLSRFERGNHQPAGVYRVDLWRNDEFIGSQDIVFESTTENTGDKSGGLMPCFNQVLLERIGLNSSAFPELAQQQNNKCINLLKAVPDATINFDFAAMRLNITIPQIALLSSAHGYIPPEEWDEGVPALLLNYNFTGNRGNGNDSYFFSELSGINIGPWRLRNNGSWNYFRGNGYHSEQWNNIGTWVQRAIIPLKSELVMGDGNTGSDIFDGVGFRGVRLYSSDNMYPDSQQGFAPTVRGIARTAAQLTIRQNGFIIYQSYVSPGAFEITDLHPTSSNGDLDVTIDERDGNQQNYTIPYSTVPILQREGRFKFDLTAGDFRSGNSQQSSPFFFQGTALGGLPQEFTAYGGTQLSANYTAFLLGLGRNLGNWGAVSLDVTHARSQLADDSRHEGDSIRFLYAKSMNTFGTNFQLMGYRYSTQGFYTLDDVAYRRMEGYEYDYDYDGEHRDEPIIVNYHNLRFSRKDRLQLNISQSLNDFGSLYISGTHQKYWNTSDSDTWYQVGYTSSWVGISYSLSFSWNESVGIPDNERIVGLNVSVPFNVLTKRRYTRENALDRAYASFNANRNSNGQNSWLAGVGGTLLEGHNLSYHVSQGDTSNNGYTGSATANWQAAYGTLGVGYNYDRDQHDVNWQLSGGVVGHENGITLSQPLGDTNVLIKAPGAGGVRIENQTGILTDWRGYAVMPYATVYRYNRIALDTNTMGNSIDVEKNISSVVPTQGALVRANFDTRIGVRALITVTQGGKPVPFGSLVRENSTGITSMVGDDGQVYLSGAPLSGELLVQWGDGANSRCIAHYVLPKQSLQQAVTVISAVCTHPGS

SEQ ID NO: 8901 - protein, 551 aa, Escherichia coli; identical to SEQ ID NO: 2446

SEQ ID NO: 8902 - protein, 193 aa, Escherichia coli; identical to SEQ ID NO: 2250

SEQ ID NO: 8903 - protein, 835 aa, Escherichia coli; identical to SEQ ID NO: 7530

SEQ ID NO: 8904 - protein, 191 aa, Escherichia coli; identical to SEQ ID NO: 2727

SEQ ID NO: 8905 - protein, 238 aa, Escherichia coli
MSVFFRVCLGITVLLTALQVQASVVLGGTRIIYPSNQNEVQITLKNKDAYARYLVQSWVSNIDGSKAPFLITPPVYKLEENRQTLLHIVFTGDKDKLPQDRESLFLANVKSVSAMPEELKDKNILQFAMKARLKLFWRPVSLDNNDALTAWEKLKFHKEAGKLIVKNPTPFYISFNDLTVSGKNIVPVDTKSEPGALLMMVGPFSEQRFSLPAGAGNVVEWSVITDYGSSSGKRKQKL

SEQ ID NO: 8906 - protein, 729 aa, Escherichia coli; identical to SEQ ID NO: 2948

SEQ ID NO: 8907 - protein, 432 aa, Escherichia coli; identical to SEQ ID NO: 2026

SEQ ID NO: 8908 - protein, 243 aa, Escherichia coli; identical to SEQ ID NO: 4409

SEQ ID NO: 8909 - protein, 432 aa, Escherichia coli; identical to SEQ ID NO: 2026

SEQ ID NO: 8910 - protein, 746 aa, Escherichia coli; identical to SEQ ID NO: 2949

SEQ ID NO: 8911 - protein, 228 aa, Escherichia coli
MKSKFVALALSLFLSQSVLAGGVGLSSTRVIYDGSKKEASLTVQNKSKTEEFLIQSWVDDAAGSKKTPFIITPPLFKLDPEKNNILRIVNITPGLPQDRESVYWVNVKAIPSKSDDSENKNVLQIAVRTRIKLFYRPAGLKGDVKTAPNELRFTRNGNQLRVDNPTVFNITFNQFFANDKEIEKAGMVPAKGALNITLPAGVGSVSKIKYNTINDFRSSAEMITKNVD

SEQ ID NO: 8912 - protein, 630 aa, Escherichia coli; identical to SEQ ID NO: 7127

SEQ ID NO: 8913 - protein, 386 aa, Escherichia coli; identical to SEQ ID NO: 3600

SEQ ID NO: 8914 - protein, 678 aa, Escherichia coli; identical to SEQ ID NO: 2902

SEQ ID NO: 8915 - protein, 367 aa, Escherichia coli
MKVKVLSLLVPALLVAGAANAAEVYNKDGNKLDLYGKVDGLHYFSDDKSVDGDQTYMRLGFKGETQVTDQLTGYGQWEYQIQGNSAENENNSWTRVAFAGLKFQDVGSFDYGRNYGVVYDVTSWTDVLPEFGGDTYGSDNFMQQRGNGFATYRNTDFFGLVDGLNFAVQYQGKNGSVSGEGMTNNGREALRQNGDGVGGSITYDYEGFGIGAAVSSSKRTDDQNSPLYIGNGDRAETYTGGLKYDANNIYLAAQYTQTYNATRVGSLGWANKAQNFEAVAQYQFDFGLRPSLAYLQSKGKNLGVINSRNYDDEDILKYVDVGATYYFNKNMSTYVDYKINLLDDNQFTRDAGINTDNIVALGLVYQF

SEQ ID NO: 8916 - protein, 514 aa, Escherichia coli
MCNEKNKFFIFTALFCCSAQAAPSSLEKRLGKNEYFIITKSSPVRAILNDFAANYSIPVFISSSVNDDFSGEIKNEKPVKVLEKLSKLYHLTWYYDENILYIYKTNEISRSIITPTYLDIDSLLKYLSDTISVNKNSCNVRKITTFNSIEVRGVPECIKYITSLSESLDKEAQSKAKNKDVVKVFKLNYASATDITYKYRDQNVVVPGVVSILKTMASNGSLPSTGKGAVERSGNLFDNSVTISADPRLNAVVVKDREITMDIYQQLISELDIEQRQIEISVSIIDVDANDLQQLGVNWSGTLNAGQGTIAFNSSTAQANISSSVISNASNFMIRVNALQQNSKAKILSQPSIITLNNMQAILDKNVTFYTKVSGEKVASLESITSGTLLRVTPRILDDSSNSLTGKRRERVRLLLDIQDGNQSTNQSNAQDASSTLPEVQNSEMTTEATLSAGESLLLGGFIQDKESSSKDGIPLLSDIPVIGSLFSSTVKQKHSVVRLFLIKATPIKSASSE

SEQ ID NO: 8917 - protein, 386 aa, Escherichia coli; identical to SEQ ID NO: 5143

SEQ ID NO: 8918 - protein, 539 aa, Escherichia coli; identical to SEQ ID NO: 3050

SEQ ID NO: 8919 - protein, 656 aa, Escherichia coli; identical to SEQ ID NO: 6982

SEQ ID NO: 8920 - protein, 226 aa, Escherichia coli; identical to SEQ ID NO: 7160

SEQ ID NO: 8921 - protein, 111 aa, Escherichia coli; identical to SEQ ID NO: 2911

SEQ ID NO: 8922 - protein, 359 aa, Escherichia coli; identical to SEQ ID NO: 2329

SEQ ID NO: 8923 - protein, 200 aa, Escherichia coli; identical to SEQ ID NO: 1788

SEQ ID NO: 8924 - protein, 162 aa, Escherichia coli; identical to SEQ ID NO: 1969

SEQ ID NO: 8925 - protein, 208 aa, Escherichia coli; identical to SEQ ID NO: 1948

SEQ ID NO: 8926 - protein, 838 aa, Escherichia coli
MPQRHHQGHKRTPKQLALIIKRCLPMVLTGSGMLCTTANAEEYYFDPIMLETTKSGMQTTDLSRFSKKYAQLPGTYQVDIWLNKKKVSQKKITFTANAEQLLQPQFTVEQLRELGIKVDEIPALAEKDDDSVINSLEQIIPGTAAEFDFNHQRLNLSIPQIALYRDARGYVSPSRWDDGIPTLFTNYSFTGSDNRYRQGNRSQRQYLNMQNGANFGPWRLRNYSTWTRNDQASSWNTISSYLQRDIKALKSQLLLGESATSGSIFSSYNFTGVQLASDDNMLPNSQRGFAPTVRGIANSSAIVTIRQNGYVIYQSNVPAGAFEINDLYPSSNSGDLEVTIEESDGTQRRFIQPYSSLPMMQRPGHLKYSATAGRYRADANSDSKEPEFAEATAIYGLNNTFTLYGGLLGSEDYYALGIGIGGTLGALGALSMDINRADTQFDNQHSFHGYQWRTQCIKDIPETNTNIAVSYYRYTNDGYFSFDEANTRNWDYNSRQKSEIQFNISQTIFDGVSLYASGSQQDYWGNNEKNRNISVGVSGQQWGIGYSLNYQYSRYTDQNNDRALSLNLSIPLERWLPRSRVSYQMTSQKDRPTQHEMRLDGSLLDDGRLSYSLEQSLDDDNNHNSSVNASYRSPYGTFSAGYSYGNDSSQYNYGVTGGVVIHPHGVTLSQYLGNAFALIDANGASGVRIQNYPGIATDPFGYAVVPYLTTYQENRLSVDTTQLPDNVDLEQTTQFVVPNRGAMVAARFNANIGYRVLVTVSDRNGKPLPFGALASNDDTGQQSIVDEGGILYLSGISSKSQSWTVRWGNQADQQCQFAFSTPDSEPTISVLQGTAQCH

SEQ ID NO: 8927 - protein, 121 aa, Escherichia coli; identical to SEQ ID NO: 5349

SEQ ID NO: 8928 - protein, 236 aa, Escherichia coli; identical to SEQ ID NO: 3482

SEQ ID NO: 8929 - protein, 615 aa, Escherichia coli
MFWRDITLSVWRKKTTGLKTKKRLLPLVLAAALCSSPVWAEEATFTANFKDTDLKSFIETVGANLNKTIIMGPGVQGKVSIRTMTPLNERQYYQLFLNLLEAQGYAVVPMENDVLKVVKSSAAKVEPLPLVGEGSDNYAGDEMVTKVVPVRNVSVRELAPILRQMIDSAGSGNVVNYDPSNVIMLTGRASVVERLTEVIQRVDHAGNRTEEVIPLDNASASEIARVLESLTKNSGENQPATLKSQIVADERTNSVIVSGDPATRDKMRRLIRRLDSEMERSGNSQVFYLKYSKAEDLVDVLKQVSGTLTAAKEEAEGTVGSGREVVSIAASKHSNALIVTAPQDIMQSLQSVIEQLDIRRAQVHVEALIVEVAEGSNINFGVQWASKDAGLMQFANGTQIPIGTLGAAISQAKPQKGSTVISENGATTINPDTNGDLSTLAQLLSGFSGTAVGVVKGDWMALVQAVKNDSSSNVLSTPSITTLDNQEAFFMVGQDVPVLTGSTVGSNNSNPFNTVERKKVGIMLKVTPQINEGNAVQMVIEQEVSKVEGQTSLDVVFGERKLKTTVLANDGELIVLGGLMDDQAGESVAKVPLLGDIPLIGNLFKSTADKKKNVT

SEQ ID NO: 8930 - protein, 660 aa, Escherichia coli; identical to SEQ ID NO: 6993

SEQ ID NO: 8931 - protein, 514 aa, Escherichia coli; identical to SEQ ID NO: 3590

SEQ ID NO: 8932 - protein, 446 aa, Escherichia coli; identical to SEQ ID NO: 2180

SEQ ID NO: 8933 - protein, 170 aa, Escherichia coli; identical to SEQ ID NO: 2564

SEQ ID NO: 8934 - protein, 203 aa, Escherichia coli; identical to SEQ ID NO: 2201

SEQ ID NO: 8935 - protein, 274 aa, Escherichia coli; identical to SEQ ID NO: 2301

SEQ ID NO: 8936 - protein, 233 aa, Escherichia coli; identical to SEQ ID NO: 3548

SEQ ID NO: 8937 - protein, 203 aa, Escherichia coli; identical to SEQ ID NO: 2009

SEQ ID NO: 8938 - protein, 191 aa, Escherichia coli; identical to SEQ ID NO: 2727

SEQ ID NO: 8939 - protein, 200 aa, Escherichia coli; identical to SEQ ID NO: 1788

SEQ ID NO: 8940 - protein, 713 aa, Escherichia coli; identical to SEQ ID NO: 3523

SEQ ID NO: 8941 - protein, 627 aa, Escherichia coli; identical to SEQ ID NO: 3529

SEQ ID NO: 8942 - protein, 191 aa, Escherichia coli; identical to SEQ ID NO: 2727

SEQ ID NO: 8943 - protein, 837 aa, Escherichia coli
MSSAELYFNPRFLADDPQAVADLSRFENGQELPPGTYRVDIYLNNGYMATRDVTFNTGDSEQGIVPCLTRAQLASMGLNTASVAGMNLLADDACVPLTTMVQDATAHLDVGQQRLNLTIPQAFMSNRARGYIPPELWDPGINAGLLNYNFSGNSVQNRIGGNSHYAYLNLQSGLNIGAWRLRDNTTWSYNSSDRSSGSKNKWQHINTWLERDIIPLRSRLTLGDGYTQGDIFDGINFRGAQLASDDNMLPDSQRGFAPVIHGIARGTAQVTIKQNGYDIYNSTVPPGPFTINDIYAAGNSGDLQVTIKEADGSTQIFTVPYSSVPLLQREGHTRYSITAGEYRSGNAQQEKPRFFQSTLLHGLPAGWTIYGGTQLADRYRAFNFGIGKNMGALGALSVDMTQANSTLPDDSQHDGQSVRFLYNKSLNESGTNIQLVGYRYSTSGYFNFADTTYSRMNGYNIETQDGVIQVKPKFTDYYNLAYNKRGKLQLTVTQQLGRSSTLYLSGSHQTYWGTSNVDEQFQAGLNTAFEDINWTLSYSLTKNAWQKGRDQMLALNVNIPFSHWLRSDSKSQWRHASASYSMSHDLNGRMTNLAGVYGTLLEDNNLSYSVQTGYAGGGDGNSGSTGYATLNYRGGYGNANIGYSHSDDIKQLYYGVSGGVLAHANGVTLGQPLNDTVVLVKAPGAKDAKVENQTGVRTDWRGYAVLPYATEYRENRVALDTNTLADNVDLDNAVANVVPTRGAIVRAEFKARVGIKLLMTLTHNNKPLPFGAMVTSESSQSSGIVADNGQVYLSGMPLAGKVQVKWGEEENAHCVANYQLPSESQQQLLTQLSAECR

SEQ ID NO: 8944 - protein, 512 aa, Escherichia coli; identical to SEQ ID NO: 2813

SEQ ID NO: 8945 - protein, 863 aa, Escherichia coli
MHIRKHRLAGFFVRLFVACAFAVQAPLSSAELYFNPRFLADDPQAVADLSRFENGQELPPGTYRVDIYLNNGYMATRDVTFNTGDSEQGIVPCLTRAQLASMGLNTASVAGMNLLADDACVPLTTMVQDATAHLDVGQQRLNLTIPLAFMSNRARGYIPPELWDPGINAGLLNYNFSGNSVQNRIGGNSHYAYLNLQSGLNIGAWRLRDNTTWSYNSSDRSSGSKNKWQHINTWLERDIIPLRSRLTLGDGYTQGDIFDGINFRGAQLASDDNMLPDSQRGFAPVIHGIARGTAQVTIKQNGYDIYNSTVPPGPFTINDIYAAGNSGDLQVTIKEADGSTQIFTVPYSSVPLLQREGHTRYSITAGEYRSGNAQQEKPRFFQSTLLHGLPAGWTIYGGTQLADRYRAFNFGIGKNMGALGALSVDMTQANSTLPDDSQHDGQSVRFLYNKSLNESGTNIQLVGYRYSTSGYFNFADTTYSRMNGYNIETQDGVIQVKPKFTDYYNLAYNKRGKLQLTVTQQLGRSSTLYLSGSHQTYWGTSNVDEQFQAGLNTAFEDINWTLSYSLTKNAWQKGRDQMLALNVNIPFSHWLRSDSKSQWRHASASYSMSHDLNGRMTNLAGVYGTLLEDNNLSYSVQTGYAGGGDGNSGSTGYATLNYRGGYGNANIGYSHSDDIKQLYYGVSGGVLAHANGVTLGQPLNDTVVLVKAPGAKDAKVENQTGVRTDWRGYAVLPYATEYRENRVALDTNTLADNVDLDNAVANVVPTRGAIVRAEFKARVGIKLLMTLTHNNKPLPFGAMVTSESSQSSGIVADNGQVYLSGMPLAGKVQVKWGEEENAHCVANYQLPPESQQQLLTQLSAECR

SEQ ID NO: 8946 - protein, 331 aa, Escherichia coli; identical to SEQ ID NO: 5128

SEQ ID NO: 8947 - protein, 816 aa, Escherichia coli; identical to SEQ ID NO: 4456

SEQ ID NO: 8948 - protein, 224 aa, Escherichia coli; identical to SEQ ID NO: 6030

SEQ ID NO: 8949 - protein, 780 aa, Escherichia coli; identical to SEQ ID NO: 3607

SEQ ID NO: 8950 - protein, 203 aa, Escherichia coli; identical to SEQ ID NO: 2201

SEQ ID NO: 8951 - protein, 209 aa, Escherichia coli; identical to SEQ ID NO: 3547

SEQ ID NO: 8952 - protein, 213 aa, Escherichia coli; identical to SEQ ID NO: 2232

SEQ ID NO: 8953 - protein, 863 aa, Escherichia coli; identical to SEQ ID NO: 3946

SEQ ID NO: 8954 - protein, 720 aa, Escherichia coli; identical to SEQ ID NO: 6178

SEQ ID NO: 8955 - protein, 678 aa, Escherichia coli; identical to SEQ ID NO: 2902

SEQ ID NO: 8956 - protein, 266 aa, Escherichia coli; identical to SEQ ID NO: 1892

SEQ ID NO: 8957 - protein, 746 aa, Escherichia coli; identical to SEQ ID NO: 2949

SEQ ID NO: 8958 - protein, 838 aa, Escherichia coli; identical to SEQ ID NO: 2916

SEQ ID NO: 8959 - protein, 193 aa, Escherichia coli; identical to SEQ ID NO: 2250

SEQ ID NO: 8960 - protein, 361 aa, Escherichia coli; identical to SEQ ID NO: 3601

SEQ ID NO: 8961 - protein, 351 aa, Escherichia coli; identical to SEQ ID NO: 2872

SEQ ID NO: 8962 - protein, 359 aa, Escherichia coli; identical to SEQ ID NO: 2332

SEQ ID NO: 8963 - protein, 747 aa, Escherichia coli; identical to SEQ ID NO: 6089

SEQ ID NO: 8964 - protein, 645 aa, Escherichia coli
MGAANCPGDAKENDASNPWRYVRAATATEITQYGNPASCSVKPDNNGGAVTPVDPTPETPETPVTPTPDNNEPSTPADSSNDYSLQAWSGQEGSEIYHVIFNGNVYQNAWWVGSEDCPRGTSVENSNNPWRLVRTATAAEMSQYGNPTTCEIDNGGVIIADGFQASKAYSANSIVDYNDAHYKTSVDQDAWGFVPGGDNPWKKYEPAKAWSASTVYVKGDRVVVDGQAYEALFWTQSDNPALIANQNATGSNSRPWKPLGKTHSYSNEELNNAPQFNPETLYASDTLIRFNGENYISQSKVQKVSPSDSNPWRVFVDWTGTKERVGTPKKAWPKHVYAPYVDFTLNTIPDLAALAKSHNVNHFTLAFVVSKDANTCLPTWGTAYGMQNYAQYSKIKALREAGGDVMLSIGGANNAPLAASCKNVDDLMQHYYDIVDNLNLRVLDFDIEGTWVADQASIERRNLAVKKVQDKWKSEGKDIAIWYTLPILPTGLTPEGMNVLSDAKAKGVELAGVNVMTMDYGNAICQSANTEGQNIHGKCATSAIANLHSQLKGLHPNKSDAEIDAMMGTTPMVGVNDVQGEVFYLSDARLVMQDAQKRNLGMVGIWSIARDLPGGTNLSPEFHGLTKEQAPKYAFSEIFAPFTKQ

SEQ ID NO: 8965 - protein, 518 aa, Escherichia coli; identical to SEQ ID NO: 2351

SEQ ID NO: 8966 - protein, 236 aa, Escherichia coli; identical to SEQ ID NO: 3970

SEQ ID NO: 8967 - protein, 660 aa, Escherichia coli; identical to SEQ ID NO: 6740

SEQ ID NO: 8968 - protein, 386 aa, Escherichia coli; identical to SEQ ID NO: 3600

SEQ ID NO: 8969 - protein, 700 aa, Escherichia coli; identical to SEQ ID NO: 2926

SEQ ID NO: 8970 - protein, 173 aa, Escherichia coli
MALLIFAVLSLLVAGELQAGVVVGGTRFIFPADRESISILLTNTSQESWLINRKINRPTRWAGGEASTVPAPLLAAPPLILLKPGTTGTLRLLRTESDILPVDRETLFELSIASVPSGKVENQSVKVAMRSVFKLFWRPEGCRATRWKLINNYAGHGSRRVYNSLTQRLITLT

SEQ ID NO: 8971 - protein, 331 aa, Escherichia coli; identical to SEQ ID NO: 2705

SEQ ID NO: 8972 - protein, 656 aa, Escherichia coli; identical to SEQ ID NO: 4901

SEQ ID NO: 8973 - protein, 432 aa, Escherichia coli; identical to SEQ ID NO: 2026

SEQ ID NO: 8974 - protein, 862 aa, Escherichia coli; identical to SEQ ID NO: 7218

SEQ ID NO: 8975 - protein, 125 aa, Escherichia coli; identical to SEQ ID NO: 6182

SEQ ID NO: 8976 - protein, 241 aa, Escherichia coli; identical to SEQ ID NO: 3582

SEQ ID NO: 8977 - protein, 391 aa, Escherichia coli
MTVKISGVLKDGTGKPVQNCTIVLKARRTSSTVVVNTVASENPDEAGRYSMDVEYGQYSVILLVEGFPPSHAGTITVYEDSQPGTLNDFLGAMSEDDVRPEALRRFELMVEEAARHAEEAKKNAGEAETSARNAGISASQAEENAANADTSAGDASESARQAAESAAAAKQSEEASSSSASAAAQKASESLQSATDAELSKKTAESAAGNAARDATTAAEKARESAESAQSAEQSRIAAEEAVNRIPTVVGPPGPKGEPGPAGPQGPKGDKGERGDTGPAGATGERGPAGDAGPAGPQGPKGDRGERGETGLTGNAGPQGPKGDTGAAGPAGPQGPKGETGAVARWGQPDLRDRRATRGRHKSVFVWGRRALLRQTAMAGSRVQMVRSSPD

SEQ ID NO: 8978 - protein, 161 aa, Escherichia coli; identical to SEQ ID NO: 2582

SEQ ID NO: 8979 - protein, 232 aa, Escherichia coli; identical to SEQ ID NO: 2087

SEQ ID NO: 8980 - protein, 729 aa, Escherichia coli; identical to SEQ ID NO: 2948

SEQ ID NO: 8981 - protein, 678 aa, Escherichia coli; identical to SEQ ID NO: 2230

SEQ ID NO: 8982 - protein, 760 aa, Escherichia coli; identical to SEQ ID NO: 2081

SEQ ID NO: 8983 - protein, 332 aa, Escherichia coli; identical to SEQ ID NO: 2702

SEQ ID NO: 8984 - protein, 246 aa, Escherichia coli
MKSPLITTGMICLLGICNFAQATVSPDRTRIIFNASNKSATVRLTNQSKIDPYLAQSWIEDASGKKTRDYISTLPPMERIEPDEQIQIRLMALASLNDLPQDRETLFYYNVREIPPRAKEQNVMQIAMQSRLKLFWRPKAIELKEGEMIPLQKVTITRTAAGLTLNNPTPYHITVGYIGTNGKTLMPGADSIMVVPFTSATQHLSSLPSTFQLGFVADYGGLEMFKVECNSIQSLCQTSPAKKGKI

SEQ ID NO: 8985 - protein, 517 aa, Escherichia coli; identical to SEQ ID NO: 2462

SEQ ID NO: 8986 - protein, 430 aa, Escherichia coli; identical to SEQ ID NO: 2617

SEQ ID NO: 8987 - protein, 266 aa, Escherichia coli; identical to SEQ ID NO: 3745

SEQ ID NO: 8988 - protein, 784 aa, Escherichia coli; identical to SEQ ID NO: 2241

SEQ ID NO: 8989 - protein, 60 aa, Escherichia coli
MTKNVSLTGGVDNLFDKRLWRAGNAQTTGDLAGANYIAGAGAYTYNEPGRTWYMSINTHF

SEQ ID NO: 8990 - protein, 241 aa, Escherichia coli; identical to SEQ ID NO: 2922

SEQ ID NO: 8991 - protein, 551 aa, Escherichia coli; identical to SEQ ID NO: 2452

SEQ ID NO: 8992 - protein, 478 aa, Escherichia coli; identical to SEQ ID NO: 2405

SEQ ID NO: 8993 - protein, 111 aa, Escherichia coli; identical to SEQ ID NO: 3419

SEQ ID NO: 8994 - protein, 446 aa, Escherichia coli; identical to SEQ ID NO: 2177

SEQ ID NO: 8995 - protein, 654 aa, Escherichia coli; identical to SEQ ID NO: 3854

SEQ ID NO: 8996 - protein, 826 aa, Escherichia coli; identical to SEQ ID NO: 3791

SEQ ID NO: 8997 - protein, 363 aa, Escherichia coli; identical to SEQ ID NO: 3839

SEQ ID NO: 8998 - protein, 200 aa, Escherichia coli; identical to SEQ ID NO: 1785

SEQ ID NO: 8999 - protein, 250 aa, Escherichia coli; identical to SEQ ID NO: 3855

SEQ ID NO: 9000 - protein, 207 aa, Escherichia coli; identical to SEQ ID NO: 2213

SEQ ID NO: 9001 - protein, 213 aa, Escherichia coli; identical to SEQ ID NO: 2232

SEQ ID NO: 9002 - protein, 162 aa, Escherichia coli; identical to SEQ ID NO: 1969

SEQ ID NO: 9003 - protein, 207 aa, Escherichia coli; identical to SEQ ID NO: 2211

SEQ ID NO: 9004 - protein, 660 aa, Escherichia coli; identical to SEQ ID NO: 7233

SEQ ID NO: 9005 - protein, 713 aa, Escherichia coli; identical to SEQ ID NO: 4590

SEQ ID NO: 9006 - protein, 241 aa, Escherichia coli; identical to SEQ ID NO: 2887

SEQ ID NO: 9007 - protein, 231 aa, Escherichia coli; identical to SEQ ID NO: 2868

SEQ ID NO: 9008 - protein, 650 aa, Escherichia coli
MNGRLPVLVFTTVILGAIPRWGAEFSANFKDTDIQEFINTVSKNLHKTVIINPDVQGTITVRSYDMLNEEQYYQFFLSVLDVYGFAVVDMHNGILKVVRSKDAKTSAVPVASDVSPGTGDEVVTRVVPVSNVAARDLAPLLRQLNDNAGAGSVVHYEPSNVLLMTGRAAVMKRLMEIVERVDKVGNRSVATVPLTYASATDVARLVTELTKETDKTAIPAWMTAKLVADERTNSVLVSGEPISQQRIISIIKQLDRQEDVQGNTKVIYLKYAKAKDLVEVLTGISSSIENDSKKSPSTEALRKGVTIKSHEQTNALILTGAPDVIRDLENVISQLDIRRPQVLVEAIIAEIQDADGLNLGIQWVNKHAGVAQFTSTGLPITTMVQTRQNEILDSDQSNALSMFNGIAAGFYQGNWAMLLTALSTSSKNDILATPSIVTLDNMEATFNVGQEVPVLSGSQTTSGDNIFNTVERKTVGIKLRVKPQINEGDSVLLEIEQEVSGVADTAVATTTDLGATFNTRTVTNAMLVGNGETVVVGGLLDKSIRGSESKVPLLGDIPVLGHLFRAKSEQTAKRNLMLFIRPTIIRERDGFRHASAEKYQSFNQEQVQSRGKETTALTLNEEQLRLSPDQDDTAFRKVKAAIAAFYAQEM

SEQ ID NO: 9009 - protein, 230 aa, Escherichia coli; identical to SEQ ID NO: 2995

SEQ ID NO: 9010 - protein, 229 aa, Escherichia coli; identical to SEQ ID NO: 3589

SEQ ID NO: 9011 - protein, 118 aa, Escherichia coli [sequence omitted]

SEQ ID NO: 9012 - protein, 191 aa, Escherichia coli; identical to SEQ ID NO: 2996

SEQ ID NO: 9013 - protein, 614 aa, Escherichia coli; identical to SEQ ID NO: 1883

SEQ ID NO: 9014 - protein, 432 aa, Escherichia coli; identical to SEQ ID NO: 2026

SEQ ID NO: 9015 - protein, 366 aa, Escherichia coli; identical to SEQ ID NO: 3520

SEQ ID NO: 9016 - protein, 871 aa, Escherichia coli; identical to SEQ ID NO: 3519

SEQ ID NO: 9017 - protein, 224 aa, Escherichia coli; identical to SEQ ID NO: 3604

SEQ ID NO: 9018 - protein, 430 aa, Escherichia coli; identical to SEQ ID NO: 2617

SEQ ID NO: 9019 - protein, 627 aa, Escherichia coli; identical to SEQ ID NO: 3529

SEQ ID NO: 9020 - protein, 816 aa, Escherichia coli; identical to SEQ ID NO: 4456

SEQ ID NO: 9021 - protein, 367 aa, Escherichia coli; identical to SEQ ID NO: 2431

SEQ ID NO: 9022 - protein, 224 aa, Escherichia coli; identical to SEQ ID NO: 3578

SEQ ID NO: 9023 - protein, 370 aa, Escherichia coli; identical to SEQ ID NO: 3599

SEQ ID NO: 9024 - protein, 351 aa, Escherichia coli
MTERELSIIRALGEEFSTVLADLQRTFEGKMAAQAQAFEEKLASLSAVLQKHVTVDEVHPVLQAMVDDAVGTIPVPRDGRDYDPDVLQQAVNDAVANIPVPADGKSITPDDVRPMLEQMVKEAVSHIPAPRDGRDYDPEVLKQAVNDAVANIPVPADGKSITPDDVRPMLEQMVKEAVSHIPVPRDGRDYDPDVLQKAVLDAVRALPAPQDGRDATALEIIPAIDDQKSFPRGTYATHQGGLWRAYEKTHGMRGWECLVDGVADIDVSMTGERSFTVVVRQSSGQRTEKTFSLPVMLYRGVFRAGETYHPGDTVTWGGSLWHCNSMTEDKPGEAHSSAWTLAAKRGRDAGG

SEQ ID NO: 9025 - protein, 840 aa, Escherichia coli; identical to SEQ ID NO: 3591

SEQ ID NO: 9026 - protein, 233 aa, Escherichia coli; identical to SEQ ID NO: 3548

SEQ ID NO: 9027 - protein, 274 aa, Escherichia coli; identical to SEQ ID NO: 2304

SEQ ID NO: 9028 - protein, 252 aa, Escherichia coli; identical to SEQ ID NO: 3543

SEQ ID NO: 9029 - protein, 860 aa, Escherichia coli; identical to SEQ ID NO: 6118

SEQ ID NO: 9030 - protein, 836 aa, Escherichia coli; identical to SEQ ID NO: 4550

SEQ ID NO: 9031 - protein, 878 aa, Escherichia coli; identical to SEQ ID NO: 3957

SEQ ID NO: 9032 - protein, 669 aa, Escherichia coli; identical to SEQ ID NO: 3677

SEQ ID NO: 9033 - protein, 191 aa, Escherichia coli; identical to SEQ ID NO: 2727

SEQ ID NO: 9034 - protein, 203 aa, Escherichia coli; identical to SEQ ID NO: 2009

SEQ ID NO: 9035 - protein, 713 aa, Escherichia coli; identical to SEQ ID NO: 5996

SEQ ID NO: 9036 - protein, 774 aa, Escherichia coli; identical to SEQ ID NO: 3426

SEQ ID NO: 9037 - protein, 884 aa, Escherichia coli; identical to SEQ ID NO: 7254

SEQ ID NO: 9038 - protein, 668 aa, Escherichia coli
MLMTTMPDSCNSWQKCRNKTMNKKIHSLALLVNLGIYGVAQAQEPTDTPVSHDDTIVVTAAEQNLQAPGVSTITADEIRKNPVARDVSEIIRTMPGVNLTGNSTSGQRGNNRQIDIRGMGPENTLILIDGKPVSSRNSVRQGWRGERDTRGDTSWVPPEMIERIEVLRGPAAARYGNGAAGGVVNIITKKGSGEWHGSWDAYFNAPEHKEEGATKRTNFSLTGPLGDEFSFRLYGNLDKTQADAWDINQGHQSARAGTYATTLPAGREGVINKDINGVVRWDFAPLQSLELEAGYSRQGNLYAGDTQNTNSDAYTRSKYGYETNRLYRQNYSLTWNGGWDNGVTTSNWVQYEHTRNSRIPEGLAGGTEGKFNEKAAQDFVDIDLDDVMLHSEVNLPIDFLVNQTLTLGTEWNQQRMKDLSSNTQALTGTNTGGAIDGVSATDRSPYSKAEIFSLFAENNMELTDSTIVTPGLRFDHHSIVGNNWSPALNISQGLGDDFTLKMGIARAYKAPSLYQTNPNYILYSKGQGCYASAGGCYLQGNDDLKAETSINKEIGLEFKRDGWLAGVTWFRNDYRNKIEAGYVAVGQNAVGTDLYQWDNVPKAVVEGLEGSLNVPVSETVMWTNNITYMLKSENKTTGDRLSIIPEYTLNSTLSWQAREDLSMQTTFT

SEQ ID NO: 9039 - protein, 121 aa, Escherichia coli; identical to SEQ ID NO: 2522

SEQ ID NO: 9040 - protein, 224 aa, Escherichia coli; identical to SEQ ID NO: 3792

SEQ ID NO: 9041 - protein, 686 aa, Escherichia coli; identical to SEQ ID NO: 3806

SEQ ID NO: 9042 - protein, 259 aa, Escherichia coli; identical to SEQ ID NO: 3847

SEQ ID NO: 9043 - protein, 673 aa, Escherichia coli; identical to SEQ ID NO: 4735

SEQ ID NO: 9044 - protein, 367 aa, Escherichia coli; identical to SEQ ID NO: 6155

SEQ ID NO: 9045 - protein, 89 aa, Escherichia coli; identical to SEQ ID NO: 2810

SEQ ID NO: 9046 - protein, 539 aa, Escherichia coli; identical to SEQ ID NO: 3050

SEQ ID NO: 9047 - protein, 122 aa, Escherichia coli; identical to SEQ ID NO: 2915

SEQ ID NO: 9048 - protein, 567 aa, Escherichia coli; identical to SEQ ID NO: 3518

SEQ ID NO: 9049 - protein, 208 aa, Escherichia coli; identical to SEQ ID NO: 1949

SEQ ID NO: 9050 - protein, 61 aa, Escherichia coli
MEYTKYNDDDTFTVKVGDKELFTNRWNLQSLLLSAQITGMTVTIKTNACHNGGGFSEVIFR

SEQ ID NO: 9051 - protein, 227 aa, Escherichia coli; identical to SEQ ID NO: 3570

SEQ ID NO: 9052 - protein, 729 aa, Escherichia coli; identical to SEQ ID NO: 4557

SEQ ID NO: 9053 - protein, 512 aa, Escherichia coli; identical to SEQ ID NO: 2813

SEQ ID NO: 9054 - protein, 828 aa, Escherichia coli; identical to SEQ ID NO: 2379

SEQ ID NO: 9055 - protein, 274 aa, Escherichia coli; identical to SEQ ID NO: 2301

SEQ ID NO: 9056 - protein, 161 aa, Escherichia coli; identical to SEQ ID NO: 2582

SEQ ID NO: 9057 - protein, 111 aa, Escherichia coli; identical to SEQ ID NO: 2911

SEQ ID NO: 9058 - protein, 446 aa, Escherichia coli; identical to SEQ ID NO: 2180

SEQ ID NO: 9059 - protein, 368 aa, Escherichia coli; identical to SEQ ID NO: 2374

SEQ ID NO: 9060 - protein, 362 aa, Escherichia coli; identical to SEQ ID NO: 4554

SEQ ID NO: 9061 - protein, 243 aa, Escherichia coli; identical to SEQ ID NO: 3561

SEQ ID NO: 9062 - protein, 170 aa, Escherichia coli; identical to SEQ ID NO: 2565

SEQ ID NO: 9063 - protein, 760 aa, Escherichia coli; identical to SEQ ID NO: 2078

SEQ ID NO: 9064 - protein, 237 aa, Escherichia coli; identical to SEQ ID NO: 2816

SEQ ID NO: 9065 - protein, 203 aa, Escherichia coli; identical to SEQ ID NO: 2201

SEQ ID NO: 9066 - protein, 232 aa, Escherichia coli; identical to SEQ ID NO: 2087

SEQ ID NO: 9067 - protein, 412 aa, Escherichia coli; identical to SEQ ID NO: 7283

SEQ ID NO: 9068 - protein, 826 aa, Escherichia coli; identical to SEQ ID NO: 3563

SEQ ID NO: 9069 - protein, 998 aa, Escherichia coli; identical to SEQ ID NO: 2918

SEQ ID NO: 9070 - protein, 840 aa, Escherichia coli; identical to SEQ ID NO: 4545

SEQ ID NO: 9071 - protein, 237 aa, Escherichia coli; identical to SEQ ID NO: 3793

SEQ ID NO: 9072 - protein, 883 aa, Escherichia coli
MTAFRAAFKAYRMHQVLILPRFARLTFALGLATAVFPVDAEYYFNPRFLSNDLAESVDLSAFTKGREAPPGTYRVDIYLNDEFMASRDITFIADDNNADLIPCLSTDLLVSLGIKKSALLDNKEHSADKHVPDNSACTPLQDRLADASSEFDVGQQHLSLSVPQIYVGRMARGYVSPDLWEEGINAGLLNYSFDGNSINNRSNHNAGKSNYAYLNLQSGINIGSWRLRDNSTWSYNSGSSNSSDSNKWQHINTSAERDIIPLRSRLTVGDSYTDGDIFDSVNFRGLKINSTEAMLPDSQHGFAPVIHGIARGTAQVSVKQNGYDVYQTTVPPGPFTIDDINSAANGGNLQVTIKEADGSIQTLYVPYSSVPVLQRAGYTRYALAMGEYRSGNNLQSTPKFVQASLMHGLKGNWTPYGGMQIAEDYQAFNLGIGKDLGLFGAFSFDITQANTTLADDTRHSGQSVKSVYSKSFYQTGTNIQVAGYRYSTQGFYNLSDSAYSRMSGYTVKPPTGDTSEQTLFIDYFNLFYSKRGQEQISISQQLGNYGTTFFSASRQSYWNTSRSDQQISFGLNVPFGDITTSLNYSYSNNIWQNDRDHLLAFTLNVPFSHWMRTDSQSAFHNSNASYSMSNDLKGGMTNLSGVYGTLLPDNNLNYSVQVGNTQGGNTSSGTSGYSSLNYRGAYGNTNVGYSRSGDSSQIYYGMSGGIIAHADGITFGQPLGDTMVLVKAPGADNVKIENQTGIHTDWRGYAILPFATEYRENRVALNANSLADNVELDETVVTVIPTHGAIARATFNAQIGGKVLMTLKYGNKSVPFGAIVTHGENKNGSIVAENGQVYLTGLPQSGKLQVSWGKDKNSNCIVDYKLPVVSPGTLLNQQTAICR

SEQ ID NO: 9073 - protein, 250 aa, Escherichia coli; identical to SEQ ID NO: 3811

SEQ ID NO: 9074 - protein, 733 aa, Escherichia coli; identical to SEQ ID NO: 4570

SEQ ID NO: 9075 - protein, 641 aa, Escherichia coli; identical to SEQ ID NO: 3794

SEQ ID NO: 9076 - protein, 200 aa, Escherichia coli; identical to SEQ ID NO: 1788

SEQ ID NO: 9077 - protein, 368 aa, Escherichia coli; identical to SEQ ID NO: 2370

SEQ ID NO: 9078 - protein, 191 aa, Escherichia coli; identical to SEQ ID NO: 2727

SEQ ID NO: 9079 - protein, 656 aa, Escherichia coli; identical to SEQ ID NO: 4560

SEQ ID NO: 9080 - protein, 244 aa, Escherichia coli; identical to SEQ ID NO: 2964

SEQ ID NO: 9081 - protein, 360 aa, Escherichia coli; identical to SEQ ID NO: 3354

SEQ ID NO: 9082 - protein, 747 aa, Escherichia coli; identical to SEQ ID NO: 3857

SEQ ID NO: 9083 - protein, 518 aa, Escherichia coli; identical to SEQ ID NO: 2350

SEQ ID NO: 9084 - protein, 351 aa, Escherichia coli
MKKSTLALVVMGIVASVSVQAAEIYNKDGNKLDVYGKVKAMHYMSDNDSKDGDQSYIRFGFKGETQINVQLTGYGRWEAEFAGNKAESDTAQQKTRLAFAGLKYKDLGSFDYGRNLGALYDVEAWTDMFPEFGGDSSAQTDNFMTKRASGLATYRNTDFFGVIDGLNLTLQYQGKNENRDVKKQNGDGFGTSLTYDFGGSDFAISGAYTNSDRTNEQNLQSRGTGKRAEAWATGLKYDANNIYLATFYSETRKMTPISGGFANKTQNFEAVAQYQFDFGLRPSLGYVLSKGKDIEGIGDEDLVNYVDVGATYYFNKNMSAFVDYKINQLDSDNKLNINNDDIVAVGMTYQF

SEQ ID NO: 9085 - protein, 193 aa, Escherichia coli; identical to SEQ ID NO: 2246

SEQ ID NO: 9086 - protein, 236 aa, Escherichia coli; identical to SEQ ID NO: 3821

SEQ ID NO: 9087 - protein, 682 aa, Escherichia coli; identical to SEQ ID NO: 3817

SEQ ID NO: 9088 - protein, 162 aa, Escherichia coli; identical to SEQ ID NO: 1967

SEQ ID NO: 9089 - protein, 208 aa, Escherichia coli; identical to SEQ ID NO: 1948

SEQ ID NO: 9090 - protein, 614 aa, Escherichia coli; identical to SEQ ID NO: 1885

SEQ ID NO: 9091 - protein, 725 aa, Escherichia coli; identical to SEQ ID NO: 4584

SEQ ID NO: 9092 - protein, 565 aa, Escherichia coli; identical to SEQ ID NO: 2664

SEQ ID NO: 9093 - protein, 203 aa, Escherichia coli; identical to SEQ ID NO: 2008

SEQ ID NO: 9094 - protein, 246 aa, Escherichia coli
MFFNTKHTAALCLASCMAFSSSAIADIVISGTRVVYKSEQKSVNVRLENKGNNPLLVQSWLDTGDDNAEPGSITVPFTATPPVSRIDAKRGQTIKLMYTASSALPKDRESVFWFNVLEVPPKPDAAKAANQSLLQLAFRTRIKLFYRPEGLSGISSDAPLALKWSWATSEGKAALRVDNPTPYYVSFSSGDLEANGKRYPLDMTMIAPFSNDVIKVNGMSGRTSSAKVHFFAINDFGGSIEGNTNL

SEQ ID NO: 9095 - protein, 360 aa, Escherichia coli; identical to SEQ ID NO: 3862

SEQ ID NO: 9096 - protein, 380 aa, Escherichia coli; identical to SEQ ID NO: 7247

SEQ ID NO: 9097 - protein, 700 aa, Escherichia coli; identical to SEQ ID NO: 4566

SEQ ID NO: 9098 - protein, 878 aa, Escherichia coli; identical to SEQ ID NO: 4404

SEQ ID NO: 9099 - protein, 230 aa, Escherichia coli; identical to SEQ ID NO: 2995

SEQ ID NO: 9100 - protein, 233 aa, Escherichia coli; identical to SEQ ID NO: 2005

SEQ ID NO: 9101 - protein, 227 aa, Escherichia coli; identical to SEQ ID NO: 3570

SEQ ID NO: 9102 - protein, 412 aa, Escherichia coli
MKQWIAALLLMLIPGVQAAKPQKVTLMVDDVPVAQVLQALAEQEKLNLVVSPDVSGTVSLHLTDVPWKQALQTVVKSAGLITRQEGNILSVHSIAWQNDNIARQEAEQARAQANLPLENRNITLQYADAGELAKAGEKLLSAKGSMTVDKRTNRLLLRDNKTALSALEQWVAQMDLPVGQVELSAHIVTINEKSLRELGVKWTLADAQHAGGVGQVTTLGSDLSVATATTHVGFNIGRINGRLLALELSALEQKQQLDIIASPRLLASHLQPASIKQGSEIPYQVSSGESGATSVEFKEAVLGMEVTPTVLQKGRIRLKLHISQNVPGQVLQQADGEVLAIDKQEIETQVEVKSGETLALGGIFTRKNKSGQDSVPLLGDIPWFGQLFRHDGKEDERRELVVFITPRLVSSE

SEQ ID NO: 9103 - protein, 883 aa, Escherichia coli; identical to SEQ ID NO: 2822

SEQ ID NO: 9104 - protein, 162 aa, Escherichia coli; identical to SEQ ID NO: 1969

SEQ ID NO: 9105 - protein, 208 aa, Escherichia coli; identical to SEQ ID NO: 1949

SEQ ID NO: 9106 - protein, 729 aa, Escherichia coli; identical to SEQ ID NO: 2948

SEQ ID NO: 9107 - protein, 840 aa, Escherichia coli
MNKSVVSISAAMLVLLCQPVMGSEISPATPSDEDNYTFDPQLFRGSRFSQSSLAKLTTRESVAPGNYKMDIYTNNKLSGSWNVTFKEAADGRVLPCLTPEVADAIGLKTGEDKGEKDPVCTFAKELAPGITSQTQLSQLRLDLSVPQSQLISRPRGYVPPSELDTGASLAFMNYIANYYNVAYSGQNAHSQRSLWASFNGGINLGAWQYRQLSNMTWDNDKGNQWNNIRSYLQRPLPAINSQLMMGQLITSGRFFSGLSYHGVSLATDERMLPDSMRGYAPTIRGVAATNARVSVMQNGHEIYQTTVAPGPFEINDLYPTSYSGDLDVTVTEANGAVSRFSVPFSAVPESMRPGTSRYNVEVGKTQDSGDDSMFGDLTWQHGMTNTLTFNSGSRIADGYQALMLGGVYGSSLGAFGANLTWSHARVPESEAQSGWMSQLTWSKTFQPTSTTVSLAGYRYSTSGYRDLADVLGERHAASNKQSWDSSQWRQQSRFDLTLSQSLANYGNLFVSGSTQNYRGGKSRDTQLQLGYSNSFSHGISMNLSVGRQRMGGYKDNSDDMQTVTSLSFSFPLGGNGPRVPSLSNSWPHSTDGSSQLQSSLTGMLDEAQTTNYSLNVMRDQQYKQTTLSGNMQKRFSQTTVGLNASKGQDYWQASGNVQGAMAVHGGGITFGPYLGETFALVEAKGAEGAKVYNSSQLEINDSGYALVPAVTPYRYNRISLDPQGMDGDAELVDSERQVAPVAGAAVKVIFRTRPGKALLIKSRMADGSELPMGADVLDENNTVVGIAGQGGQIYLRTEQTKGHLSVRWGEGANDSCQLPFDISGKDSNSPIIRLNETCQS

SEQ ID NO: 9108 - protein, 517 aa, Escherichia coli; identical to SEQ ID NO: 2462

SEQ ID NO: 9109 - protein, 368 aa, Escherichia coli; identical to SEQ ID NO: 2370

SEQ ID NO: 9110 - protein, 241 aa, Escherichia coli; identical to SEQ ID NO: 2887

SEQ ID NO: 9111 - protein, 203 aa, Escherichia coli; identical to SEQ ID NO: 2009

SEQ ID NO: 9112 - protein, 193 aa, Escherichia coli; identical to SEQ ID NO: 2250

SEQ ID NO: 9113 - protein, 207 aa, Escherichia coli; identical to SEQ ID NO: 2211

SEQ ID NO: 9114 - protein, 715 aa, Escherichia coli; identical to SEQ ID NO: 3971

SEQ ID NO: 9115 - protein, 237 aa, Escherichia coli; identical to SEQ ID NO: 2816

SEQ ID NO: 9116 - protein, 118 aa, Escherichia coli [sequence omitted]

SEQ ID NO: 9117 - protein, 879 aa, Escherichia coli; identical to SEQ ID NO: 4479

SEQ ID NO: 9118 - protein, 185 aa, Escherichia coli
MLEQMVKEAVSHIPVPRDGRDYDPDVLQKAVLDAVSALPAPQDGRDATALEILPAIDDQKSFPRGTYATHQGGLWRAYEKTHGMRGWECLVDGVADIDVSMTGERSFTVVVRQSSGQRTEKTFSLPVMLYRGVFRAGETYHPGDTVTWGGSLWHCNSMTGDKPGEAHSSGWTLAAKRGRDAGGGK

SEQ ID NO: 9119 - protein, 816 aa, Escherichia coli; identical to SEQ ID NO: 3562

SEQ ID NO: 9120 - protein, 203 aa, Escherichia coli; identical to SEQ ID NO: 2201

SEQ ID NO: 9121 - protein, 539 aa, Escherichia coli; identical to SEQ ID NO: 3050

SEQ ID NO: 9122 - protein, 161 aa, Escherichia coli; identical to SEQ ID NO: 2582

SEQ ID NO: 9123 - protein, 367 aa, Escherichia coli; identical to SEQ ID NO: 2431

SEQ ID NO: 9124 - protein, 700 aa, Escherichia coli; identical to SEQ ID NO: 2926

SEQ ID NO: 9125 - protein, 819 aa, Escherichia coli
MDAVNIYRLSVLSCLAMVTPPALTAEFNLNVLDKSIRDSVDISLLNQKGVVAPGDYFVSVTVNNNKISNGQQIRWQKSGDKIIPCINESLIELFGLKSDFRKKLPAIKECVDFSVFPEIIFTFDQANQQLNITIPQAWLAWHSENWTPPSTWNNGIPGFLMDYNLFASTYRPQSGSSSNNLNAYGTTGLNAGAWRLRSDYQLSQSDSGDNREQSGAISRTYLFRPLPQIGSRLTLGETDFSSNIFDGFSYTGAALASDDRMLPWELRGYAPQISGIAQTNATVTISHSGRVIYQKKVPPGPFIIDDLNQSVQGTLDVKVSEEDGRVNNFQVSAASTPFLTRQGQVRYKLAAGRPRSSMSHHTEDETFISHEVSWGMLSNTSPYGGMLLAGDDYRSGALGIGQNMLWMGALSFDVTWADSHFDTQQDEQGYSYRFNYSKQVDATNSTISLAAYRFSDRHFHSYANYIDHKYNDADAQDEKQTISLSFGQPITLLNLNLYANILHQSWWNADTSTTANITVGFNVDIGDWKDISVSTSFNTTHYEDKDRDNQIYFSISLPIGESGRLGYDMQNNSNTTTHRMSWNDTLDERNSWGMSAGIQSDRPDNGAQVSGNYQHLSSAGEWDLTGTYAANDYTSASASWSGSFTATQHGAAFHRRSSTNEPRLMVSTDGVGDIPIQGNIDYTNRFGIAVVPFVSSYQPTTVAVNMNDLPDGVTVSENVVKETWTEGAIGFKSLASRAGKDLNVIISDANGHFPPLGADVRQAEGGVSVGMVGENGHAWLSGVDENQQFTVHWGDQKTCAIHLPEHLEDVTKRLILPCH

SEQ ID NO: 9126 - protein, 828 aa, Escherichia coli; identical to SEQ ID NO: 2381

SEQ ID NO: 9127 - protein, 760 aa, Escherichia coli; identical to SEQ ID NO: 2078

SEQ ID NO: 9128 - protein, 659 aa, Escherichia coli; identical to SEQ ID NO: 2942

SEQ ID NO: 9129 - protein, 200 aa, Escherichia coli; identical to SEQ ID NO: 1788

SEQ ID NO: 9130 - protein, 108 aa, Escherichia coli; identical to SEQ ID NO: 3602

SEQ ID NO: 9131 - protein, 229 aa, Escherichia coli; identical to SEQ ID NO: 4047

SEQ ID NO: 9132 - protein, 233 aa, Escherichia coli; identical to SEQ ID NO: 3548

SEQ ID NO: 9133 - protein, 656 aa, Escherichia coli; identical to SEQ ID NO: 6440

SEQ ID NO: 9134 - protein, 518 aa, Escherichia coli; identical to SEQ ID NO: 2351

SEQ ID NO: 9135 - protein, 760 aa, Escherichia coli; identical to SEQ ID NO: 2078

SEQ ID NO: 9136 - protein, 614 aa, Escherichia coli; identical to SEQ ID NO: 4469

SEQ ID NO: 9137 - protein, 784 aa, Escherichia coli; identical to SEQ ID NO: 4454

SEQ ID NO: 9138 - protein, 445 aa, Escherichia coli; identical to SEQ ID NO: 4474

SEQ ID NO: 9139 - protein, 478 aa, Escherichia coli
MTRIKINARRIFSLLIPFFFFTSVHAEQTAAPAKPVTVEAKNETFAPQHPDQYLSWKATSEQSERVDALAEDPRLVILWAGYPFSRDYNKPRGHAFAVTDVRETLRTGAPKNAEDGPLPMACWSCKSPDVARLIQKDGEDGYFHGKWARGGPEIVNNLGCADCHNTASPEFAKGKPELTLSRPYAARAMEAIGKPFEKAGRFDQQLMVCGQCHVEYYFDGKNKAVKFPWDDGMKVENMEQYYDKIAFSDWTNSLSKTPMLKAQHPEYETWTAGIHGKNNVTCIDCHMPKVQNAEGKLYTDHKIGNPFDNFAQTCANCHTQDKAALQKVVAERKQSINDLKIKVEDQLVHAHFEAKAALDAGATEAEMKPIQDDIRHAQWRWDLAIASHGIHMHAPEEGLRMLGTAMDKAADARTKLARLLATKGITHEIQIPDISTKEKAQQAIGLNMEQIKAEKQDFIKTVIPQWEEQARKNGLLSQ

SEQ ID NO: 9140 - protein, 368 aa, Escherichia coli; identical to SEQ ID NO: 2370

SEQ ID NO: 9141 - protein, 366 aa, Escherichia coli; identical to SEQ ID NO: 3520

SEQ ID NO: 9142 - protein, 231 aa, Escherichia coli; identical to SEQ ID NO: 2868

SEQ ID NO: 9143 - protein, 838 aa, Escherichia coli; identical to SEQ ID NO: 2916

SEQ ID NO: 9144 - protein, 678 aa, Escherichia coli; identical to SEQ ID NO: 2902

SEQ ID NO: 9145 - protein, 89 aa, Escherichia coli; identical to SEQ ID NO: 2812

SEQ ID NO: 9146 - protein, 227 aa, Escherichia coli; identical to SEQ ID NO: 3570

SEQ ID NO: 9147 - protein, 689 aa, Escherichia coli; identical to SEQ ID NO: 5715

SEQ ID NO: 9148 - protein, 351 aa, Escherichia coli; identical to SEQ ID NO: 2872

SEQ ID NO: 9149 - protein, 122 aa, Escherichia coli; identical to SEQ ID NO: 2915

SEQ ID NO: 9150 - protein, 883 aa, Escherichia coli
MTAFRAAFKAYRMHQVLLLPRFARLTIALSLATAVFPVDAEYYFNPRFLSNDLAESVDLSAFTKGREAPPGTYRVDIYLNDEFMTSRDITFITDDNNADLIPCLSTDLLVSLGIKKSALLDNKEHSAEKHVPDNSACTPLQDRLVDASTEFDVGQQHLSLSVPQIYVGRMARGYVSPDLWEEGINAGLLNYSFNGNSINNRSNHNAGKSNYAYLNLQSGINIGSWRLRDNSTWSYNSGSSNSSDSNKWQHINTSAERDIIPLRSRLTVGDSYTDGDIFDSVNFRGLKINSTEAMLPDSQHGFAPVIHGIARGTAQVSVKQNGYDVYQTTVPPGPFTIDDINSAANGGDLQVTIKEADGSIQTLYVPYSSVPVLQRAGYTRYALAMGEYRSGNNLQSSPRFIQGSLMHGLEGNWTPYGGMQIAEDYQAFNLGIGKDLGLFGAFSFDITQANTTLADGTRHSGQSVKSVYSKSFYQTGTNIQVAGYRYSTQGFYNLSDSAYSRMSGYTVKPPTGDSNEQTQFIDYFNLFYSKRGQEQISISQQLGNYGATFFSASRQSYWNTSRSDQQISFGLNVPFGDITTSLNYSYSNNIWQNDRDHLLAFTLNVPFSHWMRTDSQSAFRNSNASYSMSNDLKGGMTNLSGVYGTLLPDNNLNYSVQVGNTHGGNTSSGTSGYSTLNYRGAYGNTNVGYSRSGDSSQIYYGMSGGIIAHADGITFGQPLGDTMVLVKAPGADNVKIENQTGIHTDWRGYAILPFATEYRENRVALNANSLADNVELDETVVTVIPTHGAIARATFNAQIGGKVLMTLKYGNKSVPFGAIVTHGENKNGSIVAENGQVYLTGLPQSGKLQVSWGNDKNSNCIVDNKLPEVSPGTLLNQQTAICR

SEQ ID NO: 9151 - protein, 239 aa, Escherichia coli; identical to SEQ ID NO: 4453

SEQ ID NO: 9152 - protein, 567 aa, Escherichia coli; identical to SEQ ID NO: 3518

SEQ ID NO: 9153 - protein, 231 aa, Escherichia coli; identical to SEQ ID NO: 2868

SEQ ID NO: 9154 - protein, 838 aa, Escherichia coli; identical to SEQ ID NO: 2916

SEQ ID NO: 9155 - protein, 432 aa, Escherichia coli; identical to SEQ ID NO: 2026

SEQ ID NO: 9156 - protein, 860 aa, Escherichia coli; identical to SEQ ID NO: 3544

SEQ ID NO: 9157 - protein, 567 aa, Escherichia coli; identical to SEQ ID NO: 3518

SEQ ID NO: 9158 - protein, 660 aa, Escherichia coli; identical to SEQ ID NO: 4092

SEQ ID NO: 9159 - protein, 700 aa, Escherichia coli; identical to SEQ ID NO: 2926

SEQ ID NO: 9160 - protein, 869 aa, Escherichia coli
MKIPTTTDIPQRYTWCLAGICYSSLAILPSFLSYAESYFNPAFLLENGTSVADLSRFERGNHQPAGVYRVDLWRNDEFIGSQDIVFESTTENTGDKSGGLMPCFNQVLLERIGLNSSAFPELAQQQNNKCINLLKAVPDATINFDFAAMRLNITIPQIALLSSAHGYIPPEEWDEGIPALLLNYNFTGNRGNGNDSYFFSELSGINIGPWRLRNNGSWNYFRGNGYHSEQWNNIGTWVQRAIIPLKSELVMGDGNTGSDIFDGVGFRGVRLYSSDNMYPDSQQGFAPTVRGIARTAAQLTIRQNGFIIYQSYVSPGAFEITDLHPTSSNGDLDVTIDERDGNQQNYTIPYSTVPILQREGRFKFDLTAGDFRSGNSQQSSPFFFQGTALGGLPQEFTAYGGTQLSANYTAFLLGLGRNLGNWGAVSLDVTHARSQLADDSRHEGDSIRFLYAKSMNTFGTNFQLMGYRYSTQGFYTLDDVAYRRMEGYEYDYDYDGEHRDEPIIVNYHNLRFSRKDRLQLNISQSLNDFGSLYISGTHQKYWNTSDSDTWYQVGYTSSWVGISYSLSFSWNESVGLPDNERIVGLNVSVPFNVLTKRRYTRENALDRAYASFNANRNSNGQNSWLAGVGGTLLEGHNLSYHVSQGDTSNNGYTGSATANWQAAYGTLGVGYNYDRDQHDVNWQLSGGVVGHENGITLSQPLGDTNVLIKAPGAGGVRIENQTGILTDWRGYAVMPYATVYRYNRIALDTNTMGNSIDVEKNISSVVPTQGALVRANFDTRIGVRALITVTQGGKPVPFGSLVRENSTGITSMVGDDGQVYLSGAPLSGELLVQWGDGANSRCIAHYVLPKQSLQQAVTVISAVCTHPGS

SEQ ID NO: 9161 - protein, 517 aa, Escherichia coli; identical to SEQ ID NO: 2462

SEQ ID NO: 9162 - protein, 826 aa, Escherichia coli; identical to SEQ ID NO: 3563

SEQ ID NO: 9163 - protein, 229 aa, Escherichia coli; identical to SEQ ID NO: 3589

SEQ ID NO: 9164 - protein, 614 aa, Escherichia coli; identical to SEQ ID NO: 1883

SEQ ID NO: 9165 - protein, 729 aa, Escherichia coli; identical to SEQ ID NO: 2948

SEQ ID NO: 9166 - protein, 203 aa, Escherichia coli; identical to SEQ ID NO: 2009

SEQ ID NO: 9167 - protein, 243 aa, Escherichia coli; identical to SEQ ID NO: 3561

SEQ ID NO: 9168 - protein, 696 aa, Escherichia coli; identical to SEQ ID NO: 4038

SEQ ID NO: 9169 - protein, 230 aa, Escherichia coli; identical to SEQ ID NO: 2995

SEQ ID NO: 9170 - protein, 869 aa, Escherichia coli; identical to SEQ ID NO: 2903

SEQ ID NO: 9171 - protein, 430 aa, Escherichia coli; identical to SEQ ID NO: 2617

SEQ ID NO: 9172 - protein, 713 aa, Escherichia coli; identical to SEQ ID NO: 3523

SEQ ID NO: 9173 - protein, 660 aa, Escherichia coli; identical to SEQ ID NO: 4092

SEQ ID NO: 9174 - protein, 351 aa, Escherichia coli; identical to SEQ ID NO: 2872

SEQ ID NO: 9175 - protein, 213 aa, Escherichia coli; identical to SEQ ID NO: 2232

SEQ ID NO: 9176 - protein, 362 aa, Escherichia coli; identical to SEQ ID NO: 2998

SEQ ID NO: 9177 - protein, 659 aa, Escherichia coli; identical to SEQ ID NO: 2942

SEQ ID NO: 9178 - protein, 237 aa, Escherichia coli; identical to SEQ ID NO: 2816

SEQ ID NO: 9179 - protein, 828 aa, Escherichia coli; identical to SEQ ID NO: 2381

SEQ ID NO: 9180 - protein, 747 aa, Escherichia coli
MARSKTAQPKHSLRKIAVVVATAVSGMSVYAQAAVEPKEDTITVTAAPAPQESAWGPAATIAARQSATGTKTDTPIQKVPQSISVVTAEEMALHQPKSVKEALSYTPGVSVGTRGASNTYDHLIIRGFAAEGQSQNNYLNGLKLQGNFYNDAVIDPYMLECAEIMRGPVSVLYGKSSPGGLLNMVSKRPTTEPLKEVQFKAGTDSLFQTGFDFSDALDDDGVYSYRLTGLARSANAQQKGSEEQRYAIAPAFTWRPDDKTNFTFLSYFQNEPETGYYGWLPKEGTVEPLPNGKRLPTDFNEGAKNNTYSRNEKMVGYSFDHEFNDTFTVRQNLRFAENKTSQNSVYGYGVCSDPANAYSKQCAALAPADKGHYLARKYVVDDEKLQNFSVDTQLQSKFATGDIDHTLLTGVDFMRMRNDINAWFGYDDSVPLLDLYNPVNTDFDFNAKDPANSGPYRILNKQKQTGVYVQDQAQWDKVLVTLGGRYDWADQESLNRVAGTTDKRDDKQFTWRGGVNYLFDNGVTPYFSYSESFEPSSQVGKDGNIFAPSKGKQYEVGVKYVPEDRPIVVTGAVYNLTKTNNLMADPEGSFFSVEGGEIRARGVEIEAKAALSASVNVVGSYTYTDAEYTTDTTYKGNTPAQVPKHMASLWADYTFFDGPLSGLTLGTGGRYTGSSYGDPANSFKVGSYTVVDALVRYDLARVGMAGSNVALHVNNLFDREYVASCFNTYGCFWGAERQVVATATFRF

SEQ ID NO: 9181 - protein, 111 aa, Escherichia coli; identical to SEQ ID NO: 2911

SEQ ID NO: 9182 - protein, 655 aa, Escherichia coli; identical to SEQ ID NO: 7517

SEQ ID NO: 9183 - protein, 512 aa, Escherichia coli; identical to SEQ ID NO: 2813

SEQ ID NO: 9184 - protein, 359 aa, Escherichia coli; identical to SEQ ID NO: 2332

SEQ ID NO: 9185 - protein, 75 aa, Escherichia coli; identical to SEQ ID NO: 4451

SEQ ID NO: 9186 - protein, 266 aa, Escherichia coli; identical to SEQ ID NO: 1892

SEQ ID NO: 9187 - protein, 430 aa, Escherichia coli; identical to SEQ ID NO: 2617

SEQ ID NO: 9188 - protein, 191 aa, Escherichia coli; identical to SEQ ID NO: 2727

SEQ ID NO: 9189 - protein, 241 aa, Escherichia coli; identical to SEQ ID NO: 2887

SEQ ID NO: 9190 - protein, 478 aa, Escherichia coli; identical to SEQ ID NO: 2409

SEQ ID NO: 9191 - protein, 228 aa, Escherichia coli; identical to SEQ ID NO: 5492

SEQ ID NO: 9192 - protein, 266 aa, Escherichia coli
MAKSLFRALVALSFLAPLWLNAAPRVITLSPANTELAFAAGITPVGVSSYSDYPPQAQKIEQVSTWQGMNLERIVALKPDLVIAWRGGNAERQVDQLASLGIKVMWVDATSIEQIANALRQLAPWSPQPDKAEQAAQSLLDQYTQLKAQYADKPKKRVFLQFGINPPFTSGKESIQNQVLEVCGGENIFKDSRVPWPQVSREQVLARSPQAIVITGGPDQIPKIKQYWGEQLKIPVIPLTSDWFERASPRIILAAQQLCSALSQVD

SEQ ID NO: 9193 - protein, 746 aa, Escherichia coli; identical to SEQ ID NO: 2949

SEQ ID NO: 9194 - protein, 232 aa, Escherichia coli
MQKNAAHTYAISSLLVLSLTGCAWIPSTPLVQGATSAQPVPGPTPVANGSIFQSAQPINYGYQPLFEDRRPRNIGDTLTIVLQENVSASKSSSASASRDGKTNFGFDTVPRYLQGLFGNARADVEASGGNTFNGKGGANASNTFSGTLTVTVDQVLVNGNLHVVGEKQIAINQGTEFIRFSGVVNPRTISGSNTVPSTQVADARIEYVGNGYINEAQNMGWLQRFFLNLSPM

SEQ ID NO: 9195 - protein, 207 aa, Escherichia coli; identical to SEQ ID NO: 2211

SEQ ID NO: 9196 - protein, 998 aa, Escherichia coli; identical to SEQ ID NO: 3056

SEQ ID NO: 9197 - protein, 432 aa, Escherichia coli; identical to SEQ ID NO: 2026

SEQ ID NO: 9198 - protein, 331 aa, Escherichia coli; identical to SEQ ID NO: 2705

SEQ ID NO: 9199 - protein, 161 aa, Escherichia coli; identical to SEQ ID NO: 2582

SEQ ID NO: 9200 - protein, 366 aa, Escherichia coli; identical to SEQ ID NO: 3520

SEQ ID NO: 9201 - protein, 863 aa, Escherichia coli; identical to SEQ ID NO: 3946

SEQ ID NO: 9202 - protein, 412 aa, Escherichia coli; identical to SEQ ID NO: 2908

SEQ ID NO: 9203 - protein, 252 aa, Escherichia coli; identical to SEQ ID NO: 3543

SEQ ID NO: 9204 - protein, 715 aa, Escherichia coli; identical to SEQ ID NO: 3971

SEQ ID NO: 9205 - protein, 816 aa, Escherichia coli; identical to SEQ ID NO: 4456

SEQ ID NO: 9206 - protein, 170 aa, Escherichia coli; identical to SEQ ID NO: 2565

SEQ ID NO: 9207 - protein, 397 aa, Escherichia coli
MKRKVLAMLVPALLVAGAANAAEIYNKDGNKLDLYGKVAGLHYFSDDASSDGDMSYARIGFKGETQIADQFTGYGQWEFNIGANGPESDKGNTATRLAFAGFGFGQNGTFDYGRNYGVVYDVEAWTDMLPEFGGDTYAGADNFMNGRANSVATYRNNGFFGQVDGLNFALQYQGNNEKSGLFDQEGSGNGNGRKLAKENGDGYGMSTSYDFDFDFGLSLGAAYSNSDRTDNQVHKGTHNTRYGDRFDATAGGETAEAWTVGAKYDANNVYLAAMYAEPRNMTGYGDADAIANKTQNFEVVAQYQFDFGLRPSIAYLQSKGKDLGGVNSDNFDSQGNHHYTNKDLVKYVDIGMTYYFNKNMSTYVDYKINLLDNDDDFYKENGIATDDIVAVGLVYQF

SEQ ID NO: 9208 - protein, 229 aa, Escherichia coli; identical to SEQ ID NO: 4047

SEQ ID NO: 9209 - protein, 518 aa, Escherichia coli; identical to SEQ ID NO: 2351

SEQ ID NO: 9210 - protein, 213 aa, Escherichia coli; identical to SEQ ID NO: 2232

SEQ ID NO: 9211 - protein, 252 aa, Escherichia coli; identical to SEQ ID NO: 3543

SEQ ID NO: 9212 - protein, 367 aa, Escherichia coli; identical to SEQ ID NO: 2431

SEQ ID NO: 9213 - protein, 512 aa, Escherichia coli; identical to SEQ ID NO: 2813

SEQ ID NO: 9214 - protein, 241 aa, Escherichia coli; identical to SEQ ID NO: 3582

SEQ ID NO: 9215 - protein, 678 aa, Escherichia coli
MVPSTFSRLKAARCLPVVLAALIFVGCGTHTPDQSTAYMQGTAQADSAFYLQQMQQSSDDTRINWQLLAIRALVKEGKTGLAVELFNQLPQELNDSQRREKTLLAVEIKLAQKDFAGAQNLLAKITPADLEQNQQARYWQAKIDASQGRPSIDLLRALIAQEPLLGAKEKQQNIDATWQALSSMTQEQANTLVINADENILQGWLDLQRVWFDNRNDPDMMKAGIADWQKRYPNNPGAKMLPTQLVNVKAFKPASTNKIALLLPLNGQAAVFGRTIQQGFEAAKNIGTQPVAAQVAAAPAADVAEQPQPQTADGVASPAQASVSDLTGDQPAAQPVPVSAPATSTAAVSAPANPSAELKIYDTSSQPLSQILSQVQQDGASIVVGPLLKNNVEELLKSNTPLNVLALNQPENIENRVNICYFALSPEDEARDAARHIRDQGKQAPLVLIPRSSLGDRVANAFAQEWQKLGGGTVLQQKFGSTSELRAGVNGGSGIALTGTPITPRATTDSGMTTNNPTLQTTPTDDQFTNNGGRVDAVYIVATPGEIAFIKPMIAMRNGSQSGATLYASSRSAQGTAGPDFRLEMEGLQYSEIPMLAGGNLPLMQQALSAVNNDYSLARMYAMGVDAWSLANHFSQMRQVQGFEINGNTGSLTANPDCVINRKLSWLQYQQGQVVPAS

SEQ ID NO: 9216 - protein, 191 aa, Escherichia coli; identical to SEQ ID NO: 2727

SEQ ID NO: 9217 - protein, 162 aa, Escherichia coli; identical to SEQ ID NO: 1969

SEQ ID NO: 9218 - protein, 203 aa, Escherichia coli; identical to SEQ ID NO: 2201

SEQ ID NO: 9219 - protein, 243 aa, Escherichia coli; identical to SEQ ID NO: 4409

SEQ ID NO: 9220 - protein, 229 aa, Escherichia coli
MALLIFAVLSLLVAGELQAGVVVGGTRFIFPADRESISILLTNTSQESWLINSKINRPTRWAGGEASTVPAPLLAAPPLILLKPGTTGTLRLLRTESDILPVDRETLFELSIASVPSGKVENQSVKMAMRSVFKLFWRPEGLPGDPLEAYQQLRWTRKSQGVQLTNPTPYYINLIQVSVNGKALSNVGVVPPKSQRQTSWCQAIAPCHVAWRAINDYGGLSAKKEQNLP

SEQ ID NO: 9221 - protein, 274 aa, Escherichia coli; identical to SEQ ID NO: 2891

SEQ ID NO: 9222 - protein, 331 aa, Escherichia coli; identical to SEQ ID NO: 2705

SEQ ID NO: 9223 - protein, 539 aa, Escherichia coli; identical to SEQ ID NO: 3050

SEQ ID NO: 9224 - protein, 232 aa, Escherichia coli; identical to SEQ ID NO: 2087

SEQ ID NO: 9225 - protein, 193 aa, Escherichia coli; identical to SEQ ID NO: 2250

SEQ ID NO: 9226 - protein, 274 aa, Escherichia coli; identical to SEQ ID NO: 2304

SEQ ID NO: 9227 - protein, 233 aa, Escherichia coli; identical to SEQ ID NO: 3548

SEQ ID NO: 9228 - protein, 111 aa, Escherichia coli; identical to SEQ ID NO: 2911

SEQ ID NO: 9229 - protein, 359 aa, Escherichia coli; identical to SEQ ID NO: 2332

SEQ ID NO: 9230 - protein, 200 aa, Escherichia coli; identical to SEQ ID NO: 1789

SEQ ID NO: 9231 - protein, 208 aa, Escherichia coli; identical to SEQ ID NO: 1949

SEQ ID NO: 9232 - protein, 746 aa, Escherichia coli; identical to SEQ ID NO: 2949

SEQ ID NO: 9233 - protein, 241 aa, Escherichia coli; identical to SEQ ID NO: 3582

SEQ ID NO: 9234 - protein, 747 aa, Escherichia coli; identical to SEQ ID NO: 2954

SEQ ID NO: 9235 - protein, 446 aa, Escherichia coli; identical to SEQ ID NO: 2180

SEQ ID NO: 9236 - protein, 224 aa, Escherichia coli; identical to SEQ ID NO: 3604

SEQ ID NO: 9237 - protein, 224 aa, Escherichia coli; identical to SEQ ID NO: 3578

SEQ ID NO: 9238 - protein, 362 aa, Escherichia coli; identical to SEQ ID NO: 2998

SEQ ID NO: 9239 - protein, 236 aa, Escherichia coli; identical to SEQ ID NO: 3970

SEQ ID NO: 9240 - protein, 89 aa, Escherichia coli; identical to SEQ ID NO: 2810

SEQ ID NO: 9241 - protein, 866 aa, Escherichia coli; identical to SEQ ID NO: 4866

SEQ ID NO: 9242 - protein, 866 aa, Escherichia coli; identical to SEQ ID NO: 3025

SEQ ID NO: 9243 - protein, 266 aa, Escherichia coli; identical to SEQ ID NO: 1894

SEQ ID NO: 9244 - protein, 359 aa, Escherichia coli; identical to SEQ ID NO: 2329

SEQ ID NO: 9245 - protein, 678 aa, Escherichia coli
MVPSTFSRLKAARCLPVVLAALIFAGCGTHTPDQSTAYMQGTAQADSAFYLQQMQQSSDDTRINWQLLAIRALVKEGKTGQAVELFNQLPQELNDTQRREKTLLAAEIKLAQKDFAGAQNLLAKITPADLEQNQQARYWQAKIDASQGRPSIDLLRALIAQEPLLGAKEKQQNIDATWQALSSMTQEQANTLVINADENILQGWLDLQRVWFDNRNDPDMMKAGIADWQKRYPNNPGAKMLPTQLVNVKAFKLASTNKIALLLPLNGQAAVFGRTIQQGFEAAKNIGTQPVVAQVAAAPAADVAEQPQPQTVDGVASPAQASVSDLTGEQPAAQSVPVSAPATSTAAVSAPANPSAELKIYDTSSQPLSQILSQVQQDGASIVVGPLLKNNVEELLKSNTPLNVLALNQPENIENRVNICYFALSPEDEARDAARHIRDQGKQAPLVLIPRSSLGDRVANAFAQEWQKLGGGTVLQQKFGSTSELRAGVNGGSGIALTGSPITPRETTDSGMTTNNPTLQTTPTDDQFTNNGGRVDAVYIVATPGEIAFIKPMIAMRNGSQSGATLYASSRSAQGTAGPDFRLEMEGLQYSEIPMLAGGNLPLMQQALSAVNNDYSLARMYAMGVDAWSLANHFSQMRQVQGFEINGNTGSLTANPDCVINRKLSWLQYQQGQVVPAS

SEQ ID NO: 9246 - protein, 191 aa, Escherichia coli; identical to SEQ ID NO: 2727

SEQ ID NO: 9247 - protein, 900 aa, Escherichia coli; identical to SEQ ID NO: 4548

SEQ ID NO: 9248 - protein, 826 aa, Escherichia coli; identical to SEQ ID NO: 3256

SEQ ID NO: 9249 - protein, 869 aa, Escherichia coli; identical to SEQ ID NO: 3012

SEQ ID NO: 9250 - protein, 843 aa, Escherichia coli; identical to SEQ ID NO: 3042

SEQ ID NO: 9251 - protein, 203 aa, Escherichia coli; identical to SEQ ID NO: 2008

SEQ ID NO: 9252 - protein, 207 aa, Escherichia coli; identical to SEQ ID NO: 2213

SEQ ID NO: 9253 - protein, 660 aa, Escherichia coli; identical to SEQ ID NO: 7233

SEQ ID NO: 9254 - protein, 747 aa, Escherichia coli
MAPSKTAQPKHSLRKIAVVVATAVSGMSVYAQAAVEPKEDTITVTAAPAPQESAWGPAATIAARQSATGTKTDTPIQKVPQSISVVTAEEMALHQPKSVKEALSYTPGVSVGTRGASNTYDHLIIRGFAAEGQSQNNYLNGLKLQGNFYNDAVIDPYMLERAEIMRGPVSVLYGKSSPGGLLNMVSKRPTTEPLKEVQFKAGTDSLFQTGFDFSDALDDDGVYSYRLTGLARSANAQQKGSEEQRYAIAPAFTWRPDDKTNFTFLSYFQNEPETGYYGWLPKEGTVEPLPNGKRLPTDFNEGAKNNTYSRNEKMVGYSFDHEFNDTFTVRQNLRFAENKTSQNSVYGYGVCSDPANAYSKQCAALAPADKGHYLARKYVVDDEKLQNFSVDTQLQSKFATGDIDHTLLTGVDFMRMRNDINAWFGYDDSVPLLDLYNPVNTDFDFNAKDPDNSGPYRILNKQKQTGVYVQDQAQWDKVLVTLGGRYDWADQESLNRVAGTTDKRDDKQFTWRGGVNYLFDNGVTPYFSYSESFELSSQVGKDGNIFAPSKGKQYEVGVKYVPEDRPIVVTGAVYNLTKTNNLMADPEGSFFSVEGGEIRARGVEIEAKAALSASVNVVGSYTYTDAEYTTDTTYKGNTPAQVPKHMASLWADYTFFDGPLSGLTLGTGGRYTGSSYGDPANSFKVGSYTVVDALVRYDLARVGMAGSNVALHVNNLFDREYVASCFNTYGCFWGAERQVVATATFRF

SEQ ID NO: 9255 - protein, 162 aa, Escherichia coli; identical to SEQ ID NO: 1967

SEQ ID NO: 9256 - protein, 663 aa, Escherichia coli
MFRLNPFVRVGLCLSAISCAWPVLAVDDDGETMVVTASSVEQNLKDAPASISVITQEDLQRKPVQNLKDVLKEVPGVQLTNEGDNRKGVSIRGLDSSYTLILVDGKRVNSRNAVFRHNDFDLNWIPVDSIERIEVVRGPMSSLYGSDALGGVVNIITKKIGQKWSGTVTVDTTVQEHRDRGDTYNGQFFTSGPLIDGVLGMKAYGSLAKREKDDPQNSTTTDTGETPRIEGFSSRDGNVEFAWTPNQNHDFTAGYGFDRQDRDSDSLDKNRLERQNYSVSHNGRWDYGTSELKYYGEKVENKNPGNSSPITSESNTVDGKYTLPLTAINQFLTVGGEWRHDKLSDAVNLTGGTSSKTSASQYALFVEDEWRIFEPLALTTGVRMDDHETYGEHWSPRAYLVYNATDTVTVKGGWATAFKAPSLLQLSPDWTSNSCRGACKIVGSPDLKPETSESWELGLYYMGEEGWLEGVESSVTVFRNDVKDRISISRTSDVNAAPGYQNFVGFETGANGRRIPVFSYYNVNKARIQGVETELKIPFNDEWKLSINYTYNDGRDVSNGENKPLSDLPFHTANGTLDWKPLALEDWSFYVSGHYTGQKRADSATAKTPGGYTIWNTGAAWQVTKDVKLRAGVLNLGDKDLSRDDYSYNEDGRRYFMAVDYRF

SEQ ID NO: 9257 - protein, 351 aa, Escherichia coli; identical to SEQ ID NO: 9084

SEQ ID NO: 9258 - protein, 721 aa, Escherichia coli; identical to SEQ ID NO: 4553

SEQ ID NO: 9259 - protein, 863 aa, Escherichia coli
MHIRKHRLAGFFVRLFVACAFAAQAPLSSAELYFNPRFLADDPQAVADLSRFENGQELPPGTYRVDIYLNNGYMATRDVTFNTGDSEQGIVPCLTRAQLASMGLNTASVSGMNLLADDACVPLTSMIHDATAHLDVGQQRLNLTIPQAFMSNRARGYIPPELWDPGINAGLLNYNFSGNSVQNRIGGNSHYAYLNLQSGLNIGAWRLRDNTTWSYNRSDRSSGSKNKWQHINTWLERDIIPLRSRLTLGDGYTQGDIFDGINFRGAQLASDDNMLPDSQRGFAPVIHGIARGTAQVTIKQNGYDIYNSTVPPGPFTINDIYAAGNSGDLQVTIKEADGSTQIFTVPYSSVPLLQREGHTRYSITAGEYRSGNAQQEKPRFFQSTLLHGLPAGWTIYGGTQLADRYRAFNFGIGKNMGALGALSVDMTQANSTLPDDSQHDGQSVRFLYNKSLNESGTDIQLVGYRYSTSGYFNFADTTYSRMNGYNIETQDGVIQVKPKFTDYYNLAYNKRGKLQLTVTQQLGRTSTLYLSGSHQTYWGTSNVDEQFQAGLNTAFEDINWTLSYSLTKNAWQKGRDQMLALNVNIPFSHWLRSDSKSQWRHASASYSMSHDLNGRMTNLAGVYGTLLEDNNLSYSVQTGYAGGGDGNSGSTGYATLNYRGGYGNANIGYSHSDDIKQLYYGVSGGVLAHANGVTLGQPLNETVVLVKAPGAKDAKVENQTGVRTDWRGYAVLPYATEYRENRVALDTNTLADNVDLDNAVANVVPTRGAIVRAEFKARVGIKLLMTLTHNNKPLPFGAMVTSESSQSSGIVADNGQVYLSGMPLAGKVQVKWGEEENAHCIANYQLPPESQQQLLTQLSAECR

SEQ ID NO: 9260 - protein, 387 aa, Escherichia coli; identical to SEQ ID NO: 3101

SEQ ID NO: 9261 - protein, 118 aa, Escherichia coli
MKKRGAFLGLLLVSACASVFAANNETSKSVTFPKCEGLDAAGIAASVKRDYQQNRVARWADDQIIVGQADPVAWVSLQDIQGKDDKWSVPLTVRGKSADIHYQVSVDCKAGMAEYQRR

SEQ ID NO: 9262 - protein, 193 aa, Escherichia coli; identical to SEQ ID NO: 2246

SEQ ID NO: 9263 - protein, 102 aa, Escherichia coli; identical to SEQ ID NO: 1823

SEQ ID NO: 9264 - protein, 883 aa, Escherichia coli; identical to SEQ ID NO: 4544

SEQ ID NO: 9265 - protein, 539 aa, Escherichia coli; identical to SEQ ID NO: 3845

SEQ ID NO: 9266 - protein, 362 aa, Escherichia coli; identical to SEQ ID NO: 4554

SEQ ID NO: 9267 - protein, 232 aa, Escherichia coli; identical to SEQ ID NO: 2087

SEQ ID NO: 9268 - protein, 274 aa, Escherichia coli; identical to SEQ ID NO: 2301

SEQ ID NO: 9269 - protein, 840 aa, Escherichia coli; identical to SEQ ID NO: 4545

SEQ ID NO: 9270 - protein, 686 aa, Escherichia coli; identical to SEQ ID NO: 3806

SEQ ID NO: 9271 - protein, 222 aa, Escherichia coli; identical to SEQ ID NO: 4595

SEQ ID NO: 9272 - protein, 331 aa, Escherichia coli; identical to SEQ ID NO: 4559

SEQ ID NO: 9273 - protein, 213 aa, Escherichia coli; identical to SEQ ID NO: 2232

SEQ ID NO: 9274 - protein, 784 aa, Escherichia coli; identical to SEQ ID NO: 2244

SEQ ID NO: 9275 - protein, 765 aa, Escherichia coli
MQFHINSPDINNEKAVLLARDETLGNCLNLTEIIPQASVRYDVNEQRLDIDVPQAWVMKNYQNYVDPSLWENGINAAMLSYNLNGYHSETPGRRNDSIYAAFNGGMNLGAWRLRASGNYNWMTDSGSNYDFKNRYIQRDIASLRSQLILGESYTTGETFDSVSIRGIRLYSDSRMLPPTLASFAPIIHGVANTNAKVTITQGGYKIYETTVPPGAFVIDDLSPSGYGSDLIVTVEESDGSKRTFSQPFSSVVQMLRPGVGRWDISGGQVLKDDIQDEPNLFQASYYYGLNNYLTGYTGIQITDNNYTAGLLGLGLNTSVGAFSFDVTHSNVRIPDDKTYQGQSYRVSWNKLFEETSTSLNIAAYRYSTQNYLGLNDALTLIDEVKHPEQDLEPKSMRNYSRMKNQVTVSINQPLKFEKKDYGSFYLSGSWSDYWASGQNRSNYSIGYSNSASWGSYSVSAQRSWNEDGDTDDSVYLSFTIPIEKLLGTEQRTSGFQSIDTQMSSDFKGNNQLNVSSSGYSDNARVSYSVNTGYTMNKASKDLSYVGGYASYESPWGSLAGSVSANSDNSRQVSLSTDGGFVLHSGGLTFSNDSFSDSDTLAVVQAPGAQGARINYGNSTIDRWGYGVTSALSPYHENRIALDINDLENDVELKSTSAVAVPRQGSVVFADFETVQGQSAIMNITRSDGKNIPFAADIYDEKGNVIGNVGQGGQAFVRGIEQQGNISIKWLEESKPVSCLAHYQQSSEAEKIAQSIILNGIRCQIQ

SEQ ID NO: 9276 - protein, 747 aa, Escherichia coli; identical to SEQ ID NO: 2072

SEQ ID NO: 9277 - protein, 880 aa, Escherichia coli
MPDHSLFRLRILPWCIALAMSGSYSSVWAEDDIQFDSRFLELKGDTKIDLKRFSSQGYVEPGKYNLQVQLNKQPLAEEYDIYWYAGEDDASKSYACLTQELVAQFGLKEDVAKNLQWSHDAKCLKSGQLEGMEIKADLSQSALVISLPQAYLEYTYPDWDPPSRWDDGISGIVADYSINAQTRHEENGGDDSNEISGNGTVGVNLGPWRMRADWQTNYQHTRSNDDDEFSGDETQKKWEWSRYYAWRALPSLKAKLALGEDYLRSDIFDGFNYVGGSVSTDDQMLPPNLRGYAPDISGVAHTTAKVTVSQMGRVIYETQVPAGPFRIQDLGDSVSGTLHIRIEEQNGQVQEYDISTASMPYLTRPGQVRYKIMMGRPQEWGHHVEGEFFSGAEASWGIANGWSLYGGALGDENYQSAALGVGRDLSTFGAVAFDVTHSHTKLDKDTAYGKGSLDGNSFRVSYSKDFDQLNSRVTFAGYRFSEENFMTMSEYLDASDSGMVRTGNDKEMYTATYNQNFRDAGVSVYLNYTRHTYWDREEQTNYNIMLSHYFNMGSIRNVSISMTGYRYEYDNQADKGMYISLSMPWGDNSTVSYNGNYGSGTDSSQVGYFSRVDDATHYQLNVGTSDKHTSVDGYYSHDGSLAQVDLSANYHEGQYTSAGLSLQGGATLTAHGGALHRTQNMGGTRLLIDADGVADVPVEGNGAAVYTNMFGKAVVSDVNNYYRNQAYIDLNKLPENAEATQSVVQATLTEGAIGYRKFAVISGQKAMAVLRLQDGSHPPFGAEVKNDNEQTVGLVDDDGNVYLAGVKPGEHMSVFWSGVAHCDINLPDPLPADLFNGLLLPCQHKGNVAPVVPDDIKPVIQEQTQQVTPTNPPVSVSANQ

SEQ ID NO: 9278 - protein, 565 aa, Escherichia coli; identical to SEQ ID NO: 2664

SEQ ID NO: 9279 - protein, 518 aa, Escherichia coli; identical to SEQ ID NO: 2349

SEQ ID NO: 9280 - protein, 230 aa, Escherichia coli; identical to SEQ ID NO: 3019

SEQ ID NO: 9281 - protein, 746 aa, Escherichia coli; identical to SEQ ID NO: 3031

SEQ ID NO: 9282 - protein, 432 aa, Escherichia coli; identical to SEQ ID NO: 2026

SEQ ID NO: 9283 - protein, 191 aa, Escherichia coli; identical to SEQ ID NO: 4195

SEQ ID NO: 9284 - protein, 111 aa, Escherichia coli; identical to SEQ ID NO: 3370

SEQ ID NO: 9285 - protein, 686 aa, Escherichia coli; identical to SEQ ID NO: 3129

SEQ ID NO: 9286 - protein, 331 aa, Escherichia coli; identical to SEQ ID NO: 2700

SEQ ID NO: 9287 - protein, 834 aa, Escherichia coli; identical to SEQ ID NO: 3095

SEQ ID NO: 9288 - protein, 249 aa, Escherichia coli; identical to SEQ ID NO: 3492

SEQ ID NO: 9289 - protein, 203 aa, Escherichia coli; identical to SEQ ID NO: 2201

SEQ ID NO: 9290 - protein, 203 aa, Escherichia coli; identical to SEQ ID NO: 2009

SEQ ID NO: 9291 - protein, 565 aa, Escherichia coli; identical to SEQ ID NO: 2662

SEQ ID NO: 9292 - protein, 161 aa, Escherichia coli; identical to SEQ ID NO: 2582

SEQ ID NO: 9293 - protein, 386 aa, Escherichia coli; identical to SEQ ID NO: 3094

SEQ ID NO: 9294 - protein, 228 aa, Escherichia coli; identical to SEQ ID NO: 4179

SEQ ID NO: 9295 - protein, 208 aa, Escherichia coli; identical to SEQ ID NO: 1949

SEQ ID NO: 9296 - protein, 446 aa, Escherichia coli
MMITLRKLPLAVAVAAGVMSAQAMAVDFHGYARSGIGWTGSGGEQQCFQTTGAQSKYRLGNECETYAELKLGQEVWKEGDKSFYFDTNVAYSVAQQNDWEATDPAFREANVQGKNLIEWLPGSTIWAGKRFYQRHDVHMIDFYYWDISGPGAGLENIDVGFGKLSLAATRSSEAGGSSSFASNNIYDYTNETANDVFDVRLAQMEINPGGTLELGVDYGRANLRDKYRLVDGASKDGWLFTAEHTQSVLKGFNKFVVQYATDSMTSQGKGLSQGSGVAFDNEKFAYNINNNGHMLRILDHGAISMGDNWDMMYVGMYQDINWDNDNGTKWWTVGIRPMYKWTPIMSTVMEIGYDNVESQRTGDKNNQYKITLAQQWQAGDSIWSRPAIRVFATYAKWDEKWGYDYNGDSKVNPNYGKAVPADFNGGSFGRGDSDEWTFGAQMEIWW

SEQ ID NO: 9297 - protein, 641 aa, Escherichia coli
MLAVDDDGETMVVTASSVEQNLKDAPASISVITQEDLQRKPVQNLKDVLKKVPGVQLTNEGDNRKGVSIRGLDSSYTLILVDGKRVNSRNAVFRHNDFDLNWIPVDSIERIEVVRGPMSSLYGSDALGGVVNIITKKIGQKWSGTVTVDTTIQEHRDRGDTYNGQFFTSGPLIDGVLGMKAYGSLAKREKDDPQNSTTTDTGETPRIEGFSSRDGNVEFAWTPNQNHDFTAGYGFDRQDRDSDSLDKNRLERQNYSVSHNGRWDYGTSELKYYGEKVENKNPGNSSPITSESNTVDGKYTLPLTAINQFLTVGGEWRHDKLSDAVNLTGGTSSKTSASQYALFVEDEWRIFEPLALTTGVRMDDHETYGEHWSPRAYLVYNATDTVTVKGGWATAFKAPSLLQLSPDWTSNSCRGACKIVGSPDLKPETSESWELGLYYMGEEGWLEGVESSVTVFRNDVKDRISISRTSDVNAAPGYQNFVGFETGANGRRIPVFSYYNVNKARIQGVETELKIPFNDEWKLSINYTYNDGRDVSNGENKPLSDLPFHTANGTLDWKPLALEDWSFYVSGHYTGQKRADSATAKTPGGYTIWNTGAAWQVTKDVKLRAGVLNLGDKDLSRDDYSYNEDGRRYFMAVDYRF

SEQ ID NO: 9298 - protein, 162 aa, Escherichia coli; identical to SEQ ID NO: 1973

SEQ ID NO: 9299 - protein, 367 aa, Escherichia coli; identical to SEQ ID NO: 4158

SEQ ID NO: 9300 - protein, 478 aa, Escherichia coli; identical to SEQ ID NO: 3436

SEQ ID NO: 9301 - protein, 241 aa, Escherichia coli; identical to SEQ ID NO: 2851

SEQ ID NO: 9302 - protein, 826 aa, Escherichia coli; identical to SEQ ID NO: 3078

SEQ ID NO: 9303 - protein, 274 aa, Escherichia coli; identical to SEQ ID NO: 3160

SEQ ID NO: 9304 - protein, 843 aa, Escherichia coli; identical to SEQ ID NO: 3163

SEQ ID NO: 9305 - protein, 231 aa, Escherichia coli; identical to SEQ ID NO: 3055

SEQ ID NO: 9306 - protein, 200 aa, Escherichia coli; identical to SEQ ID NO: 1785

SEQ ID NO: 9307 - protein, 826 aa, Escherichia coli; identical to SEQ ID NO: 3791

SEQ ID NO: 9308 - protein, 200 aa, Escherichia coli; identical to SEQ ID NO: 1784

SEQ ID NO: 9309 - protein, 880 aa, Escherichia coli; identical to SEQ ID NO: 3008

SEQ ID NO: 9310 - protein, 161 aa, Escherichia coli; identical to SEQ ID NO: 2582

SEQ ID NO: 9311 - protein, 224 aa, Escherichia coli; identical to SEQ ID NO: 3165

SEQ ID NO: 9312 - protein, 359 aa, Escherichia coli; identical to SEQ ID NO: 2328

SEQ ID NO: 9313 - protein, 224 aa, Escherichia coli
MKGLLSLLIFSMVLPAHAGIVIYGMRIIYPAENKEVMVQLMNQGNRSSLLQAWIDDGDTSLPPEKIQVPFMLTPPVAKIGANSGQQVKIKIMPNKLPTNKESIFYLNVLDIPPNSPEQEGKNALKFAMQNRIKLFYRPAGIAPVNKATFKKLLVNRSGNGLVIKNDSANWVTISDVKANNVKVNYETIMIAPLESQSVNVKSNNANNWYLTIIDDHGNYISDKI

SEQ ID NO: 9314 - protein, 368 aa, Escherichia coli; identical to SEQ ID NO: 4547

SEQ ID NO: 9315 - protein, 250 aa, Escherichia coli; identical to SEQ ID NO: 3048

SEQ ID NO: 9316 - protein, 883 aa, Escherichia coli; identical to SEQ ID NO: 4713

SEQ ID NO: 9317 - protein, 816 aa, Escherichia coli
MNIYRLSFVSCLVVAMPCALAVEFNLNVLDKSMRDRIDISLLKEKGVIAPGEYFVSVAVNNNQISNGQKINWHKNDDKTIPCINDLLVDKFGLKPEVRQSLPLINQCVDFSSRPEMLFNFDQANQQLNITIPQAWLAWHSENWTPPSTWKEGVAGVLMDYNLFASSYRPQDGSSSTNLNAYGTAGINTGAWRLRSDYQLNQTDSDDNHEQSGEISRTYLFRPLPQLGSKLTLGETDFSSNIFDGFSYTGAALASDDRMLPWELRGYAPQISGIAQTNATVTISQSGRVIYQKKVPPGPFIIDDLNQSVQGTLDVKVTEEDGRVNNFQVSAASTPFLTRQGQVRYKLAAGQPRPSMSHQTENETFFSNEVSWGMLSNTSLYGGLLLSGDDYHSAAIGIGQNMLWLGALSFDVTWASSHFDTQQDERGLSYRFNYSKQVDATNSTISLAAYRFSDRHFHSYANYLDHKYNDSDAQDEKQTISLSVGQPITPLNLNLYANLLHQTWWNADASTTANITAGFNVDIGDWRDISISTSFNTTHYEDKDRDNQIYLSISLPFGNGGRVGYDMQNSSHSTTHRMSWNDTLDERNSWGMSAGLQSDRPDNGAQVSGNYQHLSSAGEWDISGTYAANDYSSVSSSWSGSFTATQYGAAFHRRSSTNEPRLMVSTDGVADIPVQGNLDYTNHFGIAVVPLISSYQPSTVAVNMNDLPDGVIVAENVIKETWIEGAIGYKSLASRSGKDVNVIIRNASGQFPPLGADIRQDDSGISVGMVGEEGHAWLSGVAENQKFTVVWGDSQHCSLHLPEHMEDTANRLILPCH

SEQ ID NO: 9318 - protein, 237 aa, Escherichia coli; identical to SEQ ID NO: 3022

SEQ ID NO: 9319 - protein, 650 aa, Escherichia coli
MKGLNKITCCLLAALLMPCAGHAENEQYGANFNNADIRQFVEIVGQHLGKTILIDPSVQGTISVRSNDTFSQQEYYQFFLSILDLYGYSVITLDNGFLKVVRSANVKTSPGMIADSSRPGVGDELVTRIVPLENVPARDLAPLLRQMMDAGSVGNVVHYEPSNVLILTGRASTINKLIEVIKRVDVIGTEKQQIIHLEYASAEDLAEILNQLISESHGKSQMPALLSAKIVADKRTNSLIISGPEKARQRITSLLKSLDVEESEEGNTRVYYLKYAKATNLVEVLTGVSEKLKDEKGNSRKPSSTSAMDNVAITADEQTNSLVITADQSVQEKLATVIARLDIRRAQVLVEAIIVEVQDGNGLNLGVQWANKNVGAQQFTNTGLPVFNAAQGVADYKKNGGITSANPAWDMFSAYNGMAAGFFNGDWGVLLTALASNNKNDILATPSIVTLDNKLASFNVGQDVPVLSGSQTTSGDNVFNTVERKTVGTKLKVTPQVNEGDAVLLEIEQEVSSVDSSSNSTLGPTFNTRTIQNAVLVKTGETVVLGGLLDDFSKEQVSKVPLLGDIPLVGQLFRYTSTERAKRNLMVFIRPTVIRDDDVYRSLSKEKYTRYRQEQQLRIDGKSKALIGSEDLPVLDENTFNSHAPAPSSR

SEQ ID NO: 9320 - protein, 232 aa, Escherichia coli; identical to SEQ ID NO: 2087

SEQ ID NO: 9321 - protein, 243 aa, Escherichia coli; identical to SEQ ID NO: 2910

SEQ ID NO: 9322 - protein, 713 aa, Escherichia coli; identical to SEQ ID NO: 4590

SEQ ID NO: 9323 - protein, 729 aa, Escherichia coli; identical to SEQ ID NO: 4557

SEQ ID NO: 9324 - protein, 266 aa, Escherichia coli; identical to SEQ ID NO: 1894

SEQ ID NO: 9325 - protein, 729 aa, Escherichia coli; identical to SEQ ID NO: 4170

SEQ ID NO: 9326 - protein, 700 aa, Escherichia coli; identical to SEQ ID NO: 4566

SEQ ID NO: 9327 - protein, 760 aa, Escherichia coli; identical to SEQ ID NO: 2081

SEQ ID NO: 9328 - protein, 794 aa, Escherichia coli; identical to SEQ ID NO: 4850

SEQ ID NO: 9329 - protein, 360 aa, Escherichia coli; identical to SEQ ID NO: 3862

SEQ ID NO: 9330 - protein, 368 aa, Escherichia coli
MNKTITALAIIMASFAANASVLPETPVPFKSGTGAIDNDTVYIGLGSAGTAWYKLDTQAKDKKWTALAAFPGGPRDQATSAFIDGNLYVFGGIGKNSEGLTQVFNDVHKYNPKTNSWVKLMSHAPMGMAGHVTFVHNGKAYVTGGVNQNIFNGYFEDLNEAGKDSATIDKINAHYFDKKAEDYFFNKFLLSFDPSTQQWSYAGESPWYGTAGAAVVNKGDKTWLINGEAKPGLRTDAVFELDFTGNNLKWNKLAPVSSPDGVAGGFAGISNDSLIFAGGAGFKGSRENYQNGKNYAHEGLKKSYSTDIHLWHNGKWDKSGELSQGRAYGVSLPWNNSLLIIGGETAGGKAVTDSVLISVKDNKVTVQN

SEQ ID NO: 9331 - protein, 213 aa, Escherichia coli; identical to SEQ ID NO: 4186

SEQ ID NO: 9332 - protein, 266 aa, Escherichia coli; identical to SEQ ID NO: 3745

SEQ ID NO: 9333 - protein, 208 aa, Escherichia coli; identical to SEQ ID NO: 1948

SEQ ID NO: 9334 - protein, 656 aa, Escherichia coli; identical to SEQ ID NO: 4560

SEQ ID NO: 9335 - protein, 412 aa, Escherichia coli; identical to SEQ ID NO: 7283

SEQ ID NO: 9336 - protein, 656 aa, Escherichia coli; identical to SEQ ID NO: 6715

SEQ ID NO: 9337 - protein, 230 aa, Escherichia coli; identical to SEQ ID NO: 3348

SEQ ID NO: 9338 - protein, 838 aa, Escherichia coli; identical to SEQ ID NO: 3041

SEQ ID NO: 9339 - protein, 361 aa, Escherichia coli; identical to SEQ ID NO: 3061

SEQ ID NO: 9340 - protein, 784 aa, Escherichia coli; identical to SEQ ID NO: 2241

SEQ ID NO: 9341 - protein, 781 aa, Escherichia coli; identical to SEQ ID NO: 3796

SEQ ID NO: 9342 - protein, 746 aa, Escherichia coli; identical to SEQ ID NO: 4597

SEQ ID NO: 9343 - protein, 760 aa, Escherichia coli
MENNRNFPARQFNSLTFFAGLCIGITPVAQALAAEGQTNADDTLVVEASTPSLYAPQQSADPKFSRPVADTTRTMTVISEQVIKDQGATNLTDALKNVPGVGAFFAGENGNSTTGDAIYMRGADTSNSIYIDGIRDIGSVSRDTFNTEQVEVIKGPSGTDYGRSAPTGSINMISKQPRNDSGIDASASIGSAWFRRGTLDVNQVIGDTTAVRLNVMGEKTHDAGRDKVKNERYGVAPSVAFGLGTANRLYLNYLHVTQHNTPDGGIPTIGLPGYSAPSAGTAALNHSGKVDTHNFYGTDSDYDDSTTDTATMRFEHDINDNTTIRNTTRWSRVKQDYLMTAIMGGASNITQPTSDVNSWTWSRTANTKDVSNKILTNQTNLTSTFYTGSIGHDVSTGVEFTRETQTNYGVNPVTLPAVNIYHPDSSIHPGGLTRNGANANGQTDTFAIYAFDTLQITRDFELNGGIRLDNYHTEYDSATACGGSGRGAITCPTGVAKGSPVTTVDTAKSGNLMNWKAGALYHLTENGNVYINYAVSQQPPGGNNFALAQSGSGNSANRTDFKPQKANTSEIGTKWQVLDKRLLLTAALFRTDIENEVEQNDDGTYSQYGKKRVEGYEISVAGNITPAWQVIGGYTQQKATIKNGKDVAQDGSSSLPYTPEHAFTLWSQYQATDDISVGAGARYIGSMHKGSDGAVGTPAFTEGYWVADAKLGYRVNRNLDFQLNVYNLFDTDYVASINKSGYRYHPGEPRTFLLTANMHF

SEQ ID NO: 9344 - protein, 118 aa, Escherichia coli [sequence omitted]

SEQ ID NO: 9345 - protein, 715 aa, Escherichia coli; identical to SEQ ID NO: 5610

SEQ ID NO: 9346 - protein, 430 aa, Escherichia coli; identical to SEQ ID NO: 2617

SEQ ID NO: 9347 - protein, 193 aa, Escherichia coli; identical to SEQ ID NO: 2246

SEQ ID NO: 9348 - protein, 878 aa, Escherichia coli
MSYLNLRLYQRNTQCLHIRKHRLAGFFVRLFVACAFAAQAPLSSAELYFNPRFLADDPQAVADLSRFENGQELPPGTYRVDIYLNNGYMATRDVTFNTGDSEQGIVPCLTRAQLASMGLNTASISGMNLLADDACVPLTDMIHDATAHLDVGQQRLNLTIPQAFMSNRARGYIPPELWDPGINAGLLNYNFSGNSVQNRIGGNSHYAYLNLQSGLNIGAWRLRDNTTWSYNSSDRSSGSKNKWQHINTWLERDIIPLRSRLTLGDGYTQGDIFDGINFRGAQLASDDNMLPDSQRGFAPVIHGIARGTTQVTIKQNGYDIYNSTVPPGPFTINDIYAAGNSGDLQVTIKEADGSTQIFTVPYSSVPLLQREGHTRYSITAGEYRSGNAQQEKPRFFQSTLLHGLPAGWTIYGGTQLADRYRAFNFGIGKNMGALGALSVDMTQANSTLPDDSQHDGQSVRFLYNKSLNESGTNIQLVGYRYSTSGYFNFADTTYSRMNGYNIETQDGVIQVKPKFTDYYNLAYNKRGKLQLTVTQQLGRTSTLYLSGSHQTYWGTSNVDEQFQAGLNTAFEDINWTLSYSLTKNAWQKGRDQMLALNVNIPFSHWLRSDSKSQWRHASASYSMSHDLNGRMTNLAGIYGTLLEDNDLSYSVQTGYAGGGDGNSGSTGYATLNYRGGYGNANIGYSHSDDIKQLYYGVSGGVLAHANGVTLGQPLNDTVVLVKAPGAKDAKVENQTGVRTDWRGYAVLPYATEYRENRVALDTNTLADNVDLDNAVANVVPTRGAIVRAEFKARVGIKLLMTLTHNNKPLPFGAMVTSESSQSSGIVADNGQVYLSGMPLAGKVQVKWGEEENAHCVANYQLPPESQQQLLTQLSAECR

SEQ ID NO: 9349 - protein, 673 aa, Escherichia coli; identical to SEQ ID NO: 2919

SEQ ID NO: 9350 - protein, 753 aa, Escherichia coli; identical to SEQ ID NO: 6655

SEQ ID NO: 9351 - protein, 430 aa, Escherichia coli; identical to SEQ ID NO: 2617

SEQ ID NO: 9352 - protein, 351 aa, Escherichia coli
MKKSTLALVVMGIVASASVQAAEIYNKDGNKLDVYGKVKAMHYMSDNASKDGDQSYIRFGFKGETQINDQLTGYGRWEAEFAGNKAESDTAQQKTRLAFAGLKYKDLGSFDYGRNLGALYDVEAWTDMFPEFGGDSSAQTDNFMTKRASGLATYRNTDFFGVIDGLNLTLQYQGKNENRDVKKQNGDGFGTSLTYDFGGSDFAISGAYTNSDRTNEQNLQSRGTGKRAEAWATGLKYDANNIYLATFYSETRKMTPITGGFANKTQNFEAVAQYQFDFGLRPSLGYVLSKGKDIEGIGGEDLVNYIDVGATYYFNKNMSAFVDYKINQLDSDNKLNINNDDIVAVGMTYQF

SEQ ID NO: 9353 - protein, 445 aa, Escherichia coli
MITLRKLPLAVAVAAGVMSAQAMAVDFHGYARSGIGWTGSGGEQQCFQTTGAQSKYRLGNECETYAELKLGQEVWKEGDKSFYFDTNVAYSVAQQNDWEATDPAFREANVQGKNLIEWLPGSTIWAGKRFYQRHDVHMIDFYYWDISGPGAGLENIDVGFGKLSLAATRSSEAGGSSSFASNNIYDYTNETANDVFDVRLAQMEINPGGTLELGVDYGRANLRDNYRLVDGASKDGWLFTAEHTQSVLKGFNKFVVQYATDSMTSQGKGLSQGSGVAFDNEKFAYNINNNGHMLRILDHGAISMGDNWDMMYVGMYQDINWDNDNGTKWWTVGIRPMYKWTPIMSTVMEIGYDNVESQRTGDKNNQYKITLAQQWQAGDSIWSRPAIRVFATYAKWDEKWGYDYTGSSSTNPYYGKAVSADFNGGSFGRGDSDEWTFGAQMEIWW

SEQ ID NO: 9354 - protein, 363 aa, Escherichia coli; identical to SEQ ID NO: 3839

SEQ ID NO: 9355 - protein, 478 aa, Escherichia coli; identical to SEQ ID NO: 2405

SEQ ID NO: 9356 - protein, 678 aa, Escherichia coli; identical to SEQ ID NO: 4148

SEQ ID NO: 9357 - protein, 614 aa, Escherichia coli; identical to SEQ ID NO: 1885

SEQ ID NO: 9358 - protein, 243 aa, Escherichia coli; identical to SEQ ID NO: 3483

SEQ ID NO: 9359 - protein, 207 aa, Escherichia coli; identical to SEQ ID NO: 2211

SEQ ID NO: 9360 - protein, 869 aa, Escherichia coli
MKIPTTTDIPQRYTWCLAGICYSSLAILPSFLSYAESYFNPAFLLENGTSVADLSRFERGNHQPARVYRVDLWRNDEFIGSQDIVFESTTENTGDKSGGLMPCFNQVLLERIGLNSSAFPELAQQQNNKCINLLKAVPDATINFDFAAMRLNITIPQIALLSSAHGYIPPEEWDEGIPALLLNYNFTGNRGNGNDSYFFSELSGINIGPWRLRNNGSWNYFRGNGYHSEQWNNIGTWVQRAIIPLKSELVMGDGNTGSDIFDGVGFRGIRLYSSDNMYPDSQQGFAPTVRGIARTAAQLTIRQNGFIIYQSYVSPGAFEITDLHPTSSNGDLDVTIDERDGNQQNYTIPYSTVPILQREGRFKFDLTAGDFRSGNSQQSSPFFFQGTALGGLPQEFTAYGGTQLSANYTAFLLGLGRNLGNWGAVSLDVTHARSQLADDSRHEGDSIRFLYAKSMNTFGTNFQLMGYRYSTQGFYTLDDVAYRRMEGYEYDYDYDGEHRDELIIVNYHNLRFSRKDRLQLNISQSLNDFGSLYISGTHQKYWNTSDSDTWYQVGYTNSWVGISYSLSFSWNESVGIPDNERIVGLNVSVPFNVLTKRRYTRENALDRAYASFNANRNSNGQNSWLAGVGGTLLEGHNLSYHVSQGDTSNNGYTGSATANWQAAYGTLGVGYNYDRDQHDVNWQLSGGVVGHENGITLSQPLGDTNVLIKAPGAGGVRIENQTGILTDWRGYAVMPYATVYRYNRIALDTNTMGNSIDVEKNISSVVPTQGALVRANFDTRIGVRALITVTQGGKPVPFGSLVRENSTGITSMVGDDGQVYLSGAPLSGELLVQWGDGANSRCIAHYVLPKQSLQQAVTVISAVCTHPGS

SEQ ID NO: 9361 - protein, 862 aa, Escherichia coli; identical to SEQ ID NO: 7218

SEQ ID NO: 9362 - protein, 518 aa, Escherichia coli; identical to SEQ ID NO: 2350

SEQ ID NO: 9363 - protein, 161 aa, Escherichia coli; identical to SEQ ID NO: 2582

SEQ ID NO: 9364 - protein, 229 aa, Escherichia coli; identical to SEQ ID NO: 3277

SEQ ID NO: 9365 - protein, 360 aa, Escherichia coli; identical to SEQ ID NO: 4018

SEQ ID NO: 9366 - protein, 170 aa, Escherichia coli [sequence omitted]

SEQ ID NO: 9367 - protein, 432 aa, Escherichia coli; identical to SEQ ID NO: 2026

SEQ ID NO: 9368 - protein, 591 aa, Escherichia coli
MPSFIGGLVVFVSAAFNAQAETWFDPAFFKDDPSMVADLSRFEKGQKITPGVYRVDIVLNQTIVDTRNVNFVEITPEKGIAACLTTESLDAMGVNTDAFPAFKQLDKQACVPLAEIIPDASVTFNVNKLRLEISVPQIAIKSNARGYVPPERWDEGINALLLGYSFSGANSIHSSADSDSGDSYFLNLNSGVNLGPWRLRNNSTWSRSSGQTAEWKNLSSYLQRAVIPLKGELTVGDDYTAGDFFDSVSFRGVQLASDDNMLPDSLKGFAPVVRGIAKSNAQITIKQNGYTIYQTYVSPGAFEISDLYSTSSSGDLLVEIKEADGSVNSYSVPFSSVPLLQRQGRIKYAVTLAKYRINSNEQQESKFAQATLQWGGPWGTTWYGGGQYAEYYRAAMFGLGFNLGDFGAISFDATQAKSTLADQSEHKGQSYRFLYAKTLNQLGTNFQLMGYRYSTSGFYTLSDTMYKHMDGYEFNDGDDEDTPMWSRYYNLFYTKRGKLQVNISQQLGEYGSFYLSGSQQTYWHTDQQDRLLQFGYNTQIKDLSLGVSWNYSKSRGQPDADQVFALNFSLPLNLLLPRSNDSYTRKKITPG

SEQ ID NO: 9369 - protein, 237 aa, Escherichia coli; identical to SEQ ID NO: 3022

SEQ ID NO: 9370 - protein, 828 aa, Escherichia coli; identical to SEQ ID NO: 2379

SEQ ID NO: 9371 - protein, 837 aa, Escherichia coli; identical to SEQ ID NO: 4687

SEQ ID NO: 9372 - protein, 237 aa, Escherichia coli; identical to SEQ ID NO: 3793

SEQ ID NO: 9373 - protein, 614 aa, Escherichia coli
MIKKASLLTACSVTAFSAWAQDISPDTLVVTANRFEQPRSTVLAPTTVVTRQDIDRWQSTSVNDVLRRLPGVDITQNGGSGQLSSIFIRGTNASHVLVLIDGVRLNLAGVSGSADLSQFPIALVQRVEYIRGPRSAVYGSDAIGGVVNIITTRDEPGTEISAGWGSNSYQNYDVSTQQQLGDKTRVTLLGDYAHTHGYDVVAYGNTGTQAQTDNDGFLSKTLYGALEHNFTDAWSGFVRGYGYDNRTNYDAYYSPGSPLLDTRKLYSQSWDAGLRYNGELIKSQLITSYSHSKDYNYDPHFGRYDSSATLDEMKQYTVQWANNVIVGHGSIGAGVDWQKQTTTPGTGYVENGYDQRNTGIYLTGLQQVGDFTFEGAARSDDNSQFGRHGTWQTSAGWEFIEGYRFIASYGTSYKAPNLGQLYGFYGNPNLDPEKSKQWEGAFEGLTAGVNWRISGYRNDVSDLIDYDDHTLKYYNEGKARIKGVEATANFDTGPLTHTVSYDYVDARNAITDTPLLRRAKQQVKYQLDWQLYDFDWGITYQYLGTRYDKDYSSYPYQTVKMGGVSLWDLAVAYPVTSHLTVRGKIANLFDKDYETVYGYQTAGREYTLSGSYTF

SEQ ID NO: 9374 - protein, 207 aa, Escherichia coli; identical to SEQ ID NO: 2211

SEQ ID NO: 9375 - protein, 203 aa, Escherichia coli; identical to SEQ ID NO: 2201

SEQ ID NO: 9376 - protein, 362 aa, Escherichia coli; identical to SEQ ID NO: 2434

SEQ ID NO: 9377 - protein, 614 aa, Escherichia coli; identical to SEQ ID NO: 3301

SEQ ID NO: 9378 - protein, 229 aa, Escherichia coli; identical to SEQ ID NO: 3277

SEQ ID NO: 9379 - protein, 446 aa, Escherichia coli; identical to SEQ ID NO: 2179

SEQ ID NO: 9380 - protein, 731 aa, Escherichia coli; identical to SEQ ID NO: 3290

SEQ ID NO: 9381 - protein, 696 aa, Escherichia coli; identical to SEQ ID NO: 3314

SEQ ID NO: 9382 - protein, 191 aa, Escherichia coli; identical to SEQ ID NO: 2727

SEQ ID NO: 9383 - protein, 729 aa, Escherichia coli; identical to SEQ ID NO: 3052

SEQ ID NO: 9384 - protein, 213 aa, Escherichia coli; identical to SEQ ID NO: 2232

SEQ ID NO: 9385 - protein, 747 aa, Escherichia coli; identical to SEQ ID NO: 2072

SEQ ID NO: 9386 - protein, 118 aa, Escherichia coli [sequence omitted]

SEQ ID NO: 9387 - protein, 686 aa, Escherichia coli; identical to SEQ ID NO: 3015

SEQ ID NO: 9388 - protein, 246 aa, Escherichia coli; identical to SEQ ID NO: 7249

SEQ ID NO: 9389 - protein, 259 aa, Escherichia coli; identical to SEQ ID NO: 3847

SEQ ID NO: 9390 - protein, 673 aa, Escherichia coli; identical to SEQ ID NO: 3295

SEQ ID NO: 9391 - protein, 402 aa, Escherichia coli; identical to SEQ ID NO: 4768

SEQ ID NO: 9392 - protein, 200 aa, Escherichia coli; identical to SEQ ID NO: 1784

SEQ ID NO: 9393 - protein, 230 aa, Escherichia coli; identical to SEQ ID NO: 3019

SEQ ID NO: 9394 - protein, 274 aa, Escherichia coli; identical to SEQ ID NO: 2303

SEQ ID NO: 9395 - protein, 430 aa, Escherichia coli; identical to SEQ ID NO: 2617

SEQ ID NO: 9396 - protein, 360 aa, Escherichia coli; identical to SEQ ID NO: 3032

SEQ ID NO: 9397 - protein, 250 aa, Escherichia coli; identical to SEQ ID NO: 3855

SEQ ID NO: 9398 - protein, 209 aa, Escherichia coli; identical to SEQ ID NO: 4977

SEQ ID NO: 9399 - protein, 203 aa, Escherichia coli; identical to SEQ ID NO: 2201

SEQ ID NO: 9400 - protein, 208 aa, Escherichia coli; identical to SEQ ID NO: 1949

SEQ ID NO: 9401 - protein, 232 aa, Escherichia coli; identical to SEQ ID NO: 2087

SEQ ID NO: 9402 - protein, 224 aa, Escherichia coli; identical to SEQ ID NO: 3035

SEQ ID NO: 9403 - protein, 119 aa, Escherichia coli; identical to SEQ ID NO: 5512

SEQ ID NO: 9404 - protein, 784 aa, Escherichia coli; identical to SEQ ID NO: 2244

SEQ ID NO: 9405 - protein, 243 aa, Escherichia coli; identical to SEQ ID NO: 2910

SEQ ID NO: 9406 - protein, 565 aa, Escherichia coli; identical to SEQ ID NO: 2669

SEQ ID NO: 9407 - protein, 249 aa, Escherichia coli; identical to SEQ ID NO: 3028

SEQ ID NO: 9408 - protein, 246 aa, Escherichia coli; identical to SEQ ID NO: 3021

SEQ ID NO: 9409 - protein, 193 aa, Escherichia coli; identical to SEQ ID NO: 2246

SEQ ID NO: 9410 - protein, 222 aa, Escherichia coli; identical to SEQ ID NO: 4581

SEQ ID NO: 9411 - protein, 233 aa, Escherichia coli; identical to SEQ ID NO: 3276

SEQ ID NO: 9412 - protein, 746 aa, Escherichia coli; identical to SEQ ID NO: 3031

SEQ ID NO: 9413 - protein, 231 aa, Escherichia coli; identical to SEQ ID NO: 3055

SEQ ID NO: 9414 - protein, 478 aa, Escherichia coli; identical to SEQ ID NO: 2404

SEQ ID NO: 9415 - protein, 678 aa, Escherichia coli; identical to SEQ ID NO: 3014

SEQ ID NO: 9416 - protein, 828 aa, Escherichia coli; identical to SEQ ID NO: 2380

SEQ ID NO: 9417 - protein, 432 aa, Escherichia coli; identical to SEQ ID NO: 2026

SEQ ID NO: 9418 - protein, 241 aa, Escherichia coli; identical to SEQ ID NO: 2922

SEQ ID NO: 9419 - protein, 663 aa, Escherichia coli; identical to SEQ ID NO: 1910

SEQ ID NO: 9420 - protein, 367 aa, Escherichia coli; identical to SEQ ID NO: 3016

SEQ ID NO: 9421 - protein, 203 aa, Escherichia coli; identical to SEQ ID NO: 2009

SEQ ID NO: 9422 - protein, 246 aa, Escherichia coli; identical to SEQ ID NO: 3838

SEQ ID NO: 9423 - protein, 236 aa, Escherichia coli; identical to SEQ ID NO: 3821

SEQ ID NO: 9424 - protein, 228 aa, Escherichia coli; identical to SEQ ID NO: 3034

SEQ ID NO: 9425 - protein, 236 aa, Escherichia coli; identical to SEQ ID NO: 3286

SEQ ID NO: 9426 - protein, 351 aa, Escherichia coli; identical to SEQ ID NO: 3010

SEQ ID NO: 9427 - protein, 760 aa, Escherichia coli; identical to SEQ ID NO: 3026

SEQ ID NO: 9428 - protein, 539 aa, Escherichia coli; identical to SEQ ID NO: 3050

SEQ ID NO: 9429 - protein, 89 aa, Escherichia coli; identical to SEQ ID NO: 2810

SEQ ID NO: 9430 - protein, 102 aa, Escherichia coli; identical to SEQ ID NO: 1824

SEQ ID NO: 9431 - protein, 162 aa, Escherichia coli; identical to SEQ ID NO: 1965

SEQ ID NO: 9432 - protein, 359 aa, Escherichia coli; identical to SEQ ID NO: 2328

SEQ ID NO: 9433 - protein, 331 aa, Escherichia coli; identical to SEQ ID NO: 2700

SEQ ID NO: 9434 - protein, 700 aa, Escherichia coli; identical to SEQ ID NO: 3047

SEQ ID NO: 9435 - protein, 774 aa, Escherichia coli; identical to SEQ ID NO: 3018

SEQ ID NO: 9436 - protein, 250 aa, Escherichia coli; identical to SEQ ID NO: 3048

SEQ ID NO: 9437 - protein, 250 aa, Escherichia coli; identical to SEQ ID NO: 3811

SEQ ID NO: 9438 - protein, 518 aa, Escherichia coli; identical to SEQ ID NO: 2349

SEQ ID NO: 9439 - protein, 862 aa, Escherichia coli
MTIKSTNHLTHIATFCALLYSNSALCAELVEYDHTFLMGKDASNIDLSRYTDGNPTLPGIYDVSVYVNDQPIMSQSIAFAVIEGKKNAQACITQKNLLQFHISSPDKNSEKAILLKRDDDLGDCLNLAEMIPQSSIRYDVNDQRLDIDVPQAWIMKNYQNYVDPSLWENGINAAMLSYNLNGYHSESPGRTNDSIYAAFNGGINLGAWRLRASGNYNWMTNVHSDYDFQNRYLQRDLASLRSQLVIGESYTTGETFDSVSIRGIRLYSDSRMLPPVLASFAPIIHGVANTNAKVTVMQNGYKIYETTVPPGAFAIDDLSPSGYGSDLIVTIEEADGTKRTFSQPFSSVVQMLRPGVGRWDISAGQVLKDSIQDEPNLFQASYYYGLNNYLTGYTGIQLTDNNYTAGLLGLGMNTPVGAFSVDVTHSNVSIPDDKTYQGQSYRISWNKLFENTSTSLNIAAYRYSTLHYLGLNDALTLIDEVEHPEQDLEPKSMRNYSRMKNQVTVSINQPLKFEKKDYGSFYLSGSWSDYWASGQNSTNYSIGYSNSASWGSYSISAQRSLNEDGQTDDSIYLSFTIPIEHLLGTEHRSSGFQSIDTQLNSDFKGNNQLNISSSGYSDTNRISYSVNTGYMMNKSSDDLSYIGGYASYESPWGTLSGSASASSDNSRQFSLNTDGGFVLHSGGLTFSNDSFSDSDTLAVIQAPGAKGARINYGNSTVDRWGYGVTSALSPYHENRIALDINDLENDVELKSTSTVAVLRQGAVVFADFETVQGQSAIMNIVRSDGKNIPFAADIYDEQNNIIGNVGQGGQAFVRGIEQEGNIRITWIEDGKPVSCFAHYQQNTTSEKIAQSIILNGLRCQIQ

SEQ ID NO: 9440 - protein, 395 aa, Escherichia coli
MKRKVLAMLVPALLVAGAANAAEVYNKDGNKLDLYGKVAGLHYFSDDAGSDGDMSYARIGFKGETQIADQFTGYGQWEFNIGANGPESDKGNTATRLAFAGLGFGQNGTFDYGRNYGVVYDIEAWTDMLPEFGGDTYAGADNFMNGRANGVATYRNNGFFGQVDGLNFALQYQGNNEDDGLFGQEGSGNGNGRKLAKENGDGFGMSTSYDFDFGLSLGAAYSNSDRTDNQVHKGTHNTRYGDRFDATAGGETAEAWTVGAKYDANNVYLAAMYAETRNMTGYGDADAIANKTQNFEVVAQYQFDFGLRPSIAYLQSKGKDLGGVNSDNFDSQGNHHYTNKDLVKYVDIGMTYYFNKNISTYVDYKINLLDNDDDFYKENGIATDDIVAVGLVYQF

SEQ ID NO: 9441 - protein, 651 aa, Escherichia coli
MNNKNTFTGDKLSHAIKIALSGVVCSLLFVLPVHAVEFNVDMIDAEDRENIDISRFEKKGYIPPGRYLVRVQINKNMLPQTLILEWVKADNESGSLLCLTKENLTNFGLNTEFIESLQNIAGSECLDLSQRQELTTRLDKATMILSLSVPQAWLKYQATNWTPPEFWDAGIAGFILDYNVYASQYAPHHGDSTQNVSSYGTLGFNLGTWRLRSDYQYNQNFADGRSVNHDSEFARTYLFRPIPSLSSKFTMGQYDLSSNLYDTFHFTGASLESDESMLPPDLQGYAPQITGIAQTNAKVTVAQNGRVLYQTTVAPGPFTISDLGQSFQGQLDVTVEEEDGRTSTFQVGSASIPYLTRKGQVRYKTSLGKPTSVGHNDINNPFFWTAEASWGWLNNVSLYGGGMFTADDYQAITTGIGFNLNQFGSLSFDVTGADASLQQQNSDNLRGYSYRFNYAKHFESTGSQITFAGYRFSDKDYVSMSEYLSSRNGDESIDNEKESYVISLNQYFETLELNSYLNVTRNTYWDSASNTNYSVSVSKNFDIGDFKGISASLAVSRIRWDDDEENQYYFSFSLPLQQNRNISYSMQRTGSSNTSQMISWYDSSDRNNIWNISASATDDNIRDGEPTLRGSYQHYSPWGRLNINGSVQPNQ

SEQ ID NO: 9442 - protein, 368 aa, Escherichia coli
MNKTITALAIMMASFVANASVLPETPVPFKSGTGAIDNDTVYIGLGSAGTAWYKLDTQAKDKKWTALAAFPGGPRDQATSAFIDGNLYVFGGIGKNSEGLTQVFNDVHKYNPKTNSWVKLMSHAPMGMAGHVTFVHNGKAYVTGGVNQNIFNGYFEDLNEAGKDSTAIDKINAHYFDKKAEDYFFNKFLLSFDPSTQQWSYAGESPWYGTAGAAVVSKGDKTWLINGEAKPGLRTDAVFELDFTGNNLKWNKLAPVASPDGVAGGFAGMSNDSLIFAGGAGFKGSRENYQNGKNYAHEGLKKSYSADIHLWHNGKWDKSGELSRGRAYGVSLPWNNSLLIIGGETAGGKAVTDSVLISVKDNKVTVQN

SEQ ID NO: 9443 - protein, 207 aa, Escherichia coli; identical to SEQ ID NO: 2211

SEQ ID NO: 9444 - protein, 834 aa, Escherichia coli
MYKKLKLTTISELIKNIYCSLSVLIIGCASAYAVEFNKDLIEAEDRENVNLSQFETDGQLPVGKYSLNALINNKRTPIHLDLQWVLIDNQTAVCLTPEQLTLLGFTDEIIEVAQQNLIDGCYPIEKEKQITTYLDKGKMQLSISAPQAWLKYKDANWTPPELWDHGIAGAFLDYNLYASHYAPHQGDNSQNISSYGQAGVNLGAWRLRTDYQYDQSFNNGKSQANNLDFPRIYLFRPIPAINAKLTIGQYDTESSIFDSFHFSGVSLKSDENMLPPDLRGYAPQITGVAQTNAKVTVSQNNRIIYQENVPPGPFAITNLFNTLQGQLDVKVEEEDGQVTQWQVASNSIPYLTRKGQIRYTTAMGKPTSVGGDSLQQPFFWTGEFSWGWLNNVSLYGGSVLTNRDYQSLAAGVGFNLNSLGSLSFDVTRSDAQLHNQDKETGYSYRANYSKRFESTGSQLTFAGYRFSDKNFVTMNEYINDTNHYTNYQNEKESYIITFNQYLESLRLNTYVSLARNTYWDASSNVNYSLSLSRDFDIGPLKNVSTSLTFSRINWEEDNQDQLYLNISIPWGTSRTLSYGMQRNQDNKISHTASWYDSSDRNNSWSVSASGDNDEFKDMKASLRASYQHNTENGRLYLSGTSQRDSYYSLNASWNGSFTATRHGAAFHDYSGSADSRFMIDADGAEDIPLNNKRAVTNRYGIGVIPSVSSYITTSLSVDTRNLPENVDIENSVITTTLTEGAIGYAKLDTRKGYQIMGVIRLADGSHPPLGISVKDKTSHKELGLVADGGFVYLNGIQDDSKLTLRWGDKSCFIQPPNSSNLTTGTVILPCISQN

SEQ ID NO: 9445 - protein, 237 aa, Escherichia coli; identical to SEQ ID NO: 1814

SEQ ID NO: 9446 - protein, 207 aa, Escherichia coli; identical to SEQ ID NO: 2211

SEQ ID NO: 9447 - protein, 266 aa, Escherichia coli; identical to SEQ ID NO: 1894

SEQ ID NO: 9448 - protein, 883 aa, Escherichia coli
MTAFRAAFKAYRMHQVLILPRFARLTFALGLATAVFPVDAEYYFNPRFLSNDLAESVDLSAFTKGREAPPGTYRVDIYLNDEFMASRDITFIADDNNADLIPCLSTDLLVSLGIKKSALLDSKEHSAEKHVPDNSACTPLQDRLADASSEFDVGQQHLSLSVPQIYVGRMARGYVSPDLWEEGINAGLLNYSFNGNSINNRSNHNAGKSNYAYLNLQSGINIGSWRLRDNSTWSYNSGSSNSSDSNKWQHINTSAERDIIPLRSRLTVGDSYTDGDIFDSVNFRGLKINSTEAMLPDSQHGFAPVIHGIARGTAQVSVKQNGYDVYQTTVPPGPFTIDDINSAANGGDLQVTIKEADGSIQTLYVPYSSVPVLQRAGYTRYALAMGEYRSGNNLQSTPKFVQASLMHGLKGNWTPYGGMQIAEDYQAFNLGIGKDLGLFGAFSFDITQANTTLADDTRHSGQSVKSVYSKSFYQTGTNIQVAGYRYSTQGFYNLSDSAYSRMSGYTVKPPTGDTSEQTLFIDYFNLFYSKRGQEQISISQQLGNYGTTFFSASRQSYWNTSRSDQQISFGLNVPFGDITTSLNYSYSNNIWQNDRDHLLAFTLNVPFSHWMRTDSQSAFRNSNASYSMSNDLKGGMTNLSGVYGTLLPDNNLNYSVQVGNTQGGNTSSGTSGYSSLNYRGAYANTNVGYSRSGDSSQIYYGMSGGIIAHADGITFGQPLGDTMVLVKATGADNVKIENQTGIHTDWRGYAILPFATEYRENRVALNANSLADNVELDETVVTVIPTHGAIARATFNAQIGGKVLMTLKYGNKSVPFGAIVTHGENKNGSIVAENGQVYLTGLPQSGKLQVSWGNDKNSNCIVDYKLPVVSPGTLLNQQTAICR

SEQ ID NO: 9449 - protein, 826 aa, Escherichia coli
MLRMTPLASAIVALLLGIEAYAAEETFDTHFMIGAVKDQQVANIRLDDNQPLPGQYDIDIYVNKQWRGKYEIIVKDNPQETCLSREIIKRLGINTDNFASGKQCLTFEQLVQGGSYTWDIGVFRLDFSVPQAWVEELESGYVPPENWERGINAFYTSYYVSQYYSDYKASGNSKSTYVRFNSGLNLLGWQLHSDASFSKTNSNPGVWKSNTLYLERGFAQLLGTLRVGDMYTSSDIFDSVRFSGVRLFRDMQMLPNSKQNFTPRVQGIAQSNALVTIEQNGFVVYQKEVPPGPFAITDLQLAGGGADLDVSVKEADGSVTTYLVPYAAVPNMLQPGVSKYDFAAGRSHIEGASKQSDFVQAGYQYGFNNLLTLYGGSMVANNYYAFTLGTGWNTRIGAISVDATKSHSKQDNGDVFDGQSYQIAYNKFVSQTSTRFGLAAWRYSSRDYRTFNDHVWANNKDNYRRDENDIYDIADYYQNDFGRKNSFSANMSQSLPEGWGSVSLSTLWRDYWGRSGSSKDYQLSYSYNLRQISYTLAASQAYDENHHEEKRFNIFISIPFDWGDDVTTPRRQIYMSNSTTFDDQGFASNNTGLSGTVGSRYQFNYGVNLSHQHQGNETTAGANLTWNAPVATVNGSYSQSSTYRQAGASVSGGIVAWSGGVNLANRLSETFAVMNAPGIKDAYVNGQKYRTTNRNGVVVYDGMTPYRENHLMLDVSQSDSEAELRGNRKIAAPFRGAVVLVNFDTDQRKPWFIKALRTDGQPLTFGYEVNDIHGHNIGVVGQGSQLFIRTNEVPPSVNVAIDKQQGLSCTITFGKEIDESRNYICQ

SEQ ID NO: 9450 - protein, 203 aa, Escherichia coli; identical to SEQ ID NO: 2015

SEQ ID NO: 9451 - protein, 678 aa, Escherichia coli; identical to SEQ ID NO: 3881

SEQ ID NO: 9452 - protein, 402 aa, Escherichia coli
MLIPGVQAAKPQKVTLMVDDVPVAQVLQALAEQEKLNLVVSPDVSGTVSLHLTDVPWKQALQTVVKSAGLITRQEGNILSVHSIAWQNNNIARQEAEQARAQANLPLENRSITLQYADAGELAKAGEKLLSAKGSMTVDKRTNRLLLRDNKTALSALEQWVAQMDLPVGQVELSAHIVTINEKSLRELGVKWTLADAQHAGGVGQVTTLGSDLSVATATTHVGFNIGRINGRLLDLELSALEQKQQLDIIASPRLLASHLQPASIKQGSEIPYQVSSGESGATSVEFKEAVLGMEVTPTVLQKGRIRLKLHISQNVPGQVLQQADGEVLAIDKQEIETQVEVKSGETLALGGIFTRKNKSGQDSVPLLGDIPWFGQLFRHDGKEDERRELVVFITPRLVSSE

SEQ ID NO: 9453 - protein, 232 aa, Escherichia coli; identical to SEQ ID NO: 2087

SEQ ID NO: 9454 - protein, 746 aa, Escherichia coli; identical to SEQ ID NO: 3031

SEQ ID NO: 9455 - protein, 747 aa, Escherichia coli; identical to SEQ ID NO: 2072

SEQ ID NO: 9456 - protein, 729 aa, Escherichia coli; identical to SEQ ID NO: 6108

SEQ ID NO: 9457 - protein, 213 aa, Escherichia coli; identical to SEQ ID NO: 2232

SEQ ID NO: 9458 - protein, 191 aa, Escherichia coli; identical to SEQ ID NO: 2727

SEQ ID NO: 9459 - protein, 866 aa, Escherichia coli
MTIKPTKNYHNHLTRIATFCALLYCNSAFCAELVEYDHTFLMGQNASNIDLSRYSEGNPAIPGMYDVSVYVNDQPIINQSITFIEIEGKKNAQACITLKNLLQFHINSPDINNEKAVLLARDETLGNCLNLTEIIPQASVRYDVNEQRLDIDVPQAWVMKNYQNYVDPSLWENGINAAMLSYNLNGYHSETPGRRNDSIYAAFNGGMNLGAWRLRASGNYNWMTDSGSNYDFKNRYIQRDIASLRSQLILGESYTTGETFDSVSIRGIRLYSDSRMLPPTLASFAPIIHGVANTNAKVTITQGGYKIYETTVPPGAFVIDDLSPSGYGSDLIVTVEESDGSKRTFSQPFSSVVQMLRPGVGRWDISGGQVLKDDIQDETNLFQASYYYGLNNYLTGYTGIQITDNNYTAGLLGLGLNTSVGAFSFDVTHSNVRIPDDKTYQGQSYRVSWNKLFEETSTSLNIAAYRYSTQNYLGLNDALTLIDEVKHPEQDLEPKSMRNYSRMKNQVTVSINQPLKFEKKDYGSFYLSGSWSDYWASGQNRSNYSIGYSNSASWGSYSVSAQRSWNEDGDTDDSVYLSFTIPIEKLLGTEQRTSGFQSIDTQMSSDFKGNNQLNVSSSGYSDNARVSYSVNTGYTMNKASKDLSYVGGYASYESPWGTLAGSVSANSDNSRQVSLSTDGGFVLHSGGLTFSNDSFSDSDTLAVVQAPGAQGARINYGNSTIDRWGYGVTSALSPYHENRIALDINDLENDVELKSTSAVAVPRQGSVVFADFETVQGQSAIMDITRSDGKNIPFAADIYDEQGNVIGNVGQGGQAFVRGIEQQGNISIKWLEESKPVSCLAHYQQSSEAEKIAQSIILNGIRCQIQ

SEQ ID NO: 9460 - protein, 331 aa, Escherichia coli; identical to SEQ ID NO: 2700

SEQ ID NO: 9461 - protein, 162 aa, Escherichia coli; identical to SEQ ID NO: 1965

SEQ ID NO: 9462 - protein, 851 aa, Escherichia coli
MPSFIGGLVVFVSAAFNAQAETWFDPAFFKDDPSMVADLSRFEKGQKITPGVYRVDIVLNQTIVDTRNVNFVEITPEKGIAACLTTESLDAMGVNTDAFPAFKQLDKQACAPLAEIIPDASVTFNVNKLRLEISVPQIAIKSNARGYVPPERWDEGINALLLGYSFSGANSIHSSADSDSGDSYFLNLNSGVNLGPWRLRNNSTWSRSSGQTAEWKNLSSYLQRAVIPLKGELTVGDDYTAGDFFDSVSFRGVQLASDDNMLPDSLKGFAPVVRGIAKSNAQITIKQNGYTIYQTYVSPGAFEISDLYSTSSSGDLLVEIKEADGSINSYSVPFSSVPLLQRQGRIKYAVTLAKYRTNSNDQQESKFAQATLQWGGPWGTTWYGGGQYAEYYRAAMLGLGFNLGDFGAISFDATQAKSTLADQSEHKGQSYRFLYAKTLNHLGTNFQLMGYRYSTSGFYTLSDTMYKHMDGYEFNDGDDEDTPMWSRYYNLFYTKRGKLQVNISQQLGDYGSFYLSGSQQTYWHTDQQDRLLQFGYNTQIKDLSLGVSWNYSKSRGQPDADQVFALNFSLPLNLLLPRSNDSYTRKKNYAWMTSNTSIDNEGHTTQNLGLTETLLDDGNLSYSVQQGYNSEGETANGSASMDYKGAFADARVGYNYSDNGSQQQLNYALSGSLVAHSRGITLGQSLGETNVLIAAPGAENTRVANSTGLKTDWRGYTVVPYATSYRENRIVLDAASLKRNVDLENAVVNVVPTKGALVLAEFNAYAGGRVLMKTSTQGIPLRFGAIATLDGVQTNSGIIDDDGSLYMAGLPAKGTITVRWGEAPDQICHISYQLTEQQINAAITRMDAICR

SEQ ID NO: 9463 - protein, 840 aa, Escherichia coli
MNNKNTFSRDKLSHAIKNALSGVVCSLLFVLPVHAVEFNVDMIDAEDRENIDISRFEKKGYIPPGRYLVRVQINKNMLPQTLILEWVKADNESGSLLCLTKENLTNFGLNTEFIGSLQNIAGSECLDLSQRQELTTRLDKATMILSLSVPQAWLKYQATNWTPPEFWDTGIAGFILDYNVYASQYAPHHGDSTQNVSSYGTLGFNLGAWRLRSDYQYNQNFADGRPVNRDSEFARTYLFRPIPSWSSKFTMGQYDLSSNLYDTFHFTGASLESDESMLPPDLQGYAPQITGIAQTNAKVTVAQNGRVLYQTTVAPGPFTISDLGQSFQGQLDVTVEEEDGRTSTFQVGSASIPYLTRKGQVRYKTSLGKPTSVGHNDINNPFFWTAEASWGWLNNVSLYGGGMFTADDYQAITTGIGFNLNQFGSLSFDVTGADASLQQQNSGNLRGYSYRFNYAKHFESTGSQITFAGYRFSDKDYVSMSEYLSSRNGDESIDNEKESYVISLNQYFETLELNSYLNVTRNTYWDSASNTNYSVSVSKNFDIGDFKGISASLAVSRIRWDDDEENQYYFSFSLPLQQNRNISYSMQRTGSSNTSQMISWYDSSDRNNIWNISASATDDNIRDGEPTLRGSYQHYSPWGRLNINGSVQPNQYNSVTAGWYGSLTATRHGVALHDYSYGDNARMMVDTDGISGIEINSNRTVTNGLGIAVMPSLSNYTTSMLRVNNNDLPEGVDVENSVIRTTLTQGAIGYAKLNATTGYQIVGVIRQENGRFPPLGVNVTDKATGKDVGLVAEDGFVYLSGIQENSTLHLTWGDNTCEVTPPNQSNISESAIILPCKTVK

SEQ ID NO: 9464 - protein, 784 aa, Escherichia coli; identical to SEQ ID NO: 5933

SEQ ID NO: 9465 - protein, 673 aa, Escherichia coli
MKMTRLYPLALGGLLLPAIANAQTSQQDESTLVVTASKQSSRSASANNVSSTVVSAPELSDAGVTASDKLPRVLPGLNIENSGNMLFSTISLRGVSSAQDFYNPAVTLYVDGVPQLSTNTIQALTDVQSVELLRGPQGTLYGKSAQGGIINIVTQQPDSTPRGYIEGGVSSRDSYRSKFNLSGPIQDGLLYGSVTLLRQVDDGDMINPATGSDDLGGTRASIGNVKLRLAPDDQPWEMGFAASRECTRATQDAYVGWNDIKGRKLSISDGSPDPYMRRCTDSQTLSGKYTTDDWVFNLISAWQQQHYSRTFPSGSLIVNMPQRWNQNVQELRAATLGDARTVDMVFGLYRQNTREKLNSAYDMPTMPYLSSSGYTTAETLAAYSDLTWHLTDRFDIGGGVRFSHDKSSTQYHGSMLGNPFGDQGKSNDDQVLGQLSAGYMLTDDWRVYTRVAQGYKPSGYNIVPTAGLDAKPFVAEKSINYELGTRYETADVTLQAATFYTHTKDMQLYSGPVGMQTLSNAGKADATGVELEAKWRFAPGWSWDINGNVIRSEFTNDSELYHGNRVPFVPRYGAGSSVNGVIDTRYGALMPRLAVNLVGPHYFDGDNQLRQGTYATLDSSLGWQATERMNISVYVDNLFDRRYRTYGYMNGSSAVAQVNMGRTVGINTRIDFF

SEQ ID NO: 9466 - protein, 365 aa, Escherichia coli; identical to SEQ ID NO: 3878

SEQ ID NO: 9467 - protein, 663 aa, Escherichia coli; identical to SEQ ID NO: 3453

SEQ ID NO: 9468 - protein, 266 aa, Escherichia coli; identical to SEQ ID NO: 1894

SEQ ID NO: 9469 - protein, 871 aa, Escherichia coli
MHQVLLLPRFARLTIALGLATAVFPVDAEYYFNPRFLSNDLAESVDLSAFTKGREAPPGTYRVDIYLNDEFMTSRDITFIADDNNADLIPCLSTDLLVSLGIKKSALLDNKEHSAEKHVPDNSACTPLRDRLADASSEFNVGQQHLSLSVPQIYVGRMARGYVSPDLWEEGINAGLLNYSFNGNSINNRSNHNAGKSNYAYLNLQSGINIGSWRLRDNSTWSYNSGISNSSDSNKWQHINTSAERDIIPLRSRLTVGDSYTDGDIFDSVNFRGLKINSTEAMLPDSQHGFAPVIHGIARGTAQVSVKQNGYDVYQTTVPPGPFTINDINSAANGGDLQVTIKEADGSIQTLYVPYSSVPVLQRAGYTRYALAMGEYRSGNNLQSSPKFIQGSLMHGLEGNWTPYGGMQIAEDYQAFNLGIGKDLGLFGAFSFDITQANTTLADGTRHSGQSIKSVYSKSFYQTGTNIQVAGYRYSTQGFYNLSDSAYSRMSGYTVKPPTGDSNEQTQFIDYFNLFYSKRGQEQISISQQLGNYGTTFFSASRQSYWNTSRSDQQISFGLNVPFGDITTSLNYSYSNNIWQNDRDHLLAFTLNVPFSHWMRTDSQSAFRNSNASYSVSNDLKGGMTNLSGVYGTLLPDNNLNYSVQVGNTHGGNTSSGTSGYSSLNYRGAYGNTNVGYSRSGDSSQIYYGMSGGIIAHADGITFGQPLGDTMVLVKAPGADNVKIENQTGIHTDWRGYAILPFATEYRENRVALNANSLADNVELDETVVTVIPTHGAIARATFNAQIGGKVLMTLKYGNKSVPFGAIVTHGENKNGSIVAENGQVYLTGLPQSGKLQVSWGKDKNSNCIVEYKLPEVSPGTLLNQQTAICR

SEQ ID NO: 9470 - protein, 432 aa, Escherichia coli; identical to SEQ ID NO: 2026

SEQ ID NO: 9471 - protein, 208 aa, Escherichia coli; identical to SEQ ID NO: 1949

SEQ ID NO: 9472 - protein, 374 aa, Escherichia coli; identical to SEQ ID NO: 2982

SEQ ID NO: 9473 - protein, 816 aa, Escherichia coli
MNIYRLSFISCLVMAMPSALAVEFNLNVLDKSMRDRIDISLLKEKGVIAPGEYFVSVAVNNNQISNGQKINWQKKGDKTIPCINDSLVDKFGLKPDIRQSLPQIDRCIDFSSRPEMLFNFDQANQQLNISIPQAWLAWHSENWAPPSTWKEGVAGVLMDYNLFASSYRPQDGSSSTNLNAYGTAGINAGAWRLRSDYQLNKTDSEDNHDQSGGISRTYLFRPLPQLGSKLTLGETDFSSNIFDGFSYTGAALASDDRMLPWELRGYAPQISGIAQTNATVTVSHSGRVIYQKKVPPGPFIIDDLNQSVQGTLDVKVTEEDGRVNNFQVSAASTPFLTRQGQVRYKLAAGQPRPSMSHQTENETFFSNEVSWGMLSNTSLYGGLLISGDDYHSAAMGIGQNMLWLGALSFDVTWASSQFDTQQDERGLSYRFNYSKQVDATNSTISLAAYRFSDRHFHSYANYLDHKYNDNDAQDEKQTISLSVGQPITPLNLNLYANLLHQTWWNADASTTANITAGFNVDIGNWRDISISTSFNTTHYEDKDRDNQIYLSISLPFGNGGRVGYDMQNSSQSTTHRMSWNDTLDERNSWGMSTGLQSDRPDNGAQVSGNYQHLSSAGEWDISGTYAANDYSSVSSSWSGSFTATQYGAAFHRRSSTNEPRLMVSTDGVADIPVQGNLDYTNHFGIAVVPLISSYQPSTVAVNMNDLPDGVTVADNVIKETWIEGAIGYKSLASRSGKDVNVIIRNASGQFPPLGADIRQDDSGISVGMVGEEGHAWLSGVAENQQFTVVWGDSQRCSIHLPEHMEDTANRLILPCH

SEQ ID NO: 9474 - protein, 193 aa, Escherichia coli; identical to SEQ ID NO: 2246

SEQ ID NO: 9475 - protein, 614 aa, Escherichia coli; identical to SEQ ID NO: 3301

SEQ ID NO: 9476 - protein, 118 aa, Escherichia coli [sequence omitted]

SEQ ID NO: 9477 - protein, 565 aa, Escherichia coli
MKSPAPSRPQKMALIPACIFLCFAALSVQAEETPVTPQPPDILLGPLFNDVQNAKLFPDQKTFADAVPNSDPLMILADYRMQQNQSGFDLLHFVNVNFTLPKEGEKYVPPEGQSLREHIDGLWPVLTRSTENTEKWDSLLPLPEPYVVPGGRFREVYYWDSYFTMLGLAESGHWDKVADMVANFAHEIDTYGHIPNGNRSYYLSRSQPPFFALMVELLAQHEGDAALKQYLPQMQKEYAYWMDGVENLQAGQQEKRVVKLQDGTLLNRYWDDRDTPRPESWVEDIATAKSNPNRPATEIYRDLRSAAASGWDFSSRWMDNPHQLNTLRTTSIVPVDLNSLMFKMEKILARASKAAGDNAMANQYETLANARQKGIEKYMWNDQQGWYADYDLKSHKVRNQLTAAALFPLYVNAAAKDRANKMATATKTHLLQPGGLNTTSVKSGQQWDAPNGWAPLQWVATEGLQNYGQKEVAMDISWHFLTNVQHTYDREKKLVEKYDVSTTGTGGGGGEYPLQDGFGWTNGVTLKMLDLICPKEQPCDNVPATRPTVKSATTQPSTKEAQPTP

SEQ ID NO: 9478 - protein, 102 aa, Escherichia coli; identical to SEQ ID NO: 1824

SEQ ID NO: 9479 - protein, 729 aa, Escherichia coli; identical to SEQ ID NO: 4557

SEQ ID NO: 9480 - protein, 246 aa, Escherichia coli
MKSPLITTGMIYLLGICNFAQATVSPDRTRIIFNASNKSATVRLTNQSKIDPYLAQSWIEDASGKKTRDYISTLPPMERIEPDEQVQIRLMALASLNNLPQDRETLFYYNVREIPPRTKEQNVMQIAMQSRLKLFWRPKAIELKEGQMVPLQKVTITRTAAGLTLNNPTPYHITVGYIGTNGKTLMPGADSIMVAPFTSATQHLSSLPSTFQLGFVADYGGLEMFKVECNSVQSLCQSSPAKKGKI

SEQ ID NO: 9481 - protein, 713 aa, Escherichia coli
MAMFTPSFSGLKGRALFSLLFAAPMIHATDSVTTKDGETITVTADANSATEATDGYQPLSTSTATLTDMPMLDIPQVVNTVSDQVLENQNATTLDEALYNVSNVVQTNTLGGTQDAFVRRGFGANRDGSIMTNGLRTVLPRSFNAATERVEVLKGPASTLYGILDPGGLINVVTKRPEKTFHGSVSATSSSFGGGTGQLDITGPIEGTQLAYRLTGEVQDEDYWRNFGKERSTFIAPSLTWFGDNATVTMLYSHRDYKTPFDRGTIFDLTTKQPVNVDRKIRFDEPFNITDGQSDLAQLNAEYHLNSQWTARFDYSYSQDKYSDNQARVTAYDATTGTLTRRVDATQGSTQRMHATRADLQGNVDIAGFYNEILGGVSYEYYDLLRTDMIRCKKAKDFNIYNPVYGNTSKCTTVSASDSDQTIKQESYSAYAQDALYLTDNWIAVAGIRYQYYTQYAGKGRPFNVNTDSRDEQWTPKLGLVYKLTPSVSLFANYSQTFMPQSSIASYIGDLPPESSNAYEVGAKFELFDGITADIALFDIHKRNVLYTESIGDETIAKTAGRVRSRGVEVDLAGALTENINIIASYGYTDAKVLEDPDYAGKPLPNVPRHTGSLFLTYDIHNMPGNNTLTFGGGGHGVSRRSATNGADYYLPGYFVADAFAAYKMKLQYPVTLQLNVKNLFDKTYYTSSIATNNLGNQIGDPREVQFTVKMEF

SEQ ID NO: 9482 - protein, 816 aa, Escherichia coli
MLRTTRWVAAIIFLYSFPGYAEETFDTHFMIGGMRGEKVSEYRFDNKQPLPGNYELDFYVNHQWRGKKDITIPESPAKPCLPKVLLTTLGVKTDNLNTEDNCILLDEAVHGGQYQWDISEHRLNLTVPQAYINELERGYVPPESWDRGIDAFYTSYNLSQYRSYDSNNNSNTASYGRFNSGLNLFSWQLHSDASYSKPDDMKGKWQSNTLYLERGWSQILSTVQIGENYTSSLIFDSLRFSGIRLFRDMQMLPDSMQSFTPLVQGVAQSNALITVSQNGYTIYQKEVPPGPFTIADLQLSGSGSDLDVSIKEADGSVRSFLVPYSSVPNMLQPGVSNFDFIAGRSQIYGVKNQEDFLEANYIYGLNNLLTLYGGTILSDNYNAITLGNGWNTPLGAISFDATRSSSKLNNDTRHEGTSYQVAYNKYLLQTATHFSVAAWRYASQDYRTFSDHLYENDKINHQSDYDDFYDIGRKNSLSANIMQPLSNNLGNVSLSALWRNYWGRSGNAKDYQFSYSNSWQRISYTFSASQSYDENDKEEERFNLFISIPFYWGDDIAKTRHQINLSNSTSFSKDGYSSNNTGITGIAGEHDQLNYGIYVNQQQQNNDTSLGTNLSWRTPIATIDGSYSHSKNAWQSGGSISSGLVVWPGGINITNQLSDTFAILDAPGLEGAHINGQKYNRTNSKGQVVYDLIIPHRENHLVLDIANSESETELQGNRQIIAPYRGAVSYVQFTTDQRKPWYIQALRPDGSPLTFGYDVLDLQENNIGVVGQGSRLFIRVDEIPTGIKVALNDEQNLFCTITFQHVIDENKTYICQ

SEQ ID NO: 9483 - protein, 866 aa, Escherichia coli
MNKKTTTNYHYPLTHIATFCALLYSSSALSAEHVEYDNTFLMGRDASNIDLSRYSEGNPTLPGLYDVSVYINDQPVTNQSIAFVTVEGKKNAQACLTLKNLLQFHINQPDINAANAVLLARDNELGDCLNLAELIPQTSIRYDVNDQRLDIYVPQAWVMKNYQNYVDPSLWENGINAAMLSYNVNAYHSESPDRKNDSVYAAFNGGMNLGAWRLRATGNYSWRNDSDSNYDFQNRYLQRDLASLRSQLIVGESYTTGETFDSVSIRGVRLYSDSRMLPPALASFAPIIHGVANTNAKVTITQGSYKIYETTVPPGAFVIDDLSPSGYGSDLIVTIEEADGSKRTFSQPFSSVVQMLRPGVGRWDISGGQIIKDDIQDEPNLFQASYYYGLNNYLTGYTGIQLTDNHYTAGLLGLGLNTSLGAFSFDITHSNVSIPDDKTYQGQSYRLSWNKLFENTNTSLNIAAYRYSTQNYLGLNDALTLIDEVKHPEQDLEPQTMRNYSRMKNQVTVSISQPLKFEKQDYGSFYLTGDWSDYWASGQNRSNYSIGYSNSASWGSYSISAQRSWNEDGETDDSIYLSFTIPIEKLLGTSHRDSGFQSIDTQLNSDFKGNNQLNISSSGFSDANRVSYSVNTGYTMMKASDDLSYIGGYASYESPWGTLAGSVSASSDNSRQFSLNTDGGFVLHSGGLTFSNDSFSDSDTLAVVQAPGAKGARINYGNSTVDRWGYGVTSALSPYHENRIALDISGIENDVEMKSTSAIAVPRQGSVVFADFETVQGQSAIMNIKRNDGKNIPFAADIFDEQNNMIGNVGQGGQAFVRGIEQQGNIRINWVEEGKPVACIAHYKQTADQQKLTQTIILNGISCQIQ

SEQ ID NO: 9484 - protein, 266 aa, Escherichia coli; identical to SEQ ID NO: 1894

SEQ ID NO: 9485 - protein, 230 aa, Escherichia coli; identical to SEQ ID NO: 4803

SEQ ID NO: 9486 - protein, 213 aa, Escherichia coli; identical to SEQ ID NO: 2232

SEQ ID NO: 9487 - protein, 565 aa, Escherichia coli
MKSPTPSRPLKMALIPACIFLCFAALSVQAEETPVTPQPPDILLGPLFNDVQNAKLFPDQKTFADAVPNSDPLMILADYRMQQNQSGFDLRHFVNVNFTLPKEGEKYVPPEGQSLREHIDGLWPVLTRSTENTEKWDSLLPLPEPYVVPGGRFREVYYWDSYFTMLGLAESGHWDKVADMVANFAHEIDTYGHIPNGNRSYYLSRSQPPFFALMVELLAQHEGDAALKQYLPQMQKEYAYWMDGVENLQAGQQEKRVVKLQDGTLLNRYWDDRDTPRPESWGEDIATAKSNPNRPATEIYRDLRSAAASGWDFSSRWMDNPQQLNTLRTTSIVPVDLNSLMFKMEKILARASKAAGDNAMANQYETLANARQKGIEKYLWNDQQGWYADYDLKSHKVRNQLTAAALFPLYVNAAAKDRASKMATATKTHLLQPGGLNTTSVKSGQQWDAPNGWAPLQWVATEGLQNYGQKEVAMDISWHFLTNVQHTYDREKKLVEKYDVSTTGTGGGGGEYPLQDGFGWTNGVTLKMLDLICPKEQPCDNVPATRPLSESTTQPVKQNEAEPTP

SEQ ID NO: 9488 - protein, 111 aa, Escherichia coli; identical to SEQ ID NO: 3419

SEQ ID NO: 9489 - protein, 364 aa, Escherichia coli; identical to SEQ ID NO: 2848

SEQ ID NO: 9490 - protein, 203 aa, Escherichia coli
MKKIAITCALLSSLVASSVWADAASDLKSRLDKVSSFHASFTQKVTDGSGAAVQEGQGDLWVKRPNLFNWHMTQPDESILVSDGKTLWFYNPFVEQATATWLKDATGNTPFMLIARNQSSDWQQYNIKQNGDDFVLTPKASNGNLKQFTINVGRDGTIHQFSAVEQDDQRSSYQLKSQQNGAVEAAKFTFTPPQGVTVDDQRK

SEQ ID NO: 9491 - protein, 672 aa, Escherichia coli
MIVSAAPQVVSELDTPAAVSVVDGEEMRLATPRINLSESLTSVPGLQVQNRQNYAQDLQLSIRGFGSRSTYGIRGIRLYVDGIPATMPDGQGQTSNIDLSSVQNVEVLRGPFSALYGNASGGVMNVTTQTGQQPPTIEASSYYGSFGSWRYGLKATGATGDGTQPGDVDYTVSTTRFTTHGYRDHSGAQKNLANAKLGVRIDEASKLNLIFNSVDIKADDPGGLTKAEWKANPQQAPRAEQYDTRKTIKQTQAGLRYERSLSAQDDMSVMMYAGERETTQYQSIPMAPQLNPSHAGGVITLQRHYQGIDSRWTHRGELGVPLTFTTGLNYENMSENRKGYNNFRLNSGVPEYGQKGELRRDERNLMWNVDPYLQTQWQLSEKLSLDAGVRYSSVWFDSNDHYVTPGNGDDSGDASYHKWLPAGSLKYAMTDAWNIYLAAGRGFETPTINELSYRADGQSGMNFGLKPSTNDTIEIGSKTRIGYGLLSLALFQTDTDDEIVVDSSSGGRTTYKNAGKTRRQGAELAWDQRFAGDFRVKASWTWLDATYRSNVCNEQDCNGNRMPGIARNMGFASIGYVPEDGWYAGTEARYMGDIMADDENTAKAPSYTLVGLFTGYKYNYHNLTVDLFGRVDNLFDKEYVGSVIVNESNGRYYEPAPGRNYGVGMNIAWRFE

SEQ ID NO: 9492 - protein, 122 aa, Escherichia coli; identical to SEQ ID NO: 2915

SEQ ID NO: 9493 - protein, 362 aa, Escherichia coli; identical to SEQ ID NO: 4554

SEQ ID NO: 9494 - protein, 760 aa, Escherichia coli
MENNRNFPARQFHSLTFFAGLCIGITPVAQALAAEGQANADDTLVVEASTPSLYAPQQSADPKFSRPVADTTRTMTVISEQVIKDQGATNLTDALKNVPGVGAFFAGENGNSTTGDAIYMRGADTSNSIYIDGIRDIGSVSRDTFNTEQVEVIKGPSGTDYGRSAPTGSINMISKQPRNDSGIDASASIGSAWFRRGTLDVNQVIGDTTAVRLNVMGEKTHDAGRDKVKNERYGVAPSVAFGLGTANRLYLNYLHVTQHNTPDGGIPTIGLPGYSAPSAGTAALNHSGKVDTHNFYGTDSDYDDSITDTATMRFEHDINDNATIRNTTRWSRVKQDYLMTAIMGGASNITQPTSDVNSWTWSRTANTKDVSNKILTNQTNLTSTFYTGAIGHDVSTGVEFTRETQTNYGVNPVTLPAVNIYHPDSSIHPGGLTRNGANANGQTDTFAIYAFDTLQITRDFELNGGIRLDNYHTEYDSATACGGSGRGAITCPAGVAKGSPVTTVDTAKSGNLVNWKAGALYHLTENGNVYINYAVSQQPPGGNNFALAQSGSGNSANRTDFKPQKANTSEIGTKWQVLDKRLLLTAALFRTDIENEVEQNDDGTYSQYGKKRVEGYEISVAGNITPAWQMIGGYTQQKATIKNGKDVAQDGSSSLPYTPEHAFTLWSQYQATDDISVGAGARYIGSMHKGSDGAVGTPAFTEGYWVADAKLGYRVNRNLDFQLNVYNLFDTDYVASINKSGYRYHPGEPRTFLLTANMHF

SEQ ID NO: 9495 - protein, 700 aa, Escherichia coli
MKIFSVRQTVLPALLVLSPVVFAADEQTMIVSAAPQVVSELDIPAAVSVVDGEEMRLATPRINLSESLTGVPGLQVQNRQNYAQDLQLSIRGFGSRSTYGIRGIRLYVDGIPATMPDGQGQTSNIDLSSVQNVEVLRGPFSALYGNASGGVMNVTTQTGQQPPTIEASSYYGSFGSWRYGLKATGATGDGTQPGDVDYTVSTTRFTTHGYRDHSGAQKNLANAKLGVRIDDASKLSLIFNSVDIKADDPGGLTEAEWKANPQQAPRAEQYDTRKTIKQTQAGLRYERSLSAQDDMSVMMYAGERETTQYQSIPMAPQLNPSHAGGVITLQRHYQGIDSRWTHRGELGVPVTFTTGLNYENMSENRKGYNNFRLNRGVPEYGQKGELRRDERNLMWNVDPYLQTQWQLTDKLSLDAGVRYSSVWFDSNDHYVTPGNGDDSGDASYHKWLPAGSLKYAMTDAWNIYLAAGRGFETPTINELSYRADGQSGMNFGLKPSTNDTIEIGSKTRIGDGLLSLALFQTDTDDEIVVDSSSGGRTTYKNAGKTRRQGAELAWDQRFAGDFRVKASWTWLDATYRSNVCNEQDCNGNRMPGIARNMGFASIGYVPEDGWYAGTEARYMGDIMADDENTAKAPSYTLVGLFTGYKYNYHNLTVDLFGRVDNLFDKEYVGSVIVNESNGRYYEPAPGRNYGVGINIAWRFE

SEQ ID NO: 9496 - protein, 359 aa, Escherichia coli; identical to SEQ ID NO: 2329

SEQ ID NO: 9497 - protein, 250 aa, Escherichia coli
MKCIIGNKKWVYGFRDELKVSQNIIRSGILFLLSILFINNASAGGFGLGVTRLIYPAESKQITLSVQNSGDNTSYLIQSWVDDSKTEKKSQDFVITPPLFMLPTRKEASLRIMFLGKTNLPTDRETLYWMNVKAIPPTDEKNTQKNTLQLALQNKIKLFYRPENLPVQPGKARNMLRFKYEGKQLKVINPSPYYLTLTGIKVQGSKLPNMFVPPKSDITVSSPVTLAGEITYQTINDFGATTERQKGIMQ

SEQ ID NO: 9498 - protein, 368 aa, Escherichia coli
MNKTITALTIIMASFAANASVLPETPVPFKSGTGAIDNDTVYIGLGSAGTAWYKLDTQAKDKKWTALAAFPGGPRDQATSAFIDGNLYVFGGIGKNSEGLTQVFNDVHKYNPKTNSWVKLMSHAPMGMAGHVTFVHNGKAYVTGGVNQNIFNGYFEDLNEAGKDSTTIDKINAHYFDKKAEDYFFNKFLLSFDPSTQQWSYAGESPWYGTAGAAVVNKGDKTWLINGEAKPGLRTDAVFELDFTGNNLKWNKLAPVASPDGVAGGFAGMSNDSLIFAGGAGFKGSRENYQNGKNYAHEGLKKSYSADIHLWHNGKWDKSGELSQGRAYGVSLPWNNSLLIIGGETAGGKAVTDSVLISVKDNKVTVQN

SEQ ID NO: 9499 - protein, 285 aa, Escherichia coli
MKKYLALALIAPLLISCSTTKKGDTYNEAWVKDTNGFDILMGQFAHNIENIWGFKEVVIAGPKDYVKYTDQYQTRSHINFDDGTITIETIAGTEPAAHLRRAIIKTLLMGDDPSSVDLYSDVDDITISKEPFLYGQVVDNTGQPIRWEGRASNFADYLLKNRLKSRSNGLRIIYSVTINMVPNHLDKRAHKYLGMVRQASRKYGVDESLILAIMQTESSFNPYAVSRSDALGLMQVVQHTAGKDVFRSQGKSGTPSRSFLFDPASNIDIGTAYLAMLNNVYLGGI

SEQ ID NO: 9500 - protein, 420 aa, Escherichia coli
MRRLIRRLDSEMERSGNSQVFYLKYSKAEDLVDVLKQVSGTLTAAKEEAEGTVGSGREVVSIAASKHSNALIVTAPQDIMQSLQSVIEQLDIRRAQVHVEALIVEVAEGSNINFGVQWASKDAGLMQFANGTQIPIGTLGAAISQAKPQKGSTVISENGATTINPDTNGDLSTLAQLLSGFSGTAVGVVKGDWMALVQAVKNDSSSNVLSTPSITTLDNQEAFFMVGQDVPVLTGSTVGSNNSNPFNTVERKKVGIMLKVTPQINEGNAVQMVIEQEVSKVEGQTSLDVVFGERKLKTTVLANDGELIVLGGLMDDQAGESVAKVPLLGDIPLIGNLFKSTADKKEKRNLMVFIRPTILRDGMAADGVSQRKYNYMRAEQIYRDEQGLSLMPHTAQPVLPAQNQALPPEVRAFLNAGRTR

SEQ ID NO: 9501 - protein, 660 aa, Escherichia coli
MPRPQFTSLRLSLLALAVSATLPTFAFATETMTVTATGNARSSFEAPMMVSVIDTSAPENQTATSATDLLRHVPGITLDGTGRTNGQDVNMRGYDHRGVLVLVDGVRQGTDTGHLNGTFLDPALIKRVEIVRGPSALLYGSGALGGVISYDTVDAKDLLQEGQSSGFRVFGTGGTGDHSLGLGASAFGRTENLDGIVAWSSRDRGDLRQSNGETAPNDESINNMLAKGTWQIDSAQSLSGLVRYYNNDAREPKNPQTVEASDSSNPMVDRSTIQRDAQLSYKLAPQGNDWLNADAKIYWSEVRINAQNTGSSGEYREQITKGARLENRSTLFADSFASHLLTYGGEYYRQEQHPGGATTGFPQAKIDFSSGWLQDEITLRDLPITLLGGTRYDSYRGSSDGYKDVDADKWSSRAGMTINPTNWLMLFGSYAQAFRAPTMGEMYNDSKHFSIGRFYTNYWVPNPNLRPETNETQEYGFGLRFDDLMLSNDALEFKASYFDTKAKDYISTTVDFAAATTMSYNVPNAKIWGWDVMTKYTTDLFSLDVAYNRTRGKDTDTGEYISSINPDTVTSTLNIPIAHSGFSVGWVGTFADRSTHISSSYSKQPGYGVNDFYVSYQGQQALKGMTTTLVLGNAFDKEYWSPQGIPQDGRNGKIFVSYQW

SEQ ID NO: 9502 - protein, 274 aa, Escherichia coli
MNKTAIALLALLASSASLAATPWQKITQPVPGSAQSIGSFSNGCIVGADTLPIQSEHYQVMRTDQRRYFGHPDLVMFIQRLSSQVSNLGLGTVLIGDMGMPAGGRFNGGHASHQTGLDVDIFLQLPKTRWTSAQLLRPQALDLVSRDGKHVVPTLWKPEIFSLIKLAAQDKDVTRIFVNPAIKQQLCLDAGTDRDWLRKVRPWFQHRAHMHVRLRCPADSLECEDQPLPPPGDGCGAELQSWFEPPKPGTTKPEKKTPPPLPPSCQALLDEHVI

SEQ ID NO: 9503 - protein, 249 aa, Escherichia coli
MIKHLSAKTLTTVLSLLAATVSFSAQASVTPDRTRLIFNESDKSISVTLRNNDPKLPYLAQSWIEDEKGVKISSPLAVLPPVQRIDAMMNGQVKIQGLPDIHKLPADRESMFYFNVREIPPKSNKSNTLQIALQTRIKLFWRPKALEKTTTQNPWQHKVTLTRNGQEFTVNNPTPYYVIFSNASAQKNGNPAAGFSPIVMSPKTSAPLNVKMGSVPVLTYVNDYGARMPLFFTCNGNSCQVDEEQSRKG

SEQ ID NO: 9504 - protein, 879 aa, Escherichia coli
MPEHSFLRLRGLSWWIALAISGSPFNALADDTIQFDGRFLDLKGNTKIDLGRFSQKGYVEPGKYNLRVHVNNQPLPDDYDIYWYATENDPNKSYACLSPELVAQFGLKEDIAKNLQWIRDGQCLNTALLAGTEISGDLGQSALLVSVPQAYLEYTDSEWDPPSRWDDGIPGLIADYSINAQTRHENGGDDTNDISGNGTVGVNVGPWRLRADWQSDYQHTRSNDDGDTDDSCTQKNWEWSRYYAWRALPSLKAKLSLGEDYLNSDIFDGFSYIGGSISTDDQMLPPNLRGYAPDISGVAHTTAKVTVTQMGRVIYETQVPAGPFRIQDIGDSVSGTLHVRIEEQNGQVQEYDVSTASMPFLTRPGQVRYKVTMGRPQNWDHQVAGSFFSGGEASWGIANGWSLYGGALADENYQSAALGLGRDLALLGALAFDVTHSRVQLDDNSVYGNKTLDGNSYRVSYAKDFDELNSRVTFAGYRFSEKNYMTMSEYLDANDDDRARTGNDKEMYTVTYNQNFTDARVSVYLNYSHHTYWDRQDQTNYNMMLSHYFNLGSLRNLSVSLTGYRYEYDKSADKGVYLSLSLPWGDNSTISYNGNYGSGADSNQVSLYHRIDDASHYTVSAGTSENHSSVDGYYSHDGTLAKVDLSANYHEGQYTSAGISLQGGATLTAHGGALHRTQNMGGTRLLIDADGVANVPVEGNGSAVYTNMFGKAVVADVNDYYRNQAYIDLNKLPENAEATKSVVQATLTEGAIGYRKFAVISGEKAMAVLRLQDGSHPPFGAEVKNDNQQQVGLVDDEGNVYLAGVKPGEHMTVSWEGESHCDISLPDPLPNDLFNGLLLPCQQKGGSSPVIPHDIQPVIQEQTQQVAPMEPPMSVSSNQ

SEQ ID NO: 9505 - protein, 246 aa, Escherichia coli
MKLPLITTGMICFLGICNFAQATVSPDRTRIIFNASNKSATVRLTNQSKIDPYLAQSWIEDASGKKTRDYISTLPPMERIEPDEQVQIRLMALASLNNLPQDRETLFYYNVREIPPRAKEQNVMQIAMQSRLKLFWRPKAIELKEGEMVPLQKVTITRTAAGLTLNNPTPYHITVGYIGTNGKTLMPGADSIMVAPFASATQHLNNLPSTFQLGFVADYGGLEMFKVVCNSVQSLCQSTPAKKGKI

SEQ ID NO: 9506 - protein, 878 aa, Escherichia coli
MSYLNLRLYQRNTQCLHIRKHRLAGFFVRFFVACAFAAQAPLSSAELYFNPRFLADDPQAVADLSRFENGQELPPGTYRVDIYLNNGYMATRDVTFNTGDSEQGIVPCLTRAQLAGMGLNTASVSGMNLLADDACVPLTSMIHDATAHLDVGQQRLNLTIPQAFMSNRARGYIPPELWDPGINAGLLNYNFSGNSVQNRIGGNSHYAYLNLQSGLNIGAWRLRDNTTWSYNSSDSSSGSKNKWQHINTWLERDIIPLRSRLTLGDGYTQGDIFDGINFRGAQLASDDNMLPDSQRGFAPVIHGIARGTAQVTIKQNGYDIYNSTVPPGPFTINDIYAAGNSGDLQVTIKEADGSTQIFTVPYSSVPLLQREGHTRYSITAGEYRSGNAQQEKPRFFQSTLLHGLPAGWTIYGGTQLADRYRAFNFGIGKNMGALGALSVDMTQANSTLPDDSQHDGQSVRFLYNKSLNESGTNIQLVGYRYSTSGYFNFADTTYSRMNGYNIETQDGVIQVKPKFTDYYNLAYNKRGKLQLTVTQQLGRSSTLYLSGSHQTYWGTNNVDEQFQAGLNTAFEDINWTLSYSLTKNAWQKGRDQMLALNVNIPFSHWLRSDSKSQWRHASASYSMSHDLNGRMTNLAGVYGTLLEDNNLSYSVQTGYAGGGDGNSGSTGYATLNYRGGYGNANIGYSHSDDIKQLYYGVSGGVLAHANGVTLGQPLNDTVVLVKAPGAKDAKVENQTGVRTDWRGYAVLPYATEYRENRVALDTNTLADNVDLDNAVANVVPTRGAIVRAEFKARVGIKLLMTLTHNNKPLPFGAMVTSESSQSSGIVADNGQVYLSGMPLAGKVQVKWGEEENAHCVANYQLPPESQQQLLTQLSAECR

SEQ ID NO: 9507 - protein, 191 aa, Escherichia coli; identical to SEQ ID NO: 2727

SEQ ID NO: 9508 - protein, 207 aa, Escherichia coli; identical to SEQ ID NO: 2213

SEQ ID NO: 9509 - protein, 274 aa, Escherichia coli; identical to SEQ ID NO: 2301

SEQ ID NO: 9510 - protein, 565 aa, Escherichia coli
MKSPAPSRPQKMALIPACIFLCFAALSVQAEETSVTPQPPDILLGPLFNDVQNAKLFPDQKTFADAVPNSDPLMILADYRMQQNQSGFDLRHFVNVNFTLPKEGEKYVPPEGQSLREHIDGLWPVLTRSTENTEKWDSLLPLPKPYVVPGGRFREVYYWDSYFTMLGLAESGHWDKVADMVANFAHEIDTYGHIPNGNRSYYLSRSQPPFFALMVELLAQHEGDAALKQYLPQMQKEYAYWMDGVENLQAGQQEKRVVKLQDGTLLNRYWDDRDTPRPESWVEDIATAKSNPNRPATEIYRDLRSAAASGWDFSSRWMDNPQQLNTLRTTSIVPVDLNSLMFKMEKILSRASKAAGDNAMANQYETLANARQKGIEKYLWNDQQGWYADYDLKSHKVRNQLTAAALFPLYVNAAAKDRASKMATATKTHLLQSGGLNTTSVKSGQQWDAPNGWAPLQWVATEGLQNYGQKEVAMDISWHFLTNVQHTYDREKKLVEKYDVSTTGTGGGGGEYPLQDGFGWTNGVTLKMLDLICPKEQPCDNVPATRPLSESTTQPLKQKEAEPTP

SEQ ID NO: 9511 - protein, 203 aa, Escherichia coli; identical to SEQ ID NO: 2008

SEQ ID NO: 9512 - protein, 243 aa, Escherichia coli
MTFMKGLPLLLLIASLCSYAALQPDRTRIVFNANDKATSLRVDNRSDKLPYLAYSWLENEKGEKSDDLLVALPPIQRLEPKATTQVRIVKQASTAKLPGDRETLFFYNMREIPPSPEKNSGHAVLQVAIQSRIKVFWRPSALRKKAGEKVELQLQVSQQGNQLNLKNPTGYYLTIAYLGRNEQAVLPGFKTVMVAPFSTVITNTGSYSGSQFYLGYMDDYGALRMTTLNCNGHCRLQAVEAKK

SEQ ID NO: 9513 - protein, 232 aa, Escherichia coli
MVYDALGYTDMLPEFGGDTAYSDDFFVGRVGGVATYRNSNFFGLVDGLNFAVQYLGKNERAGIPERSNGDGVGGSISYEFEGFGIVGAYGAADRTDAQEAEFRGQGKKAEQWATGLKYDANNIYLAANYGETRNATPIEGGFANKTQDVLLVAQYQFDFGLRPSIAYTKSKAKDVEGIGDVDLVNYFEVGATYYFNKNMSTYVDYIINQIDSDNKLGVGSDDTVAVGIVYQF

SEQ ID NO: 9514 - protein, 518 aa, Escherichia coli; identical to SEQ ID NO: 2349

SEQ ID NO: 9515 - protein, 856 aa, Escherichia coli
MAGFFVRLFVACAFAAQAPLSSAELYFNPRFLADDPQAVADLSRFENGQELPPGTYRVDIYLNNGYMATRDVTFNTGDSEQGIVPCLTRAQLASMGLNTASVSGMNLLADDACVPLTSMIHDATAQLDVGQQRLNLTIPQAFMSNRARGYIPPELWDPGINAGLLNYNFSGNSVQNRIGGNSHYAYLNLQSGLNIGAWRLRDNTTWSYNSSDSSSGSKNKWQHINTWLERDIIPLRSRLTLGDGYTQGDIFDGINFRGAQLASDDNMLPDSQRGFAPVIHGIARGTAQVTIKQNGYDIYNSTVPPGPFTINDIYAAGNSGDLQVTIKEADGSTQIFTVPYSSVPLLQREGHTRYSITAGEYRSGNAQQEKPRFFQSTLLHGLPAGWTIYGGTQLADRYRAFNFGIGKNMGALGALSVDMTQANSTLPDDSQHDGQSVRFLYNKSLNESGTNIQLVGYRYSTSGYFNFADTTYSRMNGYNIETQDGVIQVKPKFTDYYNLAYNKRGKLQLTVTQQLGRTSTLYLSGSHQTYWGTSNVDEQFQAGLNTAFEDINWTLSYSLTKNAWQKGRDQMLALNVNIPFSHWLRSDSKSQWRHASASYSMSHDLNGRMTNLAGVYGTLLEDNNLSYSVQTGYAGGGDGNSGSTGYATLNYRGGYGNANIGYSHSDDIKQLYYGVSGGVLAHANGVTLGQPLNDTVVLVKAPGAKDAKVENQTGVRTDWRGYAVLPYATEYRENRVALDTNTLADNVDLDNAVANVVPTRGAIVRAEFKARVGIKLLMTLTHNNKPLPFGAMVTSESSQSSGIVADNGQVYLSGMPLAGKVQVKWGEEENAHCVANYQLPPESQQQLLTQLSAECR

SEQ ID NO: 9516 - protein, 828 aa, Escherichia coli
MKLSRRSFMKANAVAAAAAAAGLSVPGVARAVVGQQEAIKWDKAPCRFCGTGCGVLVGTQQGRVVACQGDPDAPVNRGLNCIKGYFLPKIMYGKDRLTQPLLRMKNGKYDKEGEFTPITWDQAFDVMEEKFKTALKEKGPESIGMFGSGQWTIWEGYAASKLFKAGFRSNNIDPNARHCMASAVVGFMRTFGMDEPMGCYDDIEQADAFVLWGSNMAEMHPILWSRITNRRLSNQNVTVAVLSTYQHRSFELADNGIIFTPQSDLVILNYIANYIIQNNAINQDFFSKHVNLRKGATDIGYGLRPTHPLEKAAKNPGSDASEPMSFEDYKAFVAEYTLEKTAEMTGVPKDQLEQLAQLYADPNKKVISYWTMGFNQHTRGVWANNLVYNLHLLTGKISQPGCGPFSLTGQPSACGTAREVGTFAHRLPADMVVTNEKHRDICEKKWNIPSGTIPAKIGLHAVAQDRALKDGKLNVYWTMCTNNMQAGPNINEERMPGWRDPRNFIIVSDPYPTVSALAADLILPTAMWVEKEGAYGNAERRTQFWRQQVQAPGEAKSDLWQLVQFSRRFKTEEVWPEELLAKKPELRGKTLYEVLYATPEVSKFPVSELAEDQLNDESRELGFYLQKGLFEEYAWFGRGHGHDLAPFDDYHKARGLRWPVVNGKETQWRYSEGNDPYVKAGEGYKFYGKPDGKAVIFALPFEPAAEAPDEEYDLWLSTGRVLEHWHTGSMTRRVPELHRAFPEAVLFIHPLDAKARDLRRGDKVKVVSRRGEVISIVETRGRNRPPQGLVYMPFFDAAQLVNKLTLDATDPLSKETDFKKCAVKLEKV

SEQ ID NO: 9517 - protein, 200 aa, Escherichia coli; identical to SEQ ID NO: 1785

SEQ ID NO: 9518 - protein, 614 aa, Escherichia coli
MIKKASLLTACSVTAFSAWAQDTSPDTLVVTANRFEQPRSTVLAPTTVVTRQDIDRWQSTSVNDVLRRLPGVDITQNGGSGQLSSIFIRGTNASHVLVLIDGVRLNLAGVSGSADLSQFPIALVQRVEYIRGPRSAVYGSDAIGGVVNIITTRDEPGTEISAGWGSNSYQNYDVSTQQQLGDKTRVTLLGDYAHTHGYDVVAYGNTGTQAQTDNDGFLSKTLYGALEHNFTDAWSGFVRGYGYDNRTNYDAYYSPGSPLLDTRKLYSQSWDAGLRYNGEMIKSQLITSYSHSKDYNYDPHYGRYDSSATLDEMKQYTVQWANNVTVGHGNIGAGVDWQKQTTTPGTGYVEDGYDQRNTGIYLTGLQQVGDFTFEGAARSDDNSQFGRHGTWQTSAGWEFIEGYRFIASYGTSYKAPNLGQLYGFYGNPNLNPEKSKQWEGAFEGLTAGVNWRISGYRNDVSDLIDYDDHTLKYYNEGKARIKGVEATANFDTGPLTHTVSYDYVDARNAITDTPLLRRAKQQVKYQLDWQLYDFDWGITYQYLGTRYDKDYSSYPYQTVKMGGVSLWDLAVAYPVTSHLTVRGKIANLFDKDYETVYGYQTAGREYTLSGSYTF

SEQ ID NO: 9519 - protein, 725 aa, Escherichia coli; identical to SEQ ID NO: 2986

SEQ ID NO: 9520 - protein, 838 aa, Escherichia coli
MPQRHHQGHKRTPKQLALIIKRCLPMVLTGSGMLCTTANAEEYYFDPIMLETTKSGMQATELSRFSKKYAQLPGTYQVDIWLNKKKVSQKKITFTANAEQLLQPQFTVEQLRELGIKVDEIPALAEKDDDSVINSLEQIIPGTAAEFDFNHQRLNLSIPQIALYRDARGYVSPSRWDDGIPTLFTNYSFTGSDNRYRQGNRSQRQYLNMQNGANFGPWRLRNYSTWTRNDQASSWNTISSYLQRDIKALKSQLLLGESATSGSIFSSYTFTGVQLASDDNMLPNSQRGFAPTVRGIANSSAIVTIRQNGYVIYQSNVPAGAFEINDLYPSSNSGDLEVTIEESDGTQRRFIQPYSSLPMMQRPGHLKYSATAGRYRADANSDSKEPEFAEATAIYGLNNTFTLYGGLLGSEDYYALGIGIGGTLGALGALSMDINRADTQFDNRHSFHGYQWRTQYIKDIPETNTNIAVSYYRYTNDGYFSFDEANTRNWDYNSRQKSEIQFNISQTIFDGVSLYASGSQQDYWGNNDKNRNISVGVSGQQWGIGYSLNYQYSRYTDQNNDRALSLNLSIPLERWLPRSRVSYQMTSQKDRPTQHEMRLDGSLLDDGRLSYSLEQSLDDDNNHNSSLNASYRSPYGTFSAGYSYGNDSSQYNYGVTGGVVIHPHGVTLSQYLGNAFALIDANGASGVRIQNYPGIATDPFGYAVVPYLTTYQENRLSVDTTQLPDNVDLEQTTQFVVPNRGAMVAARFNANIGYRVLVTVSDRNGKPLPFGALASNDETGQQSIVDEGGILYLSGISSKSQSWTVRWGNQADQQCQFAFSTPDSEPTTSVLQGTAQCH

SEQ ID NO: 9521 - protein, 351 aa, Escherichia coli; identical to SEQ ID NO: 2519

SEQ ID NO: 9522 - protein, 246 aa, Escherichia coli
MFFNIKHTTALCFVTCMAFSSSSIADIVISGTRVIYKSDQKSVNVRLENKGNNPLLVQSWLDTGDDNAEPGSITVPFTATPPVSRIDAKRGQTIKLMYTASTSLPKDRESVFWFNVLEVPPKPDAEKVANQSLLQLAFRTRIKLFYRPDGLKGNPSEAPLALKWFWSGSEGKASLRVTNPTPYYVSFSSGDLEASGKRYPIDVKMIAPFSDEVMKVTGLNGKASSAKVHFYAINDFGGAIEGNASL

SEQ ID NO: 9523 - protein, 820 aa, Escherichia coli; identical to SEQ ID NO: 7943

SEQ ID NO: 9524 - protein, 878 aa, Escherichia coli
MSYLNLRLYQRNTQCLHIRKHRLAGFFVRLVVACAFAAQAPLSSAELYFNPRFLADDPQAVADLSRFENGQELPPGTYRVDIYLNNGYMATRDVTFNTGDSEQGIVPCLTRAQLASMGLNTASVSGMNLLADDACVPLTSMIHDATAHLDVGQQRLNLTIPQAFMSNRARGYIPPELWDPGINAGLLNYNFSGNSVQNRIGGNSHYAYLNLQSGLNIGAWRLRDNTTWSYNSSDRSSGSKNKWQHINTWLERDIIPLRSRLTLGDGYTQGDIFDGINFRGAQLASDDNMLPDSQRGFAPVIHGIARGTAQVTIKQNGYDIYNSTVPPGPFTINDIYAAGNSGDLQVTIKEADGSTQIFTVPYSSVPLLQREGHTRYSITAGEYRSGNAQQEKPRFFQSTLLHGLPAGWTIYGGTQLADRYRAFNFGIGKNMGALGALSVDMTQANSTLPDDSQHDGQSVRFLYNKSLNESGTNIQLVGYRYSTSGYFNFADTTYSRMNGYNIETQDGVIQVKPKFTDYYNLAYNKRGKLQLTVTQQLGRTSTLYLSGSHQTYWGTSNVDEQFQAGLNTAFEDINWTLSYSLTKNAWQKGRDQMLALNVNIPFSHWLRSDSKSQWRHASASYSMSHDLNGRMTNLAGVYGTLLEDNNLSYSVQTGYAGGGDGNSGSTGYATLNYRGGYGNANIGYSHSDDIKQLYYGVSGGVLAHANGVTLGQPLNETVVLVKAPGAKDAKVENQTGVRTDWRGYAVLPYATEYRENRVALDTNTLADNVDLDNAVANVVPTRGAIVRAEFKARVGIKLLMTLTHNNKPLPFGAMVTSESSQSSGIVADNGQVYLSGMPLAGKVQVKWGEEENAHCIANYQLPPESQQQLLTQLSAECR

SEQ ID NO: 9525 - protein, 368 aa, Escherichia coli
MNKTITALAIMMASFAANASVLPETPVPFKSGTGAIDNDTVYIGLGSAGTAWYKLDTQAKDKKWTALAAFPGGPRDQATSAFIDGNLYVFGGIGKNSKGLTQVFNDVHKYNPKTNSWVKLMSHAPMGMAGHVTFVHNGKAYVTGGVNQNIFNGYFEDLNEAGKDSATIDKINAHYFDKKAEDYFFNKFLLSFDPSTQQWSYAGESPWYGTAGAAVVNKGDKTWLINGEAKPGLRTDAVFELDFTGNNLKWNKLAPVSSPDGVAGGFAGISNDSLIFAGGAGFKGSRENYQNGKNYAHEGLKKSYSTDIHLWHNGKWDKSGELSQGRAYGVSLPWNNSLLIIGGETAGGKAVTDSVLISVKYNKVTVQN

SEQ ID NO: 9526 - protein, 200 aa, Escherichia coli; identical to SEQ ID NO: 1784

SEQ ID NO: 9527 - protein, 575 aa, Escherichia coli; identical to SEQ ID NO: 7888

SEQ ID NO: 9528 - protein, 250 aa, Escherichia coli; identical to SEQ ID NO: 3048

SEQ ID NO: 9529 - protein, 274 aa, Escherichia coli; identical to SEQ ID NO: 2300

SEQ ID NO: 9530 - protein, 478 aa, Escherichia coli; identical to SEQ ID NO: 7448

SEQ ID NO: 9531 - protein, 237 aa, Escherichia coli
MRKITQAISAVCLLFALNSSAVALASSPSPLNPGTNVARLAEQAPIHWVSVAQIENSLAGRPPMAVGFDIDDTVLFSSPGFWRGKKTFSPESEDYLKNPVFWEKMNNGWDEFSIPKEVARQLIDMHVRRGDAIFFVTGRSPMKTETVSKTLADNFHIPATNMNPVIFAGDKPGQNTKSQWLQDKNIRIFYGDSDNDITAARDVGARGIRILRASNSTYKPLPQAGAFGEEVIVNSEY

SEQ ID NO: 9532 - protein, 700 aa, Escherichia coli
MKIFSVRQTVLPALLVLSPVVFAADEQTMIVSAAPQVVSELDTPAAVSVVDGEEMRLATPRINLSESLTGVPGLQVQNRQNYAQDLQLSIRGFGSRSTYGIRGIRLYVDGIPATMPDGQGQTSNIDLSSVQNVEVLRGPFSALYGNASGGVMNVTTQTGQQPPTIEASSYYGSFGSWRYGLKATGATGDGTQPSDVDYTVSTTRFTTHGYRDHSGAQKNLANAKLGVRIDEASKLSLIFNSVDIKADDPGGLTKAEWKANPQQAPRAEQYDTRKTIKQTQAGLRYERSLSAQDDMSVMMYAGERETTQYQSIPMAPQLNPSHAGGVITLQRHYQGIDSRWTHRGELGVPVTFTTGLNYENMSENRKGYNNFRLNSGMPEYGQKGELRRDERNLMWNIDPYLQTQWQLSEKLSLDAGVRYSSVWFDSNDHYVTPGNGDDSGDASYHKWLPAGSLKYAMTDAWNIYLAAGRGFETPTINELSYRADGQSGMNFGLKPSTNDTIEIGSKTRIGDGLLSLALFQTDTDDEIVVDSSSGGRTTYKNAGKTRRQGAELAWDQRFAGDFRVNASWTWLDATYRSNVCNEQDCNGNRMPGIARNMGFASIGYVPEDGWYAGTEARYMGDIMADDENTAKAPSYTLVGLFTGYKYNYHNLTVDLFGRVDNLFDKEYVGSVIVNESNGRYYEPSPGRNYGVGMNIAWRFE

SEQ ID NO: 9533 - protein, 826 aa, Escherichia coli
MLRMTPLASAIVALLLGIEAYAAEETFDTHFMIGGMKDQQVANIRLDDNQPLPGQYDIDIYVNKQWRGKYEIIVKDNPQETCLSIEVIKRLGINSDNFASGKQCLTFEQLVQGGSYTRDIGVFRLDFSVPQAWVEELESGYVPPENWERGINAFYTSYYVSQYYSDYKASGNSKSTYVRFNSGLNLLGWQLHSDASFSKTNNNPGVWKSNTLYLERGFAQLLGTLRVGDMYTSSDIFDSVRFSGVRLFRDMQMLPNSKQNFTPRVQGIAQSNALVTIEQNGFVVYQKEVPPGPFAITDLQLAGGGADLDVSVKEADGSVTTYLVPYAAVPNMLQPGVSKYDFAAGRSHIEGASKQSDFVQAGYQYGFNNLLTLYGGSMVANNYYAFTLGTGWNTRFGAISVDATKSHSKQDNGDVFDGQSYQIAYNKFVSQTSTRFGLAAWRYSSRDYRTFNDHVWANNKDNYRRDENVVYDIADYYQNDFGRKNSFSANMSQSLPEGWGSVSLSTLWRDYWGRSGSSKDYQLSYSNNWRRISYILAASQAYDENHHEEKRFNIFISIPFDWGDDVTTPRRQIYMSNSTTFDDQGFASNNTGLSGTVGSRDQFNYGVNLSYQNQGNETTAGANLTWNAPVATVNGSYSQSSTYRQAGASVSGGIVAWSGGVNLANRLSETFAVMNAPGIKDAYVNGQKYRTTNRNGVVVYDGMTPYRENHLMLDVSQSDSEAELRGNRKIAAPYRGAVVLVNFDTDQRKPWFIKALRADGQPLMFGYEVNDIHGHNIGVVGQGSQLFIRTNEVPPSVNVAIDKQQGLSCTITFGKEIDESRNYICQ

SEQ ID NO: 9534 - protein, 539 aa, Escherichia coli; identical to SEQ ID NO: 3050

SEQ ID NO: 9535 - protein, 725 aa, Escherichia coli; identical to SEQ ID NO: 2986

SEQ ID NO: 9536 - protein, 224 aa, Escherichia coli; identical to SEQ ID NO: 3115

SEQ ID NO: 9537 - protein, 518 aa, Escherichia coli; identical to SEQ ID NO: 2349

SEQ ID NO: 9538 - protein, 446 aa, Escherichia coli; identical to SEQ ID NO: 2176

SEQ ID NO: 9539 - protein, 883 aa, Escherichia coli; identical to SEQ ID NO: 7801

SEQ ID NO: 9540 - protein, 430 aa, Escherichia coli; identical to SEQ ID NO: 2617

SEQ ID NO: 9541 - protein, 121 aa, Escherichia coli; identical to SEQ ID NO: 2522

SEQ ID NO: 9542 - protein, 733 aa, Escherichia coli; identical to SEQ ID NO: 5945

SEQ ID NO: 9543 - protein, 229 aa, Escherichia coli
MALLIFAVLSLLVAGELQAGVVVGGTRFIFPADRESISILLTNTSQESWLINSKINRPTRWAGGEASTVPAPLLAAPPLILLKPGTTGTLRLLRTESDILPVDRETLFELSIASVPSGKVENQSVKVAIRSVFKLFWRPEGLPGDPLEAYQQLRWTWNSQGVQLTNPTPYYINLIQVSVNGKALSNAGVVPPKSQRQTSWCQAIAPCHVAWRAINDYGGLSAKKEQNLS

SEQ ID NO: 9544 - protein, 233 aa, Escherichia coli; identical to SEQ ID NO: 3276

SEQ ID NO: 9545 - protein, 816 aa, Escherichia coli
MNIYRLSFVSCLVVAMPCALAVEFNLNVLDKSMRDRIDISLLKEKGVIAPGEYFVSVAVNNNQISNGQKINWHKNDDKTIPCINDLLVDKFGLKPEVRQSLPLINQCVDFSSRPEMLFNFDQANQQLNISIPQAWLAWHSENWTPPSTWKEGVAGILMDYNLFASSYRPQDGSSSTNLNAYGTTGINAGAWRLRSDYQLNQTDSDDNHEQSGGISRTYLFRPLPQLGSKLTLGETDFSSNIFDGFSYTGAALASDERMLPWELRGYAPQISGIAQTNATVTISQSGRVIYQKKVPPGPFIIDDLNQSVQGTLDVKVTEEDGRVNNFQVSAASTPFLTRQGQVRYKLAAGQPRPSMSHQTENETFFSNEVSWGMLSNTSLYGGLLLSGDDYHSAAMGIGQNMLWLGALSFDVTWASSHFDTQQDERGLSYRFNYSKQVDATNSTISLAAYRFSDRHFHSYANYLDHKYNDSDAQDEKQTISLSVGQPITPLNLNLYANLLHQTWWNADASTTANITAGFNVDIGDWRDISISTSFNTTHYEDKDRDNQIYLSISLPFGNGGRVGYDMQNSSHSTTHRMSWNDTLDERNSWGMSAGLQSDRPDNGAQVSGNYQHLSSAGEWDISGTYAANDYSSVSSSWSGSFTATQYGAAFHRRSSTNEPRLMVSTDGVADIPVQGNLDYTNHFGIAVVPLISSYQPSTVAVNMNDLPDGVTVAENVIKETWIEGAIGYKSLASRSGKDVNVIIRNASGQFPPLGADIRQDGSGISVGMVGEEGHAWLSGVAENQQFTVVWGDSQHCSLHLPEHMEDTANRLILPCH

SEQ ID NO: 9546 - protein, 243 aa, Escherichia coli; identical to SEQ ID NO: 3483

SEQ ID NO: 9547 - protein, 359 aa, Escherichia coli; identical to SEQ ID NO: 2328

SEQ ID NO: 9548 - protein, 714 aa, Escherichia coli
MAPAVAQQTDDETFVVSANRSNRTVAEMAQTTWVIENAELEQQIQGGKELKDALAQLIPGLDVSSRSRTNYGMNVRGRPLVVLVDGVRLNSSRTDSRQLDSIDPFNIDHIEVISGATSLYGGGSTGGLINIVTKKGQPETMMEFEAGTKSGFSSSKDHDERIAGAVSGGNEHISGRLSVAYQKFGGWFDGNGDATLLDNTQTGLQYSDRLDIMGTGTLNIDESRQLQLITQYYKSQGDDDYGLNLGKGFSAIRGTSTPFVSNGLNSDRIPGTERHLISLQYSDSAFLGQELVGQVYYRDESLRFYPFPTVNANKQVTAFSSSQQDTDQYGMKLTLNSKPMDGWQITWGLDADHERFTSNQMFFDLAQASASGGLNNKKIYTTGRYPSYDITNLAVFLQSGYDINNLFTLNGGVRYQYTENKIDDFIGYAQQRQIAAGKATSADAIPGGSVDYDNFLFNAGLLMHITERQQAWLNFSQGVELPDPGKYYGRGIYGAAVNGHLPLTKSVNVSDSKLEGVKVDSYELGWRFTGNNLRTQIAAYYSISDKSVVANKDLTISVVDDKRRIYGVEGAVDYLIPDTDWSTGVNFNVLKTESKVNGTWQKYDVKTASPSKATAYIGWAPDPWSLRVQSTTSFDVSDAQGYKVDGYTTVDLLGSYQLPVGTLSFSIENLFDRDYTTVWGQRAPLYYSPGYGPASLYDYKGRGRTFGLNYSVLF

SEQ ID NO: 9549 - protein, 258 aa, Escherichia coli
MRQYRLLSPMIKVVIVLFSLLFSTAQAGLVIGGTRFAYPENQSSISVELKNTSDRDMLVKVAVSPDDARHLTGTVESLPSFSGTVFIATPPLFVLKPDKNTKIRINRVGGSLPADRESLFILNVAALPTLENSHSVKTDNQLQIAVRNRMKIFYRPSNLSEDPNMSYQKLRWARKNEIVTVYNPGPRYVTLYNLHADGKVMDGGMIAPFSHRQQSWCKAQGVCEIAWQTLDIYNNVLPILKVKLNPSQLDVTGFVFSQ

SEQ ID NO: 9550 - protein, 109 aa, Escherichia coli
MTFNTRLIKEVTQNFALAFEGSYQYMDLKPKGYQNHNAVNGSFYKLTFAPTLKANDINNFFSRPELRLFATWMDWSSKLDDFASNDAFGSSGFNTGGEWNFGVQMETWF

SEQ ID NO: 9551 - protein, 203 aa, Escherichia coli; identical to SEQ ID NO: 2201

SEQ ID NO: 9552 - protein, 312 aa, Escherichia coli
MYKKTTLAVLIALLTGATTVHAQTDISSIESRLAALEQRLKNAESRAQAAEARAKTAELQVQKLAETQQQNQLTTQEVAQRTVQLEQKSAENSGFEFHGYARSGLLMNDAASSSKSGPYLTPAGETGGAVGRLGNEADTYVELNVEHKQTLDNGATTRFKAMLADGQRDYNDWTGSSSNLNIRQAFAELGALPSFTGAFKDSTVWAGKRFDRDNFDIHWLDSDVVFLAGTGGGIYDVKWNDTFRSNFSLYGRNFGDLDDIDNNVQNYILTMNHYAGPFQLMVADYGQKIMMIEKMPMVISFKLMLQILAYMR

SEQ ID NO: 9553 - protein, 869 aa, Escherichia coli; identical to SEQ ID NO: 3352

SEQ ID NO: 9554 - protein, 446 aa, Escherichia coli; identical to SEQ ID NO: 2182

SEQ ID NO: 9555 - protein, 678 aa, Escherichia coli
MVPSTFSRLKAARCLPVVLAALIFAGCGTHTPDQSTAYMQGTAQADSAFYLQQMQQSSDDTRINWQLLAIRALVKEGKTGQAVELFNQLPQELNDSQRREKTLLAAEIKLAQKDFAGAQNLLAKITPADLEQNQQARYWQAKIDASQGRPSIDLLRALIAQEPLLGAKEKQQNIDATWQALSSMTQEQANTLVINADENILQGWLDLQRVWFDNRNDPDMMKAGIADWQKRYPNNPGAKMLPTQLVNVKAFKPASTNKIALLLPLNGQAAVFGRTIQQGFEAAKNIGTQPVAAQVAAAPAADVAEQPQPQTVDGVASPAQASVSELTGEQPAAQPVPVSAPATSTAAVSAPANPSAELKIYDTSSQPLSQILSQVQQDGASIVVGPLLKNNVEELLKSNTPLNVLALNQPENIENRVNICYFALSPEDEARDAARHIRDQGKQAPLVLIPRSSLGDRVANAFAQEWQKLGGGTVLQQKFGSTSELRAGVNGGSGIALTGSPITPRETTDSGMTTNNPTLQTTPTDDQFTNNGGRVDAVYIVATPGEIAFIKPMIAMRNGSQSGATLYASSRSAQGTAGPDFRLEMEGLQYSEIPMLAGGNLPLMQQALSAVNNDYSLARMYAMGVDAWSLANHFSQMRQVQGFEINGNTGSLTANPDCVINRKLSWLQYQQGQVVPAS

SEQ ID NO: 9556 - protein, 539 aa, Escherichia coli; identical to SEQ ID NO: 3845

SEQ ID NO: 9557 - protein, 678 aa, Escherichia coli
MVPSTFSRLKAARCLPVVLAALIFAGCGTHTPDQSTAYMQGTAQADSAFYLQQMQQSSDDTRINWQLLAIRALVKEGKTGQAVELFNQLPQELNDSQRREKTLLAAEIKLAQKDFAGAQNLLAKITPADLEQNQQARYWQVKIDASQGRPSIDLLRALIAQEPLLGAKEKQQNIDATWQALSSMTQEQANTLVINADENILQGWLDLQRIWFDNRNDPDMMKAGIADWQKRYPNNPGAKMLPTQLVNVKAFKPASTNKIALLLPLNGQAAVFGRTIQQGFEAAKNIGTQPVATQVAAAPAADVAEQPQPQTVDGVASPAQASVSDLTGEQPAAQPVPVNAPAATTAAVSAPANPSAELKIYDTSSQPLSQILNQVQQDGASIVVGPLLKNNVEELLKSNTPLNVLALNQPENIENRVNICYFALSPEDEARDAARHIRDQGKQAPLVLIPRSSLGDRVANAFAQEWQKLGGGTVLQQKFGSTSELRAGVNGGSGIALTGSPITPRATTDSGMTTNNPTLQTTPTDDQFTNNGGRVDAVYIVATPGEIAFIKPMIAMRNGSQSGATLYASSRSAQGTAGPDFRLEMEGLQYSEIPMLAGGNLPLMQQALSAVNNDYSLARMYAMGVDAWSLTNHFSQMRQVQGFEINGNTGSLTANPDCVINRKLSWLQYQQGQVVPAS

SEQ ID NO: 9558 - protein, 828 aa, Escherichia coli; identical to SEQ ID NO: 2380

SEQ ID NO: 9559 - protein, 161 aa, Escherichia coli; identical to SEQ ID NO: 2582

SEQ ID NO: 9560 - protein, 729 aa, Escherichia coli
MLSTQFNRDNQHQTTSKPSLLAACIALALLPSAAFAAPATEETVIVEGSATTPVDDENDYSVTSTSAGTKMQMTQRDIPQSVTIVSQQRMEDQQLQTLGEVMENTLGISKSQADSDRALYYSRGFQIDNYMVDGIPTYFESRWNLGDALSDMALFERVEVVRGATGLMTGTGNPSAAINMVRKHATSREFKGDVSAEYGSWNKERYVADLQSPLTEDGKIRARIVGGYQNNDSWLDRYNSEKTFFSGIVDADLGDLTTLSAGYEYQRIDVNSPTWGGLPRWNIDGSSNSYDRARSTAPDWAYNDKEINKVFMTLKQRFADTWQATLNATHSEVEFDSKMMYVDAYVNKADGMLVGPYSNYGPGFDYVGGTGWNSGKRKVDALDLFADGSYELFGRQHNLMFGGSYSKQNNRYFSSWANIFPDEIGSFYNFNGNFPQTDWSPQSLAQDDTTHMKSLYAATRVTLADPLHLILGARYTNWRVDTLTYSMEKNHTTPYAGLVFDINDNWSTYASYTSIFQPQNDRDSSGKYLAPITGNNYELGLKSDWMNSRLTTTLAIFRIEQDNVAQSTGTPIPGSNGETAYKAVDGTVSKGVEFELNGAITDNWQLTFGATRYIAEDNEGNAVNPNLPRTTVKMFTSYRLPVMPELTVGGGVNWQNRVYTDTVTPYGTFRAEQGSYALVDLFTRYQVTKNFSLQGNVNNLFDKTYDTNVEGSIVYGAPRNFSITGTYQF

SEQ ID NO: 9561 - protein, 161 aa, Escherichia coli; identical to SEQ ID NO: 2582

SEQ ID NO: 9562 - protein, 866 aa, Escherichia coli; identical to SEQ ID NO: 4866

SEQ ID NO: 9563 - protein, 362 aa, Escherichia coli; identical to SEQ ID NO: 2434

SEQ ID NO: 9564 - protein, 686 aa, Escherichia coli; identical to SEQ ID NO: 3015

SEQ ID NO: 9565 - protein, 161 aa, Escherichia coli; identical to SEQ ID NO: 2582

SEQ ID NO: 9566 - protein, 237 aa, Escherichia coli
MRKITQALSAVCLLFALNSSAVALASSPSPLNPGTNVAKLAEQVPIHWVSVAQIENSLAGRPPMAVGFDIDDTVLFSSPGFWRGKKTFSPESEDYLKNPVFWEKMNNGWDEFSIPKEVARQLIDMHVRRGDAIFFVTGRSPTKTETVSKTLADNFHIPATNMNPVIFAGDKPGQNTKSQWLQDKNIRIFYGDSDNDITAARDVGARGIRILRASNSTYKPLPQAGAFGEEVIVNSEY

SEQ ID NO: 9567 - protein, 200 aa, Escherichia coli
MLAFCRSSLKSKKYFIILLALAAIAGLGTHAAWSSNGLPRIDNKTLARLAQQHTVVVLFRHAERCDRSTNQCLSDKTGITVKGTQDARELGNAFSADIPDFDLYSSNTVRTIQSATWFSAGKKLTVDKRLLQCGNEIYSAIKDLQSKAPDKNIVIFTHNHCLTYIAKDKRDATFKPDYLDGLVMHVEKGKVYLDGEFVNH

SEQ ID NO: 9568 - protein, 208 aa, Escherichia coli; identical to SEQ ID NO: 1949

SEQ ID NO: 9569 - protein, 386 aa, Escherichia coli
MVDDVPVAQVLQALAEQEKLNLVVSPDVSGTVSLHLTDVPWKQALQTVVKSAGLITRQEGNILSVHSVAWQNDNIARQEAEQTRAQANLPLENRNITLQYADAGELAKAGEKLLSAKGSMTVDKRTNRLLLRDNKAALSALEQWVAQMDLPVGQVELSAHIVTINEKSLRELGVKWTLADAQHAGGVGQVTALGSDLSVATATTHVGFNIGRINGRLLDLELSALEQKQQLDIIASPRLLASHLQPASIKQGSEIPYQVSSGESGATSVEFKEAVLGMEVTPTVLQKGRIRLKLHISQNVPGQVLQQADGEVLAIDKQEIETQVEVKSGETLALGGIFTRKNKSGQDSVPLLGDIPWFGQLFRHDGKEDERRELVVFITPRLVSSE

SEQ ID NO: 9570 - protein, 760 aa, Escherichia coli
MENNRNFPARQFHSLTFFAGLCISITPVAQALAAEGQANADDTLVVEASTPSLYAPQQSADPKFSRPVADTTRTMTVISEQVIKDQGATNLTDALKNVPGVGAFFAGENGNSTTGDAIYMRGADTSNSIYIDGIRDIGSVSRDTFNTEQVEVIKGPSGTDYGRSAPTGSINMISKQPRNDSGIDASASIGSAWFRRGTLDVNQVIGDTTAVRLNVMGEKTHDAGRDKVKNERYGVAPSVAFGLGTANRLYLNYLHVTQHNTPDGGIPTIGLPGYSAPSAGTAALNHSGKVDTHNFYGTDSDYDDSTTDTATMRFEHDINDNTTIRNTTRWSRVKQDYLMTAIMGGASNITQPTSDVNSWTWSRTANTKDVSNKILTNQTNLTSTFYTGAIGHDVSTGVEFTRETQTNYGVNPVTLPAVNIYHPDSSIHPGGLTRNGANANGQTDTFAIYAFDTLQITRDFELNGGIRLDNYHTEYDSATACGGSGRGAITCPAGVAKGSPVTTVDTAKSGNLVNWKAGALYHLTENGNVYINYAVSQQPPGGNNFALAQSGSGNSANRTDFKPQKANTSEIGTKWQVLDKRLLLTAALFRTDIENEVEQNDDGTYSQYGKKRVEGYEISVAGNITPAWQVIGGYTQQKATIKNGKDVAQDGSSSLPYTPEHAFTLWSQYQATDDISVGAGARYIGSMHKGSDGAVGTPAFTEGYWVADAKLGYRVNRNLDFQLNVYNLFDTDYVASINKSGYRYHPGEPRTFLLTANMHF

SEQ ID NO: 9571 - protein, 191 aa, Escherichia coli
MKKSLLGLTFASLMFSAGSAVAADYKIDKEGQHAFVNFRIQHLGYSWLYGTFKDFDGTFTFDEKNPAADKVNVTINTTSVDTNHAERDKHLRSADFLNTAKYPQATFTSTSVKKDGDDLDITGDLTLNGVTKPVTLEAKLIGQGDDPWGGKRAGFDAEGKIKLKDFNIKTDLGPASQEVDLIISVEGVQQK

SEQ ID NO: 9572 - protein, 250 aa, Escherichia coli
MTYKLSCPMLVSTALMALLTTASLTAHASVTPDRTRLVFNESDKSISVTLRNNNEKLPYLAQSWLEDEKGNKITSPLAVLPPVQRIDAMMNGQVKIQALPDIHTLPSDRESLFYYNVREIPPKSGKANTLQIALQTRIKLFWRPKALEKIDMRKPWQFKVTLTRSGQDYTVNNPTPYHVIISDASTQKKGLTAAGFKPLVMPPKTSQPLKAKLASAPVLTYINDYGARMPLIFRCEGNTCKVDEDQSSKG

SEQ ID NO: 9573 - protein, 111 aa, Escherichia coli; identical to SEQ ID NO: 3419

SEQ ID NO: 9574 - protein, 224 aa, Escherichia coli
MKGLLALLISSMVLPAHAGIVIYGTRIIYPAENKEVMVQLMNQGNRSSLLQAWIDDGDTSLPPEKIQVPFMLTPPVAKIGANSGQQVKIKIMPNKLPTNKESIFYLNVLDIPPNSPEQEGKNALKFAMQNRIKLFYRPAGIAPVNKATFKKLLVNRSGNGLVIKNDSANWVTISDVKANNVKVNYETIMIAPLESQSINVKSNNANNWYLTIIDDHGNYISDKI

SEQ ID NO: 9575 - protein, 227 aa, Escherichia coli
MRIITALLMSFFILPVHAGVVIYGTRIIYPEKNREVLVQLMNQSKNASLIQAWIDDGNTTIAPEKIQVPFILTPPVSRVAGGSGQQLKIRKMPNNLPHNKESLFYLNVLDIPPNNPQNAGKNKIKLALQNRIKLLWRPSGIAPVDKKSLSQLNIKKKNNAISINNETANWITVTTIKAQNVKVNNESILLPPFSNNDITLKNNNASEYELTVVDDYGNNIHSKIAAR

SEQ ID NO: 9576 - protein, 366 aa, Escherichia coli; identical to SEQ ID NO: 3901

SEQ ID NO: 9577 - protein, 203 aa, Escherichia coli; identical to SEQ ID NO: 2201

SEQ ID NO: 9578 - protein, 230 aa, Escherichia coli; identical to SEQ ID NO: 4191

SEQ ID NO: 9579 - protein, 760 aa, Escherichia coli; identical to SEQ ID NO: 3923

SEQ ID NO: 9580 - protein, 246 aa, Escherichia coli; identical to SEQ ID NO: 3838

SEQ ID NO: 9581 - protein, 826 aa, Escherichia coli
MLRMTPLASAIVALLIGIEAYAAEETFDTHFMIGGMKDQQVANIRLEDNQPLPGPYDIDIYVNKQWRGKYEIIVKDNPQETCLSREMIKRLGINTDSFASGKQCLTFKQLIQGGSYTWDIGVFRLDFSVPQAWVEDLESGYVPPENWERGINAFYTSYYVSQYYSDYKASGNSKSTYVRFNSGLNLQGWQLHSDASFSKTNNNPGVWKSNTLYLERGFAQLLGTLRVGDMYTSSDIFDSVRFSGVRLFRDMQMLPNSKQNFTPRVQGIAQSNALVTIEQNGFVVYQKEVPPGPFAITDLQLAGGGADLDVSVKEADGSVTTYLVPYAAVPNMLQPGVSKYDFAAGRSHIEGASKQSDFVQAGYQYGFNNLLTLYGGSMVANNYYAFTLGTGWNTRIGAISVDATKSHSIQDNGDVFDGQSYQIAYNKFVSQTSTRFGLAAWRYSSRDYRTFNDHVWANNKDNYRRDENDIYDIADYYQNDFGRKNSFSANMSQSLPEGWGSVSLSTLWRDYWGRSGSSKDYQLSYSNNLRRISYTLAASHAYDENHHEEKRFNIFISIPFDWGDDVTTPRRQIYMSNSTTFDDQGFASNNTGLSGTVGSRDQFNYGVNLSYQYQGNETTAGVNLTWNAPVATVNGSYSQSSAYRQAGASVSGGIVAWSGGVNLANRLSETFAVMNAPGIKDAYVNGQKYRTTNRNGVVVYDGMTPYRENYLMLDVSQSDSEAELRGNRKIAAPYRGAVVLVNFDTDQRKPWFIKALRADGQPLTFGYEVNDIHGHNIGVVGQGSQLFIRTNEVPPSVNVAIDKQQGLSCTITFGKEIDESKNYICQ

SEQ ID NO: 9582 - protein, 656 aa, Escherichia coli
MRLKKRYLCTVLSLAFTQQAVAAQESDTLTVWSSPVSSTTTTVLDQPTMKALDKQNVAQALSVVPGVVLQKSGSRNEEQVKVRGFDSRQVPVYFDGVPIYVPYDGNLDLARILTNNLGAVEVSKGYSSLLQGPNQMGGAINITTQKPTKPLEANLGYRQGWSRSQDNAYDMHASLAASSDLGYLQVSGSQLKQDFLGLPHGVNNDIAGKHGKMINSSADDKRGIVKLGFTPRENDEYTLTYIKQDGEKDNPPYSGNSGQKSRYWQWPEYDKESFYYQGTTQLNDRFTLKSRLYRDTFENTLMMYNSLADLKNKKGSYSHYSDYSDGAGLQLAADVRENDLLSFAVNWKDDVHREKGAPHAAYDRYEDRTWSLASEYQWAAADNVDVVAGISYDWRDSVEAKKHEKDGSITHYDDNNQPAFNWQVMGKYHFANEDTLALSYYDRTRFPTLKERYTTSKPAYNQIAIVNPQLKPERARGVDLTWNGAFTHDWGFEVSVYYNRVSDAILSHNIDADTIQNQNSGTVDYSGLDAGIKGKISNILDVGLSYALIHADAKRKDIGKITDLPTQTMTAWMTLKPWEPLSVTLSEEARSSSYSNSDGSQKAAGFAVTHIRADYTLGHGFSVNASVNNLFDTKYAYSEGFIEEGRNFWAGIEYTF

SEQ ID NO: 9583 - protein, 512 aa, Escherichia coli; identical to SEQ ID NO: 2973

SEQ ID NO: 9584 - protein, 689 aa, Escherichia coli
MIHATDTATTKDGETITVTADANTATEATDGYQPLSTSTATLTDMPMLDIPQVVNTVSDQVLENQNATTLDEALYNVSNVVQTNTLGGTQDAFVRRGFGANRDGSIMTNGLRTVLPRSFNAATERVEVLKGPASTLYGILDPGGLINVVTKRPEKTFHGSVSATSSSFGGGTGQLDITGPIEGTQLAYRLTGEVQDEDYWRNFGKERSTFIAPSLTWFGDNATVTMLYSHRDYKTPFDRGTIFDLTTKQPVNVDRKIRFDEPFNITNGQSDLAQLNAEYHLNSQWTARFDYSYSQDKYSDNQARVTAYDATTGTLTRRVDATQGSTQRMHSTRADLQGNVDIAGFYNEILGGVSYEYYDLLRTDMIRCKNAKDFNIYNPVYGNTSKCTTVSASDSDQTIKQESYSAYAQDALYLTDNWIAVAGIRYQYYTQYAGKGRPFNVNTDSRDEQWTPKLGLVYKLTPSVSLFANYSQTFMPQSSIASYIGDLPPESSNAYEVGAKFELFDGITADIALFDIHKRNVLYTESIGDETIAKTAGRVRSRGVEVDLAGALTENINIIASYGYTNAKVLEDPDYAGKPLPNVPRHTGSLFLTYDIHNMPGNNTLTFGGGGHGVSRRSATNGADYYLPGYFVADAFAAYKMKLQYPVTLQLNVKNLFDKTYYTSSIATNNLGNQIGDPREVQFTVKMEF

SEQ ID NO: 9585 - protein, 351 aa, Escherichia coli
MKKSTLALVVMGIVASASVQAAEIYNKDGNKLDVYGKVKAMHYMSDNDSKDGDQSYIRFGFKGETQINDQLTGYGRWEAEFAGNKAESDTAQQKTRLAFAGLKYKDLGSFDYGRNLGALYDVEAWTDMFPEFGGDSSAQTDNFMTKRASGLATYRNTDFFGVIDGLNLTLQYQGKNENRDVKKQNGDGFGTSLTYDFGGSDFAISGAYTNSDRTNEQNLQSRGTGKRAEAWATGLKYDANNIYLATFYSETRKMTPISGGFANKTQNFEAVAQYQFDFGLRPSLGYVLSKGKDIEGIGDEDLVNYIDVGATYYFNKNMSAFVDYKINQLDSDNKLNINNDDIVAVGMTYQF

SEQ ID NO: 9586 - protein, 446 aa, Escherichia coli; identical to SEQ ID NO: 2177

SEQ ID NO: 9587 - protein, 631 aa, Escherichia coli
MVVTASSVEQNLKDAPASISVITQEDLQRKPVQNLKDVLKEVPGVQLTNEGDNRKGVSIRGLDSSYTLILVDGKRVNSRNAVFRHNDFDLNWIPVDSIERIEVVRGPMSSLYGSDALGGVVNIITKKIGQKWSGTVTVDTTIQEHRDRGDTYNGQFYTSGPLIDGVLGMKAYGSLAKREKDDPQNSTTTDTGETPRIEGFSSRDGNVEFAWTPNQNHDFTAGYGFDRQDRDSDSLDKNRLERQNYSVSHNGRWDYGTSELKYYGEKVENKNPGNSSPITSESNTVDGKYTLPLTAINQFLTVGGEWRHDKLSDAVNLTGGTSSKTSASQYALFVEDEWRIFEPLALTTGVRMDDHETYGEHWSPRAYLVYNATDTVTVKGGWATAFKAPSLLQLSPDWTSNSCRGACKIVGSPDLKPETSESWELGLYYMGEEGWLEGVESSVTVFRNDVKDRISISRTSDVNAAPGYQNFVGFETGANGRRIPVFSYYNVNKARIQGVETELKIPFNDEWKLSINYTYNDGRDVSNGENKPLSDLPFHTANGTLDWKPLALEDWSFYVSGHYTGQKRADSATAKTPGGYTIWNTGAAWQVTKDVKLRAGVLNLGDKDLSRDDYSYNEDGRRYFMAVDYRF

SEQ ID NO: 9588 - protein, 193 aa, Escherichia coli; identical to SEQ ID NO: 2246

SEQ ID NO: 9589 - protein, 233 aa, Escherichia coli
MKYKKLIILISLLFSNFSFSQSNGINLAATRVVFDSKEANASLKINNNSEEKTWLLRSWVSAYNNDEKVKNFIITPPLYRIDPTESFQLRINKINVHLPEDRESVFRINVLAIPSNYNNDTQEKRDSGLQFAINNRIKLIYRPHNLNVPKKVDDAYKALIFSKSENQVHVKNPTPYYITMNDVKINEKSITSIKDFMVSPFSTLIIPEKNAKTISYSTINDYGGKTPTQNIKL

SEQ ID NO: 9590 - protein, 331 aa, Escherichia coli; identical to SEQ ID NO: 2705

SEQ ID NO: 9591 - protein, 236 aa, Escherichia coli
MQTTRTPYSISFMATVLLLLLFACHSTVANAAVALGATRVIYPANQKQVLLPVTNNDPASVYLIQSWIENAGDQKDTQFVITPPLFSMQGKKENTLRIINATNHQLPGDRESLFWVNVKAIPAMEKDQKNENTLQLAIISRIKMFYRPTNLAMAPEEAPAMLRFRRSGSKLTLINPTPYFITVTNMKAGNSNLPNTMVPPKGDVSVDIPHAATGDISFQTINDYGALTPRIKATMQ

SEQ ID NO: 9592 - protein, 243 aa, Escherichia coli; identical to SEQ ID NO: 2910

SEQ ID NO: 9593 - protein, 234 aa, Escherichia coli
MKEAVSHIPVPRDGRDYDPDVLQKAVNDAVANIPQPADGKSLTPDDVRPMLEQMVKEAVSHIHVPRDGRDYDPDVLQKAVLDAVSALPAPQDGRDATALEILPAIDDQKSFPRGTYATHQGGLWRAYEKTHGMRGWECLVDGVADIDVSMTGERLFSVVVRQSSGQRTEKTFSLPVMLYRGVFRAGETYHPGDTVTWGGSLWHCNSMTEDKPGEAHSSAWTLAAKRGRDAGGGK

SEQ ID NO: 9594 - protein, 518 aa, Escherichia coli; identical to SEQ ID NO: 2349

SEQ ID NO: 9595 - protein, 614 aa, Escherichia coli
MIKKASLLTACSVTAFSAWAQDTSPDTLVVTANRFEQPRSTVLAPTTVVTRQDIDRWQSTSVNDVLRRLPGVDITQNGGSGQLSSIFIRGTNASHVLVLIDGVRLNLAGVSGSADLSQFPIALVQRVEYIRGPRSAVYGSDAIGGVVNIITTRDHPGTEISAGWGSNSYQNYDVSTQQQLGDKTRVTLLGDYAHTHGYDVVAYGNTGTQAQPDNDGFLSKTLYGALEHNFTDVWSGFVRGYGYDNRTNYDAYYSPGLPLVDTRKLYSQSWDAGLRYNGKLIKSQLISSYSHSKDYNYDPHYGRYDSSATLDEMKQYTVQWANNIIIGHGNIGAGVDWQKQSTAPGTAYVEDGYDQRNTGIYLTGLQQVGDFTFEGAGRSDDNSQFGRHGTWQTSAGWEFIEGYRFIASYGTSYKAPNLGQLYGTYGNPNLNPEKSKQWEGAFEGLTAGVNWRISGYRNDVSDLIDYDDHTLKYYNEGKARIKGVEATANFDTGPLTHTVSYDYVDARNAITDTPLLRRAKQQVKYQLDWQLYDFDWGITYQYLGTRYDKDYSSYPYQTVKMGGVSLWDLAVAYPVTSHLTVRGKIANLFDKDYETVYGYQTAGREYTLSGSYTF

SEQ ID NO: 9596 - protein, 229 aa, Escherichia coli
MTLAIFAVLSLLVAGELQAGVVVGGTRFIFPADRESISISLTNTSQESWLINSKINRPTRWAGGEASTGSAPLLVAPPLVLLKPGTTGTLRLLRTESDILPVDRETLFELSIASVPSGKVENQSVKVAMRSVFKLFWRPEGLPGDPLEAYQQLRWTRNSQGVQLTNPTPYYINLIQVSVNGKALSNAGVVPPKSQRQTSWCQAIAPCHVSWRTINDYGGLSAKKEQNLL

SEQ ID NO: 9597 - protein, 162 aa, Escherichia coli; identical to SEQ ID NO: 1967

SEQ ID NO: 9598 - protein, 386 aa, Escherichia coli
MVDDVPVAQVLQALAEQEKLNLVVSPDVSGTVSLHLTDVPWKQALQTVVKSAGLITRQEGNILSVHSVAWQNDNIARQEAEQARAQANLPLENRSITLQYADAGELAKAGEKLLSAKGSMTVDKRTNRLLLRDNKTALSALEQWVAQMDLPVGQVELSAHIVTINEKSLRELGVKWTLADTQQAGGVGQVTTLGSDLSVATATTHVGFNIGRINGRLLDLELSALEQKQQLDIIASPRLLASHLQPASIKQGSEIPYQVSSGESGATSVEFKEAVLGMEVTPTVLQKGRIRLKLHISQNVPGQVLQQADGEVLAIDKQEIETQVEVKSGETLALGGIFTRKNKSGQDSVPLLGDIPWFGQLFRHDGKEDERRELVVFITPRLVSSE

SEQ ID NO: 9599 - protein, 232 aa, Escherichia coli; identical to SEQ ID NO: 2087

SEQ ID NO: 9600 - protein, 650 aa, Escherichia coli
MSAISCAWPVLAVDDDGETMVVTASSVEQNLKDAPASISVITQEDLQRKPVQNLKDVLKEVPGVQLTNEGDNRKGVSIRGLDSSYTLILVDGKRVNSRNAVFRHNDFDLNWIPVDSIERIEVVRGPMSSLYGSDALGGVVNIITKKIGQKWSGTVTVDTTVQEHRDRGDTYNGQFFTSGPLIDGVLGMKAYGSLAKREKDDPQNSTTTDTGETPRIEGFSSRDGNVEFAWTPNQNHDFTAGYGFDRQDRDSDSLDKNRLERQNYSVSHNGRWDYGTSELKYYGEKVENKNPGNSSPITSESNTVDGKYTLPLTAINQFLTVGGEWRHDKLSDAVNLTGGTSSKTSASQYALFVEDEWRIFEPLALTTGVRMDDHETYGEHWSPRAYLVYNATDTVTVKGGWATAFKAPSLLQLSPDWTSNSCRGACKIVGSPDLKPETSESWELGLYYMGEEGWLEGVESSVTVFRNDVKDRISISRTSDVNAAPGYQNFVGFETGANGRRIPVFSYYNVNKARIQGVETELKIPFNDEWKLSINYTYNDGRDVSNGENKPLSDLPFHTANGTLDWKPLALEDWSFYVSGHYTGQKRADSATAKTPGGYTIWNTGAAWQVTKDVKLRAGVLNLGDKDLSRDDYSYNEDGRRYFMAVDYRF

SEQ ID NO: 9601 - protein, 360 aa, Escherichia coli
MKKLTVAISAVAASVLMAMSAQAAEIYNKDSNKLDLYGKVNAKHYFSSNDADDGDTTYARLGFKGETQINDQLTGFGQWEYEFKGNRAESQGSSKDKTRLAFAGLKFGDYGSIDYGRNYGVAYDIGAWTDVLPEFGGDTWTQTDVFMTGRTTGVATYRNNDFFGLVDGLNFAAQYQGKNDRTDVTEANGDGFGFSTTYEYEGFGVGATYAKSDRTNNQVIYGNNGLNASGQNAEVWAAGLKYDANNIYLATTYSETQNMTVFGNNHIANKAQNFEVVAQYQFDFGLRPSVAYLQSKGKDLGAWGDQDLVEYIDVGATYYFNKNMSTFVDYKINLIDKSDFTKASGVATDDIVAVGMVYQF

SEQ ID NO: 9602 - protein, 162 aa, Escherichia coli; identical to SEQ ID NO: 1965

SEQ ID NO: 9603 - protein, 478 aa, Escherichia coli
MTRIKINARRIFSLLIPFFFFTSVHAEQTAAPAKPVTVEAKNETFAPQHPDQYLSWKATSEQSERVDALTEDPRLVILWAGYPFSRDYNKPRGHAFAVTDVRETLRTGAPKNAEDGPLPMACWSCKSPDVARLIQKDGEDGYFHGKWARGGPEIVNNLGCADCHNTASPEFAKGKPELTLSRPYAARAMEAIGKPFEKAGRFDQQSMVCGQCHVEYYFDGKNKAVKFPWDDGMKVENMEQYYDKIAFSDWTNSLSKTPMLKAQHPEYETWTAGIHGKNNVTCIDCHMPKVQNAEGKLYTDHKIGNPFDNFAQTCANCHTQDKAALQKVVAERKQSINDLKIKVEDQLVHAHFEAKAALDAGATEAEMKPIQDDIRHAQWRWDLAIASHGIHMHAPEEGLRMLGTAMDKAADARTKLARLLATKGITHEIQIPDISTKEKAQQAIGLNMEQIKAEKQDFIKTVIPQWEEQARKNGLLSQ

SEQ ID NO: 9604 - protein, 431 aa, Escherichia coli; identical to SEQ ID NO: 3408

SEQ ID NO: 9605 - protein, 122 aa, Escherichia coli; identical to SEQ ID NO: 2915

SEQ ID NO: 9606 - protein, 747 aa, Escherichia coli; identical to SEQ ID NO: 3857

SEQ ID NO: 9607 - protein, 784 aa, Escherichia coli; identical to SEQ ID NO: 2244

SEQ ID NO: 9608 - protein, 432 aa, Escherichia coli; identical to SEQ ID NO: 2026

SEQ ID NO: 9609 - protein, 236 aa, Escherichia coli; identical to SEQ ID NO: 3482

SEQ ID NO: 9610 - protein, 331 aa, Escherichia coli
MKKPVVIGLAVVVLAAVVAGGYWWYQSRQDNGLTLYGNVDIRTVNLSFRVGGRVESLAVDEGDAIKAGQVLGELDHKPYEIALMQAKAGVSVAQAQYDLMLAGYRDEEIAQAAAAVKQAQAAYDYAQNFYNRQQGLWKSRTISANDLENARSSRDQAQATLKSAQDKLRQYRSGNREQDIAQAKASLEQAQAQLAQAELNLQDSTLIAPSDGTLLTRAVEPGTVLNEGGTVFTVSLTRPVWVRAYVDERNLDQAQPGRKVLLYTDGRPDKPYHGQIGFVSPTAEFTPKTVETPDLRTDLVYRLRIVVTDADDALRQGMPVTVQFGEEAGHE

SEQ ID NO: 9611 - protein, 686 aa, Escherichia coli
MFWRDMTLSIWRKKTTGLKTKKRLLPLMLAAALCSSPVWAEEATFTANFKDTDLKSFIETVGANLNKTIIMGPGVQGKVSIRTMTPLNERQYYQLFLNLLEAQGYAVVPMENDVLKVVKSSAAKVEPLPLVGEGSDNYAGDEMVTKVVPVRNVSVRELAPILRQMIDSAGSGNVVNYDPSNVIMLTGRASVVERLTEVIQRVDHAGNRTEEVIPLDNASASEIARVLESLTKNSGENQPATLKSQIVADERTNSVIVSGDPATRDKMRRLIRRLDSEMERSGNSQVFYLKYSKAEDLVDVLKQVSGTLTAAKEEAEGTVGSGREVVSIAASKHSNALIVTAPQDIMQSLQSVIEQLDIRRAQVHVEALIVEVAEGSNINFGVQWGSKDAGLMQFANGTQIPIGTLGAAISAAKPQKGSTVISENGATTINPDTNGDLSTLAQLLSGFSGTAVGVVKGDWMALVQAVKNDSSSNVLSTPSITTLDNQEAFFMVGQDVPVLTGSTVGSNNSNPFNTVERKKVGIMLKVTPQINEGNAVQMVIEQEVSKVEGQTSLDVVFGERKLKTTVLANDGELIVLGGLMDDQAGESVAKVPLLGDIPLIGNLFKSTADKKEKRNLMVFIRPTILRDGMAADGVSQRKYNYMRAEQIYRDEQGLSLMPHTAQPILPAQNQALPPEVRAFLNAGRTR

SEQ ID NO: 9612 - protein, 747 aa, Escherichia coli
MARSKTAQPKHSLRKIAVVVATAVSGMSVYAQAAVEPKEDTITVTAAPASQESAWGPAATIAARQSATGTKTDTPIQKVPQSISVVTAEEMALHQPKSVKEALSYTPGVSVGTRGASNTYDHLIIRGFAAEGQSQNNYLNGLKLQGNFYNDAVIDPYMLERAEIMRGPVSVLYGKSSPGGLLNMVSKRPTTEPLKEVQFKAGTDSLFQTGFDFSDALDDDGVYSYRLTGLARSANAQQKGSEEQRYAIAPAFTWRPDDKTNFTFLSYFQNEPETGYYGWLPKEGTVEPLPNGKRLPTDFNEGAKNNTYSRNEKMVGYSFDHEFNDTFTVRQNLRFAENKTSQNSVYGYGVCSDPANAYSKQCAALAPADKGHYLARKYVVDDEKLQNFSVDTQLQSKFATGDIDHTLLTGVDFMRMRNDINAWFGYDDSVPLLDLYNPVNTDFDFNAKDPDNSGPYRILNKQKQTGVYVQDQAQWDKVLVTLGGRYDWADQESLNRVAGTTDKRDDKQFTWRGGVNYLFDNGVTPYFSYSESFEPSSQVGKDGNIFAPSKGKQYEVGVKYVPEDRPIVVTGAVYNLTKTNNLMADPEGSFFSVEGGEIRARGVEIEAKAALSASVNVVGSYTYTDAEYTTDTTYKGNTPAQVPKHMASLWADYTFFDGPLSGLTLGTGGRYTGSSYGDPANSFKVGSYTVVDALVRYDLARVGMAGSNVALHVNNLFDREYVASCFNTYGCFWGAERQVVATATFRF

SEQ ID NO: 9613 - protein, 241 aa, Escherichia coli; identical to SEQ ID NO: 2922

SEQ ID NO: 9614 - protein, 208 aa, Escherichia coli; identical to SEQ ID NO: 1948

SEQ ID NO: 9615 - protein, 249 aa, Escherichia coli; identical to SEQ ID NO: 3492

SEQ ID NO: 9616 - protein, 221 aa, Escherichia coli; identical to SEQ ID NO: 4116

SEQ ID NO: 9617 - protein, 224 aa, Escherichia coli
MKGLLALLISSMVLPAHAGIVIYGTRIIYPAEHKEVMVQLMNQGNRSSLMQAWIDDGDTSLPPEKIQVPFMLTPPVAKIGANSGQQVKIKIMPNKLPTNKESIFYLNVLDIPPNSPEQEGKNALKFAMQNRIKLFYRPAGIAPVNKVTFKKLLINRSGNGLVIKNDSANWVTISDVKANNVKVNYETIMIAPLESQSVNVKSNNANNWHLTIIDDHGNYISDKI

SEQ ID NO: 9618 - protein, 567 aa, Escherichia coli; identical to SEQ ID NO: 4028

SEQ ID NO: 9619 - protein, 539 aa, Escherichia coli; identical to SEQ ID NO: 3050

SEQ ID NO: 9620 - protein, 656 aa, Escherichia coli
MRLKKRYLCTALSLAFTQQAVAAQESDTLTVWSSPVSSTTTTVLDQPTMKALDKQNVAQALSVVPGVVLQKSGSRNEEQVKVRGFDSRQVPVYFDGVPIYVPYDGNLDLARILTNNLGAVEVSKGYSSLLQGPNQMGGAINITTQKPTKPLEANLGYRQGWSRSQDNAYDMHASFAASSDLGYLQVSGSQLKQDFLGLPHGVNNDIAGKHGKMINSSADDKRGIVKLGFTPRENDEYTLTYIKQDGEKDNPPYSGNSGQKSRYWQWPEYDKESFYYQGTTQLNDRFTLKSRLYRDTFENTLMMYNSLADLKNKKGSYSHYSDYSDGAGLQLAADVRENDLLSFAVNWKDDVHREKGAPHAAYDRYEDRTWSLASEYQWAAADNVDVVAGISYDWRDSVEAKKHEKDGSITHYDDNNQSAFNWQVMGKYHFANEDTLALSYYDRTRFPTLKERYTTSKPAYNQIAIVNPQLKPERARGVDLTWNGAFTHDWGFEVSVYYNRVSDAILSHNIDADTIQNQNSGTVDYSGLDAGIKGKISNILDVGLSYALIHADAKRKDIGKITDLPTQTMTAWMTPKPWEPLSVTLSEEARSSSYSNSDGSQKAAGFAVTHIRADYTLGHGFSVNASVNNLFDTKYAYSEGFIEEGRNFWAGIEYTF

SEQ ID NO: 9621 - protein, 432 aa, Escherichia coli; identical to SEQ ID NO: 2026

SEQ ID NO: 9622 - protein, 746 aa, Escherichia coli; identical to SEQ ID NO: 4130

SEQ ID NO: 9623 - protein, 121 aa, Escherichia coli; identical to SEQ ID NO: 2522

SEQ ID NO: 9624 - protein, 660 aa, Escherichia coli; identical to SEQ ID NO: 5588

SEQ ID NO: 9625 - protein, 236 aa, Escherichia coli; identical to SEQ ID NO: 3821

SEQ ID NO: 9626 - protein, 373 aa, Escherichia coli
MKVKVLSLLVPALLVAGAANAAEVYNKDGNKLDLYGKVDGLHYFSDDKSVDGDQTYMRLGFKGETQVTDQLTGYGQWEYQIQGNSAENENNSWTRVAFAGLKFQDVGSFDYGRNYGVVYDVTSWTDVLPEFGGDTYGSDNFMQQRGNGFATYRSTDFFGLVDGLNFAVQYQGKNGSPEGEGMTNNGREALRQNGDGVGGSITYDYEGFGIGAAVSSSKRTDDQNFGLNRYDERYIGNGDRAETYTGGLKYDANNIYLAAQYTQTYNATRVGNLGWANKAQNFEAVAQYQFDFGLRPSLAYLQSKGKNLGVINGRNYDDEDILKYVDVGATYYFNKNMSTYVDYKINLLDDNQFTRDAGINTDNIVALGLVYQF

SEQ ID NO: 9627 - protein, 232 aa, Escherichia coli; identical to SEQ ID NO: 2087

SEQ ID NO: 9628 - protein, 241 aa, Escherichia coli; identical to SEQ ID NO: 2851

SEQ ID NO: 9629 - protein, 193 aa, Escherichia coli; identical to SEQ ID NO: 2246

SEQ ID NO: 9630 - protein, 231 aa, Escherichia coli; identical to SEQ ID NO: 7920

SEQ ID NO: 9631 - protein, 360 aa, Escherichia coli
MKKLTVAISAVAASVLMAMSAQAAEIYNKDSNKLDLYGKVNAKHYFSSNDADDGDTTYVRLGFKGETQINDQLTGFGQWEYEFKGNRAESQGSSKDKTRLAFAGLKLGDYGSIDYGRNYGVAYDIGAWTDVLPEFGGDTWTQTDVFMTGRTTGVATYRNNDFFGLVDGLNFAAQYQGKNDRTDVTEANGDGFGFSTTYEYEGFGVGATYAKSDRTNDQVIYGNNSLNASGQNAEVWAAGLKYDANNIYLATTYSETQNMTVFGNNHIANKAQNFEVVAQYQFDFGLRPSVAYLQSKGKDLGAWGDQDLVEYIDVGATYYFNKNMSTFVDYKINLIDKSDFTKASGVATDDIVAVGLVYQF

SEQ ID NO: 9632 - protein, 246 aa, Escherichia coli
MFFNTKHTVALCFATCLAFSSSAIADIVISGTRVIYTSDQKSVNVRLENKGNNPLLVQSWLDTGDDNAEPGSINVPFTATPPVSRIDGKRGQTIKLMYTGSSALPKDRESVFWFNVLEVPPKPDAEKMANQSMLQLAFRTRIKLFYRPEGLTGIPSDAPAALKWSWTTSGGKVALRVVNPTPFYVSFSSGDVVASGKRYPLDVKMIAPRSEDAITVNGISSKVSSAQVHFFAINDFGGAIEGNATL

SEQ ID NO: 9633 - protein, 241 aa, Escherichia coli; identical to SEQ ID NO: 2075

SEQ ID NO: 9634 - protein, 351 aa, Escherichia coli; identical to SEQ ID NO: 5565

SEQ ID NO: 9635 - protein, 746 aa, Escherichia coli; identical to SEQ ID NO: 4597

SEQ ID NO: 9636 - protein, 203 aa, Escherichia coli; identical to SEQ ID NO: 2009

SEQ ID NO: 9637 - protein, 224 aa, Escherichia coli
MTVSLTAILLSCSFTWAAGKGGVGLAATRLVYSEGEEQISLGVRNTSPDVPYLIQSWVMTPDNKKSADFIITPPLFVLNPANENLLRIMYIGAPLAKDRETLFFTSVRAVPSTTKREEGNTLKIATQSVIKLFWRPKGLAYPLAEAPAKLRCTSSADMVTVSNPTPYFITLTDLKIGGKVVKNQMISPFDKYQFSLPKGAKNNSVTYRTINDYGAETPQLNCKS

SEQ ID NO: 9638 - protein, 161 aa, Escherichia coli; identical to SEQ ID NO: 2582

SEQ ID NO: 9639 - protein, 883 aa, Escherichia coli
MTAFRAAFKAYRMHQVLILPRFARLTFALGLATAVFPVDAEYYFNPRFLSNDLAESVDLSAFTKGREAPPGTYRVDIYLNDEFMASRDITFIADDNNADLIPCLSTDLLVSLGIKKSALLDNKEHSADKHVPDNSACTPLQDRLADASSEFDVGQQHLSLSVPQIYVGRMARGYVSPDLWEEGINAGLLNYSFNGNSINNRSNHNAGKSNYAYLNLQSGINIGSWRLRDNSTWSYNSGSSNSSDSNKWQHINTSAERDIIPLRSRLTVGDSYTDGDIFDSVNFRGLKINSTEAMLPDSQHGFAPVIHGIARGTAQVSVKQNGYDVYQTTVPPGPFTIDDINSAANGGDLQVTIKEADGSIQTLYVPYSSVPVLQRAGYTRYALAMGEYRSGNNLQSTPKFVQASLMHGLKGNWTPYGGMQIAEDYQAFNLGIGKDLGLFGAFSFDITQANTTLADDTRHSGQSVKSVYSKSFYQTGTNIQVAGYRYSTQGFYNLSDSAYSRMSGYTVKPPTGDTSEQTLFIDYFNLFYSKRGQEQISISQQLGNYGTTFFSASRQSYWNTSRSDQQISFGLNVPFGDITTSLNYSYSNNIWQNDRDHLLAFTLNVPFSHWMRTDSQSAFHNSNASYSMSNDLKGGMTNLSGVYGTLLPDNNLNYSVQVGNTHGGNTSSGTSGYSSLNYRGAYGNTNVGYSRSGDSSQIYYGMSGGIIAHADGITFGQPLGDTMVLVKAPGADNVKIENQTGIHTDWRGYAILPFATEYRENRVALNANSLADNVELDETVVTVIPTHGAIARATFNVQIGGKVLMTLKYGNKSVPFGAIVTHGENKNGSIVAENGQVYLTGLPQSGKLQVSWGKDKNSNCIVEYKLPEVSPGTLLNQQTAICR

SEQ ID NO: 9640 - protein, 266 aa, Escherichia coli; identical to SEQ ID NO: 1894

SEQ ID NO: 9641 - protein, 869 aa, Escherichia coli; identical to SEQ ID NO: 4351

SEQ ID NO: 9642 - protein, 831 aa, Escherichia coli
MQELPMLRMTPLASAIVALLIGIEAYAAEETFDTHFMIGGMKDQQVSNIRLEDNQPLPGPYDIDIYVNKQWRGKYEIIVKDNPQETCLSREMIKRLGINTDSFASGKQCLTFKQLIQGGSYTWDIGVFRLDFSVPQAWVEDLESGYVPPENWERGINAFYTSYYVSQYYSDYKASGNSKSTYVRFNSGLNLQGWQLHSDASFSKTNNNPGVWKSNTLYLERGFAQLLGTLRVGDMYTSSDIFDSVRFSGVRLFRDMQMLPNSKQNFTPRVQGIAQSNALVTIEQNGFVVYQKEVPPGPFAITDLQLAGGGADLDVSVKEADGSVTTYLVPYAAVPNMLQPGVSKYDFAAGRSHIEGASKQSDFVQAGYQYGFNNLLTLYGGSMVANNYYAFTLGTGWNTRIGAISVDATKSHSIQDNGDVFDGQSYQIAYNKFVSQTSTRFGLAAWRYSSRDYRTFNDHVWANNKDNYRRDENDIYDIADYYQNDFGRKNSFSANMSQSLPEGWGSVSLSTLWRDYWGRSGSNKDYQLSYSNNLRRISYTLAASHAYDENHHEEKRFNIFISIPFDWGDDVTTPRRQIYMSNSTTFDDQGVASNNTGLSGTVGSRDQFNYGVNLSYQYQGNETTAGANLTWNAPVATVNGSYSQSSAYRQAGASVSGGIVAWSGGVNLANRLSETFAVMNAPGIKDAYVNGQKYRTTNRNGVVVYDGMTPYRENYLMLDVSQSDSEAELRGNRKIAAPYRGAVVLVNFDTDQRKPWFIKALRADGQPLTFGYEVNDIHGHNIGVVGQGSQLFIRTNEVPPSVNVAIDKQQGLSCTITFGKEIDESRNYICQ

SEQ ID NO: 9643 - protein, 203 aa, Escherichia coli; identical to SEQ ID NO: 2009

SEQ ID NO: 9644 - protein, 94 aa, Escherichia coli
MIYDASRKEAALPVANKGAETPYLLQSWVDNIDGTSRAPFIITPPLFRLEAGDDSSLRIIKTADNLPENKESLFYINVRAIPAKKNQMMLMLTS

SEQ ID NO: 9645 - protein, 266 aa, Escherichia coli; identical to SEQ ID NO: 1894

SEQ ID NO: 9646 - protein, 806 aa, Escherichia coli
MLCTTANAEEYYFDPIMLETTKSGIQTTDLSRFSKKYAQLPGTYQVDIWLNKKKVSQKKITFTANAEQLLQPQFTVEQLRELGIKVDEIPALAEKDDDSVINSLEQIIPGTAAEFDFNHQRLNLSIPQIALYRDARGYVSPSRWDDGIPTLFTNYSFTGSDNRYRQGNRSQRQYLNMQNGANFGPWRLRNYSTWTRNDQASSWNTISSYLQRDIKALKSQLLLGESATSGSIFSSYTFTGVQLASDDNMLPNSQRGFAPTVRGIANSSAIVTIRQNGYVIYQSNVPAGAFEINDLYPSSNSGDLEVTIEESDGTQRRFIQPYSSLPMMQRPGHLKYSATAGRYRADANSDSKEPEFAEATAIYGLNNTFTLYGGLLGSEDYYALGIGIGGTLGALGALSMDINRADTQFDNQHSFHGYQWRTQYIKDIPETNTNIAVSYYRYTNDGYFSFDEANTRNWNYNSRQKSEIQFNISQTIFDGVSLYASGSQQDYWGNNDKNRNISVGVSGQQWGVGYSLNYQYSRYTDQNNDRALSLNLSIPLERWLPRSRVSYQMTSQKDRPTQHEMRLDGSLLDDGRLSYSLEQSLDDDNNHNSSVNASYRSPYGTFSAGYSYGNDSSQYNYGVTGGVVIHPHGVTLSQYLGNAFALIDANGASGVRIQNYPGIATDPFGYAVVPYLTTYQENRLSVDTTQLPDNVDLEQTTQFVVPNRGAMVAARFNANIGYRVLVTVSDRNGKPLPFGALASNDETGQQSIVDEGGILYLSGISSKSQSWTVRWGNQADQQCQFAFSTPDSEPTTSVLQGTAQCH

SEQ ID NO: 9647 - protein, 161 aa, Escherichia coli; identical to SEQ ID NO: 2582

SEQ ID NO: 9648 - protein, 207 aa, Escherichia coli; identical to SEQ ID NO: 2211

SEQ ID NO: 9649 - protein, 331 aa, Escherichia coli; identical to SEQ ID NO: 2700

SEQ ID NO: 9650 - protein, 118 aa, Escherichia coli [sequence omitted]

SEQ ID NO: 9651 - protein, 229 aa, Escherichia coli
MANGNASIKGYNCNVSQGLVIIMPLPDFRFIRLLPLAALVLTACSITTPKGPGKSPDSPQWRQHQQDVRNLNQYQTRGAFAYISDQQKVYARFFWQQTGQDRYRLLLTNPLGSTELELNAQPGNVQLVDNKGQRYTSDDAEEMIGKLTGMPIPLNSLRQWILGLPGDATDYKLDDQYRLSEITYSQNGKNWKVVYGGYDTKTQPAMPANMELTDGGQRIKLKMDNWIVK

SEQ ID NO: 9652 - protein, 518 aa, Escherichia coli; identical to SEQ ID NO: 2349

SEQ ID NO: 9653 - protein, 865 aa, Escherichia coli; identical to SEQ ID NO: 2167

SEQ ID NO: 9654 - protein, 837 aa, Escherichia coli; identical to SEQ ID NO: 8414

SEQ ID NO: 9655 - protein, 207 aa, Escherichia coli; identical to SEQ ID NO: 2211

SEQ ID NO: 9656 - protein, 359 aa, Escherichia coli; identical to SEQ ID NO: 4362

SEQ ID NO: 9657 - protein, 249 aa, Escherichia coli; identical to SEQ ID NO: 3492

SEQ ID NO: 9658 - protein, 386 aa, Escherichia coli; identical to SEQ ID NO: 3072

SEQ ID NO: 9659 - protein, 732 aa, Escherichia coli; identical to SEQ ID NO: 4284

SEQ ID NO: 9660 - protein, 606 aa, Escherichia coli
MYRTHRQHSLLSSGGVPSFIGGLVVFVSAAFNAQAETWFDPAFFKDDPSMVADLSRFEKGQKITPGVYRVDIVLNQTIVDTRNVNFVEITPEKGIAACLTTESLDAMGVNTDAFPAFKQLDKQACVPLAEIIPDASVTFNVNKLRLEISVPQIAIKSNARGYVPPERWDEGINALLLGYSFSGANSIHSSADSDSGDSYFLNLNSGVNLGPWRLRNNSTWSRSSGQTAEWKNLSSYLQRAVIPLKGELTVGDDYTAGDFFDSVSFRGVQLASDDNMLPDSLKGFAPVVRGIAKSNAQITIKQNGYTIYQTYVSPGAFEISDLYSTSSSGDLLVEIKEADGSVNSYSVPFSSVPLLQRQGRIKYAVTLAKYRTNSNEQQESKFAQATLQWGGPWGTTWYGGGQYAEYYRAAMFGLGFNFGDFGAISFDATQAKSTLADQSEHKGQSYRFLYAKTLNHLGTNFQLMGYRYSTSGFYTLSDTMYKHMDGYEFNDGDDEDTPMWSRYYNLFYTKRGKLQVNISQQLGEYGSFYLSGSQQTYWHTDQQDRLLQFGYNTQIKDLSLGISWNYSKSRGQPDADQVFALNFSLPLNLLLPRSNDSYTRKKITPG

SEQ ID NO: 9661 - protein, 669 aa, Escherichia coli; identical to SEQ ID NO: 4276

SEQ ID NO: 9662 - protein, 377 aa, Escherichia coli
MPEYRSSCQSWYKKIALLDNKEHSAEKHVPDNSACTPLQDRLADASTEFDVGQQHLSLSVPQIYVGRMARGYVSPDLWEEGINAGLLNYSFNGNSINNRSNHNAGKSNYAYLNLQSGINIGSWRLRDNSTWSYNSGSSNSSDSNKWQHINTSAERDIIPLRSRLTVGDSYTDGDIFDSVNFRGLKINSTEAMLPDSQHGFAPVIHGIARGTAQVSVKQNGYDVYQTTVPPGPFTIDDINSAANGGDLQVTIKEADGSIQTLYVPYSSVPVLQRAGYTRYALAMGEYRSGNNLQSSPKFIQGSLMHGLEGNWTPYGGMQIAEDYQAFNLGIGKDLGLFGAFSFDITQANTTLADGTRHSGQSVKSVYSKSFYQTGTNI

SEQ ID NO: 9663 - protein, 368 aa, Escherichia coli; identical to SEQ ID NO: 2368

SEQ ID NO: 9664 - protein, 882 aa, Escherichia coli
MPNHSNFRLRGIACYIALAISGGSVNAWADDSIQFDPRFLELKGDTKIDLGKFSKKGYVDAGKYNLRVFINKQPLSDEYDINWYVSENDPTKNYACLTPELVAALGLKEGIAKSLQWTHNDECLKPGQLDGMEVENDLSQSALLLTVPQAYLEYTSSDWDPPSRWDDGIPGLIADYSLNAQTRHQEQGGEDSHDISGNGTVGANLGAWRFRADWQSDYQHTRSNDDDDDSSNSTTSKNWDWSRYYAWRALPSLKAKLSLGEDYLNSDIFDGFNYIGSSVSTDDQMLPPNLRGYAPDVSGVAHSSAKVTISQMGRVLYETQVPAGPFRIQDIGDSVSGTLHVRVEEQNGQVQEYDVTTASMPFLTRQGQVRYKVMMGRPEDWNHKTEGGFFSGGEASWGVADGWSLYGGALADKHYQSAAMGVGRDLAQFGALAFDVTHSHVNLDHDSAYGKGKLDGNSFRVSYAKDFDELNSRVTFAGYRFSEKNFMTMSEYLDANQSDMARTGNDKEMYTITYNQNFAAAGVSIYLNYSHRTYWDRPEQTNYNLMFSHYFNMGSIRNMSISVTGYRYEYDDNADKGMYLSMSIPWSDSSTVTYNGSYGSGSDSSQVGYFKRVDDATHYQVNVGTSEQHGSADGYLSHDGSLAKVDLSANYHEGEYRSAGIALQGGATLTAHGGALHRTQNMGGTRLLIDADGIANVPVESNGAPVYTNMFGKAVVADINNYYRNQAYIDLNNLPEDAEATQSVVQATLTEGAIGYRKFKVISGQKAMAVLRLRDGSYPPFGAEVKNDEQQQVGIVDDEGNVYLAGVNADEHMMVFWEGSAQCEIVLPKPLPADLFSGLLLPCEQKGTAAPDSSAPEIKPVIQDQTRQVTPTEAPTSISATQ

SEQ ID NO: 9665 - protein, 840 aa, Escherichia coli
MNNKNTFSRDKLSHAIKNALSGVVCSLLFVLPVHAVEFNVDMIDAEDRENIDISRFEKKGYIPPGRYLVRVQINKNMLPQTLILEWVKADNESGSLLCLTKENLTNFGLNTEFIESLQNIAGSECLDLSQRQELTTRLDKATMILSLSVPQAWLKYQATNWTPPEFWDTGITGFILDYNVYASQYAPHHGDSTQNVSSYGTLGFNLGAWRLRSDYQYNQNFADGRSVNRDSEFARTYLFRPIPSWSSKFTMGQYDLSSNLYDTFHFTGASLESDESMLPPDLQGYAPQITGIAQTNAKVTVAQNGRVLYQTTVAPGPFTISDLGQSFQGQLDVTVEEEDGRTSTFQVGSASIPYLTRKGQVRYKTSLGKPTSVGHNDINNPFFWTAEASWGWLNNVSLYGGGMFTADDYQAITTGIGFNLNQFGSLSFDVTGADASLQQQNSGNLRGYSYRFNYAKHFESTGSQITFAGYRFSDKDYVSMSEYLSSRNGDESIDNEKESYVISLNQYFETLELNSYLNVTRNTYWDSASNTNYSVSVSKNFDIGDFKGISASLAVSRIRWDDDEENQYYFSFSLPLQQNRNISYSMQRTGSSNTSQMISWYDSSDRNNIWNISASATDDNIRDGEPTLRGSYQHYSPWGRLNINGSVQPNQYNSVTAGWYGSLTATRHGVALHDYSYGDNARMMVDTDGISGIEINSNRTVTNGLGIAVIPSLSNYTTSMLRVNNNDLPEGVDVENSVIRTTLTQGAIGYAKLNATTGYQIVGVIRQENGRFPPLGVNVTDKATGKDVGLVAEDGFVYLSGIQENSILHLTWGDNTCEVTPPNQSNISESAIILPCKTVK

SEQ ID NO: 9666 - protein, 241 aa, Escherichia coli; identical to SEQ ID NO: 2884

SEQ ID NO: 9667 - protein, 121 aa, Escherichia coli; identical to SEQ ID NO: 4345

SEQ ID NO: 9668 - protein, 815 aa, Escherichia coli; identical to SEQ ID NO: 2698

SEQ ID NO: 9669 - protein, 826 aa, Escherichia coli; identical to SEQ ID NO: 4286

SEQ ID NO: 9670 - protein, 641 aa, Escherichia coli; identical to SEQ ID NO: 3774

SEQ ID NO: 9671 - protein, 861 aa, Escherichia coli
MITEDISKENLFWSKVIMNANNLSCLIYCRCSLLLFAALGLTVTNHSFAAEEAEFDSEFLHLDKGINVIDIRRFSHGNPVPEGRYYSDIYVNNVWKGKADLQYLRTANTGAPTLCLTPELLSLIDLVKDTMSGNTSCFPASTGLSSASINFDLSTLRLNIEIPQALLNTRPRGYISPAQWQSGVPAAFINYDANYYQYNSSGTSNEQTYLGLKAGFNLWGWALRHRGSESWNNSYPAGYQNIETSIMHDLAPLRAQFTLGDFYTNGELMDSLSLRGVRLASDERMLPGSLRGYAPAVRGIANSNAKVTIYQNAHILYETTVPAGPFVINDLYPSGYAGDLIVKITESNGQTRMFTVPFAAVAQLIRPGFSRWQMSVGKYRYANKTYNDLIAQGTYQYGLTNDITLNSGLTTASGYTAGLAGLAFNTPLGAIASDITLSRTAFRYSGVTRKGYSLHSSYSINIPASNTNITLAAYRYSSKDFYHLKDALSANHNAFIDDVSVKSTAFYRPRNQFQISINQELGEKWGGMYLTGTTYNYWGHKGSRNEYQMGYSNFWKQLGYQIGLSQSRDNEQQRRDDRFYINFTLPLGGSVQSPVFSTVLNYSKEEKNSIQTSISGTGGEDNQFSYGISGNSQENGPSGYAMNGGYRSPYVNITTTVGHDTQNNNQRSFSASGAVVAHPYGVTLSNDLSDTFAIIHAEGAQGAVINNASGSRLDFWGNGIVPYVTPYEKNQISIDPSNLDLNVELSATEQEIIPRANSATLVKFDTKTGRSLLFDIRMSTGNPPPMASEVLDEHGQLAGYVAQAGKVFTRGLPEKGHLSVVWGPDNKDRCSFVYHVAHNKDDMQSQLVPVLCIQHPNQEKT

SEQ ID NO: 9672 - protein, 897 aa, Escherichia coli; identical to SEQ ID NO: 3934

SEQ ID NO: 9673 - protein, 881 aa, Escherichia coli; identical to SEQ ID NO: 2762

SEQ ID NO: 9674 - protein, 517 aa, Escherichia coli; identical to SEQ ID NO: 3116

SEQ ID NO: 9675 - protein, 565 aa, Escherichia coli; identical to SEQ ID NO: 2669

SEQ ID NO: 9676 - protein, 111 aa, Escherichia coli; identical to SEQ ID NO: 3096

SEQ ID NO: 9677 - protein, 881 aa, Escherichia coli; identical to SEQ ID NO: 3936

SEQ ID NO: 9678 - protein, 230 aa, Escherichia coli; identical to SEQ ID NO: 4274

SEQ ID NO: 9679 - protein, 760 aa, Escherichia coli; identical to SEQ ID NO: 3923

SEQ ID NO: 9680 - protein, 837 aa, Escherichia coli; identical to SEQ ID NO: 4333

SEQ ID NO: 9681 - protein, 865 aa, Escherichia coli
MTIEYTKNYHHLTRIATFCALLYCNTAFSAELVEYDHTFLMGQNASNIDLSRYSEGNPAIPGVYDVSVYVNDQPIINQSITFVAIEGKKNAQACITLKNLLQFHINSPDINNEKAVLLARDETLGNCLNLTEIIPQASVRYDVNDQRLDIDVPQAWVMKNYQNYVDPSLWENGINAAMLSYNLNGYHSETPGRKNESIYAAFNGGMNLGAWRLRASGNYNWMTDSGSNYDFKNRYVQRDIASLRSQLILGESYTTGETFDSVSIRGIRLYSDSRMLPPTLASFAPIIHGVANTNAKVTITQGGYKIYETTVPPGAFVIDDLSPSGYGSELIVTIEESDGSKRTFSQPFSSVVQMLRPGVGRWDISGGQVLKDDIQDEPNLFQASYYYGLNNYLTGYTGIQITDNNYTAGLLGLGLNTSVGAFSFDVTHSNVRIPDDKTYQGQSYRVSWNKLFEETSTSLNIAAYRYSTQNYLGLNDALTLIDEVKHPEQDLEPKSMRNYSRMKNQVTVSINQPLKFEKKDYGSFYLSGSWSDYWASGQNRSNYSIGYSNSTSWGSYSVSAQRSWNEDGDTDDSVYLSFTIPIEKLLGTEQRTSGFQSIDTQISSDFKGNNQLNVSSSGYSDNARVSYSVNTGYTMNKASKDLSYVGGYASYESPWGTLAGSISANSDNSRQVSLSTDGGFVLHSGGLTFSNDSFSDSDTLAVVQAPGAQGARINYGNSTIDRWGYGVTSALSPYHENRIALDINDLENDVELKSTSAVAVPRQGSVVFADFETVQGQSAIMNITRSDGKNIPFAADIYDEQGNVIGNVGQGGQAFVRGIEQQGNISIKWLEQSKPVSCLAHYQQSPEAEKIAQSIILNGIRCQIQ

SEQ ID NO: 9682 - protein, 729 aa, Escherichia coli; identical to SEQ ID NO: 2948

SEQ ID NO: 9683 - protein, 834 aa, Escherichia coli; identical to SEQ ID NO: 3095

SEQ ID NO: 9684 - protein, 478 aa, Escherichia coli; identical to SEQ ID NO: 2404

SEQ ID NO: 9685 - protein, 224 aa, Escherichia coli; identical to SEQ ID NO: 3165

SEQ ID NO: 9686 - protein, 395 aa, Escherichia coli; identical to SEQ ID NO: 3220

SEQ ID NO: 9687 - protein, 161 aa, Escherichia coli; identical to SEQ ID NO: 2582

SEQ ID NO: 9688 - protein, 226 aa, Escherichia coli; identical to SEQ ID NO: 6247

SEQ ID NO: 9689 - protein, 539 aa, Escherichia coli
MAAVCGTSGIASLFSQAAFAADSDIADGQTQRFDFSILQSMAHDLAQTAWRGAPRPLPDTLATMTPQAYNSIQYDAEKSLWHNVENRQLDAQFFHMGMGFRRRVRMFSVDPATHLAREIHFRPELFKYNDAGVDTKQLEGQSDLGFAGFRVFKAPELARRDVVSFLGASYFRAVDDTYQYGLSARGLAIDTYTDSKEEFPDFTAFWFDTVKPGATTFTVYALLDSASITGAYKFTIHCEKSQVIMDVENHLYARKDIKQLGIAPMTSMFSCGTNERRMCDTIHPQIHDSDRLSMWRGNGEWICRPLNNPQKLQFNAYTDNNPKGFGLLQLDRDFSHYQDIMGWYNKRPSLWVEPRNKWGKGTIGLMEIPTTGETLDNIVCFWQPEKAVKAGDEFAFQYRLYWSAQPPVHCPLARVMATRTGMGGFPEGWAPGEHYPEKWARRFAVDFVGGDLKAAAPKGIEPVITLSSGEAKQIEILYIEPIDGYRIQFDWYPISDSTDPVDMRMYLRCQGDAISETWLYQYFPPAPDKRQYVDDRVMS

SEQ ID NO: 9690 - protein, 835 aa, Escherichia coli
MDQMYKKLKLTTISELIKNIYCSLSVIIIGCASAYAVEFNKDLIEAEDRENVNLSQFETDGQLPVGKYSLSTLINNKRTPIHLDLQWVLIDNLTAVCVTPEQLTLLGFTDEIIEEAQQNLIDGCYPIEKEKQITTYLDKGKMQLSISAPQAWLKYKDANWTPPELWDHGIAGAFLDYNLYASHYAPHQGDNSQNISSYGQAGVNLGAWRLRTDYQYDQSFNNGKSQANNLDFPRIYLFRPIPAINAKLTIGQYDTESSIFDSFHFSGVSLKSDENMLPPDLRGYAPQITGVAQTNAKVTVSQNNRIIYQENVPPGPFSITNLFNTLQGQLDVKVEEEDGRVTQWQVASNSIPYLTRKGQIRYTTAMGKPTSVGGDSLQQPFFWTGEFSWGWLNNVSLYGGSVLTNRDYQSLATGVGFNLNSLGSLSFDVTRSDAQLHNQNKETGYSYRANYSKRFESTGSQLTFAGYRFSDKNFVSMNEYINDTNHYTNYQNEKESYIVTFNQYLESLRLNTYVSLARNTYWDASSNVNYSLSLSRDFDIGPLKNVSTSLTFSRINWEDDNQDQLYLNISIPWGTSRTLSYGMQRNQDNNISHTASWYDSSDRNNSWSVSASGDNDEFKDMEASLRASYQHNTENGRLYLSGTSQRDSYYSLNASWNGSFTATRHGAAFHDYSGSADSRFMIDADGAEDIPLNNKRAVTNRYGIGVIPSVSSYITTSLSVDTRNLPENVDIENSVITTTLTEGAIGYAKLDTRKGYQIMGVIRLADGSHPPLGISVKDETSHKELGLVADGGFVYLNGIQDDSKLTLRWGDKSCFIQPPKSSNLTTGTVILPCIS

SEQ ID NO: 9691 - protein, 878 aa, Escherichia coli; identical to SEQ ID NO: 7315

SEQ ID NO: 9692 - protein, 213 aa, Escherichia coli; identical to SEQ ID NO: 4344

SEQ ID NO: 9693 - protein, 250 aa, Escherichia coli; identical to SEQ ID NO: 4332

SEQ ID NO: 9694 - protein, 274 aa, Escherichia coli; identical to SEQ ID NO: 2300

SEQ ID NO: 9695 - protein, 825 aa, Escherichia coli
MGKDASNIDLSRYTEGNPTLPGIYDVSVYVNDQPIMSQSIAFAVIEGKKNAQACITQKNLLQFHISSPDKNSEKAILLKRDDDLGDCLNLAEMIPQSSIRYDVNDQRLDIDVPQAWIMKNYQNYVDPSLWENGINAAMLSYNLNGYHSESPGRTNDSIYAAFNGGINLGAWRLRASGNYNWMTNVHSDYDFQNRYLQRDLASLRSQLVIGESYTTGETFDSVSIRGIRLYSDSRMLPPVLASFAPIIHGVANTNAKVTVMQNGYKIYETTVPPGAFAIDDLSPSGYGSDLIVTIEEADGTKRTFSQPFSSVVQMLRPGVGRWDISAGQVLKDSIQDEPNLFQASYYYGLNNYLTGYTGIQLTDNNYTAGLLGLGMNTPVGAFSVDVTHSNVSIPDDKTYQGQSYRISWNKLFENTSTSLNIAAYRYSTQHYLGLNDALTLIDEVEHPEQDLEPKSMRNYSRMKNQVTVSINQPLKFEKKDYGSFYLSGSWSDYWASGQNSTNYSIGYSNSASWGSYSISAQRSLNEDGQTDDSIYLSFTIPIENLLGTEHRSSGFQSIDTQLNSDFKGNNQLNISSSGYSDTNRISYSVNTGYMMNKSSDDLSYIGGYASYESPWGTLSGSASASSDNSRQFSLNTDGGFVLHSGGLTFSNDSFSDSDTLAVIQAPGAKGARINYGNSTVDRWGYGVTSALSPYHENRIALDINDLENDVELKSTSTVAVPRQGAVVFADFETVQGQSAIMNIVRSDGKNIPFAADIYDEQNNIIGNVGQGGQAFVRGIEQEGNIRITWIEEGKPVSCFAHYQQNTTSEKIAQSIILNGLRCQIQ

SEQ ID NO: 9696 - protein, 485 aa, Escherichia coli; identical to SEQ ID NO: 6417

SEQ ID NO: 9697 - protein, 880 aa, Escherichia coli; identical to SEQ ID NO: 6424

SEQ ID NO: 9698 - protein, 237 aa, Escherichia coli; identical to SEQ ID NO: 4356

SEQ ID NO: 9699 - protein, 900 aa, Escherichia coli
MKLNIFTKSMIGMGLVCSALPALAMEAWNNQQGGNKYQVIFDGKIYENAWWVSSTNCPGKAKANDATNPWRLKRTATAAEISQFGNTLSCEKSGSSSSSNSNTPASNTPANGGSATPAQGTVPSNSSVVAWNKQQGGQTWYVVFNGAVYKNAWWVASSNCPGDAKGNDASNPWRYVRAATATEISETSNPQSCTSAPQPAPDVKPAPDVKPAPDVQPAPADKSNDNYAVVAWKGQEGSSTWYVIYNGGIYKNAWWVGAANCPGDAKENDASNPWRYVRAATATEITQYGNPGSCSVKPDNNGGAVTPVDPTPETPETPVTPTPDNNEPSTPADSSNDYSLQAWSGQEGSEIYHVIFNGNVYQNAWWVGSEDCPRGTSVENSNNPWRLVRTATAAEMSQYGNPTTCEIDNGGVIIANGFQASKAYSANSIVDYNDAHYKTSVDQDAWGFVPGGDNPWKKYEPAKAWSASTVYVKGDRVVVDGQAYEALFWTQSDNPALVANQNATGSNSRPWKPLGKTQSYSNEELNNAPQFNPETLYASDTLIRFNGENYISQSKVQKVSPSDSNPWRVFVDWTGTKERVGTPKKAWPKHVYAPYVDFTLNTIPDLAALAKNHNVNHFTLAFVVSKDANTCLPTWGTAYGMQNYAQYSKIKALREAGGDVMLSIGGANNAPLAASCKNVDDLMQHYYDIVDNLNLRVLDFDIEGTWVADQASIERRNLAVKKVQDKWKSEGKDIAIWYTLPILPTGLTPEGMNVLSDAKAKGVELAGVNVMTMDYGNAICQSANTEGQNIHGKCATSAIANLHSQLKGLHPNKSDAEIDAMMGTTPMVGVNDVQGEVFYLSDARLVMQDAQKRNLGMVGIWSIARDLPGGTNLSPEFHGLTKEQAPKYAFSEIFAPFTKQ

SEQ ID NO: 9700 - protein, 852 aa, Escherichia coli
MRYPVIYLFVNLVMRGMKDRIPFAVNNITCVILLSLFCNAASAVEFNTDVLDAADKKNIDFTRFSEAAYVLPGQYLLDVIVNGQSISPASLQISFVEPALSGDKAEKKLPQACLTSDMVRLMGLTAESLDKVVYWHDGQCADFHGLPGVDIRPDTGAGVLRINMPQAWLEYSDATWLPPSRWDDGIPGLMLDYNLNGTVSRNYQGGDSHQFSYNGTVGGNLGPWRLRADYQGSQEQSRYNGEKTTNRNFTWSRFYLFRAIPRWRANLTLGENNINSDIFRSWSYTGASLESDDRMLPPRLRGYAPQITGIAETNARVVVSQQGRVLYDSMVPAGPFSIQDLDSSVRGRLDVEVIEQNGRKKTFQVDTASVPYLTRPGQVRYKLVSGRSRGYGHETEGPVFATGEASWGLSNQWSLYGGAVLAGDYNALAAGAGWDLGVPGTLSADITQSVARIEGERTFQGKSWRLSYSKRFDNADADITFAGYRFSERNYMTMEQYLNARYRNDYSSREKEMYTVTLNKNVADWNTSFNLQYSRQTYWDIRKTDYYTVSVNRYFNVFGLQGVAVGLSASRSKYLGRDNDSAYLRISVPLGTGTASYSGSMSNDRYVNMAGYTDTFNDGLDSYSLNAGLNSGGGLTSQRQINAYYSHRSPLANLSANIASLQKGYTSFGVSASGGATITGKGAALHAGGMSGGTRLLVDTDGVGGVPVDGGQVVTNRWGTGVVTDISSYYRNITSVDLKRLPDDVEATRSVVESALTEGAIGYRKFSVLKGKRLFAILRLADGSQPPFGASVTSEKGRELGMVADEGLAWLSGVTPGETLSVNWDEKIQCQVNVPETAISDQQLLLPCTPQK

SEQ ID NO: 9701 - protein, 826 aa, Escherichia coli
MLRMTPLASAIVALLLGIEAYAAEETFDTHFMIGGMKDQQVANIRLDDNQPLPGQYDIDIYVNKQWRGKYEIIVKDNPQETCLSREVIKRLGINSDNFASGKQCLTFEQLVQGGSYTWDIGVFRLDFSVPQAWVEELESGYVPPENWERGINAFYTSYYLSQYYSDYKASGNNKSTYVRFNSGLNLLGWQLHSDASFSKTNNNPGVWKSNTLYLERGFAQLLGTLRVGDMYTSSDIFDSVRFRGVRLFRDMQMLPNSKQNFTPRVQGIAQSNALVTIEQNGFVVYQKEVPPGPFAITDLQLAGGGADLDVSVKEADGSVTTYLVPYAAVPNMLQPGVSKYDFAAGRSHIEGASKQSEFVQVGYQYGFNNLLTLYGGSMVANNYYAFTLGTGWNTRIGAISVDATKSHSKQDNGDVFDGQSYQIAYNKFVSQTSTRFGLAAWRYSSRDYRTFNDHVWANNKDNYRRDENDVYDIADYYQNDFGRKNSFSANMSQSLPEGWGSVSLSTLWRDYWGRSGSSKDYQLSYSNNWRRISYTLAASQAYDENHHEEKRFNIFISIPFDWGDDVTTPRRQIYMSNSTTFDDQGFASNNTGLSGTVGSRDQFNYGVNLSYQHQGNETTAGANLTWNAPVATVNGSYSQSSTYRQAGASVSGGIVAWSGGVNLANRLSETFAVMNAPGIKDAYVNGQKYRTTNRNGVVVYDGMTPYRENHLMLDVSQSDSEAELRGNRKIAAPYRGAVVLVNFDTDQRKPWFIKALRADGQPLMFGYEVNDIHGHNIGVVGQGSQLFIRTNEVPPSVNVAIDKQQGLSCTITFGKEIDESRNYICQ

SEQ ID NO: 9702 - protein, 700 aa, Escherichia coli; identical to SEQ ID NO: 3128

SEQ ID NO: 9703 - protein, 673 aa, Escherichia coli; identical to SEQ ID NO: 2919

SEQ ID NO: 9704 - protein, 432 aa, Escherichia coli; identical to SEQ ID NO: 2026

SEQ ID NO: 9705 - protein, 813 aa, Escherichia coli
MVLTGSGMLCTTANAEEYYFDPIMLETTKSGMQTTDLSRFSKKYAQLPGTYQVDIWLNKKKVSQKKITFTANAEQLLQPQFTVEQLRELGIKVDEIPALAEKDDDSVINSLEQIIPGTAAEFDFNHQRLNLSIPQIALYRDARGYVSPSRWDDGIPTLFTNYSFTGSDNRYRQGNRSQRQYLNMQNGANFGPWRLRNYSTWTRNDQTSSWNTISSYLQRDIKALKSQLLLGESATSGSIFSSYTFTGVQLASDDNMLPNSQRGFTPTVRGIANSSAIVTIRQNGYVIYQSNVPAGAFEINDLYPSSNSGDLEVTIEESDGTQRRFIQPYSSLPMMQRPGHLKYSATAGRYRADANSDSKEPEFAEATAIYGLNNTFTLYGGLLGSEDYYALGIGIGGTLGALGALSMDINRADTQFDNQHSFHGYQWRTQYIKDIPETNTNIAVSYYRYTNDGYFSFNEANTRNWDYNSRQKSEIQFNISQTIFDGVSLYASGSQQDYWGNNDKNRNISVGVSGQQWGVGYSLNYQYSRYTDQNNDRALSLNLSIPLERWLPRSRVSYQMTSQKDRPTQHEMRLDGSLLDDGRLSYSLEQSLDDDNNHNSSLNASYRSPYGTFSAGYSYGNDSSQYNYGVTGGVVIHPHGVTLSQYLGNAFALIDANGASGVRIQNYPGIATDPFGYAVVPYLTTYQENRLSVDTTQLPDNVDLEQTTQFVVPNRGAMVAARFNANIGYRVLVTVSDRNGKPLPFGALASNDETGQQSIVDEGGILYLSGISSKSQSWTVRWGNQADQQCQFAFSTPDSEPTTSVLQGTAQCH

SEQ ID NO: 9706 - protein, 243 aa, Escherichia coli; identical to SEQ ID NO: 3483

SEQ ID NO: 9707 - protein, 368 aa, Escherichia coli; identical to SEQ ID NO: 2371

SEQ ID NO: 9708 - protein, 614 aa, Escherichia coli; identical to SEQ ID NO: 1888

SEQ ID NO: 9709 - protein, 430 aa, Escherichia coli; identical to SEQ ID NO: 2617

SEQ ID NO: 9710 - protein, 512 aa, Escherichia coli; identical to SEQ ID NO: 2974

SEQ ID NO: 9711 - protein, 359 aa, Escherichia coli; identical to SEQ ID NO: 2328

SEQ ID NO: 9712 - protein, 250 aa, Escherichia coli; identical to SEQ ID NO: 3811

SEQ ID NO: 9713 - protein, 733 aa, Escherichia coli
MMISKKYTLWALNPLLLTMMAPAVAQQTDDETFVVSANRSNRTVAEMAQTTWVIENAELEQQIQGGKELKDALAQLIPGLDVSSRSRTNYGMNVRGRPLVVLVDGVRLNSSRTDSRQLDSIDPFNIDHIEVISGATSLYGGGSTGGLINIVTKKGQPETMMEFEAGTKSGFSSSKDHDERIAGAVSGGNEHISGRLSVAYQKFGGWFDGNGDATLLDNTQTGLQYSDRLDIMGTGTLNIDESRQLQLITQYYKSQGDDDYGLNLGKGFSAIRGTSTPFVSNGLNSDRIPGTERHLISLQYSDSAFLGQELVGQVYYRDESLRFYPFPTVNANKQVTAFSSSQQDTDQYGMKLTLNSKPMDGWQITWGLDADHERFTSNQMFFDLAQASASGGLNNKKIYTTGRYPSYDITNLAAFLQSDYDINNLFTLNGGVRYQYTENKIDDFIGYAQQRQIAAGKATSADAIPGGSVDYDNFLFNAGLLMHITERQQAWLNFSQGVELPDPGKYYGRGIYGAAVNGHLPLTKSVNVSDSKLEGVKVDSYELGWRFTGNNLRTQIAAYYSISDKSVVANKDLTISVVDDKRRIYGVEGAVDYLIPDTDWSTGVNFNVLKTESKVNGTWQKYDVKTASPSKATAYIGWAPDPWSLRVQSTTSFDVSDAQGYKVDGYTTVDLLGSYQLPVGTLSFSIENLFDRDYTTVWGQRAPLYYSPGYGPASLYDYKGRGRTFGLNYSVLF

SEQ ID NO: 9714 - protein, 752 aa, Escherichia coli
MAPSKTAQPKHSLRKIAVVVATAVSGMSVYAQAAVEPKEDTITVTAAPAPQESAWGPAATIAARQSATGTKTDTPIQKVPQSISVVTAEEMALHQPKSVKEALSYTPGVAVGTRGASNTYDYLIIRGFAADGQSQNNYLNGLKLQGNFYNDAVIDPYMLERAEIMRGPVSVLYGKSSPGGLLNMVSKRPTTEPLKEVQFKAGTDSLFQTGFDFSDALDDDGVYSYRLTGLARSANAQQKGSEEQRYAIAPAFTWRPDDKTNFTFLSYFQNEPETGYYGWLPKEGTVEPLPNGKRLPTDFNEGAKNNTYSRNEKMIGYSFDHEFNDTFTVRQNLRFAQNKVSQKSVYGYGMCSDPLYTKDQEALKASPCLSIPQSQWGHTLTRQYVIDNEKLENFSVDTQLQSKFATGSVDHTLLTGVDFMRMRNDIDSWFGYAGSVAPSDIYNLDRSDFDFGAHPNPSGPYRVLLKQKQTGLYVQDQAQWDKVLVTLGGRYDWADQSSFNRDYGNKSERDDKEFTWRGGVNYLFDNGVTPYFSYSESFEPASQTDANGDLFAPSKGKQYEVGVKYVPEDRPIVVTGALYQLTKTNNLMADPNGSLFSVEGGEIRARGVELEAKAALSASVNVVGSYTYTDAEYTTDTTYKGNTPAQVPKHMASLWADYTFFDGPLSGLTLGTGGRYTGSSYGDPANSFKVGSYTVVDALVRYDLARVGMAGSNVALHVNNLFDREYVASCFNTYGCFWGAERQVVATATFRF

SEQ ID NO: 9715 - protein, 362 aa, Escherichia coli; identical to SEQ ID NO: 4554

SEQ ID NO: 9716 - protein, 360 aa, Escherichia coli
MMKKYLALALIAPLLISCSTTKKGDTYNEAWVKDTNGFDILMGQFAHNIENIWGFKEVVIAGPKDYVKYTDQYQTRSYINFDDGTITIETIAGTEPAAHLRRAIIKTLLMGDDPSSVDLYSDVDDITISKEPFLYGQVVDNTGQPIRWEGRASNFADYLLKNRLKSRSNGLRIIYSVTINMVPNHLDKRAHKYLGMVRQASRKYGVDESLILAIMQTESSFNPYAVSRSDALGLMQVVQHTAGKDVFRSQGKSGTPSRSFLFDPASNIDTGTAYLAMLNNVYLGGIDNPTSRRYAVITAYNGGAGSVLRVFSNDKIQAANIINTMTPGDVYQTLTTRHHSAESRRYLYKVNTAQKSYRRR

SEQ ID NO: 9717 - protein, 840 aa, Escherichia coli
MKNKADNKKRNFLTHSEIESLLKAANTGPHAARNYCLTLLCFIHGFRASEICRLRISDIDLKAKCIYIHRLKKGFSTTHPLLNKEIQALKNWLSIRTSYPHAESEWVFLSRKGNPLSRQQFYHIISTSGGNAGLSLEIHPHMLRHSCGFALANMGIDTRLIQDYLGHRNIRHTVWYTASNAGRLRDNTTWSYNSSDSSSGSKNKWQHINTWLERDIIPLRSRLTLGDGYTQGDIFDGINFRGAQLASDDNMLPDSQRGFASVIHGIARGTAQVTIKQNGYDIYNSTVPPGPFTINDIYAAGNSGDLQVTIKEADGSTQIFTVPYSSVPLLQREGHTRYSITAGEYRSGNAQQEKPRFFQSTLLHGLPAGWTIYGGTQLADRYRAFNFGIGKNMGALGALSVDMTQANSTLPDDSQHDGQSVRFLYNKSLNESGTNIQLVGYRYSTSGYFNFADTTYSRMNGYNIETQDGVIQVKPKFTDYYNLAYNKRGKLQLTVTQQLGRTSTLYLSGSHQTYWGTSNVDEQFQAGLNTAFEDINWTLSYSLTKNAWQKGRDQMLALNVNIPFSHWLRSDSKSQWRHASASYSMSHDLNGRMTNLAGVYGTLLEDNNLSYSVQTGYAGGGDGNSGSTGYATLNYRGGYGNANIGYSHSDDIKQLYYGVSGGVLAHANGVTLGQPLNDTVVLVKAPGAKDAKVENQTGVRTDWRGYAVLPYATEYRENRVALDTNTLADNVDLDNAVANVVPTRGAIVRAEFKARVGIKLLMTLTHNNKPLPFGAMVTSESSQSSGIVADNGQVYLSGMPLAGKVQVKWGEEENAHCVANYQLPPESQQQLLTQLSAECR

SEQ ID NO: 9718 - protein, 774 aa, Escherichia coli
MTPLRVFRKTTPLVNAIRLSLLPLAGLSFSAFAAQVNIAPGSLDKALNQYAAHSGFTLSVDASLTRGKQSNGLHGDYDVESGLQQLLDGSGLQVKPLGNNSWTLEPAPAPKEDALTVVGDWLGDARENDVFEHAGARDVIRREDFAKTGATTMREVLNRIPGVSAPENNGTGSHDLAMNFGIRGLNPRLASRSTVLMDGIPVPFAPYGQPQLSLAPVSLGNMDAIDVVRGGGAVRYGPQSVGGVVNFVTRAIPQDFGIEAGVEGQLSPTSSQNNPKETHNLMVGGTADNGFGTALLYSGTRGSDWREHSATRIDDLMLKSKYAPDEVHTFNSLLQYYDGEADMPGGLSRADYDADRWQSTRPYDRFWGRRKLASLGYQFQPDSQHKFNIQGFYTQTLRSGYLEQGKRITLSPRNYWVRGIEPRYSQIFMIGPSAHEVGVGYRYLNESTHEMRYYTATSSGQLPSGSSPYDRDTRSGTEAHAWYLDDKIDIGNWTITPGMRFEHIESYQNNAITGTHEEVSYNAPLPALNVLYHLTDSWNLYANTEGSFGTVQYSQIGKAVQSGNVEPEKARTWELGTRYDDGALTAEMGLFLINFNNQYDSNQTNDTVTARGKTRHTGLETQARYDLGTLTPTLDNVSIYASYAYVNAEIREKGDTYGNLVPFSPKHKGTLGVDYKPGNWTFNLNSDFQSSQFADNANTVKESADGSTSRIPGFMLWGARVAYDFGPQMADLNLAFGVKNIFDQDYFIRSYNDNNKGIYAGQPRTLYMQGSLKF

SEQ ID NO: 9719 - protein, 746 aa, Escherichia coli
MNKKIHSLALLVNLGIYGVAQAQEPTDTPVSHDDTIVVTAAEQNLQAPGVSTITADEIRKNPVARDVSEIIRTMPGVNLTGNSTSGQRGNNRQIDIRGMGPENTLILIDGKPVSSRNSVRQGWRGERDTRGDTSWVPPEMIERIEVLRGPAAARYGNGAAGGVVNIITKKGSGEWHGSWDAYFNAPEHKEEGATKRTNFSLTGPLGDEFSFRLYGNLDKTQADAWDINQGHQSARAGTHATTLPAGREGVINKDINGVVRWDFAPLQSLELEAGYSRQGNLYAGDTQNTNSDAYTRSKYGDETNRLYRQNYSLTWNGGWDNGVTTSNWVQYEHTRNSRIPEGLAGGTEGKFNEKAAQDFVDIDLDDVMLHSEVNLPIDFLVNQTLTLGTEWNQQRMKDLSSNTQALTGTNTGGAIDGVSATDRSPYSKAEIFSLFAENNMELTDSTIVTPGLRFDHHSIVGNNWSPALNISQGLGDDFTLKMGIARAYKAPSLYQTNPNYILYSKGQGCYASAGGCYLQGNDDLKAETSINKEIGLEFKRDGWLAGVTWFRNDYRNKIEAGYVAVGQNAVGTDLYQWDNVPKAVVEGLEGSLNVPVSETVMWTNNITYMLKSENKTTGDRLSIIPEYTLNSTLSWQAREDLSMQTTFTWYGKQQPKKYNYKGQPAVGPETKEISPYSIVGLSATWDVTKNVSLTGGVDNLFDKRLWRAGNAQTTGDLAGANYIAGAGAYTYNEPGRTWYMSINTHF

SEQ ID NO: 9720 - protein, 643 aa, Escherichia coli
MKMTRLYPLALGGLLLPAIANAQTSQQDESTLVVTASKQSSRSASANNVSSTVVSAPELSDAGVTASDKFPRVLPGLNIENSGNMLFSTISLRGVSSAQDFYNPAVTLYVDGVPQLSTNTIQALTDVQSVELLRGPQGTLYGKSAQGGIINIVTQQPDSTPRGYIEGGVSSRDSYRSKFNLSGPIQDGLLYGSVTLLRQVDDGDMINPATGSDDLGGTRASIGNVKLRLAPDDQPWEMGFAASRECTRATQDAYVGWNDIKGRKLSISDGSPDPYMRRCTDSQTLSGKYTTDDWVFNLISAWQQQHYSRTFPSGSLIVNMPQRWNQDVQELRAATLGDARTVDMVFGLYRQNTREKLNSAYDMPTMPYLSSTGYTTAETLAAYSDLTWHLTDRFDIGGGVRFSHDKSSTQYHGSMLGNPFGDQGKSNDDQVLGQLSAGYMLTDDWRVYTRVAQGYKPSGYNIVPTAGLDAKPFVAEKSINYELGTRYETADVTLQAATFYTHTKDMQLYSGPVGMQTLSNAGKADATGVELEAKWRFAPGWSWDINGNVIRSEFTNDSELYHGNRVPFVPRYGAGSSVNGVIDTRYGALMPRLAVNLVGPHYFDGDNQLRQGTYATLDSSLGWQATERMNISVYVDITVPMAT

SEQ ID NO: 9721 - protein, 478 aa, Escherichia coli
MAADFIFSLSVGADMFFGDGGQLLSDKSLTGSAGGGNNRMKFNILPLAFFIGIIVSPARAELYFNPRFLSDDPDAVADLSAFTQGQELPPGVYRVDIYLNDTYISTRDVQFQMSQDGKQLAPCLSPEHMSAMGVNRYAVPGMERLPADTCTSLNSMIQGATFRFDVGQQRLYLTVPQLYMSNQARGYIAPEYWDNGITAALLNYDFSGNRVRDSYGGTSDYAYLNLKTGLNIGSWRLRDNTSWSYSAGKGYSQNNWQHINTWLERDIVSLRSRLTMGDSYTRGDIFDGVNFRGIQLASDDNMVPDSQRGYAPTIHGISRGTSRISIRQNGYEIYQSTLPPGPFEINDIYPAGSGGDLQVTLQEADGSVQRFNVPWSSVPVLQREGHLKYALSAGEFRSGGHQQDNPRFAEGTLKYGLPAGWTVYGGAWIAERYRAFNLGVGKNMGWLGAVSLDATRANARLPDESRHDGLVHGYRYHG

SEQ ID NO: 9722 - protein, 231 aa, Escherichia coli; identical to SEQ ID NO: 2864

SEQ ID NO: 9723 - protein, 719 aa, Escherichia coli; identical to SEQ ID NO: 4573

SEQ ID NO: 9724 - protein, 222 aa, Escherichia coli; identical to SEQ ID NO: 1956

SEQ ID NO: 9725 - protein, 235 aa, Escherichia coli
MIAMQKNAAHTYAISSLLVLSLTGCAWIPSTPLVQGATSAQPVPGPTPVANGSIFQSAQPINYGYQPLFEDRRPRNIGDTLTIVLQENVSASKSSSANASRDGKTNFGFDTVPRYLQGVFGNARADVEASGGNTFNGKGGANASNTFSGTLTVTVDQVLVNGNLHVVGEKQIAINQGTEFIRFSGVVNPRTISGSNTVPSTQVADARIEYVGNGYINEAQNMGWLQRFFLNLSPM

SEQ ID NO: 9726 - protein, 836 aa, Escherichia coli
MKDRIPFAVNNITCVILLSLFCNAASAVEFNTDVLDAADKKNIDFTRFSEAGYVLPGQYLLDVIVNGQSISPASLQISFVEPQSSGDKAEKKLPQACLTSDMVRLMGLTAESLDKVVYWHDGQCADFHGLPGVDIRPDTGAGVLRINMPQAWLEYSDATWLPPSRWDDGIPGLMLDYNLNGTVSRNYQGGDSHQFSYNGTVGGNLGPWRLRADYQGSQEQSRYNGEKTTNRNFTWSRFYLFRAIPRWRANLTLGENNINSDIFRSWSYTGASLESDDRMLPPRLRGYAPQITGIAETNARVVVSQQGRVLYDSMVPAGPFSIQDLDSSVRGRLDVEVIEQNGRKKTFQVDTASVPYLTRPGQVRYKLVSGRSRGYGHETEGPVFATGEASWGLSNQWSLYGGAVLAGDYNALAAGAGWDLGVPGTLSADITQSVARIEGERTFQGKSWRLSYSKRFDNADADITFAGYRFSERNYMTMEQYLNARYRNDYSSREKEMYTVTLNKNVADWNTSFNLQYSRQTYWDIRKTDYYTVSVNRYFNVFGLQGVAVGLSASRSKYLGRDNDSAYLRISVPLGTGTASYSGSMSNDRYVNMAGYTDTFNDGLDSYSLNAGLNSGGGLTSQRQINAYYSHRSPLANLSANIASLQKGYTSFGVSASGGATITGKGAALHAGGMSGGTRLLVDTDGVGGVPVDGGQVVTNRWGTGVVTDISSYYRNTISVDLKRLPDDVEATRSVVESALTEGAIGYRKFSVLKGKRLFAILRLADGSQPPFGASVTSEKGRELGMVADEGLAWLSGVTPGETLSVNWDGKIQCQVNVPETAISDQQLLLPCTPQK

SEQ ID NO: 9727 - protein, 518 aa, Escherichia coli; identical to SEQ ID NO: 2356

SEQ ID NO: 9728 - protein, 258 aa, Escherichia coli
MRQYRLLSPMIKVVIVLFSLLFSTAQAGLVIGGTRFAYPENQSSISVELKNTSDRDMLVKVAVSPDDARQLTGTVESLPSYSETVFIATPPLFILKPDKNTKIRINRVGGSLPADRESLFILNVAALPTLENSHSVKTDNQLQIAVRNRMKIFYRPSNLSEDPNMSYQKLRWARKNEIVTVYNPGPRYVTLYNLHVDGKVIDGGMVAPFSHRQQSWCKSQGVCEIAWQTLDIYNNVLPILKVKLNPSQLDVTGFAFSQ

SEQ ID NO: 9729 - protein, 122 aa, Escherichia coli; identical to SEQ ID NO: 2915

SEQ ID NO: 9730 - protein, 260 aa, Escherichia coli; identical to SEQ ID NO: 4546

SEQ ID NO: 9731 - protein, 161 aa, Escherichia coli; identical to SEQ ID NO: 2582

SEQ ID NO: 9732 - protein, 266 aa, Escherichia coli; identical to SEQ ID NO: 1893

SEQ ID NO: 9733 - protein, 331 aa, Escherichia coli; identical to SEQ ID NO: 2713

SEQ ID NO: 9734 - protein, 224 aa, Escherichia coli; identical to SEQ ID NO: 4578

SEQ ID NO: 9735 - protein, 250 aa, Escherichia coli; identical to SEQ ID NO: 2761

SEQ ID NO: 9736 - protein, 213 aa, Escherichia coli; identical to SEQ ID NO: 2232

SEQ ID NO: 9737 - protein, 510 aa, Escherichia coli; identical to SEQ ID NO: 3982

SEQ ID NO: 9738 - protein, 867 aa, Escherichia coli; identical to SEQ ID NO: 2581

SEQ ID NO: 9739 - protein, 237 aa, Escherichia coli; identical to SEQ ID NO: 1814

SEQ ID NO: 9740 - protein, 733 aa, Escherichia coli
MMISKKYTLWALNPLLLTMMAPAVAQQTDDETFVVSANRSNRTVAEMAQTTWVIENAELEQQIQGGKELKDALAQLIPGLDVSSRSRTNYGMNVRGRPLVVLVDGVRLNSSRTDSRQLDSIDPFNIDHIEVISGATSLYGGGSTGGLINIVSKKGQPETMKEFEAGTKSGFSSSKDHDERIAGAVSGGNEHISGRLSVAYQKFGGWFDGNGDATLLDNTQTGLQYSDRLDIMGTGTLNIDESRQLQLITQYYKSQGDDDYGLNLGKGFSAIRGTSTPFVSNGLNSDRIPGTERHLISLQYSDSAFLGQELVGQVYYRDESLRFYPFPTVNANKQVTAFSSSQQDTDQYGMKLTLNSKPMDGWQITWGLDADHERFTSNQMFFDLAQASASGGLNNKKIYTTGRYPSYDITNLAVFLQSGYDINNLFTLNGGVRYQYTENKIDDFIGYAQQRQIAAGKATSADAIPGGSVDYDNFLFNAGLLMHITERQQAWLNFSQGVELPDPGKYYGRGIYGAAVNGHLPLTKSVNVSDSKLEGVKVDSYELGWRFTGNNLRTQIAAYYSISDKSVVANKDLTISVVDDKRRIYGVEGAVDYLIPDTDWSTGVNFNVLKTESKVNGTWQKYDVKTASPSKATAYIGWAPDPWSLRVQSTTSFDVSDAQGYKVDGYTIVDLLGSYQLPVGTLSFSIENLFDRDYTTVWGQRAPLYYSPGYGPASLYGYKGRGRTFGLSYSVLF

SEQ ID NO: 9741 - protein, 897 aa, Escherichia coli
MKLNIFTKSMIGMGLVCSALPALAMEAWNNQQGGNKYQVIFDGKIYENAWWVSSTNCPGKAKANDATNPWRLKRTATAAEISQFGNTLSCEKSGSSSSSNSNTPASNTPANGGSATPAQGTVPSNSSVVAWNKQQGGQTWYVVFNGAVYKNAWWVASSNCPGDAKGNDASNPWRYVRAATATEISETSNPQSCTSAPQPAPDVKPAPDVKPAPDVQPAPADKSNDNYAVVAWKGQEGSSTWYVIYNGGIYKNAWWVGAANCPGDAKENDASNPWRYVRAATATEISQYGNPGSCSVKPDNNGGAVTPVDPTPETPVTPTPDNSEPSTPADSGNDYSLQAWSGQEGSEIYHVIFNGNVYKNAWWVGSKDCPRGTSAENSNNPWRLERTATAAELSQYGNPTTCEIDNGGVIVADGFQASKAYSADSIVDYNDAHYKTSVDQDAWGFVPGGDNPWKKYEPAKAWSASTVYVKGDRVVVDGQAYEALFWTQSDNPALVANQNATGSNSRPWKPLGKAQSYSNEELNNAPQFNPETLYASDTLIRFNGVNYISQSKVQKVSPSDSNPWRVFVDWTGTKERVGTPKKAWPKHVYAPYVDFTLNTIPDLAALAKNHNVNHFTLAFVVSKDANTCLPTWGTAYGMQNYAQYSKIKALREAGGDVMLSIGGANNAPLAASCKNVDDLMQHYYDIVDNLNLRVLDFDIEGTWVADQASIERRNLAVKKVQDKWKSEGKDIAIWYTLPILPTGLTPEGMNVLSDAKAKGVELAGVNVMTMDYGNAICQSANTEGQNIHGKCATSAIANLHSQLKGLHPNKSDAEIDAMMGTTPMVGVNDVQGEVFYLSDARLVMQDAQKRNLGMVGIWSIARDLPGGTNLSPEFHGLTKEQAPKYAFSEIFAPFTKQ

SEQ ID NO: 9742 - protein, 504 aa, Escherichia coli
MMDAGSVGNVVHYEPSNVLILTGRASTINKLIEVIKRVDVIGTEKQQIIHLEYASAEDLAEILNQLISESHGKSQMPALLSAKIVADKRTNSLIISGPEKARQRITSLLKSLDVEESEEGNTRVYYLKYAKATNLVEVLTGVSEKLKDEKGNARKPSSSGAMDNVAITADEQTNSLVITADQSVQEKLATVIARLDIRRAQVLVEAIIVEVQDGNGLNLGVQWANKNVGAQQFTNTGLPIFNAAQGVADYKKNGGITSANPAWDMFSAYNGMAAGFFNGDWGVLLTALASNNKNDILATPSIVTLDNKLASFNVGQDVPVLSGSQTTSGDNVFNTVERKTVGTKLKVTPQVNEGDAVLLEIEQEVSSVDSSSNSTLGPTFNTRTIQNAVLVKTGETVVLGGLLDDFSKEQVSKVPLLGDIPLVGQLFRYTSTERAKRNLMVFIRPTIIRDDDVYRSLSKEKYTRYRQEQQQRIDGKSKALVGSEDLPVLDENTFNSHAPAPSSR

SEQ ID NO: 9743 - protein, 230 aa, Escherichia coli; identical to SEQ ID NO: 2580

SEQ ID NO: 9744 - protein, 250 aa, Escherichia coli; identical to SEQ ID NO: 4023

SEQ ID NO: 9745 - protein, 193 aa, Escherichia coli; identical to SEQ ID NO: 2246

SEQ ID NO: 9746 - protein, 430 aa, Escherichia coli; identical to SEQ ID NO: 2617

SEQ ID NO: 9747 - protein, 367 aa, Escherichia coli; identical to SEQ ID NO: 2433

SEQ ID NO: 9748 - protein, 246 aa, Escherichia coli; identical to SEQ ID NO: 1985

SEQ ID NO: 9749 - protein, 614 aa, Escherichia coli; identical to SEQ ID NO: 1888

SEQ ID NO: 9750 - protein, 162 aa, Escherichia coli; identical to SEQ ID NO: 1973

SEQ ID NO: 9751 - protein, 826 aa, Escherichia coli; identical to SEQ ID NO: 2758

SEQ ID NO: 9752 - protein, 747 aa, Escherichia coli
MARSKTAQPKHSLRKIAVVVATAVSGMSVYAQAAVEPKEDTITVTAAPAPQESAWGPAATIAARQSATGTKTDTPIQKVPQSISVVTAEEMALHQPKSVKEALSYTPGVSVGTRGASNTYDHLIIRGFAAEGQSQNNYLNGLKLQGNFYNDAVIDPYMLERAEIMRGPVSVLYGKSSPGGLLNMVSKRPTTEPLKEVQFKAGTDSLFQTGFDFSDSLDDDGVYSYRLTGLARSANAQQKGSEEQRYAIAPAFTWRPDDKTNFTFLSYFQNEPETGYYGWLPKEGTVEPLPNGKRLPTDFNEGAKNNTYSRNEKMVGYSFDHEFNDTFSVRQNLRFAENKTSQNSVYGYGVCSDPANAYSKQCAALAPADKGHYLARKYVVDDEKLQNFSVDTQLQSKFATGDIDHTLLTGVDFMRMRNDINAWFGYDDSVPLLNLYNPVNTDFDFNAKDPANSGPYRILNKQKQTGVYVQDQAQWDKVLVTLGGRYYWADQESLNRVAGTTDKRDDKQFTWRGGVNYLFDNGVTPYFSYSESFEPSSQVGKDGNIFAPSKGKQYEVGVKYVPEDRPIVVTGAVYNLTKTNNLMADPEGSFFSVEGGEIRARGVEIEAKAALSASVNVVGSYTYTDAEYTTDTTYKGNTPAQVPKHMASLWADYTFFDGPLSGLTLGTGGRYTGSSYGDPANSFKVGSYTVVDALVRYDLARVGMAGSNVALHVNNLFDREYVASCFNTYGCFWGAERQVVATATFRF

SEQ ID NO: 9753 - protein, 851 aa, Escherichia coli; identical to SEQ ID NO: 4440

SEQ ID NO: 9754 - protein, 367 aa, Escherichia coli; identical to SEQ ID NO: 2433

SEQ ID NO: 9755 - protein, 130 aa, Escherichia coli; identical to SEQ ID NO: 3184

SEQ ID NO: 9756 - protein, 828 aa, Escherichia coli; identical to SEQ ID NO: 2386

SEQ ID NO: 9757 - protein, 663 aa, Escherichia coli; identical to SEQ ID NO: 1910

SEQ ID NO: 9758 - protein, 207 aa, Escherichia coli; identical to SEQ ID NO: 2211

SEQ ID NO: 9759 - protein, 351 aa, Escherichia coli; identical to SEQ ID NO: 2872

SEQ ID NO: 9760 - protein, 678 aa, Escherichia coli; identical to SEQ ID NO: 3993

SEQ ID NO: 9761 - protein, 231 aa, Escherichia coli; identical to SEQ ID NO: 4031

SEQ ID NO: 9762 - protein, 700 aa, Escherichia coli; identical to SEQ ID NO: 2784

SEQ ID NO: 9763 - protein, 122 aa, Escherichia coli; identical to SEQ ID NO: 2915

SEQ ID NO: 9764 - protein, 869 aa, Escherichia coli; identical to SEQ ID NO: 3173

SEQ ID NO: 9765 - protein, 242 aa, Escherichia coli; identical to SEQ ID NO: 2697

SEQ ID NO: 9766 - protein, 815 aa, Escherichia coli; identical to SEQ ID NO: 2698

SEQ ID NO: 9767 - protein, 446 aa, Escherichia coli [sequence omitted]

SEQ ID NO: 9768 - protein, 199 aa, Escherichia coli
MIYDASRKEAALPVANKGAETPYLLQSWVDNIDGKSRAPFIITPPLFRLEAGDDSSLRIIKTADNLPENKESLFYINVRAIPAKKKSDDVNANELTLVFKTRIKMFYRPAHLKGRVNDAWKSLEFKRSDHSLNIYNPTEYYVVFAGLAVDKIDLTSKIEYIAPGEHKQLPLPASGGKNVKWAAINDYGGSSGTETRPLQ

SEQ ID NO: 9769 - protein, 446 aa, Escherichia coli [sequence omitted]

SEQ ID NO: 9770 - protein, 368 aa, Escherichia coli; identical to SEQ ID NO: 3933

SEQ ID NO: 9771 - protein, 747 aa, Escherichia coli; identical to SEQ ID NO: 2072

SEQ ID NO: 9772 - protein, 432 aa, Escherichia coli; identical to SEQ ID NO: 2026

SEQ ID NO: 9773 - protein, 784 aa, Escherichia coli; identical to SEQ ID NO: 8230

SEQ ID NO: 9774 - protein, 816 aa, Escherichia coli; identical to SEQ ID NO: 4401

SEQ ID NO: 9775 - protein, 241 aa, Escherichia coli; identical to SEQ ID NO: 2922

SEQ ID NO: 9776 - protein, 368 aa, Escherichia coli; identical to SEQ ID NO: 7478

SEQ ID NO: 9777 - protein, 193 aa, Escherichia coli; identical to SEQ ID NO: 2246

SEQ ID NO: 9778 - protein, 191 aa, Escherichia coli; identical to SEQ ID NO: 2727

SEQ ID NO: 9779 - protein, 162 aa, Escherichia coli; identical to SEQ ID NO: 1965

SEQ ID NO: 9780 - protein, 746 aa, Escherichia coli; identical to SEQ ID NO: 4275

SEQ ID NO: 9781 - protein, 208 aa, Escherichia coli; identical to SEQ ID NO: 1949

SEQ ID NO: 9782 - protein, 351 aa, Escherichia coli; identical to SEQ ID NO: 2872

SEQ ID NO: 9783 - protein, 224 aa, Escherichia coli; identical to SEQ ID NO: 3115

SEQ ID NO: 9784 - protein, 170 aa, Escherichia coli [sequence omitted]

SEQ ID NO: 9785 - protein, 367 aa, Escherichia coli; identical to SEQ ID NO: 4285

SEQ ID NO: 9786 - protein, 200 aa, Escherichia coli; identical to SEQ ID NO: 1784

SEQ ID NO: 9787 - protein, 761 aa, Escherichia coli
MQFHINSPDINNEKAVLLARDETLGNCLNLTEIIPQASVRYDVNEQRLDIDVPQAWVMKNYQNYVDPSLWENGINAAMLSYNLNGYHSETPGRRNDSIYAAFNGGMNLGAWRLRASGNYNWMTDSGSNYDFKNRYIQRDIASLRSQLILGESYTFDSVSIRGIRLYSDSRMLPPTLASFAPIIHGVANTNAKVTITQGGYKIYETTVPPGAFVIDDLSPSGYGSDLIVTVEESDGSKRTFSQPFSSVVQMLRPGVGRWDISGGQVLKDDIQDEPNLFQASYYYGLNNYLTGYTGIQITDNNYTAGLLGLGLNTSVGAFSFDVTHSNVRIPDDKTYQGQSYRVSWNKLFEETSTSLNIAAYRYSTQNYLGLNDALTLIDEVKHPEQDLEPKSMRNYSRMKNQVTVSINQPLKFEKKDYGSFYLSGSWSDYWASGQNRSNYSIGYSNSASWGSYSVSAQRSWNEDGDTDDSVYLSFTIPIEKLLGTEQRTSGFQSIDTQMSSDFKGNNQLNVSSSGYSDNARVSYSVNTGYTMNKASKDLSYVGGYASYESPWGTLAGSVSANSDNSRQVSLSTDGGFVLHSGGLTFSNDSFSDSDTLAVVQAPGAQGARINYGNSTIDRWGYGVTSALSPYHENRIALDINDLENDVELKSTSAVAVPRQGSVVFADFETVQGQSAIMNITRSDGKNIPFAADIYDEQGNVIGNVGQGGQAFVRGIEQQGNISIKWLEESKPVSCLAHYQQSSEAEKIAQSIILNGIRCQIQ

SEQ ID NO: 9788 - protein, 230 aa, Escherichia coli; identical to SEQ ID NO: 3348

SEQ ID NO: 9789 - protein, 747 aa, Escherichia coli; identical to SEQ ID NO: 2072

SEQ ID NO: 9790 - protein, 266 aa, Escherichia coli; identical to SEQ ID NO: 1894

SEQ ID NO: 9791 - protein, 446 aa, Escherichia coli; identical to SEQ ID NO: 2176

SEQ ID NO: 9792 - protein, 816 aa, Escherichia coli; identical to SEQ ID NO: 2817

SEQ ID NO: 9793 - protein, 535 aa, Escherichia coli
MRYQRHCFSFSQAAFAADSDIADGQTQRFDFSILQSMAHDLAQTAWRGAPRPLPDTLATMTPQAYNSIQYDAEKSLWHNVENRQLDAQFFHMGMGFRRRVRMFSVDPATHLAREIHFRPELFKYNDAGVDTKQLEGQSDLGFAGFRVFKAPELARRDVVSFLGASYFRAVDDTYQYGLSARGLAIDTYTDSKEEFPDFTAFWFDTVKPGATTFTVYALLDSASITGAYKFTIHCEKSQVIMDVENHLYARKDIKQLGIAPMTSMFSCGTNERRMCDTIHPQIHDSDRLSMWRGNGEWICRPLNNPQKLQFNAYTDNNPKGFGLLQLDRDFSHYQDIMGWYNKRPSLWVEPRNKWGKGTIGLMEIPTTGETLDNIVCFWQPEKAVKAGDEFAFQYRLYWSAQPPVHCPLARVMATRTGMGGFSEGWAPGEHYPEKWARRFAVDFVGGDLKAAAPKGIEPVITLSSGEAKQIEILYIEPIDGYRIQFDWYPTSDSTDPVDMRMYLRCQGDAISETWLYQYFPPAPDKRQYVDDRVMS

SEQ ID NO: 9794 - protein, 203 aa, Escherichia coli; identical to SEQ ID NO: 2201

SEQ ID NO: 9795 - protein, 591 aa, Escherichia coli; identical to SEQ ID NO: 4273

SEQ ID NO: 9796 - protein, 849 aa, Escherichia coli; identical to SEQ ID NO: 4340

SEQ ID NO: 9797 - protein, 250 aa, Escherichia coli; identical to SEQ ID NO: 4375

SEQ ID NO: 9798 - protein, 191 aa, Escherichia coli; identical to SEQ ID NO: 2727

SEQ ID NO: 9799 - protein, 232 aa, Escherichia coli; identical to SEQ ID NO: 2087

SEQ ID NO: 9800 - protein, 721 aa, Escherichia coli; identical to SEQ ID NO: 6411

SEQ ID NO: 9801 - protein, 678 aa, Escherichia coli; identical to SEQ ID NO: 3881

SEQ ID NO: 9802 - protein, 871 aa, Escherichia coli
MHQVLIMPRFARLTIALGLATAVFPVDAEYYFNPRFLSNDLAESVDLSAFTKGREAPPGTYRVDIYLNDEFMTSRDITFIADDNNAELIPCLSTDLLVSLGIKKSALLDNKEHSAEKHVPDNSACTPLQDRLADASTEFDVGQQHLSLSVPQIYVGRMARGYVSPDLWEEGINAGLLNYSFNGNSINNRSNHNAGKSNYAYLNLQSGINIGSWRLRDNSTWSYNSGSSNSSDSNKWQHINTSAERDIIPLRSRLTVGDSYTDGDIFDSVNFRGLKINSTEAMLPDSQHGFAPVIHGIARGTAQVSVKQNGYDVYQTTVPPGPFTIDDINSATNGGDLQVTIKEADGSIQTLYVPYSSVPVLQRAGYTRYALAMGEYRSGNNLQSSPKFIQGSLMHGLEGNWTPYGGMQIAEDYQAFNLGIGKDLGLFGAFSFDITQANTTLADGTRHSGQSVKSVYSKSFYQTGTNIQVAGYRYSTQGFYNLSDSAYSRMSGYTVKPPTGDTNEQTQFIDYFNLFYSKRGQEQISISQQLGNYGTTFFSASRQSYWNTSRSDQQISFGLNVPFGDITTSLNYSYSNNIWQNDRDHLLAFTLNVPFSHWMRTDSQSAFRNSNASYSMSNDLKGGMTNLSGVYGTLLPDNNLNYSVQVGNTHGGNTSSGTSGYSSLNYRGAYGNTNVGYSRNGDSSQIYYGMSGGIIAHADGITFGQPLGDTMVLVKAPGADNVKIENQTGIHTDWRGYAILPFATEYRENRVALNANSLADNVELDETVVTVIPTHGAIARATFNAQIGGKVLMTLKYGNKSVPFGAIVTHGENKNGSIVAENGQVYLTGLPQSGKLQVSWGNDKNSNCIVDYKLPEVSPGTLLNQQTAICR

SEQ ID NO: 9803 - protein, 224 aa, Escherichia coli; identical to SEQ ID NO: 4280

SEQ ID NO: 9804 - protein, 360 aa, Escherichia coli; identical to SEQ ID NO: 3062

SEQ ID NO: 9805 - protein, 243 aa, Escherichia coli; identical to SEQ ID NO: 2910

SEQ ID NO: 9806 - protein, 361 aa, Escherichia coli; identical to SEQ ID NO: 3061

SEQ ID NO: 9807 - protein, 686 aa, Escherichia coli; identical to SEQ ID NO: 3129

SEQ ID NO: 9808 - protein, 696 aa, Escherichia coli; identical to SEQ ID NO: 5576

SEQ ID NO: 9809 - protein, 375 aa, Escherichia coli; identical to SEQ ID NO: 2432

SEQ ID NO: 9810 - protein, 628 aa, Escherichia coli
MVKDTITIVATGNQNTVFETPSMVSVVTNDTPWSQNAVTSAGMLKGVAGLSQTGAGRTNGQTFNLRGYDKSGVLVLVDGVRQLSDMAKSSGTYLDPALVKRIEVVRGPNSSLYGSGGLGGVVDFRTADAADFLPPGETNGLSLWGNIASGDHSTGSGLTWFGKTGKTDALLSVIMRKRGNIYQSDGEHAPNKEKPAALFAKGSVGITDSNKAGASLRLYRNNTTEPGNSTQTHGDSGLRDRKTVQNDVQFWYQYAPVDNSLINVKSTLYLSDITIKTNGHNKTAEWRNNRTSGVNVVNRSHTLIFPGAHQLSYGAEYYRQQQKPEGSATLYPEGNIDFTSLYFQDEMTMKSYPVNIIVGSRYDRYKSFNPRAGELKAERLSPRAAISVSPTDWLMMYGSISSAFRAPTMAEMYRDDVHFYRKGKPNYWVPNLNLKPENNITREIGAGIQLDGLLTDNDRLQLKGGYFGTDARNYIATRVDMKRMRSYSYNVSRARIWGWDMQGNYQSDYVDWMLSYNRTESMDASSREWLGSGNPDTLISDISIPVGHRGVYAGWRAELSASATHVKKGDPHQAGYTIHSFSLSYKPVSVKGFEASVTLDNAFNKLAMNGKGVPLSGRTVSLYTRYQW

SEQ ID NO: 9811 - protein, 725 aa, Escherichia coli
MRINKIFWSLTVLLVGLNSQVSVAKYSDDDNDETLVVEATAEQVLKQQPGVSVITSEDIKKTPPVNDLSDIIRKMPGVNLTGNSASGTRGNNRQIDIRGMGPENTLILIDGVPVTSRNSVRYSWRGERDTRGDTNWVPPEQVERIEVIRGPAAARYGSGAAGGVVNIITKRPTNDWHGSLSLYTNQPESSEEGATRRANFSLSGPLAGDALTTRLYGNLNKTDADSWDINSPVGTKNAAGHEGVRNKDINGVVSWKLNPQQILDFEVGYSRQGNIYAGDTQNSSSSAVTESLAKSGKETNRLYRQNYGITHNGIWDWGQSRFGVYYEKTNNTRMNEGLSGGGEGRILAGEKFTTNRLSSWRTSGELNIPLNVMVDQTLTVGAEWNRDKLDDPSSTSLTVNDRDISGISGSAADRSSKNHSQISALYIEDNIEPVPGTNIIPGLRFDYLSDSGGNFSPSLNLSQELGDYFKVKAGVARTFKAPNLYQSSEGYLLYSKGNGCPKDITSGGCYLIGNKDLDPEISVNKEIGLEFTWEDYHASVTYFRNDYQNKIVAGDNVIGQTASGAYILKWQNGGKALVDGIEASMSFPLVKERLNWNTNATWMITSEQKDTGNPLSVIPKYTINNSLNWTITQAFSASFNWTLYGRQKPRTHAETRSEDTGGLSGKELGAYSLVGTNFNYDINKNLRLNVGVSNILNKQIFRSSEGANTYNEPGRAYYAGVTASF

SEQ ID NO: 9812 - protein, 678 aa, Escherichia coli
MVPSTFSRLKAARCLPVVLAALIFAGCGTHTPDQSTAYMQGTAQADSAFYLQQMQQSSDDTRINWQLLAIRALVKEGKTGQAVELFNQLPQELNDAQRREKTLLAVEIKLAQKDFAGAQNLLAKITPADLEQNQQARYWQAKIDASQGRPSIDLLRALIAQEPLLGAKEKQQNIDATWQALSSMTQEQANTLVINADENILQGWLDLQRVWFDNRNDPDMMKAGIADWQKRYPNNPGAKMLPTQLVNVKAFKPASTNKIALLLPLNGQAAVFGRTIQQGFEAAKNIGTQPVAAQVAAAPAADVAEQPQPQTVDGVASPAQASVSDLTGEQPAAQPVPVSAPATSTAAVSAPANPSAELKIYDTSSQPLSQILSQVQQDGASIVVGPLLKNNVEELLKSNTPLNVLALNQPENIENRVNICYFALSPEDEARDAARHIRDQGKQAPLVLIPRSSLGDRVANAFAQEWQKLGGGTVLQQKFGSTSELRAGVNGGSGIALTGSPITLRATTDSGMTTNNPTLQTTPTDDQFTNNGGRVDAVYIVATPGEIAFIKPMIAMRNGSQSGATLYASSRSAQGTAGPDFRLEMEGLQYSEIPMLAGGNLPLMQQALSAVNNDYSLARMYAMGVDAWSLANHFSQMRQVQGFEINGNTGSLTANPDCVINRKLSWLQYQQGQVVPVS

SEQ ID NO: 9813 - protein, 274 aa, Escherichia coli; identical to SEQ ID NO: 2309

SEQ ID NO: 9814 - protein, 828 aa, Escherichia coli; identical to SEQ ID NO: 2388

SEQ ID NO: 9815 - protein, 729 aa, Escherichia coli; identical to SEQ ID NO: 4557

SEQ ID NO: 9816 - protein, 230 aa, Escherichia coli; identical to SEQ ID NO: 4598

SEQ ID NO: 9817 - protein, 746 aa, Escherichia coli; identical to SEQ ID NO: 4083

SEQ ID NO: 9818 - protein, 362 aa, Escherichia coli; identical to SEQ ID NO: 2434

SEQ ID NO: 9819 - protein, 517 aa, Escherichia coli; identical to SEQ ID NO: 3116

SEQ ID NO: 9820 - protein, 203 aa, Escherichia coli; identical to SEQ ID NO: 2201

SEQ ID NO: 9821 - protein, 330 aa, Escherichia coli
MEDVIEGKLDYTIADSVAISLFQRVHPELAVALDITDEQPVTWFSPLDGDNTLSAALLDFFNEMNEDGTLARIEEKYLGHGDDFDYVDTRTFLRAVDAVLPQLKPLFEKYAEEIDWRLLAAIAYQESHWDAQATSPTGVRGMMMLTKNTAQSLGITDRTDAEQSISGGVRYLQDMMSKVPESVPENERIWFALAAYNMGYAHMLDARALTAKTKGNPDSWADVKQRLPLLSQKPYYSKLTYGYARGHEAYAYVENIRKYQISLVGYLQEKEKQATEAAMQLAQDYPAVSPTELGKEKFPFLSFLSQSSSNYLTHSPSLLFSRKGSEEKQN

SEQ ID NO: 9822 - protein, 193 aa, Escherichia coli; identical to SEQ ID NO: 2246

SEQ ID NO: 9823 - protein, 200 aa, Escherichia coli; identical to SEQ ID NO: 1785

SEQ ID NO: 9824 - protein, 721 aa, Escherichia coli
MKTQITFAALLPALASFIPLHAHASSTSEDEMIVTGNTAADTTDSAAGAGFKTNDIDVGPLGTKSWIETPYSSTTVTKEMIENQQAQSVSEMLKYSPSTQMQARGGMDVGRPQSRGMQGSVVANSRLDGLNIVSTTAFPVEMLERMDVLNSLTGALYGPASPAGQFNFVAKRPTEETLRKVTLGYQSRSAFTGHADLGGHFDENKRFGYRVNLLDQEGEGNVDDSTLRRKLVSVALDWNIQPGTQLQLDASHYEFIQKGYVGSFNYGPNVKLPSAPNPKDKNLALSTAGNDLTTDTISTRLIHYFNDDWSMNAGVGWQQADRAMRSVSSKILNNQGDISRSMKDSTAAGRFRVLSNTAGLNGHIDTGSIGHDLSLSTTGYVWSLYSAKGTGSSYSWGTTNMYHPDAIDEQGDGKIRTGGPRYRSSVNTQQSVTLGDTVTFTPQWSAMFYLSQSWLQTKNYDKHGNQTNQVDENGLSPNAALMYKITPNTMAYVSYADSLEQGGTAPTDESVKNAGQTLNPYRSKQYEVGLKSDIGEMNLGAALFRLERPFAYLDTDNVYKEQGNQVNNGLELTAAGNVWQGLNIYSGVTFLDPKLKDTANASTSNKQVVGVPKVQANLLAEYSLPSIPEWVYSANVHYTGKRAANDTNTSYASSYTTWDLGTRYTTKVSNVPTTFRVVVNNVFDKHYWASIFPSGTDGDNGSPSAFIGGGREVRASVTFDF

SEQ ID NO: 9825 - protein, 700 aa, Escherichia coli
MKIFSVRQTVLPALLVLSPVVFAADEQTMIVSAAPQVVSELDTPAAVSVVNGEEMRLATPRINLSESLTGVPSLQVQNRQNYAQDLQLSIRGFGSRSTYGIRGIRLYVDGIPATMPDGQGQTSNIDLSSVQNVEVLRGPFSALYGNASGGVMNVTTQTGQQPPTIEASSYYGSFGSWRYGLKATGATGDGTQPGDVDYTVSTTRFTTHGYRDHSGAQKNLANAKLGVRIDDASKLSLIFNSVDIKADDPGGLTKAEWKANPQQAPRAEQYDTRKTIKQTQAGLRYERSLSAQDDMSVMMYAGERETTQYQSIPMAPQLNPSHAGGVITLQRHYQGIDSRWTHRGELGVPLTFTTGLNYENMSENRKGYNNFRLNSGVPEYGQKGELRRDERNLMWNVDPYLQTQWQLSEKLSLDAGVRYSSVWFDSNDHYVTPGNGDDSGDASYHKWLPAGSLKYAMTDAWNIYLAAGRGFETPTINELSYRADGQSGMNFGLKPSTNDTIEIGSKTRIGDGLLSLALFQTDTDDEIVVDSSSGGRTTYKNAGKTRRQGAELAWDQRFAGDFRVKASWTWLDATYRSNVCNEQDCNGNRMPGIARNMGFASIGYIPEDGWYAGTEARYMGDIMADDENTAKAPSYTLVGLFTGYKYNYHNFTVDLFGRVDNLFDKEYVGSVIVNESNGRYYEPAPGRNYGVGINIAWRFE

SEQ ID NO: 9826 - protein, 111 aa, Escherichia coli; identical to SEQ ID NO: 4073

SEQ ID NO: 9827 - protein, 746 aa, Escherichia coli; identical to SEQ ID NO: 4083

SEQ ID NO: 9828 - protein, 478 aa, Escherichia coli; identical to SEQ ID NO: 2404

SEQ ID NO: 9829 - protein, 213 aa, Escherichia coli; identical to SEQ ID NO: 2232

SEQ ID NO: 9830 - protein, 242 aa, Escherichia coli; identical to SEQ ID NO: 2697

SEQ ID NO: 9831 - protein, 274 aa, Escherichia coli; identical to SEQ ID NO: 2309

SEQ ID NO: 9832 - protein, 431 aa, Escherichia coli; identical to SEQ ID NO: 3408

SEQ ID NO: 9833 - protein, 200 aa, Escherichia coli; identical to SEQ ID NO: 1793

SEQ ID NO: 9834 - protein, 412 aa, Escherichia coli; identical to SEQ ID NO: 2161

SEQ ID NO: 9835 - protein, 203 aa, Escherichia coli; identical to SEQ ID NO: 2015

SEQ ID NO: 9836 - protein, 614 aa, Escherichia coli; identical to SEQ ID NO: 6666

SEQ ID NO: 9837 - protein, 614 aa, Escherichia coli; identical to SEQ ID NO: 1888

SEQ ID NO: 9838 - protein, 774 aa, Escherichia coli; identical to SEQ ID NO: 3978

SEQ ID NO: 9839 - protein, 446 aa, Escherichia coli; identical to SEQ ID NO: 2177

SEQ ID NO: 9840 - protein, 249 aa, Escherichia coli
MNIMKLPLITTGMICFLGICNFAQATVSPDRTRIIFNASNKSATVRLTNQSKIDPYLAQSWIEDASGKKTRDYISTLPPMERIEPDEQVQIRLMALASLNNLPQDRETLFYYNVREIPPRAKEQNVMQIAMQSRLKLFWRPKAIELKEGEMVPLQKVTITRTAAGLTLNNPTPYHITVGYIGTNGKTLMPGADSIMVAPFASATQHLNNLPSTFQLGFVADYGGLEMFKVVCNSVQSLCQSTPAKKGKI

SEQ ID NO: 9841 - protein, 224 aa, Escherichia coli; identical to SEQ ID NO: 3792

SEQ ID NO: 9842 - protein, 111 aa, Escherichia coli; identical to SEQ ID NO: 3153

SEQ ID NO: 9843 - protein, 729 aa, Escherichia coli; identical to SEQ ID NO: 2074

SEQ ID NO: 9844 - protein, 517 aa, Escherichia coli; identical to SEQ ID NO: 2462

SEQ ID NO: 9845 - protein, 554 aa, Escherichia coli
MALIPACIFLCFAALSVQAEETSVTPQPPDILLGPLFNDVQNAKLFPDQKTFADAVPNSDPLMILADYRMQQNQSGFDLRHFVNVNFTLPKEGEKYVPPEGQSLREHIDGLWPVLTRSTENTEKWDSLLPLPKPYVVPGGRFREVYYWDSYFTMLGLAESGHWDKVADMVANFAHEIDTYGHIPNGNRSYYLSRSQPPFFALMVELLAQHEGDAALKQYLPQMQKEYAYWMDGVENLQAGQQEKRVVKLQDGTLLNRYWDDRDTPRPESWVEDIATAKSNPNRPATEIYRDLRSAAASGWDFSSRWMDNPQQLNTLRTTSIVPVDLNSLMFKMEKILARASKAAGDNAMANQYETLANARQKGIEKYLWNDQQGWYADYDLKSHKVRNQLTAAALFPLYVNAAAKDRASKMATATKTHLLQPGGLNTTSVKSGQQWDAPNGWAPLQWVATEGLQNYGQKEVAMDISWHFLTNVQHTYDREKKLVEKYDVSATGTGGGGGEYPLQDGFGWTNGVTLKMLDLICPKEQPCDNVPATRPLSESTTQPVKQKEAEPTP

SEQ ID NO: 9846 - protein, 200 aa, Escherichia coli; identical to SEQ ID NO: 1793

SEQ ID NO: 9847 - protein, 686 aa, Escherichia coli
MFWRDMTLSVWRKKTTGLKTKKRLLPLVLAAALCSSPVWAEEATFTANFKDTDLKSFIETVGANLNKTIIMGPGVQGKVSIRTMTPLNERQYYQLFLNLLEAQGYAVVPMENDVLKVVKSSAAKVEPLPLVGEGSDNYAGDEMVTKVVPVRNVSVRELAPILRQMIDSAGSGNVVNYDPSNVIMLTGRASVVERLTEVIQRVDHAGNRTEEVIPLDNASASEIARVLESLTKNSGENQPATLKSQIVADERTNSVIVSGDPATRDKMRRLIRRLDSEMERSGNSQVFYLKYSKAEDLVDVLKQVSGTLTAAKEEAEGTVGSGREVVSIAASKHSNALIVTAPQDIMQSLQSVIEQLDIRRAQVHVEALIVEVAEGSNINFGVQWASKDAGLMQFANGTQIPIGTLGAAISQAKPQKGSTVISENGATTINPDANGDLSTLAQLLSGFSGTAVGVVKGDWMALVQAVKNDSSSNVLSTPSITTLDNQEAFFMVGQDVPVLTGSTVGSNNSNPFNTVERKKVGIMLKVTPQINEGNAVQMVIEQEVSKVEGQTSLDVVFGERKLKTTVLANDGELIVLGGLMDDQAGESVAKVPLLGDIPLIGNLFKSTADKKEKRNLMVFIRPTILRDGMAADGVSQRKYNYMRAEQIYRDEQGLSLMPHTAQPVLPAQNQALPPEVRAFLNAGRTR

SEQ ID NO: 9848 - protein, 249 aa, Escherichia coli; identical to SEQ ID NO: 8251

SEQ ID NO: 9849 - protein, 412 aa, Escherichia coli; identical to SEQ ID NO: 4058

SEQ ID NO: 9850 - protein, 239 aa, Escherichia coli; identical to SEQ ID NO: 2759

SEQ ID NO: 9851 - protein, 551 aa, Escherichia coli; identical to SEQ ID NO: 2449

SEQ ID NO: 9852 - protein, 784 aa, Escherichia coli; identical to SEQ ID NO: 2244

SEQ ID NO: 9853 - protein, 246 aa, Escherichia coli; identical to SEQ ID NO: 1985

SEQ ID NO: 9854 - protein, 656 aa, Escherichia coli
MRLKKRYLCTVLSLAFTQQSVAAQESDTLTVWSSPVSSTTTTVLDQPTMKALDKQNVAQALSVVPGVVLQKSGSRNEEQVKVRGFDSRQVPVYFDGVPIYVPYDGNLDLARILTNNLGAVEVSKGYSSLLQGPNQMGGAINITTQKPTKPLEASLGYRQGWSRSQDNAYDMHASFAASSDLGYLQVSGSQLKQDFLGLPHGVNNDIAGKHGKMINSSADDKRGIVKLGFTPRENDEYTLTYIKQDGEKDNPPYSGNSGQKSRYWQWPEYDKESFYYQGTTQLNDRFTLKSRLYHDTFENTLMMYNSLADLKNKKGSYSHYSDYSDGAGLQLAADVRENDLLSFAVNWKDDVHREKGAPHAAYDRYEDRTWSLASEYQWAAADNVDVVAGISYDWRDSVEAKKHEKDGSITHYDDNNQSAFNWQVMGKYHFANEDTLALSYYDRTRFPTLKERYTTSKPAYNQIAIVNPQLKPERARGVDLTWNGAFTHDWGFEVSVYYNRVSDAILSHNIDADTIQNQNSGTVDYSGLDAGIKGKISNILDVGLSYALIHADAKRKDIGKITDLPTQTMTAWMTLKPWEPLSVTLSEEARSSSYSNSDGSQKAAGFAVTHIRADYTLGHGFSVNASVNNLFDTKYAYSEGFIEEGRNFWAGIEYTF

SEQ ID NO: 9855 - protein, 760 aa, Escherichia coli
MENNRNFPARQFHSLTFFAGLCIGITPVAQALAAEGQANADDTLVVEASTPSLYAPQQSADPKFSRPVADTTRTMTVISEQVIKDQGATNLTDALKNVPGVGAFFAGENGNSTTGDAIYMRGADTSNSIYIDGIRDIGSVSRDTFNTEQVEVIKGPSGTDYGRSAPTGSINMISKQPRNDSGIDASASIGSAWFRRGTLDVNQVIGDTTAVRLNVMGEKTHDAGRDKVKNERYGVAPSVAFGLGTANRLYLNYLHVTQHNTPDGGIPTIGLPGYSAPSAGTAALNHSGKVDTHNFYGTDSDYDDSTTDTATMRFEHDINDNTTIRNTTRWSRVKQDYLMTAIMGGASNITQPTSDVNSWTWSRTANTKDVSNKILTNQTNLTSTFYTGAIGHDLSTGVEFTRETQTNYGVNPVTLPAVNIYHPDSSIHPGGLTRNGANANGQTDTFAIYAFDTLQITRDFELNGGIRLDNYHTEYDSATACGGSGRGAITCPAGVAKGSPVTTVDTAKSGNLVNWKAGALYHLTENGNVYINYAVSQQPPGGNNFALAQSGSGNSANRTDFKPQKANTSEIGTKWQVLDKRLLLTAALFRTDIENEVEQNDDGTYSQYGKKRVEGYEISVAGNITPAWQMIGGYTQQKATIKNGKDVAQDGSSSLPYTPEHAFTLWSQYQATDDISVGAGARYIGSMHKGSDGAVGTPAFTEGYWVADAKLGYRVNRNLDFQLNVYNLFDTDYVASINKSGYRYHPGEPRTFLLTANMHF

SEQ ID NO: 9856 - protein, 203 aa, Escherichia coli; identical to SEQ ID NO: 2015

SEQ ID NO: 9857 - protein, 351 aa, Escherichia coli; identical to SEQ ID NO: 4530

SEQ ID NO: 9858 - protein, 760 aa, Escherichia coli; identical to SEQ ID NO: 2080

SEQ ID NO: 9859 - protein, 239 aa, Escherichia coli; identical to SEQ ID NO: 2759

SEQ ID NO: 9860 - protein, 362 aa, Escherichia coli
MMKRNILAVIVPALLVAGTANAAEIYNKDGNKVDLYGKAVGLHYFSKDNGVNSYGGNGDKTYARLGFKGETQINSDLTGYGQWEYNFQGNNSEGADAQTGNKTRLAFAGLKYADIGSFDYGRNYGVVYDALGYTDMLPEFGGDTAYSDDFFVGRVGGVATYRNSNFFGLVDGLNFAVQYLGKNERDTARRSNGDGVGGSISYEYEGFGIVGAYGAADRTNLQEAQPLGNGKKAEQWATGLKYDANNIYLAANYGETRNATPITNKFTNTSGFANKTQDVLLVAQYQFDFGLRPSIAYTKSKAKDVEDIGDVDLVNYFEVGATYYFNKNMSTYVDYIINQIDSDNKLGVGSDDTVAVGIVYQF

SEQ ID NO: 9861 - protein, 663 aa, Escherichia coli
MFRLNPFVRVGLCLSAISCAWPVLAVDDDGETMVVTASSVEQNLKDAPASISVITQEDLQRKPVQNLKDVLKEVPGVQLTNEGDNRKGVSIRGLDSSYTLILVDGKRVNSRNAVFRHNDFDLNWIPVDSIERIEVVRGPMSSLYGSDALGGVVNIITKKIGQKWSGTVTVDTTIQEHRDRGDTYNGQFFTSGPLIDGVLGMKAYGSLAKREKDDPQNSTTTDTGETPRIEGFSSRDGNVEFAWTPNQNHDFTAGYGFDRQDRDSDSLDKNRLERQNYSVSHNGRWDYGTSELKYYGEKVENKNPGNSSPITSESNTVDGKYTLPLTAINQFLTVGGEWRHDKLSDAVNLTGGTSSKTSASQYALFVEDEWRIFEPLALTTGVRMDDHETYGEHWSPRAYLVYNATDTVTVKGGWATTFKAPSLLQLSPDWTSNSCRGACKIVGSPDLKPETSESWELGLYYMGEEGWLEGVESSVTVFRNDVKDRISISRTSDVNAAPGYQNFVGFETGANGRRIPVFSYYNVNKARIQGVETELKIPFNDEWKLSINYTYNDGRDVSNGENKPLSDLPFHTANGTLDWKPLALEDWSFYVSGHYTGQKRADSATAKTPGGYTIWNTGAAWQVTKDVKLRAGVLNLGDKDLSRDDYSYNEDGRRYFMAVDYRF

SEQ ID NO: 9862 - protein, 615 aa, Escherichia coli
MFWRDITLSVWRKKTTCLKTKKRLLPLVLAAALCSSPVWAEEATFTANFKDTDLKSFIETVGANLNKTIIMGPGVQGKVSIRTMTPLNERQYYQLFLNLLEAQGYAVVPMENDVLKVVKSSAAKVEPLPLVGEGSDNYAGDEMVTKVVPVRNVSVRELAPILRQMIDSAGSSNVVNYDPSNVIMLTGRASVVERLTEVIQRVDHAGNRTEEVIPLDNASASEIARVLESLTKNSGENQPAPLKSQIVADERTNSVIVSGDPATRDKMRRLIRRLDSEMERSGNSQVFYLKYSKAEDLVDVLKQVSGTLTAAKEEAEGTVGSGREIVSIAASKHSNALIVTAPQDIMQSLQSVIEQLDIRRAQVHVEALIVEVAEGSNINFGVQWASKDAGLMQFANGTQIPIGTLGAAISQAKPQKGSTVISENGATTINPDTNGDLSTLAQLLSGFSGTAVGVVKGDWMALVQAVKNDSSSNVLSTPSITTLDNQEAFFMVGQDVPVLTGSTVGSNNSNPFNTVERKKVGIMLKVTPQINEGNAVQMVIEQEVSKVEGQTSLDVVFGERKLKTTVLANDGELIVLGGLMDDQAGESVAKVPLLGDIPLIGNLFKSTADKKENVT

SEQ ID NO: 9863 - protein, 654 aa, Escherichia coli; identical to SEQ ID NO: 4042

SEQ ID NO: 9864 - protein, 232 aa, Escherichia coli; identical to SEQ ID NO: 2087

SEQ ID NO: 9865 - protein, 565 aa, Escherichia coli; identical to SEQ ID NO: 2669

SEQ ID NO: 9866 - protein, 230 aa, Escherichia coli
MMTKIKLLMLIIFYLIISASAHAAGGIALGATRIIYPADAKQTAVWIRNSHTNERFLINSWIENSSGVKEKSFIITPPLFVSEPKSENTLRIIYTGPPLAADRESLFWMNVKTIPSVDKNALNGRNVLQLAILSRMKLFLRPIQLQELPAEAPDTLKFSRSGNYINVHNPSPFYVTLVNLQVGSQKLGNAMAAPRVNSQIPLPSGVQGKLKFQTVNDYGSVTPVREVNLN

SEQ ID NO: 9867 - protein, 191 aa, Escherichia coli; identical to SEQ ID NO: 2727

SEQ ID NO: 9868 - protein, 138 aa, Escherichia coli
MPTITTAQIKSTLQSAKQSAANKLHSAGQSTKDALKKAAEQTRNAGNRLILLIPKDYKGQGSSLNDLVRTADELGIEVQYDEKNGTAITKQVFGTAEKLIGLTERGVTIFAPQLDKLLQKYQKAGNKLGGSAENIGDN

SEQ ID NO: 9869 - protein, 274 aa, Escherichia coli; identical to SEQ ID NO: 2301

SEQ ID NO: 9870 - protein, 728 aa, Escherichia coli; identical to SEQ ID NO: 4574

SEQ ID NO: 9871 - protein, 211 aa, Escherichia coli
RAVNDAVGKLPVPADGKSITPDDVRPMLEQMVTDAVSHIPVPRDGRDYDPEVLQKAVLDAVSALPAPQDGRDATALEIFPAIDEQKSFPRGTYATHQGGLWRAYEKTHGMRGWECLVDGVADIDVSMTGERSFTVVVRQSSGQCTEKTFSLPVMLYRGVFRTGETYHPGDTVTWGGSLWHCNSMTGDKPGEAHSSGWTLAAKRGRDAGGGK

SEQ ID NO: 9872 - protein, 498 aa, Escherichia coli
MKKHLLSCAILLACSPVFAAGNTDSIEARLAALEKRLQDAETRAQKAESRATATEQQVQQLAATPATQPVVPQTVSVPPEKKADNSGFEFHGYARSGLLMNDAASGSKSGPYLTPAGETGGSVGRLGNEGDTYVETVFEHKKTLESGATTRFKVMLADGQKTYNDWSANSSDLNVRQVVAELGNLPDFTGPLKHSTVWAGKRFDRDNFDIHWLDSDVVFLGGTGGGIYDVKWNDTLRSNFSLYGRNFGEMEDIDNNVQNYILTMNHFAGPFQLMVSGMRAKDNDDRRDNNGDLIHASAASHGVHVLAGLHNDSFWGLREGTAKIALLYGHGLGAEVKGIGSDGALRSDADTWRLAAYGTTPLGNGWHIAPSVMAQGSKDRYARGDSYEWVTLNTRLIKEVTQNFALAFEGTYQYMDLKPEGYKDRNAVNGSFYKLTFAPTLKAGGLGDFFSRPELRLFATWMDWSSRLDNYASDDAFGGSGFNAGGEWNFGVQMETWF

SEQ ID NO: 9873 - protein, 232 aa, Escherichia coli; identical to SEQ ID NO: 2087

SEQ ID NO: 9874 - protein, 331 aa, Escherichia coli; identical to SEQ ID NO: 2705

SEQ ID NO: 9875 - protein, 227 aa, Escherichia coli
MRIIIALLMSFFILPVHAGMVIYGTRIIYPKKNREVLVQLMNQSKNASLIQAWIDDGNTTIAPEKIQVLFILTPPVSRVAGGSGQQLKIRKMPNNLPHNKESLFYLNVLDIPPNNPQNAGKNKIKLAFQNRIKLLWRPSGIAPVDKKSLSQLNIKKKNNAISINNETANWITVTTIKAQNVKVNNESILLPPFSNNDITLKNNHASEYELTVVDDYGNNIHSKIAAR

SEQ ID NO: 9876 - protein, 204 aa, Escherichia coli; identical to SEQ ID NO: 2957

SEQ ID NO: 9877 - protein, 865 aa, Escherichia coli
MKIDELIKKQKSGSNVSSSELAKASIELINQLVDTAASINNNVNSFSQQLNKLGSVLSNTKHLNGVGNKLQNLPNLDNIGAGLDTVSGILSAISASFILSNADADTGTKAAAGVELTTKVLGNVGKGISQYIIAQRAAQGLSTSAAAAGLIASVVTLAISPLSFLSIADKFKRANKIEEYSQRFKKLGYDGDSLLAAFHKETGAIDASLTTISTVLASVSSGISAAATTSLVGAPVSALVGAVTGIISGILEASKQAMFEHVASKMADVIAEWEKKHGKNYFENGYDARHAAFLEDNFKILSQYNKEYSVERSVLITQQHWDTLIGELAGVTRNGDKTLSGKSYIDYYEEGKRLEKKPDEFQKQVFDPLKGNIDLSDSKSSTLLKFVTPLLTPGEEIRERRQSGKYEYITELLVKGVDKWTVKGVQDKGSVYDYSNLIQHASVGNNQYREIRIESHLGDGDDKVFLSAGSANIYAGKGHDVVYYDKTDTGYLTIDGTKATEAGNYTVTRVLGGDVKVLQEVVKEQEVSVGKRTEKTQYRSYEFTHINGKNLTETDNLYSVEELIGTTRADKFFGSKFTDIFHGADGDDHIEGNDGNDRLYGDKGNDTLSGGNGDDQLYGGDGNDKLIGGAGNNYLNGGDGDDELQVQGNSLAKNVLSGGKGNDKLYGSEGADLLDGGEGNDLLKGGYGNDIYRYLSGYGHHIIDDDGGKDDKLSLADIDFRDVAFRREGNDLIMYKAEGNVLSIGHKNGITFRNWFEKESGDISNHQIEQIFDKDGRVITPDSLKKALEYQQSNNKASYVYGNDALAYGSQDNLNPLINEISKIISAAGNFDVKEERAAASLLQLSGNASDFSYGRNSITLTASA

SEQ ID NO: 9878 - protein, 432 aa, Escherichia coli; identical to SEQ ID NO: 2026

SEQ ID NO: 9879 - protein, 478 aa, Escherichia coli; identical to SEQ ID NO: 2405

SEQ ID NO: 9880 - protein, 541 aa, Escherichia coli
MAMAAVCGTSGIASLFSQAAFAADSDIADGQTQRFDFSILQSMAHDLAQTAWRGAPRPLPDTLATMTPQAYNSIQYDAEKSLWHNVENRQLDAQFFHMGMGFRRRVRMFSVDPATHLAREIHFRPELFKYNDAGVDTKQLEGQSDLGFAGFRVFKAPELARRDVVSFLGASYFRAVDDTYQYGLSARGLAIDTYTDSKEEFPDFTAFWFDTVKPGATTFTVYALLDSASITGAYKFTIHCEKNQVIMDVENHLYARKDIKQLGIAPMISMFSCGTNERRMCDTIHPQIHDSDRLSMWRGNGEWICRPLNNPQKLQFNAYTDNNPKGFGLLQLDRDFSHYQDIMGWYNKRPSLWVEPRNKWGKGTIGLMEIPTTGETLDNIVCFWQPEKAVKAGDEFAFQYRLYWSAQPPVHCPLARVMATRTGMGGFPEGWAPGEHYPEKWARRFAVDFVGGDLKAAAPKGIEPVITLSSGEAKQIEILYIEPIDGYRIQFDWYPTSDSTDPVDMRMYLRCQGDAISETWLYQYFPPAPDKRQYVDDRVMS

SEQ ID NO: 9881 - protein, 169 aa, Escherichia coli; identical to SEQ ID NO: 3373

SEQ ID NO: 9882 - protein, 774 aa, Escherichia coli; identical to SEQ ID NO: 8244

SEQ ID NO: 9883 - protein, 208 aa, Escherichia coli; identical to SEQ ID NO: 1949

SEQ ID NO: 9884 - protein, 713 aa, Escherichia coli; identical to SEQ ID NO: 4590

SEQ ID NO: 9885 - protein, 239 aa, Escherichia coli
MIRKKILMAAIPLFVISGADAAVSLDRTRAVFDGSEKSMTLDISNDNKQLPYLAQAWIENENQEKIITGPVIATPPVQRLEPGARSMVRLSTTPDISKLPQDRESLFYFNLREIPPRSEKANVLQIALQTKIKLFYRPAAIKTRPNEVWQDQLILNKVSGGYRIENPTPYYVTVIGLGGSEKQAEEGEFETVMLSPRSEQTVKSANYNTPYLSYINDYGGRPVLSFICNGSRCSVKKEK

SEQ ID NO: 9886 - protein, 224 aa, Escherichia coli; identical to SEQ ID NO: 4053

SEQ ID NO: 9887 - protein, 213 aa, Escherichia coli; identical to SEQ ID NO: 2232

SEQ ID NO: 9888 - protein, 224 aa, Escherichia coli; identical to SEQ ID NO: 4053

SEQ ID NO: 9889 - protein, 226 aa, Escherichia coli
MIFAVLSLLVAGELQAGVVVGGTRFIFPADRESISILLTNTSQESWLINSKINRPTRWAGGEASTVPAPLLAAPPLILLKPGTTGTLRLLRTESDILPVDRETLFELSIASVPSGKVENQSVKVAMRSVFKLFWRPEGLPGDPLEAYQQLRWTRNSQGVQLTNPTPYYINLIQVSVNGKALSNVGVVPPKSQRQTSWCQAIAPCHVAWRAINDYGGLSAKKEQNLP

SEQ ID NO: 9890 - protein, 432 aa, Escherichia coli; identical to SEQ ID NO: 2026

SEQ ID NO: 9891 - protein, 236 aa, Escherichia coli; identical to SEQ ID NO: 3286

SEQ ID NO: 9892 - protein, 360 aa, Escherichia coli; identical to SEQ ID NO: 3862

SEQ ID NO: 9893 - protein, 241 aa, Escherichia coli
MLRFVLFFFTLSVSAVVQGSVVIMGTRVVYPATQKSISIRLNNDNESPALVQSWLDDGDAAAPPESVHVPFIITPPIFRMDSKSGQTVRIVYTGESLPKDRESLFYLNVLDIPAKPGAKKDSDNSEQRNNNYLQLAIRSRIKFFFRPAHLKLTPNDAYLKVTWHQEEGRIKAVNPTPYYITYNKIAVDQNKHLTPVEHGGMIPPFSSTVFALKGRTAPASKVSWVIVNDYGGYQQGESVLE

SEQ ID NO: 9894 - protein, 360 aa, Escherichia coli; identical to SEQ ID NO: 3354

SEQ ID NO: 9895 - protein, 656 aa, Escherichia coli
MYMNVIRTVICTLIIVPVGLQAATSHSSMAKDTITIVATGNQNTVFETPSMVSVVTNDTPWSQNAVTSAGMLKGVAGLSQTGAGRTNGQTFNLRGYDKSGVLVLVDGVRQLSDMAKSSGTYLDPALVKRIEVVRGPNSSLYGSGGLGGVVDFRTADAADFLPPGETNGLSLWGNIASGDHSTGSGLTWFGKTGKTDALLSVIMRKRGNIYQSDGERAPNKEKPAALFAKGSVGITDSNKAGASLRLYRNNTTEPGNPTQTHGDSGLRDRKTVQNDVQFWYQYAPVDNSLINVKSTLYLSDITIKTNGHNKTAEWRNNRTSGVNVVNRSHTLIFPGAHQLSYGAEYYRQQQKPEGSATLYPEGNIDFTSLYFQDEMTMKSYPVNIIVGSRYDRYKSFNPRAGELKAERLSPRAAISVSPTDWLMMYGSISSAFRAPTMAEMYRDDVHFYRKGKPNYWVPNLNLKPENNITREIGAGIQLDGLLTDNDRLQLKGGYFGTDARNYIATRVDMKRMRSYSYNVSRARIWGWDMQGNYQSDYVDWVLSYNRTESMDASSREWLGSGNPDTLISDISIPVGHRGVYAGWRAELSASATHVKKGDSYQAGYAIHSFSLSYKPVSVKGFEASVTLDNAFNKLAMNGKGVPLSGRTVSLYTRYQW

SEQ ID NO: 9896 - protein, 244 aa, Escherichia coli; identical to SEQ ID NO: 2964

SEQ ID NO: 9897 - protein, 249 aa, Escherichia coli; identical to SEQ ID NO: 2793

SEQ ID NO: 9898 - protein, 161 aa, Escherichia coli; identical to SEQ ID NO: 8530

SEQ ID NO: 9899 - protein, 162 aa, Escherichia coli; identical to SEQ ID NO: 1973

SEQ ID NO: 9900 - protein, 760 aa, Escherichia coli; identical to SEQ ID NO: 2080

SEQ ID NO: 9901 - protein, 203 aa, Escherichia coli; identical to SEQ ID NO: 2008

SEQ ID NO: 9902 - protein, 331 aa, Escherichia coli; identical to SEQ ID NO: 2705

SEQ ID NO: 9903 - protein, 208 aa, Escherichia coli; identical to SEQ ID NO: 1948

SEQ ID NO: 9904 - protein, 250 aa, Escherichia coli
MSYKLSCPMLVSTALMALLTTASLTAHASVTPDRTRLVFNESDKSISVTLRNNNEKLPYLAQSWLEDEKGNKITSPLAVLPPVQRIDAMMNGQVKIQALPDIHTLPSDRESLFYYNVREIPPKSGKANTLQIALQTRIKLFWRPKALEKIDMRRPWQFKVTLTRSGQDYTVNNPTPYHVIISDASTQKKGLTAAGFKPLVMPPKTSQPLKAKMASAPVLTYINDYGARMPLIFRCEGNTCKVDEDQSSKG

SEQ ID NO: 9905 - protein, 654 aa, Escherichia coli; identical to SEQ ID NO: 3854

SEQ ID NO: 9906 - protein, 412 aa, Escherichia coli
MKQWIAALLLMLIPGVQAAKPQKVTLMVDDVPVAQVLQALAEQEKLNLVVSPDVSGTVSLHLTDVPWKQALQTVVKSAGLITRQEGNILSVHSVAWQNDNIARQEAEQARAQANLPLENRNITLQYADAGELAKAGEKLLSAKGSMTVDKRTNRLLLRDNKTALSTLEQWVSQMDLPVGQVELSAHIVTINEKSLRELGVKWTLADAQQAGGVGQVTTLGSDLSVATATTHIGFNIGRINGRLLDLELSALEQKQQLDIIASPRLLASHLQPASIKQGSEIPYQVSSGESGATSVEFKEAVLGMEVTPTVLQKGRIRLKLHISQNVPGQVLQQADGEVLAIDKQEIETQVEVKSGETLALGGIFTRKNKSGQDSVPLLGDIPWFGQLFRHDGKEDERRELVVFITPRLVSSE

SEQ ID NO: 9907 - protein, 686 aa, Escherichia coli; identical to SEQ ID NO: 4535

SEQ ID NO: 9908 - protein, 517 aa, Escherichia coli; identical to SEQ ID NO: 3116

SEQ ID NO: 9909 - protein, 565 aa, Escherichia coli; identical to SEQ ID NO: 2669

SEQ ID NO: 9910 - protein, 359 aa, Escherichia coli; identical to SEQ ID NO: 2328

SEQ ID NO: 9911 - protein, 729 aa, Escherichia coli; identical to SEQ ID NO: 3979

SEQ ID NO: 9912 - protein, 203 aa, Escherichia coli; identical to SEQ ID NO: 2201

SEQ ID NO: 9913 - protein, 431 aa, Escherichia coli
MMKQALRVAFGFLILWASVLHAEVRIVIDSGVDSGRPIGVVPFQWAGPGAAPEDIGGIVAADLRNSGKFNPLDRARLPQQPGSAQEVQPAAWSALGIDAVVVGQVTPNPDGSYNVAYQLVDTGGAPGTVLAQNSYKVNKQWLRYAGHTASDEVFEKLTGIKGAFRTRIAYVVQTNGGQFPYELRVSDYDGYNQFVVHRSPQPLMSPAWSPDGSKLAYVTFESGRSALVIQTLANGAVRQVASFPRHNGAPAFSPDGSKLAFALSKTGSLNLYVMDLASGQIRQVTDGRSNNTEPTWFPDSQNLAFTSDQAGRPQVYKVNINGGAPQRITWEGSQNQDADVSSDGKFMVMVSSNGGQQHIAKQDLATGGVQVLSSTFLDETPSLAPNGTMVIYSSSQGMGSVLNLVSTDGRFKARLPATDGQVKSPAWSPYL

SEQ ID NO: 9914 - protein, 111 aa, Escherichia coli; identical to SEQ ID NO: 3419

SEQ ID NO: 9915 - protein, 784 aa, Escherichia coli; identical to SEQ ID NO: 2241

SEQ ID NO: 9916 - protein, 360 aa, Escherichia coli; identical to SEQ ID NO: 4018

SEQ ID NO: 9917 - protein, 353 aa, Escherichia coli; identical to SEQ ID NO: 6704

SEQ ID NO: 9918 - protein, 191 aa, Escherichia coli; identical to SEQ ID NO: 2728

SEQ ID NO: 9919 - protein, 660 aa, Escherichia coli; identical to SEQ ID NO: 5588

SEQ ID NO: 9920 - protein, 828 aa, Escherichia coli; identical to SEQ ID NO: 2388

SEQ ID NO: 9921 - protein, 836 aa, Escherichia coli; identical to SEQ ID NO: 7852

SEQ ID NO: 9922 - protein, 266 aa, Escherichia coli; identical to SEQ ID NO: 1894

SEQ ID NO: 9923 - protein, 591 aa, Escherichia coli; identical to SEQ ID NO: 3668

SEQ ID NO: 9924 - protein, 856 aa, Escherichia coli
MAGFFVRLVVACAFAAQAPLSSAELYFNPRFLADDPQAVADLSRFENGQELPPGTYRVDIYLNNGYMATRDVTFNTGDSEQGIVPCLTRAQLASMGLNTASVSGMNLLADDACVPLTSIIHDATAHLDVGQQRLNLTIPQAFMSNRARGYIPPELWDPGINAGLLNYNFSGNSVQNRIGGNSHYAYLNLQSGLNIGAWRLRDNTTWSYNSSDRSSGSKNKWQHINTWLERDIIPLRSRLTLGDGYTQGDIFDGINFRGAQLASDDNMLPDSQRGFAPVIHGIARGTAQVTIKQNGYDIYNSTVPPGPFTINDIYAAGNSGDLQVTIKEADGSTQIFTVPYSSVPLLQREGHTRYSITAGEYRSGNAQQEKPRFFQSTLLHGLPAGWTIYGGTQLADRYRAFNFGIGKNMGALGALSVDMTQANSTLPDDSQHDGQSVRFLYNKSLNESGTNIQLVGYRYSTSGYFNFADTTYSRMNGYNIETQDGVIQVKPKFTDYYNLAYNKRGKLQLTVTQQLGRSSTLYLSGSHQTYWGTSNVDEQFQAGLNTAFEDINWTLSYSLTKNAWQKGRDQMLALNVNIPFSHWLRSDSKSQWRHASASYSMSHDLNGRMTNLAGVYGTLLEDNNLSYSVQTGYAGGGDGNSGSTGYATLNYRGGYGNANIGYSHSDDIKQLYYGVSGGVLAHANGVTLGQPLNDTVVLVKAPGAKDAKVENQTGVRTDWRGYAVLPYATEYRENRVALDTNTLADNVDLDNAVANVVPTRGAIVRAEFKARVGIKLLMTLTHNNKPLPFGAMVTSESSQSSGIVADNGQVYLSGMPLAGKVQVKWGEEENAHCVANYQLPPESQQQLLTQLSAECR

SEQ ID NO: 9925 - protein, 883 aa, Escherichia coli
MTAIRAAFKAYRMHQVLIMPRFARLTIALGLATAVFPVDAEYYFNPRFLSNDLAESVDLSAFTKGREAPPGTYRVDIYLNDEFMTSRDITFIADDNNAELIPCLSTDLLVSLGIKKSALLDNKEHSAEKHVPDNSACTPLQDRLADASTEFDVGQQHLSLSVPQIYVGRMARGYVSPDLWEEGINAGLLNYSFNGNSINNRSNHNAGKSNYAYLNLQSGINIGSWRLRDNSTWSYYSGSSNSSDSNKWQHINTSAERDIIPLRSRLTVGDSYTDGDIFDSVNFRGLKINSTEAMLPDSQHGFAPVIHGIARGTAQVSVKQNGYDVYQTTVPPGPFTIDDINSAANGGDLQVTIKEADGSIQTLYVPYSSVPVLQRAGYTRYALAMGEYRSGNNLQSSPKFIQGSLMHGLEGNWTPYGGMQIAEDYQAFNLGIGKDLGLFGAFSFDITQANTTLADGTRHSGQSVKSVYSKSFYQTGTNIQVAGYRYSTQGFYNLSDSAYSRMSGYTVKPPTGDTNEQTQFIDYFNLFYSKRGQEQISISQQLGNYGTTFFSASRQSYWNTSRSDQQISFGLNVPFGDITTSLNYSYSNNIWQNDRDHLLAFTLNVPFSHWMRTDSQSAFRNSNASYSMSNDLKGGMTNLSGVYGTLLPDNNLNYSVQVGNTHGGNTSSGTSGYSSLNYRGAYGNTNVGYSRNGDSSQIYYGMSGGIIAHADGITFGQPLGDTMVLVKAPGADNVKIENQTGIHTDWRGYAILPFATEYRENRVALNANSLADNVELDETVVTVIPTHGAIARATFNAQIGGKVLMTLKYGNKSVPFGAIVTHGENKNGSIVAENGQVYLTGLPQSGKLQVSWGNDKNSNCIVDYKLPEVSPETLLNQQTAICR

SEQ ID NO: 9926 - protein, 831 aa, Escherichia coli; identical to SEQ ID NO: 3367

SEQ ID NO: 9927 - protein, 161 aa, Escherichia coli; identical to SEQ ID NO: 2582

SEQ ID NO: 9928 - protein, 207 aa, Escherichia coli; identical to SEQ ID NO: 2211

SEQ ID NO: 9929 - protein, 843 aa, Escherichia coli; identical to SEQ ID NO: 3042

SEQ ID NO: 9930 - protein, 834 aa, Escherichia coli; identical to SEQ ID NO: 3095

SEQ ID NO: 9931 - protein, 368 aa, Escherichia coli; identical to SEQ ID NO: 3872

SEQ ID NO: 9932 - protein, 219 aa, Escherichia coli; identical to SEQ ID NO: 3328

SEQ ID NO: 9933 - protein, 861 aa, Escherichia coli
MSGSYSSVWAEDDIQFDSRFLELKGDTKIDLKRFSSQGYVEPGKYNLQVQLNKQPLAEEYDIYWYAGEDDASKSYACLTPELVAQFGLKEDVAKNLQWSHDAKCLKSGQLEGMEIKADLSQSALVISLPQAYLEYTYPDWDPPSRWDDGISGIVADYSINAQTRHEENGGDDSNEISGNGTVGVNLGPWRMRADWQTNYQHTRSNDDDEFSGDETQKKWEWSRYYAWRALPSLKAKLALGEDYLRSDIFDGFNYVGGSVSTDDQMLPPNLRGYAPDISGVAHTTAKVTVSQMGRVIYETQVPAGPFRIQDLGDSVSGTLHIRIEEQNGQVQEYDISTASMPYLTRPGQVRYKIMMGRPQEWGHHVEGEFFSGAEASWGIANGWSLYGGALGDENYQSAALGVGRDLSTFGAVAFDVTHSHTKLDKDTAYGKGSLDGNSFRVSYSKDFDQLNSRVTFAGYRFSEENFMTMSEYLDASDSGMVRTGNDKEMYTATYNQNFRDAGVSVYLNYTRHTYWDREEQTNYNIMLSHYFNMGSIRNVSISMTGYRYEYDNQADKGMYISLSMPWGDNSTVSYNGNYGSGTDSSQVGYFSRVDDATHYQLNVGTSDKHTSVDGYYSHDGSLAQVDLSANYHEGQYTSAGLSLQGGATLTAHGGALHRTQNMGGTRLLIDADGVADVPVEGNGAAVYTNMFGKAVVSDVNNYYRNQAYIDLNKLPENAEATQSVVQATLTEGAIGYRKFAVISGQKAMAVLRLQDGSHPPFGAEVKNDNEQTVGLVDDDGNVYLAGVKPGEHMSVFWSGVAHCDINLPDPLPADLFNGLLLPCQHKGNVAPVVPDDIKPVIQEQTQQVTPTNPPVSVSANQ

SEQ ID NO: 9934 - protein, 825 aa, Escherichia coli
MGQNASNIDLSRYSEGNPAIPGMYDVSVYVNDQPIINQSITFIEIEGKKNAQACITLKNLLQFHINSPDINNEKAVLLARDETLGNCLNLTEIIPQASVRYDVNEQRLDIDVPQAWVMKNYQNYVDPSLWENGINAAMLSYNLNGYHSETPGRRNDSIYAAFNGGMNLGAWRLRASGNYNWMTDSGSNYDFKNRYIQRDIASLRSQLILGESYTTGETFDSVSIRGIRLYSDSRMLPPTLASFAPIIHGVANTNAKVTITQGGYKIYETTVPPGAFVIDDLSPSGYGSDLIVTVEESDGSKRTFSQPFSSVVQMLRPGVGRWDISGGQVLKDDIQDEPNLFQASYYYGLNNYLTGYTGIQITDNNYTAGLLGLGLNTSVGAFSFDVTHSNVRIPDDKTYQGQSYRVSWNKLFEETSTSLNIAAYRYSTQNYLGLNDALTLIDEVKHPEQDLEPKSMRNYSRMKNQVTVSINQPLKFEKKDYGSFYLSGSWSDYWASGQNRSNYSIGYSNSASWGSYSVSAQRSWNEDGDTDDSVYLSFTIPIEKLLGTEQRTSGFQSIDTQMSSDFKGNNQLNVSSSGYSDNARLSYSVNTGYTMNKASKDLSYVGGYASYESPWGTLAGSVSANSDNSRQVSLSTDGGFVLHSGGLTFSNDSFSDSDTLAVVQAPGAQGARINYGNSTIDRWGYGVTSALSPYHENRIALDINDLENDVELKSTSAVAVPRQGSVVFADFETVQGQSAIMNITRSDGKNIPFAADIYDEQGNVIGNVGQGGQAFVRGIEQQGNISIKWLEESKPVSCLAHYQQSSEAEKIAQSIILNGIRCQIQ

SEQ ID NO: 9935 - protein, 869 aa, Escherichia coli
MKIPTTTDIPQRYSWCLAGICYSSLAILPSFLSYAESYFNPAFLLENGTSVADLSRFERGNHQPARVYRVDLWRNDEFIGSQDIVFESTTENTGDKSGGLMPCFNQVLLERIGLNSSAFPELAQQQNNKCINLLKAVPDATINFDFAAMRLNITIPQITLLSSAHGYIPPEEWDEGIPALLLNYNFTGNRGNGNDSYFFSELSGINIGPWRLRNNGSWNYFRGNGYHSEQWNNIGTWVQRAIIPLKSELVMGDGNTGSDIFDGVGFRGVRLYSSDNMYPDSQQGFAPTVRGIARTAAQLTIRQNGFIIYQSYVSPGAFEITDLHPTSSNGDLDVTIDERDGNQQNYTIPYSTVPILQREGRFKFDLTAGDFRSGNSQQSSPFFFQGTALGGLPQEFTAYGGTQLSANYTAFLLGLGRNLGNWGAVSLDVTHARSQLADDSRHEGDSIRFLYAKSMNTFGTNFQLMGYRYSTQGFYTLDDVAYRRMEGYEYDYDYDGEHRDELIIVNYHNLRFSRKDRLQLNISQSLNDFGSLYISGTHQKYWNTSDSDTWYQVGYTSSWVGISYSLSFSWNESVGIPDNERIVGLNVSVPFNVLTKRRYTRENALDRAYASFNANRNSNGQNSWLAGVGGTLLEGHNLSYHVSQGDTSNNGYTGSATANWQAAYGTLGVGYNYDRDQHDVNWQLSGGVVGHENGITLSQPLGDTNVLIKAPGAGGVRIENQTGILTDWRGYAVMPYATVYRYNRIALDTNTMGNSIDVEKNISSVVPTQGALVRANFDTRIGVRALITVTQGGKPVPFGSLVRENSTGITSMVGDDGQVYLSGAPLSGELLVQWGDGANSRCIAHYVLPKQSLQQAVTVISAVCTHPGS

SEQ ID NO: 9936 - protein, 819 aa, Escherichia coli; identical to SEQ ID NO: 3875

SEQ ID NO: 9937 - protein, 813 aa, Escherichia coli; identical to SEQ ID NO: 4302

SEQ ID NO: 9938 - protein, 111 aa, Escherichia coli; identical to SEQ ID NO: 3096

SEQ ID NO: 9939 - protein, 554 aa, Escherichia coli; identical to SEQ ID NO: 3409

SEQ ID NO: 9940 - protein, 122 aa, Escherichia coli; identical to SEQ ID NO: 2915

SEQ ID NO: 9941 - protein, 386 aa, Escherichia coli; identical to SEQ ID NO: 3072

SEQ ID NO: 9942 - protein, 208 aa, Escherichia coli; identical to SEQ ID NO: 1949

SEQ ID NO: 9943 - protein, 360 aa, Escherichia coli
MMKKYLALALIAPLLISCSTTKKGDTYNEAWVKDTNGFDILMGQFAHNIENIWGFKEVVIAGPKDYVKYTDQYQTRSHINFDDGTITIETIAGTEPAAHLRRAIIKTLLMGDDPSSVDLYSDVDDITISKEPFLYGQVVDNTGQPIRWEGRASNFADYLLKNRLQSRNNGLRIIYSVTINMVPNHLDKRAHKYLGMVRQASRKYGVDESLILAIMQTESSFNPYAVSRSDALGLMQVVQHTAGKDVFRSQGKSGTPSRSFLFDPASNIDTGTAYLAMLNNVYLGGIDNPTSRRYAVITAYNGGAGSVLRVFSNDKIQAANIINTMTPGDVYQTLTTRHPSAESRRYLYKVNTAQKSYRRR

SEQ ID NO: 9944 - protein, 432 aa, Escherichia coli; identical to SEQ ID NO: 2026

SEQ ID NO: 9945 - protein, 746 aa, Escherichia coli; identical to SEQ ID NO: 4275

SEQ ID NO: 9946 - protein, 478 aa, Escherichia coli; identical to SEQ ID NO: 2404

SEQ ID NO: 9947 - protein, 663 aa, Escherichia coli; identical to SEQ ID NO: 1910

SEQ ID NO: 9948 - protein, 784 aa, Escherichia coli; identical to SEQ ID NO: 2244

SEQ ID NO: 9949 - protein, 224 aa, Escherichia coli; identical to SEQ ID NO: 4306

SEQ ID NO: 9950 - protein, 228 aa, Escherichia coli; identical to SEQ ID NO: 3034

SEQ ID NO: 9951 - protein, 700 aa, Escherichia coli
MKIFSVRQTVLPALLVLSPVVFAADEQTMIVSAAPQVVSELDTPAAVSVVDGEEMRLATPRINLSESLTGVPGLQVQNRQNYAQDLQLSIRGFGSRSTYGIRGIRLYVDGIPATMPDGQGQTSNIDLSSVQNVEVLRGPFSALYGNASGGVMNVTTQTGQQPPTIEASSYYGSFGSWRYGLKATGATGDGTQPGDVDYTVSTTRFTTHGYRDHSGAQKNLANAKLGVRIDEASKLSLIFNSVDIKADDPGGLTKAEWKANPQQAPRAEQYDTRKTIKQTQAGLRYERSLSAQDDMSVMMYAGERETTQYQSIPMAPQLNPSHAGGVITLQRHYQGIDSRWTHRGELGVPVTFTTGLNYENMSENRKGYNNFRLNSGMPEYGQKGELRRDERNLMWNIDPYLQTQWQLSEKLSLDAGVRYSSVWFDSNDHYVTPGNGDESGDASYHKWLPAGSLKYAMTDAWNIYLAAGRGFETPTINELSYRADGQSGMNFGLKPSTNDTIEIGSKTRIGDGLLSLALFQTDTDDEIVVDSSSGGRTTYKNAGKTRRQGAELAWDQRFAGDFRVNASWTWLDATYRSNVCNEQDCNGNRMPGIARNMGFASIGYVPEDGWYAGTEARYMGDIMADDENTAKAPSYTLVGLFTGYKYNYHNLTVDLFGRVDNLFDKEYVGSVIVNESNGRYYEPSPGRNYGVGMNIAWRFE

SEQ ID NO: 9952 - protein, 231 aa, Escherichia coli
MSKRTFAVIITLLCSFCIGQALAGGIVLQRTRVIYDASRKEAALPVANKGAETPYLLQSWVDNIDGTSRAPFIITPPLFRLEAGDDSSLRIFKTADNLPENKESLFYINVRAIPAKKKSDDVNANELTLVFKTRFKMFYRPAHLKGRVNDAWTSLEFKRSDHSLNIYNPTEYYVVFAGLAVDKTDLTSKIEYIAPGEHKQLPLPASGGKNVKWAAINDYGGSSGTETRPLQ

SEQ ID NO: 9953 - protein, 747 aa, Escherichia coli; identical to SEQ ID NO: 2072

SEQ ID NO: 9954 - protein, 541 aa, Escherichia coli; identical to SEQ ID NO: 3377

SEQ ID NO: 9955 - protein, 191 aa, Escherichia coli; identical to SEQ ID NO: 2727

SEQ ID NO: 9956 - protein, 267 aa, Escherichia coli; identical to SEQ ID NO: 5971

SEQ ID NO: 9957 - protein, 353 aa, Escherichia coli; identical to SEQ ID NO: 4626

SEQ ID NO: 9958 - protein, 236 aa, Escherichia coli; identical to SEQ ID NO: 3438

SEQ ID NO: 9959 - protein, 356 aa, Escherichia coli
MLDTRKLYSQSWDAGLRYNGELIKSQLITSYSHSKDYNYDPHFGRYDSSATLDEMKQYTVQWANNVIVGHGSIGAGVDWQKQTTTPGTGYVENGYDQRNTGIYLTGLQQVGDFTFEGAARSDDNSQFGRHGTWQTSAGWEFIEGYRFIASYGTSYKAPNLGQLYGFYGNPNLDPEKSKQWEGAFEGLTAGVNWRISGYRNDVSDLIDYDDHTLKYYNEGKARIKGVEATANFDTGPLTHTVSYDYVDARNAITDTPLLRRAKQQVKYQLDWQLYDFDWGITYQYLGTRYDKDYSSYPYQTVKMGGVSLWDLAVAYPVTSHLTVRGKIANLFDKDYETVYGYQTAGREYTLSGSYTF

SEQ ID NO: 9960 - protein, 518 aa, Escherichia coli; identical to SEQ ID NO: 2350

SEQ ID NO: 9961 - protein, 230 aa, Escherichia coli; identical to SEQ ID NO: 3348

SEQ ID NO: 9962 - protein, 331 aa, Escherichia coli
MADLYGKAVGLHYFSKGNGENSYGGNGDMTYARLGFKGETQINSDLTGYGQWEYNFQGNNSEGADAQTGNKTRLAFAGLKYADVGSFDYGRNYGVVYDALGYTDMLPEFGGDTAYSDDFFVGRVGGVATYRNSNFFGLVDGLNFAVQYLGKNERDTARRSNGDGVGGSISYEYEGFGIVGAYGAADRTNLQEAQPLGNGKKAEQWATGLKYDANNIYLAANYGETRNATPITNKFTNTSGFANKTQDVLLVAQYQFDFGLRPSIAYTKSKAKDVEGIGDVDLVNYFEVGATYYFNKNMSTYVDYIINQIDSDNKLGVGSDDTVAVGIVYQF

SEQ ID NO: 9963 - protein, 160 aa, Escherichia coli
MVLPAHAGIVIYGTRIIYPAENKEVMVQLMNQGNRSSLLQAWIDDGDTSLPPEKIQVPFMLTPPVAKIGANSGQQVKIKIMPNKLPTNKESIFYLNVLDIPPNSPEQEGKNALKFAMQNRIKLFYRPAGIAPVNKATFKKLLVNRSGNGLVNKKMTQLIG

SEQ ID NO: 9964 - protein, 274 aa, Escherichia coli; identical to SEQ ID NO: 2318

SEQ ID NO: 9965 - protein, 204 aa, Escherichia coli; identical to SEQ ID NO: 2957

SEQ ID NO: 9966 - protein, 245 aa, Escherichia coli; identical to SEQ ID NO: 3410

SEQ ID NO: 9967 - protein, 230 aa, Escherichia coli; identical to SEQ ID NO: 4274

SEQ ID NO: 9968 - protein, 213 aa, Escherichia coli; identical to SEQ ID NO: 2232

SEQ ID NO: 9969 - protein, 233 aa, Escherichia coli; identical to SEQ ID NO: 3276

SEQ ID NO: 9970 - protein, 828 aa, Escherichia coli; identical to SEQ ID NO: 5894

SEQ ID NO: 9971 - protein, 431 aa, Escherichia coli; identical to SEQ ID NO: 3408

SEQ ID NO: 9972 - protein, 331 aa, Escherichia coli
MKKPVVIGLAVVALAAVVAGGYWWYQSRQDNGLTLYGNVDIRTVNLSFRVGGRVESLAVDEGDAIKAGQVLGELDHKPYEIALMQAKAGVSVAQAQYDLMLAGYRDEEIAQAAAAVKQAQAAYDYAQNFYNRQQGLWKSRTISANDLENARSSRDQAQATLKSAQDKLRQYRSGNREQDIAQAKASLEQAQAQLAQAELNLQDSTLIAPSDGTLLTRAVEPGTVLNEGGTVFTVSLTRPVWVRAYVDERNLDQAQPGRKVLLYTDGRPDKPYHGQIGFVSPTAEFTPKTVETPDLRTDLVYRLRIVVTDADDALRQGMPVTVQFGNEAGHE

SEQ ID NO: 9973 - protein, 760 aa, Escherichia coli; identical to SEQ ID NO: 3923

SEQ ID NO: 9974 - protein, 517 aa, Escherichia coli; identical to SEQ ID NO: 2462

SEQ ID NO: 9975 - protein, 250 aa, Escherichia coli; identical to SEQ ID NO: 4332

SEQ ID NO: 9976 - protein, 498 aa, Escherichia coli; identical to SEQ ID NO: 9872

SEQ ID NO: 9977 - protein, 235 aa, Escherichia coli
MIAMQKNAAHTYAISSLLVLSLTGCAWIPSTPLVQGATSAQPVPGPTPVANGSIFQSAQPINYGYQPLFEDRRPRNIGDTLTIVLQENVSASKSSYANASRDGKTNFGFDTVPRYLQGLFGNARADVEASGGNTFNGKGGANASNTFNGTLTVTVDQVLVNGNLHVVGEKQIAINQGTEFIRFSGVVNPRTISGSNTVPSTQVADARIEYVGNGYINEAQNMGWLQRFFLNLSPM

SEQ ID NO: 9978 - protein, 252 aa, Escherichia coli; identical to SEQ ID NO: 3400

SEQ ID NO: 9979 - protein, 345 aa, Escherichia coli
VYNKDGNKLDLYGKVDGLHYFSDNKDVDGDQTYMRLGFKGETQVTDQLTGYGQWEYQIQGGNSAENENNSWTRVAFAGLKFQDVGSFDYGRNYGVVYDVTSWTDVLPEFGGDTYGSDNFMQQRGNGFATYRNTDFFGLVDGLNFAVQYQGKNGSVNGEGMTNNGRDALRQNGDGVGGSITYDYEGFGIGAAVSSSKRTDAQNTAAYIGNGDRAETYTGGLKYDANNIYLAAQYTQTYNATRVGSLGWANKAQNFEAVAQYQFDFGLRPSVAYLQSKGKNLGTIAGRNYDDEDILKYVDVGATYYFNKNMSTYVDYKINLLDDNQFTRDAGINTDNIVALGLVYQF

SEQ ID NO: 9980 - protein, 729 aa, Escherichia coli
MLSTQFNRDNQYQAITKPSLLAGCIALALLPSAAFAAPATEETVIVEGSATAPDDGENDYSVTSTSAGTKMQMTQRDIPQSVTIVSQQRMEDQQLQTLGEVMENTQGISKSQADSDRALYYSRGFQIDNYMVDGIPTYFESRWNLGDALSDMALFERVEVVRGATGLMTGTGNPSAAINMVRKHATSREFKGDVSAEYGSWNKERYVADLQSPLTEDGKIRARIVGGYQNNDSWLDRYNSEKTFFSGIVDADLGDLTTLSAGYEYQRIDVNSPTWGGLPRWNTDGSSNSYDRARSTAPDWAYNDKEINKVFMTLKQRFADTWQATLNATHSEVEFDSKMMYVDAYVNKADGMLVGPYSNYGPGFDYVGGTGWNSGKRKVDALDLFADGSYELFGRQHNLMFGGSYSKQNNRYFSSWTNIFPDEIGSFYNFNGNFPQTDWSPQSLAQDDTTHMKSLYAATRVTLADPLHLILGARYTNWRVDTLTYSMEKNHTTPYAGLVFDINDNWSTYASYTSIFQPQNDRDSSGKYLAPITGNNYELGLKSDWMNSRLTTTLAIFRIEQDNVAQSTGTPIPGSNGETAYKAVDGTVSKGVEFELNGAITDNWQLTFGATRYIAEDNEGNAVNPNLPRTTVKMFTSYRLPVMPELTVGGGVNWQNRVYTDTVTPYGTFRAEQGSYALVDLFTRYQVTKNFSLQGNVNNLFDKTYDTNVEGSIVYGAPRNFSITGTYQF

SEQ ID NO: 9981 - protein, 169 aa, Escherichia coli; identical to SEQ ID NO: 3373

SEQ ID NO: 9982 - protein, 121 aa, Escherichia coli
MNVKAIPSMDKSKLTENTLQLAIISRIKLYYRPAKLALPPDQAAEKLRFRRSANSLTLINPTPYYLTVTELNAGARVLENALVPPMGESTVKLPSDAGSNITYRTINDYGALTPKMTGVME

SEQ ID NO: 9983 - protein, 446 aa, Escherichia coli; identical to SEQ ID NO: 2176

SEQ ID NO: 9984 - protein, 132 aa, Escherichia coli
MSLPDDRESVFWLNIKNIPPSASNKATNSLEIAVKTRIKLFWRPANIRLIPEDAAPKVKWRREGRNLIAENPNPIHISVMDVIVDGHDVPLNMIRPFETLTLPLPANSAGGQMTWRFINDYGAVSDPIKMTL

SEQ ID NO: 9985 - protein, 207 aa, Escherichia coli; identical to SEQ ID NO: 2211

SEQ ID NO: 9986 - protein, 826 aa, Escherichia coli; identical to SEQ ID NO: 2758

SEQ ID NO: 9987 - protein, 816 aa, Escherichia coli; identical to SEQ ID NO: 5482

SEQ ID NO: 9988 - protein, 851 aa, Escherichia coli
MPSFIGGLVVFVSAAFNAQAETWFDPAFFKDDPSMVADLSRFEKGQKITPGVYRVDIVLNQTIVDTRNVNFVEITPEKGIAACLTTESLDAMGVNTDAFPAFKQLDKQACVPLAEIIPDASVTFNVNKLRLEISVPQIAIKSNARGYVPPERWDEGINALLLGYSFSGANSIHSSADSDSGDSYFLNLNSGVNLGPWRLRNNSTWSRSSGQTAEWKNLSSYLQRAVIPLKGELTVGDDYTAGDFFDSVSFRGVQLASDDNMLPDSLKGFAPVVRGIAKSNAQITIKQNGYTIYQTYVSPGAFEISDLYSTSSSGDLLVEIKEADGSVNSYSVPFSSVPLLQRQGRIKYAVTLAKYRTNSNEQQESEFAQATLQWGGPWGTTWYGGGQYAEYYRAAMFGLGFNFGDFGAISFDATQAKSTLADQSEHKGQSYRFLYAKTLNHLGTNFQLMGYRYSTSGFYTLSDTMYKHMDGYEFNDGDDEDTPMWSRYYNLFYTKRGKLQVNISQQLGEYGSFYLSGSQQTYWHTDQQDRLLQFGYNTQIKDLSLGISWNYSKSRGQPDADQVFALNFSLPLNLLLPRSNDSYTRKKNYAWMTSNTSIDNEGHTTQNLGLTETLLDDGNLSYSVQQGYNSEGKTANGSASMDYKGAFADARVGYNYSDNGSQQQLNYALSGSLVAHSQGITLGQSLGETNVLIAAPGAENTRVANSTGLKTDWRGYTVVPYATSYRENRIALDAASLKRNVDLENAVVNVVPTKGALVLAEFNAHAGARVLMKTSKQGIPLRFGAIATLDGVQANSGIIDDDGSLYMAGLPAKGTISVRWGEAPDQICHINYELTEQQINSAITRMDAICR

SEQ ID NO: 9989 - protein, 161 aa, Escherichia coli; identical to SEQ ID NO: 2582

SEQ ID NO: 9990 - protein, 878 aa, Escherichia coli
MSYLNLRLYQRNTQCLHIRKHRLAGFFVRLFVACAFAAQAPLSSAELYFNPRFLADDPQAVADLSRFENGQELPPGTYRVDIYLNNGYMATRDVTFNTGDSEQGIVPCLTRAQLASMELNTASVSGMNLLADDACVPLTSMIHDATAHLDVGQQRLNLTIPQAFMSNRARGYIPPELWDPGINAGLLNYNFSGNSVQNRIGGNSHYAYLNLQSGLNIGAWRLRDNTTWSYNSSDSSSGSKNKWQHINTWLERDIIPLRSRLTLGDGYTQGDIFDGINFRGAQLASDDNMLPDSQRGFAPVIHGIARGTAQVTIKQNGYDIYNSTVPPGPFTINDIYAAGNSGDLQVTIKEADGSTQIFTVPYSSVPLLQREGHTRYSITAGEYRSGNAQQEKPRFFQSTLLHGLPAGWTIYGGTQLADRYRAFNFGIGKNMGALGALSVDMTQANSTLPDDSQHDGQSVRFLYNKSLNESGTNIQLVGYRYSTSGYFNFADTTYSRMNGYNIETQDGVIQVKPKFTDYYNLAYNKRGKLQLTVIQQLGRTSTLYLSGSHQTYWGTSNVDEQFQAGLNTAFEDINWTLSYSLTKNAWQKGRDQMLALNVNIPFSHWLRSDSKSQWRHASASYSMSHDLNGRMTNLVGVYGTLLEDNNLSYSVQTGYAGGGDGNSGSTGYATLNYRGGYGNANIGYSHSDDIKQLYYGVSGGVLAHANGVTLGQPLNDTVVLVKAPGAKDAKVENQTGVRTDWRGYAVLPYATEYRENRVALDTNTLADNVDLDNAVANVVPTRGAIVRAEFKARVGIKLLMTLTHNNKPLPFGAMVTSESSQSSGIVADNGQVYLSGMPLAGKVQVKWGEEENAHCVANYQLPPESQQQLLTQLSAECR

SEQ ID NO: 9991 - protein, 368 aa, Escherichia coli
MNKTITALTIIMASFAANASVLPETPVPFKSGTGAIDNDTVYIGLGSAGTAWYKLDTQAKDKRWTALAAFPGGPRDQATSAFIDGNLYVFGGIGKNSEGLTQVFNDVHKYNPKTNSWVKLMSHAPMGMAGHVTFVHNGKAYVTGGVNQNIFNGYFEDLNEAGKDSTAIDKINAYYFDKKAEDYFFNKFLLSFDPSTQQWSYAGESPWYGTAGAAVVNKGDKTWLINGEAKPGLRTDAVFELDFTGDNLKWNKLDPVSSPDGVAGGFAGISNDSLIFAGGAGFKGSRENYQNGKNYAHEGLKKSYSVDIHLWYNGKWDKSGELSQGRAYGVSLPWNNSLLIIGGETAGGKAVMDSVLISVKDNKVTVQN

SEQ ID NO: 9992 - protein, 266 aa, Escherichia coli; identical to SEQ ID NO: 1894

SEQ ID NO: 9993 - protein, 917 aa, Escherichia coli
MKLNIFTKSMIGMGLVCSALPALAMEAWNNQQGGNKYQVIFDGKIYENAWWVSSTNCPGKAKANDATNPWRLKRTATAAEISQFGNTLSCEKSGSSSSSNSNTPASNTPANGGSATPAQGTVPSNSSVVAWNKQQGGQTWYVVFNGAVYKNAWWVASSNCPGDAKGNDASNPWRYVRAATATEISETSNPQSCTSAPQPAPDVKPAPDVKPAPDVQPAPADKSNDNYAIVAWKGQEGSSTWYVIYNGGIYKNAWWVGAANCPGDAKENDASNPWRYVRAATATEISQYGNPGSCSVKPDNNGGTVTPVDPTPETPVTPTPDNSEPSTPADSGNDYSLQAWSGQEGSEIYHVIFNGNVYKNAWWVGSKDCPRGTSAENSNNPWRLERTATAAELSQYGNPTTCEIDNGGVIVADGFQASKAYSADSIVDYNDAHYKTSVDQDAWGFVPGGDNPWKKYEPAKAWSASTVYVKGDRVVVDGQAYEALFWTQSDNPALVANQNATGSNSRPWKPLGKAQSYSNEELNNAPQFNPETLYASDTLIRFNGVNYISQSKVQKVSPSDSNPWRVFVDWTGTKERVGTPKKAWPKHVYAPYVDFTLNTIPDLAALAKNHNVNHFTLAFVVSKDANTCLPTWGTAYGMHNYAQYSKIKALREAGGDVMLSIGGANNAPLAASCKNVDDLMQHYYDIVDNLNLKVLDFDIEGTWVADQASIERRNLAVKKVQDKWKSEGKDIAIWYTLPILPTGLTPEGMNVLSDAKAKGVELAGVNVMTMDYGNAICQSANTEGQNIHGKCATSAIANLHSQLKGLHPNKSDAEIDAMMGTTPMVGVNDVQGEVFYLSDARLVMQDAQKRNLGMVGIWSIARDLPGGTNLSPEFHGLTKEQAPKYAFSEIFAPFTKQKMCWRYLPVSPHFLSMGYFW

SEQ ID NO: 9994 - protein, 869 aa, Escherichia coli; identical to SEQ ID NO: 4609

SEQ ID NO: 9995 - protein, 881 aa, Escherichia coli; identical to SEQ ID NO: 3936

SEQ ID NO: 9996 - protein, 866 aa, Escherichia coli; identical to SEQ ID NO: 3953

SEQ ID NO: 9997 - protein, 813 aa, Escherichia coli
MVLTGSGMLCTTANAEEYYFDPIMLETTKSGMQTTDLSRFSKKYAQLPGTYQVDIWLNKKKVSQKKITFTANAEQLLQPQFTVEQLRELGIKVDEIPALAEKDDDSVINSLEQIIPGTAAEFDFNHQRLNLSIPQIALYRDARGYVSPSRWDDGIPTLFTNYSFTGSDNRYRQGNRSQRQYLNMQNGANFGPWRLRNYSTWTRNDQTSSWNTISSYLQRDIKALKSRLLLGESATSGSIFSSYTFTGVQLASDDNMLPNSQRGFAPTVRGIANSSAIVTIRQNGYVIYQSNVPAGAFEINDLYPSSNSGDLEVTIEESDGTQRRFIQPYSSLPMMQRPGHLKYSATAGRYRADANSDSKEPEFAEATAIYGLNNTFTLYGGLLGSEDYYALGIGIGGTLGALGALSMDINRADTQFDNQHSFHGYQWRTQYIKDIPETNTNIAVSYYRYTNDGYFSFNEANTRNWDYNSRQKSEIQFNISQTIFDGVSLYASGSQQDYWGNNDKNRNISVGVSGQQWGVGYSLNYQYSRYTDQNNDRALSLNLSIPLERWLPRSRVSYQMTSQKDRPTQHEMRLDGSLLDDGRLSYSLEQSLDDDNNHNSSLNASYRSPYGTFSAGYSYGNDSSQYNYGVTGGVVIHPHGVTLSQYLGNAFALIDANGASGVRIQNYPGIATDPFGYAVVPYLTTYQENRLSVDTTQLPDNVDLEQTTQFVVPNRGAMVAARFNANIGYRVLVTVSDRNGKPLPFGALASNDETGQQSIVDEGGILYLSGISSKSQSWTVRWGNQADQQCQFAFSTPDSEPTTSVLQGTAQCH

SEQ ID NO: 9998 - protein, 740 aa, Escherichia coli
MTPEQLTLLGFTDEFIEKTQQTLIDGCYPIEKEKQITTYLDKGKMQLSISAPQAWLKYKDANWTPPELWDHGIAGAFLDYNLYASHYAPHQGDNSQNISSYGQAGVNLGAWRLRTDYQYDQSFNNGKSQANNLDFPRIYLFRPIPAINAKLTIGQYDTESSIFDSFHFSGVSLKSDENMLPPDLRGYAPQITGVAQTNAKVTVSQNNRIIYQENVPPGPFAITNLFNTLQGQLDVKVEEEDGQVTQWQVASNSIPYLTRKGQIRYTTAMGKPTSVGGDSLQQPFFWTGEFSWGWLNNVSLYGGSVLTNRDYQSLAAGVGFNLNSLGSLSFDVTRSDAQLHNQDKETGYSYRANYSKRFESTGSQLTFAGYRFSDKNFVTMNEYINDTNHYTNYQNEKESYIVTFNQYLESLRLNTYVSLARNTYWDASSNVNYSLSLSRDFDIGPLKNVSTSLTFSRINWEDDNQDQLYLNISIPWGTSRTLSYGMQRNQDNKISHTASWYDSSDRNNSWSVSASGDNDEFKDMKASLRASYQHNTENGRLYLSGTSQRDSYYSLNASWNGSFTATRHGAAFHDYSGSADSRFMIDADGAEDIPLNNKRAVTNRYGIGVIPSVSSYITTSLSVDTRNLPENVDIENSVITTTLTEGAIGYAKLDTRKGYQIIGVIRLADGSHPPLGISVKDETSHKELGLVADGGFVYLNGIQDDNKLALRWGDKSCFIQPPNSSNLTTGTVILPCISQN

SEQ ID NO: 9999 - protein, 351 aa, Escherichia coli; identical to SEQ ID NO: 2872

SEQ ID NO: 10000 - protein, 232 aa, Escherichia coli; identical to SEQ ID NO: 2087

SEQ ID NO: 10001 - protein, 565 aa, Escherichia coli; identical to SEQ ID NO: 2669

SEQ ID NO: 10002 - protein, 241 aa, Escherichia coli; identical to SEQ ID NO: 2922

SEQ ID NO: 10003 - protein, 551 aa, Escherichia coli; identical to SEQ ID NO: 2449

SEQ ID NO: 10004 - protein, 784 aa, Escherichia coli; identical to SEQ ID NO: 2244

SEQ ID NO: 10005 - protein, 747 aa, Escherichia coli; identical to SEQ ID NO: 4126

SEQ ID NO: 10006 - protein, 412 aa, Escherichia coli; identical to SEQ ID NO: 4058

SEQ ID NO: 10007 - protein, 663 aa, Escherichia coli; identical to SEQ ID NO: 1910

SEQ ID NO: 10008 - protein, 200 aa, Escherichia coli; identical to SEQ ID NO: 1793

SEQ ID NO: 10009 - protein, 119 aa, Escherichia coli; identical to SEQ ID NO: 2526

SEQ ID NO: 10010 - protein, 746 aa, Escherichia coli; identical to SEQ ID NO: 4083

SEQ ID NO: 10011 - protein, 170 aa, Escherichia coli
MVRLNPSEQIQIRMITQKKIAQLPKDRETLFYFNVREIPPKTDKKNVMQVTMQHALKLFWRPKAIELEDDGVMTYEKVEIIRRNDGSIRFNNKMPYHVTLGYIGTNGVTMLPQTQSLMVTPFSHANTQFKNVPSTFQVGYINDFGGLSFYEINCPVVNNICNISVAKRDQ

SEQ ID NO: 10012 - protein, 243 aa, Escherichia coli; identical to SEQ ID NO: 4043

SEQ ID NO: 10013 - protein, 431 aa, Escherichia coli; identical to SEQ ID NO: 3408

SEQ ID NO: 10014 - protein, 760 aa, Escherichia coli; identical to SEQ ID NO: 3992

SEQ ID NO: 10015 - protein, 686 aa, Escherichia coli
MFWRDMTLSVWRKKTTDLKTKKRLLPLVLAAALCSSPVWAEEATFTANFKDTDLKSFIETVGANLNKTIIMGPGVQGKVSIRTMTPLNERQYYQLFLNLLEAQGYAVVPMENDVLKVVKSSAAKVEPLPLVGEGSDNYAGDEMVTKVVPVRNVSVRELAPILRQMIDSAGSGNVVNYDPSNVIMLTGRASVVERLTEVIQRVDHAGNRTEEVIPLDNASASEIARVLESLTKNSGENQPATLKSQIVADERTNSVIVSGDPATRDKMRRLIRRLDSEMERSGNSQVFYLKYSKAEDLVDVLKQVSGTLTAAKEEAEGTVGSGREVVSIAASKHSNALIVTAPQDIMQSLQSVIEQLDIRRAQVHVEALIVEVAEGSNINFGVQWGSKDAGLMQFANGTQIPIGTLGAAISAAKPQKGSTVISENGATTINPDTNGDLSTLAQLLSGFSGTAVGVVKGDWMALVQAVKNDSSSNVLSTPSITTLDNQEAFFMVGQDVPVLTGSTVGSNNSNPFNTVERKKVGIMLKVTPQINEGNAVQMVIEQEVSKVEGQTSLDVVFGERKLKTTVLANDGELIVLGGLMDDQAGESVAKVPLLGDIPLIGNLFKSTADKKEKRNLMVFIRPTILRDGMAADGVSQRKYNYMRAEQIYRDEQGLSLMPHTAQPILPAQNQALPPEVRAFLNAGRTR

SEQ ID NO: 10016 - protein, 432 aa, Escherichia coli; identical to SEQ ID NO: 2026

SEQ ID NO: 10017 - protein, 673 aa, Escherichia coli; identical to SEQ ID NO: 2919

SEQ ID NO: 10018 - protein, 828 aa, Escherichia coli; identical to SEQ ID NO: 2388

SEQ ID NO: 10019 - protein, 614 aa, Escherichia coli; identical to SEQ ID NO: 1888

SEQ ID NO: 10020 - protein, 517 aa, Escherichia coli; identical to SEQ ID NO: 3116

SEQ ID NO: 10021 - protein, 367 aa, Escherichia coli; identical to SEQ ID NO: 2433

SEQ ID NO: 10022 - protein, 700 aa, Escherichia coli
MKIFSVRQTVLPALLALSPVVFAADEQTMIVSAAPQVVSELDTPAAVSVVDGEEMRLATPRINLSESLTSVPGLQVQNRQNYAQDLQLSIRGFGSRSTYGIRGIRLYVDGIPATMPDGQGQTSNIDLSSVQNVEVLRGPFSALYGNASGGVMNVTTQTGQQPPTIEASSYYGSFGSWRYGLKATGATGDGTQPGDVDYTVSTTRFTTHGYRDHSGAQKNLANAKLGVRIDEASKLSLIFNSVDIKADDPGGLTKAEWKANPQQAPRAEQYDTRKTIKQTQAGLRYERRLSSRDDMSVMMYAGERETTQYQSIPMAPQLNPSHAGGVITLQRHYQGIDSRWTHRGELGVPVTFTTGLNYENMSENRKGYNNFRLNSGMPEYGQKGELRRDERNLMWNIDPYLQTQWQLSEKLSLDADVRYSSVWFDSNDHYVTPGNGDDSGDASYHKWLPAGSLKYAMTDAWNIYLAAGRGFETPTINELSYRADGQSGMNLGLKPSTNDTIEIGSKTRIGDGLLSLALFQTDTDDEIVVDSSSGGRTTYKNAGKTRRQGAELAWDQRFAGDFRVNASWTWLDATYRSNVCNEQDCNGNRMPGIARNMGFASIGYVPEDGWYAGTEARYMGDIMADDENTAKAPSYTLVGLFTGYKYNYHNLTVDLFGRVDNLFDKEYVGSVIVNESNGRYYEPSPGRNYGVGMNIAWRFE

SEQ ID NO: 10023 - protein, 446 aa, Escherichia coli [sequence omitted]

SEQ ID NO: 10024 - protein, 246 aa, Escherichia coli; identical to SEQ ID NO: 3021

SEQ ID NO: 10025 - protein, 360 aa, Escherichia coli; identical to SEQ ID NO: 4018

SEQ ID NO: 10026 - protein, 478 aa, Escherichia coli; identical to SEQ ID NO: 2404

SEQ ID NO: 10027 - protein, 360 aa, Escherichia coli; identical to SEQ ID NO: 3354

SEQ ID NO: 10028 - protein, 250 aa, Escherichia coli; identical to SEQ ID NO: 4023

SEQ ID NO: 10029 - protein, 224 aa, Escherichia coli; identical to SEQ ID NO: 4053

SEQ ID NO: 10030 - protein, 111 aa, Escherichia coli; identical to SEQ ID NO: 4073

SEQ ID NO: 10031 - protein, 130 aa, Escherichia coli; identical to SEQ ID NO: 3184

SEQ ID NO: 10032 - protein, 230 aa, Escherichia coli; identical to SEQ ID NO: 2580

SEQ ID NO: 10033 - protein, 654 aa, Escherichia coli; identical to SEQ ID NO: 4042

SEQ ID NO: 10034 - protein, 191 aa, Escherichia coli; identical to SEQ ID NO: 2727

SEQ ID NO: 10035 - protein, 203 aa, Escherichia coli; identical to SEQ ID NO: 2015

SEQ ID NO: 10036 - protein, 729 aa, Escherichia coli; identical to SEQ ID NO: 3979

SEQ ID NO: 10037 - protein, 213 aa, Escherichia coli; identical to SEQ ID NO: 2232

SEQ ID NO: 10038 - protein, 678 aa, Escherichia coli
MVPSTFSRLKAARCLPVVLAALIFAGCGTHTPDQSTDYMQGTAQADSAFYLQQMQQSSDDTRINWQLLAIRALVKEGKTGQAVELFNQLPQELNDAQRREKTLLAVEIKLAQKDFAGAQNLLAKITPADLEQNQQARYWQAKIDASQGRPSIDLLRALIAQEPLLGAKEKQQNIDATWQALSSMTQEQANTLVINADENILQGWLDLQRVWFDNRNDPDMMKAGIADWQKRYPNNPGAKMLPTQLVNVKAFKPASTNKIALLLPLNGQAAVFGRTIQQGFEAAKNIGTQPVAAQIAAAPAADVAEQPQPQTVDGVASPAQASVSDLTGEQPAAQPVPVSAPATSTAAVSAPANPSAELKIYDTSSQPLSQILSQVQQDGASIVVGPLLKNNVEELLKSNTPLNVLALNQPENIENRVNICYFALSPEDEARDAARHIRDQGKQAPLVLIPRSSLGDRVANAFAQEWQKLGGGTVLQQKFGSTSELRAGVNGGSGIALTGSPITLRATTDSGMTTNNPTLQTTPTDDQFTNNGGRVDAVYIVATPGEIAFIKPMIAMRNGSQSGATLYASSRSAQGTAGPDFRLEMEGLQYSEIPMLAGGNLPLMQQALSAVNNDYSLARMYAMGVDAWSLANHFSQMRQVQGFEINGNTGSLTANPDCVINRNLSWLQYQQGQVVPVS

SEQ ID NO: 10039 - protein, 274 aa, Escherichia coli; identical to SEQ ID NO: 2309

SEQ ID NO: 10040 - protein, 362 aa, Escherichia coli; identical to SEQ ID NO: 2434

SEQ ID NO: 10041 - protein, 331 aa, Escherichia coli; identical to SEQ ID NO: 2705

SEQ ID NO: 10042 - protein, 203 aa, Escherichia coli; identical to SEQ ID NO: 2201

SEQ ID NO: 10043 - protein, 239 aa, Escherichia coli; identical to SEQ ID NO: 2759

SEQ ID NO: 10044 - protein, 208 aa, Escherichia coli; identical to SEQ ID NO: 1949

SEQ ID NO: 10045 - protein, 193 aa, Escherichia coli; identical to SEQ ID NO: 2246

SEQ ID NO: 10046 - protein, 510 aa, Escherichia coli; identical to SEQ ID NO: 3982

SEQ ID NO: 10047 - protein, 162 aa, Escherichia coli; identical to SEQ ID NO: 1973

SEQ ID NO: 10048 - protein, 229 aa, Escherichia coli; identical to SEQ ID NO: 3984

SEQ ID NO: 10049 - protein, 193 aa, Escherichia coli; identical to SEQ ID NO: 2250

SEQ ID NO: 10050 - protein, 209 aa, Escherichia coli; identical to SEQ ID NO: 3547

SEQ ID NO: 10051 - protein, 689 aa, Escherichia coli; identical to SEQ ID NO: 5715

SEQ ID NO: 10052 - protein, 243 aa, Escherichia coli; identical to SEQ ID NO: 2898

SEQ ID NO: 10053 - protein, 430 aa, Escherichia coli; identical to SEQ ID NO: 2617

SEQ ID NO: 10054 - protein, 162 aa, Escherichia coli; identical to SEQ ID NO: 5457

SEQ ID NO: 10055 - protein, 200 aa, Escherichia coli; identical to SEQ ID NO: 1788

SEQ ID NO: 10056 - protein, 266 aa, Escherichia coli; identical to SEQ ID NO: 1894

SEQ ID NO: 10057 - protein, 161 aa, Escherichia coli; identical to SEQ ID NO: 2582

SEQ ID NO: 10058 - protein, 351 aa, Escherichia coli; identical to SEQ ID NO: 2872

SEQ ID NO: 10059 - protein, 89 aa, Escherichia coli; identical to SEQ ID NO: 2810

SEQ ID NO: 10060 - protein, 193 aa, Escherichia coli; identical to SEQ ID NO: 2250

SEQ ID NO: 10061 - protein, 860 aa, Escherichia coli
MSGSYVNAWAENEIQFDSRFLELKGDTKIDLKRFSSQGYVEPGKYNLQVQLNKQPLTEEYDIYWYASENDASKTYACLTPELVAQFGLKEDVAKNLQWIHDGKCLKPGQLEGIDIKADLSQSALVISLPQAYLEYTDINWDPPSRWDDGISGLIADYSITAQTRHEENGGDDSNEISGNGTVGVNLGAWRLRADWQTDYLHSKSNDDDVINGDDTQKNWEWSRYYAWRALPSLKAKLGLGEDYLNSDIFDGFNYVGGSISTDDQMLPPNLRGYAPDISDVAHTTAKVTVSQLGRVIYETQVPAGPFRIQDLGDSVSGTLHIRIEEQNGQVQEYDINTASMPFLTRPGQVRYKLMMGRPQEWGHHVEGGFFSSGEASWGIANGWSLYGGALADEHYQSAALGVGRDLSVFGAVAFDITHSHTRLDKETAYGKGSLDGNSFRLSYSKDFDELNSRVTFAGYRFSEENFMTMSEYLDASDSEMVRTGNDKEMYTATYNQNFRDAGVSVYLNYTGHTYWDRDEQTNYNVMLSHYFNLGSIRNMSISMTGYRYEYDNQADKGVYISLSMPWGDSSTISYNGNYGSGSDSSQVGYFSRVDDATHYQLNVGTSDNHSSVDGYYSHDGSLAQVDLSANYHEGQYTSAGISLQGGATLTAQGGALHRTQNMGGTRLLIDADGVAGVPVEGNGAAVYTNMFGKAVVADVNNYYRNQAYIDLNNLPENAEATQSVVQATLTEGAIGYHKFSVISGQKAMAVLRLQDGSYPPFGAEVKNDSAQNVGLVDDDGNVYLAGVKPGEHMIVSWGGVAHCDIHLPDPLPADLFNGLLLPCQQTGAISPSIPHEIKPVIQEQTQQVMPTEAPVSVSAN

SEQ ID NO: 10062 - protein, 331 aa, Escherichia coli; identical to SEQ ID NO: 2705

SEQ ID NO: 10063 - protein, 760 aa, Escherichia coli
MENNRNFPARQFHSLTFFAGLCIGITPVAQALAAEGQTNADDTLVVEASTPSLYALQQSADPKFSRPVADTTRTMTVISEQVIKDQGATNLTDALKNVPGVGAFFAGENGNSTTGDAIYMRGADTSNSIYIDGIRDIGSVSRDTFNTEQVEVIKGPSGTDYGRSAPTGSINMISKQPRNDSGIDASASIGSAWFRRGTLDVNQVIGDTTAVRLNVMGEKTHDAGRDKVKNERYGVAPSIAFGLGTANRLYLNYLHVTQHNTPDGGIPTIGLPGYSAPSAGTATLNHSGKVDTHNFYGTDSDYDDSTTDTATMRFEHDINDNTTIRNTTRWSRVKQDYLMTAIMGGASNITQPTSDVNSWTWSRTANTKDVSNKILTNQTNLTSTFYTASIGHDVSTGVEFTRETQTNYGVNPVTLPAVNIYHPDSSIHPGGLTRNGANANGQTDTFAIYAFDTLQITRDFELNGGIRLDNYHTEYDSATACGGSGRGAITCPAGVAKGSPVTTVDTAKSGNLVNWKAGALYHLTENGNVYINYAVSQQPPGGNNFALAQSGSGNSANRTDFKPQKANTSEIGTKWQVLDKRLLLTAALFRTDIENEVEQNDEGTYSQYGKKRVEGYEISVAGNITPAWQVIGGYTQQKATIKNGKDVAQDGSSSLPYTPEHAFTLWSQYQATDDISVGAGARYIGSMHKGSDGAVGTPAFTEGYWVADAKLGYRVNRNLDFQLNVYNLFDTDYVASINKSGYRYHPGEPRTFLLTANMHF

SEQ ID NO: 10064 - protein, 241 aa, Escherichia coli; identical to SEQ ID NO: 2922

SEQ ID NO: 10065 - protein, 869 aa, Escherichia coli; identical to SEQ ID NO: 9160

SEQ ID NO: 10066 - protein, 237 aa, Escherichia coli; identical to SEQ ID NO: 2816

SEQ ID NO: 10067 - protein, 370 aa, Escherichia coli
MQRAVIPLKGELTVGDDYTAGDFFDSVSFRGVQLASDDNMLPDSLKGFAPVVRGIAKSNAQITIKQNGYTIYQTYVSPGAFEISDIYSTSSSGDLLVEIKEADGSVNSYSVPFSSVPLLQRQGRIKYAVTLAKYRTNSNEQQESKFAQATLQWGGPWGTTWYGGGQYAEYYRAAMFGLGFNLGDFGAISFDVTQAKSTLADQSEHKGQSYRFLYAKTLNQLGTNFQLMGYRYSTSGFYTLSDTMYKHMDGYEFNDGDDEDTPMWSRYYNLFYTKRGKLQVNISQQLSEYGSFYLSGSQQTYWHTDQQDRLLQFGYNTQIKALSLGISWNYSKSRGQPDADQVFALNFSLPLNLLLSRSNDSYTSKKITPG

SEQ ID NO: 10068 - protein, 446 aa, Escherichia coli; identical to SEQ ID NO: 2180

SEQ ID NO: 10069 - protein, 816 aa, Escherichia coli; identical to SEQ ID NO: 4456

SEQ ID NO: 10070 - protein, 227 aa, Escherichia coli; identical to SEQ ID NO: 3570

SEQ ID NO: 10071 - protein, 478 aa, Escherichia coli; identical to SEQ ID NO: 2404

SEQ ID NO: 10072 - protein, 614 aa, Escherichia coli; identical to SEQ ID NO: 4469

SEQ ID NO: 10073 - protein, 430 aa, Escherichia coli; identical to SEQ ID NO: 2617

SEQ ID NO: 10074 - protein, 233 aa, Escherichia coli; identical to SEQ ID NO: 3548

SEQ ID NO: 10075 - protein, 217 aa, Escherichia coli
MRVVAVFTGMLTGVLSVTGLLSAGAYAAGGEGNMSASATETNARVFSLHLGATRVVYNPASSGETLTVINDQDYPMLVQSEVLSEDQKSPAPFVVTPPLFRLDGQQSSRLRIVRTGGEFPSDRESLQWICVKGIPPKEDDRWAEGKDGEKKADKVSLNVQLSVSSCIKLFVRPPAVKGRPDDVAGKVEWQRAGNRLKGVNPTPFYINLSTLTVGVRK

SEQ ID NO: 10076 - protein, 331 aa, Escherichia coli; identical to SEQ ID NO: 2705

SEQ ID NO: 10077 - protein, 627 aa, Escherichia coli; identical to SEQ ID NO: 3529

SEQ ID NO: 10078 - protein, 367 aa, Escherichia coli; identical to SEQ ID NO: 2431

SEQ ID NO: 10079 - protein, 232 aa, Escherichia coli; identical to SEQ ID NO: 2087

SEQ ID NO: 10080 - protein, 407 aa, Escherichia coli
MTERELSIIRALGEEFSTVLADLQRTFEGKMASQAQAFEEKLTSLSAVLQKHVTVDEVRPVLLAMVDDAVGTIPVPRDGRDYDPDVLQQAVNDAVANIPVPADGKSITPDDVRPMLEQMVKEAVSHIPVPRDGRDYDPEVLKQAVNDAVANIPVPADGKSITPDDVRPMLEQMVKEAVSHIPVPRDGRDYDPEVLQKAVNDAVANIPVPADGKSITPDDVRPMLEQMVKEAVSHIPVPRDGRDYDPDVLQKAVLDAVRALPAPQDGRDATALEIIPAIDDQKSFPRGTYATHLGGFWRAYEKTHGMRGWECLVDGVADIDVSMTGERSFTVVVRQSSGQRTEKTFSLPVMLYRGVFRAGETYHPGDTVTWGGSLWHCNSMTGDKPGEAHSSGWTLAAKRGRDAGGGK

SEQ ID NO: 10081 - protein, 651 aa, Escherichia coli; identical to SEQ ID NO: 6992

SEQ ID NO: 10082 - protein, 120 aa, Escherichia coli; identical to SEQ ID NO: 2525

SEQ ID NO: 10083 - protein, 203 aa, Escherichia coli; identical to SEQ ID NO: 2201

SEQ ID NO: 10084 - protein, 274 aa, Escherichia coli; identical to SEQ ID NO: 2891

SEQ ID NO: 10085 - protein, 252 aa, Escherichia coli; identical to SEQ ID NO: 3543

SEQ ID NO: 10086 - protein, 203 aa, Escherichia coli; identical to SEQ ID NO: 2009

SEQ ID NO: 10087 - protein, 361 aa, Escherichia coli; identical to SEQ ID NO: 3601

SEQ ID NO: 10088 - protein, 224 aa, Escherichia coli; identical to SEQ ID NO: 3578

SEQ ID NO: 10089 - protein, 838 aa, Escherichia coli; identical to SEQ ID NO: 2916

SEQ ID NO: 10090 - protein, 229 aa, Escherichia coli; identical to SEQ ID NO: 9220

SEQ ID NO: 10091 - protein, 518 aa, Escherichia coli; identical to SEQ ID NO: 2351

SEQ ID NO: 10092 - protein, 132 aa, Escherichia coli
MDAVLSVQGASAPVRNKSFFSKFTRLKKYFSFRPSRLNMLRLARAVIPAAVLMMFFPQLAMAAGSSGQDLMASGNTTVKATFGKDSSVVKWVVLAEVLVGAVMYMMTKNVKFLAGFAIISVFIAVGMAVVGL

SEQ ID NO: 10093 - protein, 432 aa, Escherichia coli; identical to SEQ ID NO: 2026

SEQ ID NO: 10094 - protein, 432 aa, Escherichia coli; identical to SEQ ID NO: 2026

SEQ ID NO: 10095 - protein, 207 aa, Escherichia coli; identical to SEQ ID NO: 2211

SEQ ID NO: 10096 - protein, 539 aa, Escherichia coli; identical to SEQ ID NO: 3050

SEQ ID NO: 10097 - protein, 514 aa, Escherichia coli; identical to SEQ ID NO: 3590

SEQ ID NO: 10098 - protein, 203 aa, Escherichia coli; identical to SEQ ID NO: 2201

SEQ ID NO: 10099 - protein, 700 aa, Escherichia coli
MKIVFVRQTVLPALLVLSPVVFAADEQTMIVSAAPQVVSELDTPAAVSVVDGEEMRLATPRINLSESLTGVPGLQVQNRQNYAQDLQLSIRGFGSRSTYGIRGIRLYVDGIPATMPDGQGQTSNIDLSSVQNVEVLRGPFSALYGNASGGVMNVTTQTGQQPPTIEASSYYGSFGSWRYGLKATGATGDGTQPGDVDYTVSTTRFTTHGYRDHSGAQKNLANAKLGVRIDDASKLSLIFNSVDIKADDPGGLTKAEWKANPQQAPRAEQYDTRKTIKQTQAGLRYERSLSSRDDMSVMMYAGERETTQYQSIPMAPQLNPSHAGSVITLQRHYQGIDSRWTHRGELGVPVTFTTGLNYENMSENRKGYNNFRLNSGMPEYGQKGELRRDERNLMWNIDPYLQTQWQLSEKLSLDAGVRYSSVWFDSNDHYVTPGNGDDSGDASYHKWLPAGSLKYAMTDAWNIYLAAGRCFETPTINELSYRADGQSGMNFGLKPSTNDTIDIGSKTRIGDGLLSLALFQTDTDDEIVVDSSSGGRTTYKNAGKTRRQGAELAWDQRFAGDFRVNASWTWLDATYRSNVCNEQDCNGNRMPGIARNMGFASIGYVPEDGWYAGMEARYMGDIMADDENTAKAPSYTLVGLFTGYKYNYHNLTVDLFGRVDNLFDKEYVGSVIVNESNGRYYEPAPGRNYGVGVNIAWRFE

SEQ ID NO: 10100 - protein, 366 aa, Escherichia coli; identical to SEQ ID NO: 5499

SEQ ID NO: 10101 - protein, 871 aa, Escherichia coli; identical to SEQ ID NO: 7131

SEQ ID NO: 10102 - protein, 121 aa, Escherichia coli
MNITIIPAMEKDQKNENTLQLAIISRIKMFYRPTNLAMAPEEAPAMLRFRRSGSNLTLINPTPYFITVTNMKAGNSNLPNTMVPPKGEVSVDIPHAATGDISFQTINDYGALTPRIKATMQ

SEQ ID NO: 10103 - protein, 386 aa, Escherichia coli; identical to SEQ ID NO: 3600

SEQ ID NO: 10104 - protein, 108 aa, Escherichia coli; identical to SEQ ID NO: 3602

SEQ ID NO: 10105 - protein, 689 aa, Escherichia coli; identical to SEQ ID NO: 5715

SEQ ID NO: 10106 - protein, 826 aa, Escherichia coli
MLRMTPLASAIVALLLGIEAHAAEETFDTHFMMGGMKGEQVTNLRLDDNQPLPGQYDIDIYVNKQWRGKYEIIVKDNPHETCLTREIVKRLGINSDNFARENQCLTFEQLVQDGSYSWDIGIFRLDLAVPQAWVEELENGYVPPENWERGINAFYTSYYVSQYYSDYKASGNSKSTYVRFNSGLNLLGWQLHSDASFSKTDNNPGEWKSNTLYLEHGFSQILGTLRIGDMYTSADIFDSVRFTGVRLFRDMQMLPNSKQNFTPRVQGIAQSNALVTIEQNGFVVYQKEVPPGPFSISDLQLAGGGADLDVSVKEADGSVTTYLVPYAAVPNMLQPGVSKYDFAAGRSHIEGASKQSDFVQAGYQYGFNNLLTLYGGTMVANNYYAFTLGTGWNTRIGAISVDATKSHSKQDNGDVFDGQSYQIAYNKFLSQTSTRFGLAAWRYSSRDYRTFNDYVWANNKDNYRRDKNDVYDIADYYQNDFGRKNSFSANMSQSLPEGWGSVSLSTLWRDYWGRSGSSKDYQLSYSNNWRRISYTLAASQAYDENHAEEKRFNIFISIPFDWGDDVTTPRRQIYMSNSTTFDDQGFASNNTGLSGTVGNRDQFNYGINLSHQHQGNETTAGANLTWTAPAATVNGSYSQSSTYRQVGASVSGGLVAWSGGVNLANRLSETFAVMHAPGIKDAYVNGQKYRTTNCNGVVVYDGLTPYRENHLMMDVSQSDSETELRGNRKMTAPYRGAVVLVDFDTDQRKPWFIKALRSDGQPLTFGYEVNDMHGHNIGVVGQGSQIFIRTNEIPPAVNVAIDKQQGLSCTITFGKEIDESKNYICR

SEQ ID NO: 10107 - protein, 721 aa, Escherichia coli; identical to SEQ ID NO: 7755

SEQ ID NO: 10108 - protein, 678 aa, Escherichia coli; identical to SEQ ID NO: 9215

SEQ ID NO: 10109 - protein, 386 aa, Escherichia coli
MVDDVPVAQVLQALAEQEKLNLVVSPDVSGTVSLHLTDVPWKQALQTVVKSAGLITRQEGNILSVHSIAWQNDNIARQEAEQARAQANLPLENRNITLQYADAGELAKAGEKLLSAKGSMTVDKRTNRLLLRDNKTALSALEQWVAQMDLPVGQVELSAHIVTINEKSLRELGVKWTLADAQHAGGVGQVTTLGSDLSVATATTHVGFNIGRINGRLLALELSALEQKQQLDIIASPRLLASHLQPASIKQGSEIPYQVSSGESGATSVEFKEAVLGMEVTPTVLQKGRIRLKLHISQNVPGQVLQQADGEVLAIDKQEIETQVEVKSGETLALGGIFTRKNKSGQDSVPLLGDIPWFGQLFRHDGKEDERRELVVFITPRLVSSE

SEQ ID NO: 10110 - protein, 395 aa, Escherichia coli; identical to SEQ ID NO: 5516

SEQ ID NO: 10111 - protein, 857 aa, Escherichia coli; identical to SEQ ID NO: 8889

SEQ ID NO: 10112 - protein, 351 aa, Escherichia coli; identical to SEQ ID NO: 2872

SEQ ID NO: 10113 - protein, 241 aa, Escherichia coli; identical to SEQ ID NO: 2887

SEQ ID NO: 10114 - protein, 208 aa, Escherichia coli; identical to SEQ ID NO: 1949

SEQ ID NO: 10115 - protein, 816 aa, Escherichia coli; identical to SEQ ID NO: 4456

SEQ ID NO: 10116 - protein, 660 aa, Escherichia coli; identical to SEQ ID NO: 4092

SEQ ID NO: 10117 - protein, 367 aa, Escherichia coli; identical to SEQ ID NO: 6155

SEQ ID NO: 10118 - protein, 143 aa, Escherichia coli
MRIVNITPGLPQDRESVYWVNVKAIPSKSDDSENKNVLQIAVRTRIKLFYRPAGLKGDVKTAPNELRFTRNGNQLRVDNPTVFNITFNQFFANDKEIEKAGMVPAKGALNITLPAGVGSVSKIKYNTINDFGSSAEMITKNVD

SEQ ID NO: 10119 - protein, 170 aa, Escherichia coli; identical to SEQ ID NO: 2565

SEQ ID NO: 10120 - protein, 266 aa, Escherichia coli; identical to SEQ ID NO: 9192

SEQ ID NO: 10121 - protein, 869 aa, Escherichia coli; identical to SEQ ID NO: 6956

SEQ ID NO: 10122 - protein, 630 aa, Escherichia coli; identical to SEQ ID NO: 7127

SEQ ID NO: 10123 - protein, 367 aa, Escherichia coli; identical to SEQ ID NO: 2431

SEQ ID NO: 10124 - protein, 816 aa, Escherichia coli; identical to SEQ ID NO: 5436

SEQ ID NO: 10125 - protein, 226 aa, Escherichia coli; identical to SEQ ID NO: 7160

SEQ ID NO: 10126 - protein, 835 aa, Escherichia coli; identical to SEQ ID NO: 2930

SEQ ID NO: 10127 - protein, 747 aa, Escherichia coli; identical to SEQ ID NO: 9180

SEQ ID NO: 10128 - protein, 359 aa, Escherichia coli; identical to SEQ ID NO: 2332

SEQ ID NO: 10129 - protein, 856 aa, Escherichia coli
MAGFFVRLFVACAFAAQAPLSSAELYFNPRFLADDPQAVADLSRFENGQELPPGTYRVDIYLNNGYMATRDVTFNTGDSEQGIVPCLTRAQLASMGLNMASVAGMNLLADDACVPLTTMVQDATAHLDVGQQRLNLTIPQAFMSNRARGYIPPELWDPGINAGLLNYNFSGNSVQNRIGGNSHYAYLNLQSGLNIGAWRLRDNTTWSYNSSDRSSGSKNKWQHINTWLERDIIPLRSRLTLGDGYTQGDIFDGINFRGAQLASDDNMLPDSQRGFAPVIHGIARGTAQVTIKQNGYDIYNSTVPPGPFTINDIYAAGNSGDLQVTIKEADGSTQIFTVPYSSVPLLQREGHTRYSITAGEYRSGNAQQEKPRFFQSTLLHGLPAGWTIYGGTQLADRYRAFNFGIGKNMGALGALSVDMTQANSTLPDDSQHDGQSVRFLYNKSLNESGTNIQLVGYRYSTSGYFNFADTTYSRMNGYNIETQDGVIQVKPKFTDYYNLAYNKRGKLQLTVTQQLGRSSTLYLSGSHQTYWGTSNVDEQFQAGLNTAFEDINWTLSYSLTKNAWQKGRDQMLALNVNIPFSHWLRSDSKSQWRHASASYSMSHDLNGRMTNLVGVYGTLLEDNNLSYSVQTGYAGGGDGNSGSTGYATLNYRGGYGNANIGYSHSDDIKQLYYGVSGGILAHANGVTLGQPLNETVVLVKAPGAKDAKVENQTGVRTDWRGYAVLPYATEYRENRVALDTNTLADNVDLDNAVANVVPTRGAIVRAEFKARVGIKLLMTLTHNNKPLPFGAMVTSESSQSSGIVADNGQVYLSGMPLAGKVQVKWGEEENAHCVANYQLPPESQQQLLTQLSAECR

SEQ ID NO: 10130 - protein, 252 aa, Escherichia coli; identical to SEQ ID NO: 5502

SEQ ID NO: 10131 - protein, 200 aa, Escherichia coli; identical to SEQ ID NO: 1788

SEQ ID NO: 10132 - protein, 614 aa, Escherichia coli; identical to SEQ ID NO: 4469

SEQ ID NO: 10133 - protein, 567 aa, Escherichia coli; identical to SEQ ID NO: 3518

SEQ ID NO: 10134 - protein, 170 aa, Escherichia coli; identical to SEQ ID NO: 2565

SEQ ID NO: 10135 - protein, 539 aa, Escherichia coli; identical to SEQ ID NO: 3050

SEQ ID NO: 10136 - protein, 446 aa, Escherichia coli; identical to SEQ ID NO: 2180

SEQ ID NO: 10137 - protein, 243 aa, Escherichia coli; identical to SEQ ID NO: 4409

SEQ ID NO: 10138 - protein, 241 aa, Escherichia coli; identical to SEQ ID NO: 3582

SEQ ID NO: 10139 - protein, 161 aa, Escherichia coli; identical to SEQ ID NO: 2582

SEQ ID NO: 10140 - protein, 230 aa, Escherichia coli; identical to SEQ ID NO: 2995

SEQ ID NO: 10141 - protein, 232 aa, Escherichia coli; identical to SEQ ID NO: 9194

SEQ ID NO: 10142 - protein, 162 aa, Escherichia coli; identical to SEQ ID NO: 1969

SEQ ID NO: 10143 - protein, 118 aa, Escherichia coli [sequence omitted]

SEQ ID NO: 10144 - protein, 130 aa, Escherichia coli; identical to SEQ ID NO: 3184

SEQ ID NO: 10145 - protein, 860 aa, Escherichia coli; identical to SEQ ID NO: 2958

SEQ ID NO: 10146 - protein, 678 aa, Escherichia coli; identical to SEQ ID NO: 2902

SEQ ID NO: 10147 - protein, 567 aa, Escherichia coli; identical to SEQ ID NO: 3518

SEQ ID NO: 10148 - protein, 700 aa, Escherichia coli; identical to SEQ ID NO: 2926

SEQ ID NO: 10149 - protein, 241 aa, Escherichia coli; identical to SEQ ID NO: 5479

SEQ ID NO: 10150 - protein, 729 aa, Escherichia coli; identical to SEQ ID NO: 2948

SEQ ID NO: 10151 - protein, 229 aa, Escherichia coli; identical to SEQ ID NO: 3589

SEQ ID NO: 10152 - protein, 729 aa, Escherichia coli; identical to SEQ ID NO: 2948

SEQ ID NO: 10153 - protein, 998 aa, Escherichia coli; identical to SEQ ID NO: 2918

SEQ ID NO: 10154 - protein, 199 aa, Escherichia coli
MIYDASRKEAALPVANKGTETPYLLQSWVDNIDGTSRAPFIITPPLIRLEAGDDSSLRIIKTADNLPENKESLFYINVRAIPAKKKSDDVNANELTLVFKTRIKMFYRPAHLKGRVSDAWKSLEFKRSDHSLNIYNPTEYYVVFAGLAVDKADLTSKIEYIAPGEHKQLPLPASGGKNVKWAAINDYGGSSGTETRPLQ

SEQ ID NO: 10155 - protein, 237 aa, Escherichia coli; identical to SEQ ID NO: 2816

SEQ ID NO: 10156 - protein, 656 aa, Escherichia coli; identical to SEQ ID NO: 6440

SEQ ID NO: 10157 - protein, 673 aa, Escherichia coli
MKMTRLYPLALGGLLLPAIANAQTSQQDESTLVVTASKQSSRSASANNVSSTVVSAPELSDAGVTASDKLPRVLPGLNIENSGNMLFSTISLRGVSSAQDFYNPAVTLYVDGVPQLSTNTIQALTDVQSLELLRGPQGTLYGKSAQGGIINIVTQQPDSTPRGYIEGGVSSRDSYRSKFNLSGPIQDGLLYGSVTLLRQVDDGDMINPATGSDDLGGTRASIGNVKLRLAPDDQPWEMGFAASRECTRATQDAYVGWNDIKGRKLSISDGSPDPYMRRCTDSQTLSGKYTTDDWVFNLISAWQQQHYSRTFPSGSLIVNMPQRWNQDVQELRAATLGDARTVDMVFGLYRQNTREKLNSAYDMPTMPYLSSTGYTTAETLAAYSDLTWHLTDRFDIGGGVRFSHDKSSTQYHGSMLGNPFGDQGKSNDDQVLGQLSAGYMLTDDWRVYTRVAQGYKPSGYNIVPTAGLDAKPFVAEKSINYELGTRYETADVTLQAATFYTHTKDMQLYSGPVGMQTLSNAGKADATGVELEAKWRFAPGWSWDINGNVIRSEFTNDSELYHGNRVPFVPRYGAGSSVNGVIDTRYGALMPRLAVNLVGPHYFDGDNQLRQGTYATLDSSLSWQATERMNISVYVDNLFDRRYRTYGYMNGSSAVAQVNMGRTVGINTRIDFF

SEQ ID NO: 10158 - protein, 637 aa, Escherichia coli; identical to SEQ ID NO: 6148

SEQ ID NO: 10159 - protein, 856 aa, Escherichia coli
MAGFFVRLFVACAFAVQAPLSSAELYFNPRFLADDPQAVADLSRFENGQELPPGTYRVDIYLNNGYMATRDVTFNTGDSEQGIVPCLTRAQLASMGLNTASVAGMNLLADDACVPLTTMVQDATAHLDVGQQRLNLTIPQAFMSNRARGYIPPELWDPGINAGLLNYNFSGNSVQNRIGGNSHYAYLNLQSGLNIGAWRLRDNTTWSYNSSDRSSGSKNKWQHINTWLERDIIPLRSRLTLGDGYTQGDIFDGINFRGAQLASDDNMLPDSQRGFAPVIHGIARGTAQVTIKQNGYDIYNSTVPPGPFTINDIYAAGNSGDLQVTIKEADGSTQIFTVPYSSVPLLQREGHTRYSITAGEYRSGNAQQEKPRFFQSTLLHGLPAGWTIYGGTQLADRYRAFNFGIGKNMGALGALSVDMTQANSTLPDDSQHDGQSVRFLYNKSLNESGTNIQLVGYRYSTSGYFNFADTTYSRMNGYNIETQDGVIQVKPKFTDYYNLAYNKRGKLQLTVTQQLGRSSTLYLSGSHQTYWGTSNVDEQFQAGLNTAFEDINWTLSYSLTKNAWQKGRDQMLALNVNIPFSHWLRSDSKSQWRHASASYSMSHDLNGRMTNLAGVYGTLLEDNNLSYSVQTGYAGGGDGNSGSTGYATLNYRGGYGNANIGYSHSDDIKQLYYGVSGGVLAHANGVTLGQPLNDTVVLVKAPGAKDAKVENQTGVRTDWRGYAVLPYATEYRENRVALDTNTLADNVDLDNAVANVVPTRGAIVRAEFKARVGIKLLMTLTHNNKPLPFGAMVTSESSQSSGIVADNGQVYLSGMPLAGKVQVKWGEEENAHCVANYQLPPESQQQLLTQLSAECR

SEQ ID NO: 10160 - protein, 208 aa, Escherichia coli; identical to SEQ ID NO: 1949

SEQ ID NO: 10161 - protein, 715 aa, Escherichia coli; identical to SEQ ID NO: 3971

SEQ ID NO: 10162 - protein, 191 aa, Escherichia coli; identical to SEQ ID NO: 2727

SEQ ID NO: 10163 - protein, 224 aa, Escherichia coli; identical to SEQ ID NO: 3115

SEQ ID NO: 10164 - protein, 108 aa, Escherichia coli; identical to SEQ ID NO: 3602

SEQ ID NO: 10165 - protein, 784 aa, Escherichia coli
MNKSVVSISAAMLVLLCQPVMGSEISPATPSDEDNYTFDPQLFRGSRFSQSSLAKLTTRESVAPGNYKMDIYTNNKLSGSWNVTFKEAADGRVLPCLTPEVADAIGLKTGEDKGEKDPVCTFAKELAPGITSQTQLSQLRLDLSVPQSQLISRPRGYVPPSELDTGASLAFMNYIANYYNVAYSGQNAHSQRSLWASFNGGINLGAWQYRQLSNMTWDNDKGNQWNNIRSYLQRPLPAINSQLMMGQLITSGRFFSGLSYHGVSLATDERMLPDSMRGYAPTIRGVAATNARVSVMQNGHEIYQTTVAPGPFEINDLYPTSYSGDLDVTVTEANGAVSRFSVPFSAVPESMRPGTSRYNVEVGKTQDSGDDSMFGDLTWQHGMTNTLTFNSGSRIADGYQALMLGGVYGSSLGAFGANLTWSHARVPESEAQSGWMSQLTWSKTFQPTSTTVSLAGYRYSTSGYRDLADVLGERHAASNKQSWDSSQWRQQSRFDLTLSQSLANYGNLFVSGSTQNYRGGKSRDTQLQLGYSNSFSHGISMNLSVGRQRMGGYKDNSDDMQTVTSLSFSFPLGGNGPRVPSLSNSWTHSTDGSSQLQSSLTGMLDEAQTTNYSLNVMRDQQYKQTTLSGNMQKRFSQTIVGLNASKGQDYWQASGNVQGAMAVHGGGITFGPYLGETFALVEAKGAEGAKVYNSSQLEINDSGYALVPAVTPYRYNRISLDPQGMDGDAELVDSERQVAPVAGAAVKVIFRTRPGKALLIKSRMADGSELPMGADVLDENRSLT

SEQ ID NO: 10166 - protein, 231 aa, Escherichia coli; identical to SEQ ID NO: 2868

SEQ ID NO: 10167 - protein, 274 aa, Escherichia coli; identical to SEQ ID NO: 2891

SEQ ID NO: 10168 - protein, 747 aa, Escherichia coli; identical to SEQ ID NO: 2954

SEQ ID NO: 10169 - protein, 746 aa, Escherichia coli; identical to SEQ ID NO: 2949

SEQ ID NO: 10170 - protein, 368 aa, Escherichia coli; identical to SEQ ID NO: 2370

SEQ ID NO: 10171 - protein, 840 aa, Escherichia coli; identical to SEQ ID NO: 9107

SEQ ID NO: 10172 - protein, 656 aa, Escherichia coli
MRLKKHYLCTALSLAFTQQAVAAQESDSLTVWSSPVSSTTTTVLDQPTMKALDKQNVAQALSVVPGVVLQKSGSRNEEQVKVRGFDSRQVPVYFDGVPIYVPYDGNLDLARILTNNLGAVEVSKGYSSLLQGPNQMDGAINITTQKPTKPLEASLGYRQGWSRSQDNAYDMHASFAASSELGYLQVSGSQLKQDFLGLPHGVNNDIAGKHGKMINSSADDKRGIVKLGFTPRENDEYTLTYIKQDGEKDNPPYSGNSGQKSRYWQWPEYDKESFYYQGTTQLNDRFTLKSRLYRDTFENTLMMYNSLADLKNKKGSYSHYSDYSDGAGLQLAADVRENDLLSFAVNWKDDVHREKGAPHAAYDRYEDRTWSLASEYQWAAADNVDVVAGISYDWRDSVEAKKHEKDGSITHYDDNNQSAFNWQVMGKYHFVNEDTLALSYYDRKRFPTLKERYTTSKPAYNQIAIVNPQLKPERARGVDLTWNGAFTHDWGFEVSVYYNRVSDAILSHNIDADTIQNQNSGTVDYSGLDAGIKGKISNILDVGLSYALIHADAKRKDIGKITDLPTQTMTAWMTLKPWEPLSVTLSEEARSSSYSNSDGSQKAAGFAVTHIRADYTLGHGFSVNASVNNLFDTQYAYSEGFIEEGRNFWAGVEYTF

SEQ ID NO: 10173 - protein, 62 aa, Escherichia coli
MASGNTTVKATFGKDSSVVKWVVLAEVLVGAVMYMMTKNVKFLAGFAIISVFIAVGMAVVGL

SEQ ID NO: 10174 - protein, 760 aa, Escherichia coli; identical to SEQ ID NO: 2078

SEQ ID NO: 10175 - protein, 233 aa, Escherichia coli; identical to SEQ ID NO: 3548

SEQ ID NO: 10176 - protein, 111 aa, Escherichia coli; identical to SEQ ID NO: 2911

SEQ ID NO: 10177 - protein, 159 aa, Escherichia coli
MMTKIKLLMLIIFYLIISASVHAAGGIALGATRIIYPADAKQTAVWIRNSHTNERFLVNSWIENSSGVKEKSFIITPPLFVSEPKSENTLRIIYTGPPLAADRESLFWMNVKTIPSVDKNALNGRNVLQLAILSLMKLFLRPIQLQELPAEAPDTLKFS

SEQ ID NO: 10178 - protein, 518 aa, Escherichia coli
MKKLKINYLFIGILALLLAVALWPSIPWFGKADNRIAAIQARGELRVSTIHTPLTYNEINGKPFGLDYELAKQFADYLGVKLKVTVRQNISQLFDDLDNGNADLLAAGLVYNSERVKNYQPGPTYYSVSQQLVYKVGQYRPRTLGNLTAEQLTVAPGHVVVNDLQTLKETKFPELSWKVDDKKGSAELMEDVIEGKLDYTIADSVAISLFQRVHPKLAVALDITDEQPVTWFSPLDGDNTLSAALLDFFNEMNEDGTLARIEEKYLGHGDDFDYVDTRTFLRAVDAVLPQLKPLFEKYAEEIDWRLLAAIAYQESHWDAQATSPTGVRGMMMLTKNTAQSLGITDRTDAEQSISGGVRYLQDMMSKVPESVPENERIWFALAAYNMGYAHMLDARALTAKTKGNPDSWADVKQRLPLLSQKPYYSKLTYGYARGHEAYAYVENIRKYQISLVGYLQEKEKQATEAAMQLAQDYPAVSPTELGKEKFPFLSFLSQSSSNYLTHSPSLLFSRKGSEEKQN

SEQ ID NO: 10179 - protein, 203 aa, Escherichia coli; identical to SEQ ID NO: 2009

SEQ ID NO: 10180 - protein, 669 aa, Escherichia coli; identical to SEQ ID NO: 3677

SEQ ID NO: 10181 - protein, 236 aa, Escherichia coli; identical to SEQ ID NO: 3970

SEQ ID NO: 10182 - protein, 732 aa, Escherichia coli
MMRKKYMPRALGPLLLVVLSPAVAQQNDDNEIIVSASRSNRTVAEMAQTIWVIENAELEQQIQGGKELKDALAQLIPGLDVSSQSRTNYGMNMRGRPLVVLIDGVRLNSSRSDSRQLDSVDPFNIDHIEVISGATALYGGGSTGGLINIVTKKGQPETMMEFEAGTKSGFNSSKDHDERIAGAVSGGNDHISGRLSVAYQKFGGWFDGNGDATLLDNTQTGLQHSNRLDIMGTGTLNIDESRQLQLITQYYKSQGDDNYGLNLGKGFSAISGSSTPYVSKGLNSDRIPGTERHLISLQYSDSDFLRQELVGQVYYRDESLRFYPFPTVNANKQATAFSSSQQDTDQYGMKLTLNSQLMDGWQITWGLDAEHERFTSNQMFFDLAQASASGGLNNHKIYTTGRYPSYDITNLAAFLQSSYDINDIFTVSGGVRYQYTENRVDDFIDYTQQQKIAAGKAISADAIPGGSVDYDNFLFNAGLLMHITERQQAWFNFSQGVALPDPGKYYGRGIYGAAVNGHLPLTKSVNVSDSKLEGVKVDSYELGWRFTGDNLRTQIAAYYSLSNKSVERNKDLTISVKDDRRRIYGVEGAVDYLIPDTDWSTGVNFNVLKTESKVNGQWQKYDVKESSPSKATAYISWAPEPWSLRVQSTTSFDVSDAEGNDINGYTTVDFISSWLLPVGTLSFSVENLFDRDYTTVWGQRAPLYYSPGYGPASLYDYKGRGRTFGLNYSVLF

SEQ ID NO: 10183 - protein, 361 aa, Escherichia coli; identical to SEQ ID NO: 3601

SEQ ID NO: 10184 - protein, 227 aa, Escherichia coli; identical to SEQ ID NO: 3570

SEQ ID NO: 10185 - protein, 397 aa, Escherichia coli; identical to SEQ ID NO: 9207

SEQ ID NO: 10186 - protein, 816 aa, Escherichia coli
MNIYRLSVLSCLAMVTPPALTAEFNLNVLDKSIRDSVDISLLNQKGVVAPGDYFVSVTVNNNKISNGQQIRWQKSGDKIIPCINESLIELFGLKSDFRKKLPAIKECVDFSVFPEIIFTFDQANQQLNITIPQAWLAWHSENWTPPSTWNNGIPGFLMDYNLFASTYRPQSGSSSNNLNAYGTTGLNAGAWRLRSDYQLSQSDSGDNREQSGAISRTYLFRPLPQIGSRLTLGETDFSSNIFDGFSYTGAALASDDRMLPWELRGYAPQISGIAQTNATVTISHSGRVIYQKKVPPGPFIIDDLNQSVQGTLDVKVSEEDGRVNNFQVSAASTPFLTRQGQVRYKLAAGRPRSSMSHHTEDETFISHEVSWGMLSNTSPYGGMLLAGDDYRSGALGIGQNMLWMGALSFDVTWADSHFDTQQDEQGYSYRFNYSKQVDATNSTISLAAYRFSDRHFHSYANYIDHKYNDADAQDEKQTISLSFGQPITLLNLNLYANILHQSWWNADTSTTANITVGFNVDIGDWKDISVSTSFNTTHYEDKDRDNQIYFSISLPIGESGRLGYDMQNNSNTTTHRMSWNDTLDERNSWGMSAGIQSDRPDNGAQVSGNYQHLSSAGEWDLTGTYAANDYTSASASWSGSFTATQHGAAFHRRSSTNEPRLMVSTDGVGDIPIQGNIDYTNRFGIAVVPFVSSYQPTTVAVNMNDLPDGVTVSENVVKETWTEGAIGFKSLASRAGKDLNVIISDANGHFPPLGADVRQAEGGVSVGMVGENGHAWLSGVDENQQFTVHWGDQKTCAIHLPEHLEDVTKRLILPCH

SEQ ID NO: 10187 - protein, 243 aa, Escherichia coli; identical to SEQ ID NO: 4409

SEQ ID NO: 10188 - protein, 224 aa, Escherichia coli
MTVSLTAILLSCSSTWAAGKGGVGLAATRLVYSEGEEQISLGVRNTSPDVPYLIQSWVMTPDNKKSADFIITPPLFVLNPANENLLRIMYIGAPLAKDRETIFFTSVRAVPSTTKREEGNTLKIATQSVIKLFWRPKGLAYPLGEAPAKLRCTSSADMVTVSNPTPYFITLTDLKIGGKLVKNQMISPFDKYQFSLPKGAKNSSVTYRTINDYGAETPQLNCKS

SEQ ID NO: 10189 - protein, 512 aa, Escherichia coli; identical to SEQ ID NO: 2813

SEQ ID NO: 10190 - protein, 111 aa, Escherichia coli; identical to SEQ ID NO: 2911

SEQ ID NO: 10191 - protein, 746 aa, Escherichia coli; identical to SEQ ID NO: 2949

SEQ ID NO: 10192 - protein, 366 aa, Escherichia coli; identical to SEQ ID NO: 3520

SEQ ID NO: 10193 - protein, 209 aa, Escherichia coli
MKGLLSLLISSMIFPVHAGMVIFGTRIIYPAEQKEVMVQLMNQGNRSSLMQAWIDDGDTSLPPEKIQVPFMLTPPVVKVAANSGQQIKIKIMPNKLPSNKESIFYLNVLDIPPNSPEDEGKNALKFAMQNRIKLFYRPAGIAPVNKTTFKKLRVSRSGNNVVIKNDSPNWVTISDVKANNVKVNYETIMIAPQESQNVCVKIIMRMAGN

SEQ ID NO: 10194 - protein, 87 aa, Escherichia coli; identical to SEQ ID NO: 6957

SEQ ID NO: 10195 - protein, 368 aa, Escherichia coli
MNKTITALAIMMASFAANASVLPETPVPFKSGTGAIDNDTVYIGLGSAGTAWYKLDTQAKDKKWTALAAFPGGPRDQATSAFIDGDLYLFGGIGKNSKGLTQVFNDVHKYNPKTNSWVKLMSHAPMGMAGHVTFVHNGKAYVTGGVNQNIFNGYFEDLNEAGKDSTAIDKINAHYFDKKAEDYFFNKFLLSFDPSTQQWSYAGESPWYGTAGAAVVNKGDKTWLINGEAKPGLRTDAVFELDFTGDNLKWNRLAPVSSPDGVAGGFAGISNDSLIFAGGAGFKGSRENYQNGKNYAHEGLKKSYSTDIHLWHNGKWDKSGELSQGRAYGVSLPWNNSLLIIGGESAGGKAVTDSVLISVKDNKVTVQN

SEQ ID NO: 10196 - protein, 774 aa, Escherichia coli; identical to SEQ ID NO: 4771

SEQ ID NO: 10197 - protein, 191 aa, Escherichia coli; identical to SEQ ID NO: 2727

SEQ ID NO: 10198 - protein, 213 aa, Escherichia coli; identical to SEQ ID NO: 2232

SEQ ID NO: 10199 - protein, 207 aa, Escherichia coli; identical to SEQ ID NO: 2211

SEQ ID NO: 10200 - protein, 660 aa, Escherichia coli; identical to SEQ ID NO: 4092

SEQ ID NO: 10201 - protein, 213 aa, Escherichia coli; identical to SEQ ID NO: 2232

SEQ ID NO: 10202 - protein, 359 aa, Escherichia coli; identical to SEQ ID NO: 2332

SEQ ID NO: 10203 - protein, 883 aa, Escherichia coli; identical to SEQ ID NO: 7801

SEQ ID NO: 10204 - protein, 813 aa, Escherichia coli; identical to SEQ ID NO: 7870

SEQ ID NO: 10205 - protein, 851 aa, Escherichia coli; identical to SEQ ID NO: 3458

SEQ ID NO: 10206 - protein, 219 aa, Escherichia coli; identical to SEQ ID NO: 3328

SEQ ID NO: 10207 - protein, 825 aa, Escherichia coli
MGQNASNIDLSRYSEGNPAIPDMYDVSVYVNDQPIINQSITFIEIEGKKNAQACITLKNLLQFHINSPDINNEKAVLLARDETLGNCLNLTEIIPQASVRYDVNEQRLDIDVPQAWVMKNYQNYVDPSLWENGINAAMLSYNLNGYHSETPGRRNDSIYAAFNGGMNLGAWRLRASGNYNWMTDSGSNYDFKNRYIQRDIASLRSQLILGESYTTGETFDSVSIRGIRLYSDSRMLPPTLASFAPIIHGVANTNAKVTITQGGYKIYETTVPPGAFVIDDLSPSGYGSDLIVTVEESDGSKRTFSQPFSSVVQMLRPGVGRWDISGGQVLKDDIQDETNLFQASYYYGLNNYLTGYTGIQITDNNYTAGLLGLGLNTSVGAFSFDVTHSNVRIPDDKTYQGQSYRVSWNKLFEETSTSLNIAAYRYSTQNYLGLNDALTLIDEVKHPEQDLEPKSMRNYSRMKNQVTVSINQPLKFEKKDYGSFYLSGSWSDYWASGQNRSNYSIGYSNSASWGSYSVSAQRSWNEDGDTDDSVYLSFTIPIEKLLGTEQRTSGFQSIDTQMSSDFKGNNQLNVSSSGYSDNARVSYSVNTGYTMNKASKDLSYVGGYASYESPWGTLAGSVSANSDNSRQVSLSTDGGFVLHSGGLTFSNDSFSDSDTLAVVQAPGAQGARINYGNSTIDRWGYGVTSALSPYHENRIALDINDLENDVELKSTSAVAVPRQGSVVFADFETVQGQSAIMNITRSDGKNIPFAADIYDEQGNVIGNVGQGGQAFVRGIEQQGNISIKWLEESKPVSCLAHYQQSSEAEKIAQSIILNGIRCQIQ

SEQ ID NO: 10208 - protein, 834 aa, Escherichia coli; identical to SEQ ID NO: 9444

SEQ ID NO: 10209 - protein, 831 aa, Escherichia coli; identical to SEQ ID NO: 7867

SEQ ID NO: 10210 - protein, 207 aa, Escherichia coli; identical to SEQ ID NO: 2211

SEQ ID NO: 10211 - protein, 368 aa, Escherichia coli
MNKTITALAIMMASFAANASVLPETPVPFKSGTGAIDNDTVYIGLGSAGTAWYKLDTQAKDKKWTALAAFPGGPRDQATSAFIDGNLYVFGGIGKNSEGLTQVFNDVHKYNPKTNSWVKLMSHAPMGMAGHVTFVHNGKAYVTGGVNQNIFNGYFEDLNEAGKDSTAVDKINAHYFDKKAEDYFFNKFLLSFDPSTQQWSYAGESPWYGTAGAAVVNKGDKTWLINGEAKPGLRTDAVFELDFTGNNLKWNKLASVSSPDGVAGGFAGISNDSLIFAGGAGFKGSRENYQNGKNYAHEGLKKSYSTDIHLWHNGKWDKSGELSQGRAYGVSLPWNNSLLIIGGETAGGKAVTDSVLISVKDNKVTVQN

SEQ ID NO: 10212 - protein, 266 aa, Escherichia coli; identical to SEQ ID NO: 1894

SEQ ID NO: 10213 - protein, 816 aa, Escherichia coli
MLRTTRWVAAIIFLYSFPGYAEETFDTHFMIGGMRGEKVSEYRFDNKQPLPGNYELDVYVNHQWRGKQDITIPESPAKPCLPKVLLTTLGVKTDNLNTEDNCILLDEAVHGGQYQWDISEHRLNLTIPQAYINELERGYVPPESWDRGIDAFYTSYNLSQYRSYDSNNNSNTASYGRFNSGLNLFSWQLHSDASYSKPDDMKGTWQSNTLYLERGWSQILSTVQIGENYTSSLIFDSLRFSGIRLFRDMQMLPDSMQSFTPLVQGVAQSNALITVSQNGYIIYQKEVPPGPFTIADLQLSGSGADLDVSIKEADGSVRSFLVPYSSVPNMLQPGVSNFDFIAGRSKIYGVKNQEDFLEANYIYGLNNLLTLYGGTILSDNYNAITLGNGWNTPLGAISFDATRSSSKLNNDITHEGTSYQVAYNKYLVQTATRFSVAAWRYASQDYRTFSDHLYENDKHNHQSEYDDFYDIGRKNSLSANIMQPLSNNLGNVSLSALWRNYWGRSGNAKDYQFSYSNSWQRISYTFSASQSYDENDKEEERFNLFISIPFYWGDDITKTRHQINLSNSTSFSKDGYSSNNTGVTGIAGEHDQLNYGIYVNQQQQNNDTSLGTNLSWRTPIAIIDGSYSHSKNTWQSGGSISSGLVVWPGGINITNQLSDTFAILDAPGLEGAHINGQKYNRSNSKGQVVYDLMIPHRENHLVLDIANSESETELQGNRQIIAPYRGAVSYVQFTTDQRKPWYIQALRPDGSPLTFGYDVLDLQENNIGVVGQGSRLFIRVDEIPTGIKVALNDEQNLFCTITFQHVIDENKTYICQ

SEQ ID NO: 10214 - protein, 790 aa, Escherichia coli
MATRDVTFNTGDSEQGIVPCLTRAQLASMGLNTASVAGMNLLADDACVPLTTMVQDATAHLDVGQQRLNLTIPQAFMSNRARGYIPPELWDPGINAGLLNYNFSGNSVQNRIGGNSHYAYLNLQSGLNIGAWRLRDNTTWSYNSSDRSSGSKNKWQHINTWLERDIIPLRSRLTLGDGYTQGDIFDGINFRGAQLASDDNMLPDSQRGFAPVIHGIARGTAQVTIKQNGYDIYNSTVPPGPFTINDIYAAGNSGDLQVTIKEADGSTQIFTVPYSSVPLLQREGHTRYSITAGEYRSGNAQQEKPRFFQSTLLHGLPAGWTIYGGTQLADRYRAFNFGIGKNMGALGALSVDMTQANSTLPDDSQHDGQSVRFLYNKSLNESGTNIQLVGYRYSTSGYFNFADTTYSRMNGYNIETQDGVIQVKPKFTDYYNLAYNKRGKLQLTVTQQLGRTSTLYLSGSHQTYWGTSNVDEQFQAGLNTAFEDINWTLSYSLTKNAWQKGRDQMLALNVNIPFSHWLRSDSKSQWRHASASYSMSHDLNGRMTNLAGVYGTLLEDNNLSYSVQTGYAGGGDGNSGSTGYATLNYRGGYGNANIGYSHSDDIKQLYYGVSGGVLAHANGVTLGQPLNETVVLVKAPGAKDAKVENQTGVRTDWRGYAVLPYATEYRENRVALDTNTLADNVDLDNAVANVVPTRGAIVRAEFKARVGIKLLMTLTHNNKPLPFGAMVTSESSQSSGIVADNGQVYLSGMPLAGKVQVKWGEEENAHCVANYQLPPESQQQLLTQLSAECR

SEQ ID NO: 10215 - protein, 751 aa, Escherichia coli
MDLWRNDEFIGSQDIVFESTTENTGDKSGGLMPCFNQVLLERIGLNSSAFPELAQQQNNKCINLLKAVPDATINFDFAAMRLNITIPQIALLSSAHGYIPPEEWDEGIPALLLNYNFTGNRGNGNDSYFFSELSGINIGPWRLRNNGSWNYFRGNGYHSEQWNNIGTWVQRAIIPLKSELVMGDGNTGSDIFDGVGFRGIRLYSSDNMYPDSQQGFAPTVRGIARTAAQLTIRQNGFIIYQSYVSPGAFEITDLHPTSSNGDLDVTIDERDGNQQNYTIPYSTVPILQREGRFKFDLTAGDFRSGNSQQSSPFFFQGTALGGLPQEFTAYGGTQLSANYTAFLLGLGRNLGNWGAVSLDVTHARSQLADDSRHEGDSIRFLYAKSMNTFGTNFQLMGYRYSTQGFYTLDDVAYRRMEGYEYDYDYDGEHRDEPIIVNYHNLRFSRKDRLQLNISQSLNDFGSLYISGTHQKYWNTSDSDTWYQVGYTSSWVGISYSLSFSWNESVGIPDNERIVGLNVSVPFNVLTKRRYTRENALDRAYASFNANRNSNGQNSWLAGVGGTLLEGHNLSYHVSQGDTSNNGYTGSATANWQAAYATLGVGYNYDRDQHDVNWQLSGGVVGHENGITLSQPLGDTNVLIKAPGAGGVRIENQTGILTDWRGYAVMPYATVYRYNRIALDTNTMGNSIDVEKNISSVVPTQGALVRANFDTRIGVRALITVTQGGKPVPFGSLVRENSIGITSMWVMTGKFI

SEQ ID NO: 10216 - protein, 161 aa, Escherichia coli; identical to SEQ ID NO: 2582

SEQ ID NO: 10217 - protein, 819 aa, Escherichia coli
MDTVNIYRLSFVSCLVVAMPCALAVEFNLNVLDKSMRDRIDISLLKEKGVIAPGEYFVSVAVNNNQISNGQKINWHKNDDKTIPCINDLLVDKFGLKPEVRQSLPLINQCVDFSSRPEMLFNFDQANQQLNISIPQAWLAWHSENWTPPSTWKEGVAGILMDYNLFASSYRPQDGSSSTNLNAYGTTGINAGAWRLRSDYQLNQTDSDDNHEQSGGISRTYLFRPLPQLGSKLTLGETDFSSNIFDGFSYTGAALASDERMLPWELRGYAPQISGIAQTNATVTISQSGRVIYQKKVPPGPFIIDDLNQSVQGTLDVKVTEEDGRVNNFQVSAASTPFLTRQGQVRYKLAAGQPRPSMSHQTENETFFSNEVSWGMLSNTSLYGGLLLSGDDYHSAAMGIGQNMLWLGTLSFDVTWASSHFDTQQDERGLSYRFNYSKQVDATNSTISLAAYRFSDRHFHSYANYLDHKYNDSDAQDEKQTISLSVGQPITPLNLNLYANLLHQTWWNADASTTANITAGFNVDIGDWRDISISTSFNTTHYEDKDRDNQIYLSISLPFGNGGRVGYDMQNSSHSTTHRMSWNDTLDERNSWGMSAGLQSDRPDNGAQVSGNYQHLSSAGEWDISGTYAANDYSSVSSSWSGSFTATQYGAAFHRRSSTNEPRLMVSTDGVADIPVQGNLDYTNHFGIAVVPLISSYQPSTVAVNMNDLPDGVTVAENVIKETWIEGAIGYKSLASRSGKDVNVIIRNASGQFPPLGADIRQDGSGISVGMVGEEGHAWLSGVAENQQFTVVWGDSQHCSLHLPEHMEDTANRLILPCH

SEQ ID NO: 10218 - protein, 541 aa, Escherichia coli; identical to SEQ ID NO: 3377

SEQ ID NO: 10219 - protein, 166 aa, Escherichia coli
MTPDNKKSADFIITPPLFVLNPANENLLRIMYIGAPLAKDRETLFFTSVRAVPSTTKREEGNTLKIATQSVIKLFWRPKGLAYPLGEAPAKLRCTSSADMVTVSNPTPYFITLTDLKIGGKVVKNQMISPFDKYQFSLPKGAKNSSVTYRTINDYGAETPQLNCKS

SEQ ID NO: 10220 - protein, 274 aa, Escherichia coli; identical to SEQ ID NO: 2300

SEQ ID NO: 10221 - protein, 250 aa, Escherichia coli; identical to SEQ ID NO: 3048

SEQ ID NO: 10222 - protein, 784 aa, Escherichia coli; identical to SEQ ID NO: 5933

SEQ ID NO: 10223 - protein, 219 aa, Escherichia coli
MSFFILPVHAGVVIYGTRIIYPEKNREVLVQLMNQSKNASLIQAWIDDGNTTIAPEKIQVPFILTPPVSRVAGGSGQQLKIRKMPNNLPHNKESLFYLNVLDIPPNNPQNAGKNKIKLALQNRIKLLWRPSGIAPVDKKSLSQLNIKKKNNAISINNETANWITVTTIKAQNVKVNNESILLPPFSNSDITLKNNNASEYELTVVDDYGNNIHSKIAAR

SEQ ID NO: 10224 - protein, 663 aa, Escherichia coli; identical to SEQ ID NO: 3453

SEQ ID NO: 10225 - protein, 360 aa, Escherichia coli
MMKKYLALALIAPLLISCSTTKKGDTYNEAWVKDTNGFDILMGQFAHNIENIWGFKEVVIAGPKDYVKYTDQYQTRSHINFDDGTITIETIAGTEPAAHLRRAIIKTLLMGDDPSSVDLYSDVDDITISKEPFLYGQVVDNTGQPIRWEGRASNFADYLLKNRLKSRSNGLRIIYSVTINMVPNHLDKRAHKYLGMVRQASRKYGVDESLILAIMQTESSFNPYAVSRSDALGLMQVVQHTAGKDVFRSQGKSGTPSRSFLFDPASNIDTGTAYLAMLNNVYLGGIDNPTSRRYAVITAYNGGAGSGLRGFLNDKIQAANIINTMTPGDVYQTLTTRHPSAESRRYLYKVNTAQKSYRRR

SEQ ID NO: 10226 - protein, 774 aa, Escherichia coli
MTPLRVFRKTTPLVNAIRLSLLPLAGLSFSAFAAQVNIAPGSLDKALNQYAAHSGFTLSVDASLTRGKQSNGLHGDYDVESGLQQLLDGSGLQVKPLGNNSWTLEPAPAPKEDALTVVGDWLGDARENDVFEHAGARDVIRREDFAKTGATTMREVLNRIPGVSAPENNGTGSHDLAMNFGIRGLNPRLASRSTVLMDGIPVPFAPYGQPQLSLAPVSLGNMDAIDVVRGGGAVRYGPQSVGGVVNFVTRAIPQDFGIEAGVEGQLSPTSSQNNPKETHNLMVGGTADNGFGTALLYSGTRGSDWREHSATRIDDLMLKSKYAPDEVHTFNSLLQYYDGEADMPGGLSRADYDANRWQSTRPYDRFWGRRKLASLGYQFQPDSQHKFNIQGFYTQTLRSGYLEQGKRITLSPRNYWVRGIEPRYSQIFMIGPSAHEVGVGYRYVNESTHEMRYYTATSSGQLPSGSSPYDRDTRSGTEAHAWYLDDKIDIGNWTITPGMRFEHIESYQNNAITGTHEEVSYNAPLPALNVLYHLTDSWNLYANTEGSFGTVQYSQIGKAVQSGNVEPEKARTWELGTRYDDGALTAEMGLFLINFNNQYDSNQTNDTVTARGKTRHTGLETQARYDLGTLTPTLDNVSIYASYAYVNAEIREKGDTYGNLVPFSPKHKGTLGVDYKPGNWTFNLNSDFQSSQFADNANTVKESADGSTGRIPGFMLWGARVAYDFGPQMADLNLAFGVKNIFDQDYFIRSYDDNNKGIYAGQPRTLYMQGSLKF

SEQ ID NO: 10227 - protein, 554 aa, Escherichia coli; identical to SEQ ID NO: 7949

SEQ ID NO: 10228 - protein, 231 aa, Escherichia coli; identical to SEQ ID NO: 7920

SEQ ID NO: 10229 - protein, 353 aa, Escherichia coli; identical to SEQ ID NO: 3376

SEQ ID NO: 10230 - protein, 213 aa, Escherichia coli; identical to SEQ ID NO: 3368

SEQ ID NO: 10231 - protein, 386 aa, Escherichia coli; identical to SEQ ID NO: 3072

SEQ ID NO: 10232 - protein, 405 aa, Escherichia coli
MKIIITREYIMKRKVLAMLVPALLVAGAANAAEVYNKDGNKLDLYGKVAGLHYFSDDAGSDGDMSYARIGFKGETQIADQFTGYGQWEYNLQANGTEGDGDNSATRLAFAGLGFGQNGTFDYGRNYGVVYDIEAWTDMLPEFGGDTYAGADNFMNGRTNGVAIYRNNGFFGQVDGLNFALQYQGNNEGSGDGFLFGQEGSGSGDGRKLSKENGDGYGMSTSYNFDFGLSFGAAYSNSDRTDEQTKPDFHNTRAGDRNDITAGGETAEAWTVGAKYDANNVYLAAMYAETRNMTGYGDANAIANKTQNFEVVAQYQFDFGLRPSIAYLQSKGKDLGGWAHDGNGDPRYTNKDLVKYVEVGATYYFNKNMSTYVDYKINLLDNDDDFYEANGIATDDIVAVGLVYQF

SEQ ID NO: 10233 - protein, 230 aa, Escherichia coli
MMTKIKLLMLIIFYLIISASSHAAGGIALGATRIIYPADAKQTAVWIRNSHTNERFLVNSWIENSSGVKEKSFIITPPLFVSEPKSDNTLRIIYTGPPLAADRESLFWMNVKTIPSVDKNALNGRNVLQLAILSRMKLFLRPIQLQELPAEAPDTLKFSRSGNYINVHNPSPFYVTLVNLQVGSQKLGNAMAAPRVSSQIPLPSGVQGKLKFQTVNDYGSVTPVREVNLN

SEQ ID NO: 10234 - protein, 737 aa, Escherichia coli
MARSKTAQPKHSLRKIAVVVATAVSGMSVYAQAAVEPKEDTITVTAAPAPQESAWGPAATIAARQSATGTKTDTPIQKVPQSISVVTAEEMALHQPKSVKEALSYTPGVSVGTRGASNTYDHLIIRGFAAEGQSQNNYLNGLKLQGNFYNDAVIDPYMLERAEIMRGPVSVLYGKSSPGGLLNMVSKRPTTEPLKEVQFKAGTDSLFQTGFDFSDSLDDDGVYSYRLTGLARSANAQQKGSEEQRYAIAPAFTWRPDDKTNFTFLSYFQNEPETGYYGWLPKEGTVEPLPNGKRLPTDFNEGAKNNTYSRNEKMVGYSFDHEFNDTFTVRQNLRFAENKTSQNSVYGYGVCSDPANAYSKQCAALAPADKGHYLARKYVVDDEKLQNFSVDTQLQSKFATGDIDHTLLTGVDFMRMRNDINAWFGYDDSVPLLNLYNPVNTDFDFNAKDPANSGPYRILNKQKQTGVYVQDQAQWDKVLVTLGGRYDWADQESLNRVAGTTDKRDDKQFTWRGGVNYLFDNGVTPYFSYSESFEPSSQVGKDGNIFAPSKGKQYEVGVKYVPEDRPIVVTGAVYNLTKTNNLMADPEGSFFSVEGGEIRARGVEIEAKAALSASVNVVGSYTYTDAEYTTDTTYKGNTPAQVPKHMASLWADYTFFDGPLSGLTLGTGGRYTGSSYGDPANSFKVGSYTVVDALVRYDLARVGMAGSNVALHVNNLFDREYVASCFNTYGCFWGAER

SEQ ID NO: 10235 - protein, 686 aa, Escherichia coli
MFWRDITLSVWRKKTTDLKTKKRLLPLVLAAALCSSPVWAEEATFTANFKDTDLKSFIETVGANLNKTIIMGPGVQGKVSIRTMTPLNERQYYQLFLNLLEAQGYAVVPMENDVLKVVKSSAAKVEPLPLVGEGSDNYAGDEMVTKVVPVRNVSVRELAPILRQMIDSAGSGNVVNYDPSNVIMLTGRASVVERLTEVIQRVDHAGNRTEEVIPLDNASASEIARVLESLTKNSGENQPATLKSQIVADERTNSVIVSGDPATRDKMRRLIRRLDSEMERSGNSQVFYLKYSKAEDLVDVLKQVSGTLTAAKEEAEGTVGSGREVVSIAASKHSNALIVTAPQDIMQSLQSVIEQLDIRRAQVHVEALIVEVAEGSNINFGVQWASKDAGLMQFANGTQIPIGTLGAAISQAKPQKGSTVISENGATTINPDTNGDLSTLAQLLSGFSGTAVGVVKGDWMALVQAVKNDSSSNVLSTPSITTLDNQEAFFMVGQDVPVLTGSTVGSNNSNPFNTVERKKVGIMLKVTPQINEGNAVQMVIEQEVSKVEGQTSLDVVFGERKLKTTVLANDGELIVLGGLMDDQAGESVAKVPLLGDIPLIGNLFKSTADKKEKRNLMVFIRPTILRDGMAADGVSQRKYNYMRAEQIYRDEQGLSLMPHTAQPVLPAQNQALPPEVRAFLNAGRTR

SEQ ID NO: 10236 - protein, 111 aa, Escherichia coli; identical to SEQ ID NO: 3096

SEQ ID NO: 10237 - protein, 224 aa, Escherichia coli; identical to SEQ ID NO: 3431

SEQ ID NO: 10238 - protein, 518 aa, Escherichia coli; identical to SEQ ID NO: 2349

SEQ ID NO: 10239 - protein, 204 aa, Escherichia coli; identical to SEQ ID NO: 2957

SEQ ID NO: 10240 - protein, 252 aa, Escherichia coli; identical to SEQ ID NO: 3400

SEQ ID NO: 10241 - protein, 478 aa, Escherichia coli; identical to SEQ ID NO: 7448

SEQ ID NO: 10242 - protein, 241 aa, Escherichia coli
MSNKNVNVRKSQEITFCLLAGILMFMAMMVAGRAEAGVALGATRVIYPAGQKQVQLAVTNNDENSTYLIQSWVENADGVKDGRFIVTPPLFAMKGKKENTLRILDATNNQLPQDRESLFWMNVKAIPSMDKSKLTENTLQLAIISRIKLYYRPAKLALPPDQAAEKLRFRRSANSLTLINPTPYYLTVTELNAVTRVLENALVPPMGESTVKLPSDAGSNITYRTINDYGALTPKMTGVME

SEQ ID NO: 10243 - protein, 191 aa, Escherichia coli; identical to SEQ ID NO: 2727

SEQ ID NO: 10244 - protein, 122 aa, Escherichia coli; identical to SEQ ID NO: 2915

SEQ ID NO: 10245 - protein, 235 aa, Escherichia coli; identical to SEQ ID NO: 4365

SEQ ID NO: 10246 - protein, 746 aa, Escherichia coli; identical to SEQ ID NO: 3031

SEQ ID NO: 10247 - protein, 432 aa, Escherichia coli; identical to SEQ ID NO: 2026

SEQ ID NO: 10248 - protein, 729 aa, Escherichia coli; identical to SEQ ID NO: 6108

SEQ ID NO: 10249 - protein, 166 aa, Escherichia coli
MNWRISGYRNDVSDLIDYDDHTLKYYNEGKARIKGVEATANFDTGPLTHTVSYDYVDARNAITDTPLLRRAKQQVKYQLDWQLYDFDWGITYQYLGTRYDKDYSSYPYQTVKMGGVSLWDLAVAYPVTSHLTVRGKIANLFDKDYETVYGYQTAGREYTLSGSYTF

SEQ ID NO: 10250 - protein, 236 aa, Escherichia coli; identical to SEQ ID NO: 7940

SEQ ID NO: 10251 - protein, 760 aa, Escherichia coli; identical to SEQ ID NO: 3923

SEQ ID NO: 10252 - protein, 230 aa, Escherichia coli; identical to SEQ ID NO: 3348

SEQ ID NO: 10253 - protein, 245 aa, Escherichia coli; identical to SEQ ID NO: 3410

SEQ ID NO: 10254 - protein, 213 aa, Escherichia coli; identical to SEQ ID NO: 2232

SEQ ID NO: 10255 - protein, 446 aa, Escherichia coli; identical to SEQ ID NO: 2176

SEQ ID NO: 10256 - protein, 431 aa, Escherichia coli; identical to SEQ ID NO: 3408

SEQ ID NO: 10257 - protein, 169 aa, Escherichia coli; identical to SEQ ID NO: 3373

SEQ ID NO: 10258 - protein, 365 aa, Escherichia coli; identical to SEQ ID NO: 3878

SEQ ID NO: 10259 - protein, 362 aa, Escherichia coli; identical to SEQ ID NO: 2434

SEQ ID NO: 10260 - protein, 208 aa, Escherichia coli; identical to SEQ ID NO: 1949

SEQ ID NO: 10261 - protein, 331 aa, Escherichia coli; identical to SEQ ID NO: 2700

SEQ ID NO: 10262 - protein, 575 aa, Escherichia coli
MTVSQMGRVIYETQVPAGPFRIQDLGDSVSGTLHIRIEEQNGQVQEYDISTASMPYLTRPGQVRYKIMMGRPQEWGHHVEGEFFSGAEASWGIANGWSLYGGALGDENYQSAALGVGRDLSTFGAVAFDVTHSHTKLDKDTAYGKGSLDGNSFRVSYSKDFDQLNSRVTFAGYRFSEENFMTMSEYLDASDSGMVRTGNDKEMYTATYNQNFRDAGVSVYLNYTRHTYWDREEQTNYNIMLSHYFNMGSIRNVSISMTGYRYEYDNREDKGMYISLSMPWGDNSTVSYNGNYGSGTDSSQVGYFSRVDDATHYQLNVGTSDKHTSVDGYYSHDGSLAQVDLSANYHEGQYTSAGLSLQGGATLTAHGGALHRTQNMGGTRLLIDADGVADVPVEGNGAAVYTNMFGKAVVSDVNNYYRNQAYIDLNRLPENAEATQSVVQATLTEGAIGYRKFAVISGQKAMAVLRLSDGSHPPFGAEVKNDNEQTVSLVDDDGNVYLAGVKPGEHMSVFWSGVAHCDINLPDPLPADLFNGLLLPCQHKGNVAPVVPDDIKPVIQEQTQQVTPTNPPVSVSANQ

SEQ ID NO: 10263 - protein, 374 aa, Escherichia coli; identical to SEQ ID NO: 2982

SEQ ID NO: 10264 - protein, 517 aa, Escherichia coli; identical to SEQ ID NO: 2462

SEQ ID NO: 10265 - protein, 243 aa, Escherichia coli; identical to SEQ ID NO: 2910

SEQ ID NO: 10266 - protein, 700 aa, Escherichia coli
MKIFSVRQTVLPALLVLSPVVFAADEQTMIVSAAPQVVSELDTPAAVSVVDGEEMRLATPRINLSESLTGVPGLQVQNRQNYAQDLQLSIRGFGSRSTYGIRGIRLYVDGIPATMPDGQGQTSNIDLSSVQNVEVLRGPFSALYGNASGGVMNVTTQTGQQPPTIEASSYYGSFGSWRYGLKATGATGDGTQPGDVDYTVSTTRFTTHGYRDHSGAQKNLANAKLGVRIDEASKLSLIFNSVDIKADDPGGLTKAEWKANPQQAPRAEQYDTRKTIKQTQAGLRYERSLSAQDDMSVMMYAGERETTQYQSIPMAPQLNPSHAGGVITLQRHYQGIDSRWTHRGELGVPVTFTTGLNYENMSENRKGYNNFRLNSGMPEYGQKGELRRDERNLMWNIDPYLQTQWQLSEKLSLDAGVRYSSVWFDSNDHYVTPGNGDDSGDASYHKWLPVGSLKYAMTDAWNIYLAAGRGFETPTINELSYRADGQSGMNFGLKPSTNDTIEIGSKTRIGDGLLSLALFQTDTDDEIVVDSSSGGRTTYKNAGKTRRQGAELAWDQRFAGDFRVNASWTWLDATYRSNVCNEQDCNGNRMPGIARNMGFASIGYVPEDGWYAGTEARYMGDIMADDENTAKAPSYTLVGLFTGYKYNYHNLTVDLFGRVDNLFDKEYVGSVIVNESNGRYYEPSPGRNYGVGMNIAWRFE

SEQ ID NO: 10267 - protein, 517 aa, Escherichia coli; identical to SEQ ID NO: 3116

SEQ ID NO: 10268 - protein, 232 aa, Escherichia coli; identical to SEQ ID NO: 2087

SEQ ID NO: 10269 - protein, 203 aa, Escherichia coli; identical to SEQ ID NO: 2009

SEQ ID NO: 10270 - protein, 359 aa, Escherichia coli; identical to SEQ ID NO: 4362

SEQ ID NO: 10271 - protein, 834 aa, Escherichia coli; identical to SEQ ID NO: 3095

SEQ ID NO: 10272 - protein, 219 aa, Escherichia coli
MCSFCIGQALAGGIVLQRTRVIYDASRKEAALPVANKGAETPYLLQSWVDNIDGTSRAPFIITPPLFRLEAGDDSSLRIIKTADNLPENKESLFYINVRAIPAKKKSDDVNANELTLVFKTRIKMFYRPAHLKGRVNDAWTSLEFKRSDHSLNIYNPTEYYVVFAGLAVDKTDLTSKIEYIAPGEHKQLPLPASGGKNVKWAAINDYGGSSGTETRPLQ

SEQ ID NO: 10273 - protein, 838 aa, Escherichia coli; identical to SEQ ID NO: 4277

SEQ ID NO: 10274 - protein, 690 aa, Escherichia coli
MPALLVLSPVVFAADEQTMIVSAAPQVVSELDTPAAVSVVDGEEMRLATPRINLSESLTGVPGLQVQNRQNYAQDLQLSIRGFGSRSTYGIRGIRLYVDGIPATMPDGQGQTSNIDLSSVQNVEVLRGPFSALYGNASGGVMNVTTQTGQQPPTIEASSYYGSFGSWRYGLKATGATGDGTQPGDVDYTVSTTRFTTHGYRDHSGAQKNLANAKLGVRIDEASKLSLIFNSVDIKADDPGGLTKAEWKANPQQAPRAEQYDTRKTIKQTQAGLRYERSLSAQDDMSVMMYAGERETTQYQSIPMAPQLNPSHAGGVITLQRHYQGIDSRWTHRGELGVPVTFTTGLNYENMSENRKGYNNFRLNSGMPEYGQKGELRRDERNLMWNIDPYLQTQWQLSEKLSLDAGVRYSSVWFDSNDHYVTPGNGDDSGDASYHKWLPAGSLKYAMTDAWNIYLAAGRGFETPTINELSYRADGQSGMNFGLKPSTNDTIEIGSKTRIGDGLLSLALFQTDTDDEIVVDSSSGGRTTYKNAGKTRRQGAELAWDQRFAGDFRVNASWTWLDATYRSNVCNEQDCNGNRMPGIARNMGFASIGYVPEDGWYAGTEARYMGDIMADDENTAKAPSYTLVGLFTGYKYNYHNLTVDLFGRVDNLFDKEYVGSVIVNESNGRYYEPSPGRNYGVGMNIAWRFE

SEQ ID NO: 10275 - protein, 699 aa, Escherichia coli
MSASRSNRTVAEMAQTTWVIENAELEQQIQGGKELKDALAQLIPGLDVSSQSRTNYGMNMRGRPLVVLIDGVRLNSSRSDSRQLDSVDPFNIDHIEVISGATALYGGGSTGGLINIVTKKGQPETMMEFEAGTKSGFNSSKDHDERIAGAVSGGNDHISGRLSVAYQKFGGWFDGNGDATLLDNTQTGLQHSNRLDIMGTGTLNIDESRQLQLITQYYKSQGDDNYGLNLGKGFSAISGSSTPYVSKGLNSDRIPGTERHLISLQYSDSDFLGQELVGQVYYRDESLRYYPFPTVNANKQATAFSSSQQDTDQYGMKLTLNSQLMDGWQITWGLDAEHERFTSNQMFFDLAQASASGGLNNHKIYTTGRYPSYDITNLAAFLQSSYDINDIFTVSGGVRYQYTENRVDDFIDYTQQQKIAAGKAISADAIPGGSVDYENFLFNAGLLMHITERQQAWFNFSQGVALPDPGKYYGRGIYGAAVNGHLPLTKSVNVSDSKLEGVKVDSYELGWRFIGDNLRTQIAAYYSLSNKSVERNKDLTISVKDDRRRIYGVEGAVDYLIPDTDWSTGVNFNVLKTESKVNGQWQKYDVKESSPSKATAYINWAPEPWSLRVQSTTSFDVSDAEGNDINGYTTVDFISSWQLPVGTLSFSVENLFDRDYTTVWGQRAPLYYSSGYGPASLYDYKGRGRTFGLNYSVLF

SEQ ID NO: 10276 - protein, 351 aa, Escherichia coli; identical to SEQ ID NO: 2872

SEQ ID NO: 10277 - protein, 360 aa, Escherichia coli; identical to SEQ ID NO: 3062

SEQ ID NO: 10278 - protein, 395 aa, Escherichia coli; identical to SEQ ID NO: 3220

SEQ ID NO: 10279 - protein, 671 aa, Escherichia coli
MTRLYPLALGGLLLPAIANAQTSQQDESTLVVTASKQSSRSASANNVSSTVVSAPELSDAGVTASDKLPRVLPGLNIENSGNMLFSTISLRGVSSAQDFYNPAVTLYVDGVPQLSTNTIQALTDVQSVELLRGPQGTLYGKSAQGGIINIVTQQPDSTPRGYIEGGVSSRDSYRSKFNLSGPIQDGLLYGSVTLLRQVDDGDMINPATGSDDLGGTRASIGNVKLRLAPDDQPWEMGFAASRECTRATQDAYVGWNDIKGRKLSISDGSPDPYMRRCTDSQTLSGKYTTDDWVFNLISAWQQQHYSRTFPSGSLIVNMPQRWNQDVQELRAATLGDARTVDMVFGLYRQNTREKLNSAYDMPTMPYLSSTGYTTAETLAAYSDLTWHLTDRFDIGGGVRFSHDKSSTQYHGSMLGNPFGDQGKSNDDQVLGQLSAGYMLTDDWRVYTRVAQGYKPSGYNIVPTAGLDAKPFVAEKSINYELGTRYETADVTLQAATFYTHTKDMQLYSGPVGMQTLSNAGKADATGVELEAKWRFAPGWSWDINGNVIRSEFTNDSELYHGNRVPFVPRYGAGSSVNGVIDTRYGALMPRLAVNLVGPHYFDGDNQLRQGTYATLDSSLGWQATERMNISVYVDNLFDRRYRTYGYMNGSSAVAQVNMGRTVGINTRIDFF

SEQ ID NO: 10280 - protein, 237 aa, Escherichia coli; identical to SEQ ID NO: 4356

SEQ ID NO: 10281 - protein, 200 aa, Escherichia coli; identical to SEQ ID NO: 1784

SEQ ID NO: 10282 - protein, 274 aa, Escherichia coli; identical to SEQ ID NO: 2300

SEQ ID NO: 10283 - protein, 863 aa, Escherichia coli; identical to SEQ ID NO: 6401

SEQ ID NO: 10284 - protein, 430 aa, Escherichia coli; identical to SEQ ID NO: 2617

SEQ ID NO: 10285 - protein, 760 aa, Escherichia coli; identical to SEQ ID NO: 3923

SEQ ID NO: 10286 - protein, 250 aa, Escherichia coli; identical to SEQ ID NO: 4332

SEQ ID NO: 10287 - protein, 880 aa, Escherichia coli; identical to SEQ ID NO: 6424

SEQ ID NO: 10288 - protein, 170 aa, Escherichia coli [sequence omitted]

SEQ ID NO: 10289 - protein, 230 aa, Escherichia coli; identical to SEQ ID NO: 3348

SEQ ID NO: 10290 - protein, 224 aa, Escherichia coli; identical to SEQ ID NO: 3165

SEQ ID NO: 10291 - protein, 816 aa, Escherichia coli; identical to SEQ ID NO: 2817

SEQ ID NO: 10292 - protein, 826 aa, Escherichia coli; identical to SEQ ID NO: 4286

SEQ ID NO: 10293 - protein, 445 aa, Escherichia coli; identical to SEQ ID NO: 6625

SEQ ID NO: 10294 - protein, 222 aa, Escherichia coli
MLIIFYLIISASTHAAGGIALGATRIIYPADAQQTAVWIRNSHTNERFLVNSWIENSSGVKEKSFIITPPLFVSEPKSENTLRIIYTGPPLAADRESLFWMNVKTIPSVDKNALNGRNVLQLAILSRMKLFLRPIQLQELPAEAPDTLKFSRSGNYINVHNPSPFYVTLVNLQVGSQKLGNAMAAPRVNSQIPLPSGVQGKLKFQTVNDYGSVTPVREVNLN

SEQ ID NO: 10295 - protein, 869 aa, Escherichia coli; identical to SEQ ID NO: 4351

SEQ ID NO: 10296 - protein, 266 aa, Escherichia coli; identical to SEQ ID NO: 1894

SEQ ID NO: 10297 - protein, 224 aa, Escherichia coli; identical to SEQ ID NO: 4280

SEQ ID NO: 10298 - protein, 784 aa, Escherichia coli; identical to SEQ ID NO: 2244

SEQ ID NO: 10299 - protein, 729 aa, Escherichia coli; identical to SEQ ID NO: 2948

SEQ ID NO: 10300 - protein, 249 aa, Escherichia coli; identical to SEQ ID NO: 3492

SEQ ID NO: 10301 - protein, 198 aa, Escherichia coli; identical to SEQ ID NO: 3645

SEQ ID NO: 10302 - protein, 207 aa, Escherichia coli; identical to SEQ ID NO: 2211

SEQ ID NO: 10303 - protein, 883 aa, Escherichia coli; identical to SEQ ID NO: 5904

SEQ ID NO: 10304 - protein, 208 aa, Escherichia coli; identical to SEQ ID NO: 1949

SEQ ID NO: 10305 - protein, 224 aa, Escherichia coli; identical to SEQ ID NO: 3115

SEQ ID NO: 10306 - protein, 331 aa, Escherichia coli; identical to SEQ ID NO: 2700

SEQ ID NO: 10307 - protein, 191 aa, Escherichia coli; identical to SEQ ID NO: 2727

SEQ ID NO: 10308 - protein, 243 aa, Escherichia coli; identical to SEQ ID NO: 3483

SEQ ID NO: 10309 - protein, 539 aa, Escherichia coli; identical to SEQ ID NO: 3050

SEQ ID NO: 10310 - protein, 866 aa, Escherichia coli; identical to SEQ ID NO: 7592

SEQ ID NO: 10311 - protein, 361 aa, Escherichia coli; identical to SEQ ID NO: 3061

SEQ ID NO: 10312 - protein, 678 aa, Escherichia coli; identical to SEQ ID NO: 3881

SEQ ID NO: 10313 - protein, 423 aa, Escherichia coli
MVVNTVASENPDEAGRYSMDVEHGQYSVTLLVEGFPPSHAGTITVYEDSRPGTLNDFLGAMTEDDARPEALRRFELMVEEVVRNAEEAKKNAGEAETSARNAGISASQAEESAANADTSAGDASESARQAAESAASAKQSEEASSSSASAAAQKASESLQSATDAELSKKTAESAAGNAARDATTATEKARESAESAQSAEQSRIAAEEAVNRIPTVVGPPGPKGEPGPAGPQGPKGDKGERGDTGPAGATGERGPAGDAGPAGPQGPKGDRGETGLTGAAGPAGPQGPKGDTGAAGPAGPQGPKGDTGAAGPAGPQGPKGDAGVAGPAGPQGPSGSPDSGLFGVGSFVLAAYYQTYYSGDRAPGSTVAGSSLSACCLSNGTPLVASGNVGETRLPGTWRACGPMLWTSSPGIRQAGLFQRIS

SEQ ID NO: 10314 - protein, 696 aa, Escherichia coli
MRITTLASVVIPCLGFSASSIAAAEDVMIVSASGYEKKLTNAAASVSVISQEELQSSQYHDLAEALRSVEGVDVESGTGKTGGLEISIRGMPASYTLILIDGVRQGGSSDVTPNGFSAMNTGFMPPLAAIERIEVIRGPMSTLYGSDAMGGVVNIITRKNADKWLSSVNAGLNLQESNKWGNSSQFNFWSSGPLVDDSVSLQVRGSTQQRQGSSVTSLSDTAATRIPYPTESQNYNLGARLDWKASEQDVLWFDMDTTRQRYDNRDGQLGSLTGGYDRTLRYERNKISAGYDHTFTFGTWKSYLNWNETENKGRELVRSVLKRDKWGLAGQPRELKESNLILNSLLLTPLGESHLVTVGGEFQSSSMKDGVVLASTGETFRQKSWSVFAEDEWHLTDALALTAGSRYEHHEQFGGHFSPRAYLVWDVADAWTLKGGVTTGYKAPRMGQLHKGISGVSGQGKTNLLGNPDLKPEESVSYEAGVYYDNPAGLNANVIGFMTDFSNKIVSYSINDNTNSYVNSGKARLHGVEFAGTLPLWSEDVTLSLNYTWTRSEQRDGDNKGAPLSYTPEHMVNAKLNWQITEEVASWLGARYRGKTPRFTQNYSSLSAVQKKVYDEKGEYLKAWTVVDAGLSWKMTDALTLNAAVNNLLNKDYSDVSLYSAGKSTLYAGDYFQTGSSTTGYVIPERNYWMSLNYQF

SEQ ID NO: 10315 - protein, 121 aa, Escherichia coli; identical to SEQ ID NO: 4345

SEQ ID NO: 10316 - protein, 367 aa, Escherichia coli; identical to SEQ ID NO: 4285

SEQ ID NO: 10317 - protein, 203 aa, Escherichia coli; identical to SEQ ID NO: 2201

SEQ ID NO: 10318 - protein, 104 aa, Escherichia coli
MTMKKVLALVVAAAMGLSSAAFAAETATTPAPTATTTKAAPAKTTHHKKQHKAAPAQKAQAAKKHHKNTKAEQKAPEQKAQAAKKHAGKHSHQQPAKPAAQPAA

SEQ ID NO: 10319 - protein, 518 aa, Escherichia coli; identical to SEQ ID NO: 2349

SEQ ID NO: 10320 - protein, 565 aa, Escherichia coli; identical to SEQ ID NO: 2669

SEQ ID NO: 10321 - protein, 161 aa, Escherichia coli; identical to SEQ ID NO: 2582

SEQ ID NO: 10322 - protein, 686 aa, Escherichia coli; identical to SEQ ID NO: 3129

SEQ ID NO: 10323 - protein, 641 aa, Escherichia coli; identical to SEQ ID NO: 3774

SEQ ID NO: 10324 - protein, 213 aa, Escherichia coli; identical to SEQ ID NO: 4344

SEQ ID NO: 10325 - protein, 193 aa, Escherichia coli; identical to SEQ ID NO: 2246

SEQ ID NO: 10326 - protein, 761 aa, Escherichia coli; identical to SEQ ID NO: 9787

SEQ ID NO: 10327 - protein, 128 aa, Escherichia coli
MDRETLFELSIASVPSGKVENQSVKVAMRSVFKLFWRPEGLPGDPLEAYQQLRWTRNSQGVQLTNPTPYYINLIQVSVNGKALSNAGVVPPKSQRQTSWCQVIAQCHVAWRAINDYGGLSAKKEQNLP

SEQ ID NO: 10328 - protein, 241 aa, Escherichia coli; identical to SEQ ID NO: 2884

SEQ ID NO: 10329 - protein, 614 aa, Escherichia coli; identical to SEQ ID NO: 1888

SEQ ID NO: 10330 - protein, 386 aa, Escherichia coli; identical to SEQ ID NO: 3072

SEQ ID NO: 10331 - protein, 118 aa, Escherichia coli [sequence omitted]

SEQ ID NO: 10332 - protein, 432 aa, Escherichia coli; identical to SEQ ID NO: 2026

SEQ ID NO: 10333 - protein, 746 aa, Escherichia coli; identical to SEQ ID NO: 4275

SEQ ID NO: 10334 - protein, 368 aa, Escherichia coli; identical to SEQ ID NO: 2371

SEQ ID NO: 10335 - protein, 721 aa, Escherichia coli
MSVYAQAAVEPKEDTITVTAAPAPQESAWGPAATIAARQSATGTKTDTPIQKVPQSISVVTAEEMALHQPKSVKEALSYTPGVSVGTRGASNTYDHLIIRGFAAEGQSQNNYLNGLKLQGNFYNDAVIDPYMLERAEIMRGPVSVLYGKSSPGGLLNMVSKRPTTEPLKEVQFKAGTDSLFQTGFDFSDSLDDDGVYSYRLTGLARSANAQQKGSEEQRYAIAPAFTWRPDDKTNFTFLSYFQNEPETGYYGWLPKEGTVEPLPNGKRLPTDFNEGAKNNTYSRNEKMVGYSFDHEFNDTFTVRQNLRFAENKTSQNSVYGYGVCSDPANAYSKQCAALAPADKGHYLARKYVVDDEKLQNFSVDTQLQSKFATGDIDHTLLTGVDFMRMRNDINAWFGYDDSVPLLNLYNPVNTDFDFNAKDPANSGPYRILNKQKQTGVYVQDQAQWDKVLVTLGGRYDWADQESLNRVAGTTDKRDDKQFTWRGGVNYLFDNGVTPYFSYSESFEPSSQVGKDGNIFAPSKGKQYEVGVKYVPEDRPIVVTGAVYNLTKTNNLMADPEGSFFSVEGGEIRARGVEIEAKAALSASVNVVGSYTYTDAEYTTDTTYKGNTPAQVPKHMASLWADYTFFDGPLSGLTLGTGGRYTGSSYGDPANSFKVGSYTVVDALVRYDLARVGMAGSNVALHVNNLFDREYVASCFNTYGCFWGAERQVVATATFRF

SEQ ID NO: 10336 - protein, 207 aa, Escherichia coli; identical to SEQ ID NO: 2211

SEQ ID NO: 10337 - protein, 266 aa, Escherichia coli; identical to SEQ ID NO: 1892

SEQ ID NO: 10338 - protein, 871 aa, Escherichia coli; identical to SEQ ID NO: 3519

SEQ ID NO: 10339 - protein, 367 aa, Escherichia coli; identical to SEQ ID NO: 6155

SEQ ID NO: 10340 - protein, 237 aa, Escherichia coli; identical to SEQ ID NO: 2816

SEQ ID NO: 10341 - protein, 368 aa, Escherichia coli; identical to SEQ ID NO: 2370

SEQ ID NO: 10342 - protein, 869 aa, Escherichia coli; identical to SEQ ID NO: 2903

SEQ ID NO: 10343 - protein, 630 aa, Escherichia coli; identical to SEQ ID NO: 4909

SEQ ID NO: 10344 - protein, 539 aa, Escherichia coli; identical to SEQ ID NO: 3050

SEQ ID NO: 10345 - protein, 351 aa, Escherichia coli; identical to SEQ ID NO: 2872

SEQ ID NO: 10346 - protein, 432 aa, Escherichia coli; identical to SEQ ID NO: 2026

SEQ ID NO: 10347 - protein, 191 aa, Escherichia coli; identical to SEQ ID NO: 2996

SEQ ID NO: 10348 - protein, 132 aa, Escherichia coli
MKKQIEGMTMKKVLALVVAAAMGLSSAAFAAETATTPAPTATTTKAAPAKTTHHKKQHKAAPAQKAQAAKKHHKNTKAEQKAPEQKAQAAKKHHKNTKAEQKAPEQKAQAAKKHAKKHSHQQPAKPAAQPAA

SEQ ID NO: 10349 - protein, 236 aa, Escherichia coli; identical to SEQ ID NO: 3970

SEQ ID NO: 10350 - protein, 127 aa, Escherichia coli; identical to SEQ ID NO: 5431

SEQ ID NO: 10351 - protein, 720 aa, Escherichia coli; identical to SEQ ID NO: 6178

SEQ ID NO: 10352 - protein, 122 aa, Escherichia coli; identical to SEQ ID NO: 2915

SEQ ID NO: 10353 - protein, 614 aa, Escherichia coli; identical to SEQ ID NO: 1883

SEQ ID NO: 10354 - protein, 512 aa, Escherichia coli; identical to SEQ ID NO: 2813

SEQ ID NO: 10355 - protein, 860 aa, Escherichia coli; identical to SEQ ID NO: 6118

SEQ ID NO: 10356 - protein, 161 aa, Escherichia coli; identical to SEQ ID NO: 2582

SEQ ID NO: 10357 - protein, 367 aa, Escherichia coli; identical to SEQ ID NO: 2431

SEQ ID NO: 10358 - protein, 696 aa, Escherichia coli; identical to SEQ ID NO: 4038

SEQ ID NO: 10359 - protein, 241 aa, Escherichia coli; identical to SEQ ID NO: 3582

SEQ ID NO: 10360 - protein, 229 aa, Escherichia coli; identical to SEQ ID NO: 3589

SEQ ID NO: 10361 - protein, 700 aa, Escherichia coli; identical to SEQ ID NO: 2926

SEQ ID NO: 10362 - protein, 203 aa, Escherichia coli; identical to SEQ ID NO: 2201

SEQ ID NO: 10363 - protein, 233 aa, Escherichia coli; identical to SEQ ID NO: 3548

SEQ ID NO: 10364 - protein, 229 aa, Escherichia coli; identical to SEQ ID NO: 4047

SEQ ID NO: 10365 - protein, 729 aa, Escherichia coli; identical to SEQ ID NO: 2948

SEQ ID NO: 10366 - protein, 232 aa, Escherichia coli; identical to SEQ ID NO: 2087

SEQ ID NO: 10367 - protein, 655 aa, Escherichia coli; identical to SEQ ID NO: 7517

SEQ ID NO: 10368 - protein, 826 aa, Escherichia coli; identical to SEQ ID NO: 3563

SEQ ID NO: 10369 - protein, 173 aa, Escherichia coli; identical to SEQ ID NO: 8970

SEQ ID NO: 10370 - protein, 362 aa, Escherichia coli; identical to SEQ ID NO: 2998

SEQ ID NO: 10371 - protein, 863 aa, Escherichia coli; identical to SEQ ID NO: 3946

SEQ ID NO: 10372 - protein, 191 aa, Escherichia coli; identical to SEQ ID NO: 2727

SEQ ID NO: 10373 - protein, 227 aa, Escherichia coli; identical to SEQ ID NO: 3570

SEQ ID NO: 10374 - protein, 863 aa, Escherichia coli; identical to SEQ ID NO: 3959

SEQ ID NO: 10375 - protein, 430 aa, Escherichia coli; identical to SEQ ID NO: 2617

SEQ ID NO: 10376 - protein, 224 aa, Escherichia coli; identical to SEQ ID NO: 3604

SEQ ID NO: 10377 - protein, 998 aa, Escherichia coli; identical to SEQ ID NO: 2918

SEQ ID NO: 10378 - protein, 518 aa, Escherichia coli; identical to SEQ ID NO: 2351

SEQ ID NO: 10379 - protein, 61 aa, Escherichia coli; identical to SEQ ID NO: 9050

SEQ ID NO: 10380 - protein, 713 aa, Escherichia coli; identical to SEQ ID NO: 5996

SEQ ID NO: 10381 - protein, 478 aa, Escherichia coli; identical to SEQ ID NO: 2404

SEQ ID NO: 10382 - protein, 656 aa, Escherichia coli; identical to SEQ ID NO: 4901

SEQ ID NO: 10383 - protein, 243 aa, Escherichia coli; identical to SEQ ID NO: 3561

SEQ ID NO: 10384 - protein, 840 aa, Escherichia coli; identical to SEQ ID NO: 3591

SEQ ID NO: 10385 - protein, 816 aa, Escherichia coli; identical to SEQ ID NO: 4456

SEQ ID NO: 10386 - protein, 231 aa, Escherichia coli; identical to SEQ ID NO: 2868

SEQ ID NO: 10387 - protein, 407 aa, Escherichia coli
MTERELSIIRALGEEFSTVLADLQRTFEGKMAAQAQAFEEKLASLSAVLQKHVTVDEVHPVLQAMVDDAVGTIPVPRDGRDYDPDVLQQAVNDAVANIPVPADGKSITPDDVRPMLEQMVKEAVSHIPAPRDGRDYDPEVLKQAVNDAVANIPVPADGKSLTPDDVRPMLEQMVKEAVSHIPAPRDGRDYDPEVLKQAVNDAVANIPVPADGKSITPDDVRPMLEQMVKEAVSHIPVPRDGRDYDPDVLQKAVLDAVRALPAPQDGRDATALEIIPAIDDQKSFPRGTYATHQGGLWRAYEKTHGMRGWECLVDGVADIDVSMTGERSFTVVVRQSSGQRTEKTFSLPVMLYRGVFRAGETYHPGDTVTWGGSLWHCNSMTGDKPGEAHSSGWTLAAKRGRDAGGGK

SEQ ID NO: 10388 - protein, 859 aa, Escherichia coli
MWNLLRRTRKNQKSGRDVREVGWRSLFQAVAEPFAGAWQQGVKADPETVLSFHAVFSCISLISQDIAKMRLRLMQTDVQGIRREKRQGDTARLCRRPNAQQNRIQFFELWLNSKLRHGNTVVLKIRTPRGQIKELRILDWNRVEPLVADDGEVFYRITPDRNCGITESVTVPAREVIHDRFNCFFHPLVGLPPVYAAGLAAMQGHHIQANSTYFFRNGGRPSGVIEVPGSITEENAKKLKGNWDSGYTGENAGKTAILSNGAKYSPTTFSPVDAQTVEQLKMTAEIVCSVFRVPAYKIGVGHPPSSDNVEALEQQYYSQCLQTLIESIELLLDEALETGENESTEFDVTTLLRMDSERRMKTLGDAVKNTLLTPNEARKRENLPPLAGGDALYLQQQNYSLEALSRRDAREDPFASAGKTVSSQLPDGASDGNKAISETEHDAVKAMFRGDTEKMTERELSIIRALGEEFSTVLADLQRTFEGKMASQAQAFEEKLTSLSAVLQKHVTVDEVRPVLQAMVDDAVGAIPVPRDGRDYDPDVLQQAVNDAVANIPQPADGKSLTPDDVRPMLEQMVKEAVSHIPVPRDGRDYDPEVLQKAVNDAVANIPQPADGKSLTPDDVRPMLEQMVKEAVSHIPVPRDGRDYDPEVLQKAVNDAVANIPQPADGKSLTPDDVRPMLEQMVKEAVSHIPVPRDGRDYDPDVLQKAVLDAVSALPAPQDGRDATALEILPAIDDQKSFPRGTYATHQGGLWRAYEKTHGMRGWECLVDGVADIDVSMTGERLFSVVVRQSSGQRTEKTFSLPVMLYRGVFRAGETYHPGDTVTWGGSLWHCNSMTEDKPGEAHSSAWTLAAKRGRDAGG

SEQ ID NO: 10389 - protein, 746 aa, Escherichia coli; identical to SEQ ID NO: 2949

SEQ ID NO: 10390 - protein, 359 aa, Escherichia coli; identical to SEQ ID NO: 2332

SEQ ID NO: 10391 - protein, 213 aa, Escherichia coli; identical to SEQ ID NO: 2232

SEQ ID NO: 10392 - protein, 241 aa, Escherichia coli; identical to SEQ ID NO: 2887

SEQ ID NO: 10393 - protein, 446 aa, Escherichia coli; identical to SEQ ID NO: 2180

SEQ ID NO: 10394 - protein, 627 aa, Escherichia coli
MVVTASSVEQNLKDAPASISVITQEDLQRKPVQNLKDVLKEVPGVQLTNEGDNRKGVSIRGLDSSYTLILVDGKRVNSRNAVFRHNDFDLNWIPVDSIERIEVVRGPMSSLYGSDALGGVVNIITKKIGQKWSGTVTVDTTIQEHRDRGDTYNGQFFTSGPLIDGVLGMKAYGSLAKREKDDPQNSTTTDTGETPRIEGFSSRDGNVEFAWTPNQNHDFTAGYGFDRQDRDSDSLDKNRLERQNYSVSHNGRWDYGTSELKYYGEKVENKNPGNSSPITSESNTVDGKYTLPLTAINQFLTVGGEWRHDKLSDAVNLTGGTSSKTSASQYALFVEDEWRIFEPLALTTGVRMDDHETYGEHWSPRAYLVYNATDTVTVKGGWATAFKAPSLLQLSPDWTSNSCRGACKIVGSPDLKPETSESWELGLYYMGEEGWLEGVESSVTVFRNDVKDRISISRTSDVNAAPGYQNFVGFTANGVPVFSYYNVNKARIQGVETELKIPFNDEWKLSLNYTYNDGRDVSNGENKPLSDLPFHTANGTLDWKPLALEDWSFYVSGHYTGQKRADSATAKTPGGYTIWNSGAAWQVTKDVKLRAGVLNLGDKDLSRDDYSYNEDGRRYFMAVDYRF

SEQ ID NO: 10395 - protein, 208 aa, Escherichia coli; identical to SEQ ID NO: 1949

SEQ ID NO: 10396 - protein, 203 aa, Escherichia coli; identical to SEQ ID NO: 2009

SEQ ID NO: 10397 - protein, 224 aa, Escherichia coli; identical to SEQ ID NO: 3578

SEQ ID NO: 10398 - protein, 193 aa, Escherichia coli; identical to SEQ ID NO: 2250

SEQ ID NO: 10399 - protein, 412 aa, Escherichia coli; identical to SEQ ID NO: 2908

SEQ ID NO: 10400 - protein, 200 aa, Escherichia coli; identical to SEQ ID NO: 1788

SEQ ID NO: 10401 - protein, 660 aa, Escherichia coli
MSRPQFTSLRLSLLALAVSATLPTFAFATETMTVTATGNARSSFEAPMMVSVIDTSAPENQTATSATDLLRHVPGITLDGTGRTNGQDVNMRGYDHRGVLVLVDGVRQGTDTGHLNGTFLDPALIKRVEIVRGPSALLYGSGALGGVISYDTVDAKDLLQEGQSSGFRVFGTGGTGDHSLGLGASAFGRTENLDGIVAWSSRDRGDLRQSNGETAPNDESINNMLAKGTWQIDSAQSLSGLVRYYNNDAREPKNPQTVGASESSNPMVDRSTIQRDAQLSYKLAPQGNDWLNADAKIYWSEVRINAQNTGSSGEYREQITKGARLENRSTLFADSFASHLLTYGGEYYRQEQHPGGATTGFPQAKIDFSSGWLQDEITLRDLPITLLGGTRYDSYRGSSDGYKDVDADKWSSRAGMTINPTNWLMLFGSYAQAFRAPTMGEMYNDSKHFSIGRFYTNYWVPNPNLRPETNETQEYGFGLRFDDLMLSNDALEFKASYFDTKAKDYISTTVDFAAATTMSYNVPNAKIWGWDVMTKYTTDLFSLDVAYNRTRGKDTDTGEYISSINPDTVTSTLNIPIDHSGFSVGWVGTFADRSTHISSSYSKQPGYGVNDFYVSYQGQQALKGMTTTLVLGNAFDKEYWSPQGIPQDGRNGKIFVSYQW

SEQ ID NO: 10402 - protein, 252 aa, Escherichia coli; identical to SEQ ID NO: 3543

SEQ ID NO: 10403 - protein, 366 aa, Escherichia coli; identical to SEQ ID NO: 3520

SEQ ID NO: 10404 - protein, 331 aa, Escherichia coli; identical to SEQ ID NO: 2705

SEQ ID NO: 10405 - protein, 715 aa, Escherichia coli; identical to SEQ ID NO: 3971

SEQ ID NO: 10406 - protein, 784 aa, Escherichia coli; identical to SEQ ID NO: 2240

SEQ ID NO: 10407 - protein, 678 aa, Escherichia coli; identical to SEQ ID NO: 2902

SEQ ID NO: 10408 - protein, 274 aa, Escherichia coli; identical to SEQ ID NO: 2304

SEQ ID NO: 10409 - protein, 747 aa, Escherichia coli; identical to SEQ ID NO: 6089

SEQ ID NO: 10410 - protein, 162 aa, Escherichia coli; identical to SEQ ID NO: 1969

SEQ ID NO: 10411 - protein, 828 aa, Escherichia coli; identical to SEQ ID NO: 2381

SEQ ID NO: 10412 - protein, 567 aa, Escherichia coli; identical to SEQ ID NO: 3518

SEQ ID NO: 10413 - protein, 230 aa, Escherichia coli; identical to SEQ ID NO: 2995

SEQ ID NO: 10414 - protein, 517 aa, Escherichia coli; identical to SEQ ID NO: 2462

SEQ ID NO: 10415 - protein, 760 aa, Escherichia coli; identical to SEQ ID NO: 2078

SEQ ID NO: 10416 - protein, 879 aa, Escherichia coli
MPEHSFLRLRGLSWWIALAISGSPFNVLADDTIQFDARFLELKGNTKIDLGRFSQKGYVEPGKYNLRVHVNNHPLPDEYDIYWYVAENDPNKSYACLPPELIAQFGFKDDFAKSLQWGHDGQCLKTDQIGGMEIKGDLSQSALLVSVPQAYLEYTDDDWDPPSRWDEGIPGLIADYSINAQTRHENGGDDTNDISGNGTVGVNVGPWRLRADWQSDYQHTRSNDDGDTDDSGTQKNWEWSRYYAWRALPSLKAKLSLGEDYLNSDIFDGFSYIGGSISTDDQMLPPNMRGYAPDISGVAHTTAKVTVTQMGRVIYETQVPAGPFRIQDIGDSVSGTLHVRIEEQNGQVQEYDVSTASMPFLTRPGQVRYKVTMGRPQNWDHQVAGSFFSGGEASWGIANGWSLYGGALADENYQSAALGLGRDLALFGALAFDVTHSRVQLDDNSVYGNKTLDGNSYRVSYAKDFDELNSRVTFAGYRFSEKNYMTMSEYLDANDTDRARTGNDKEMYTVTYNQNFRDARVSVYLNYSHHTYWDREDQTNYNMMLSHYFNLGSLRNLSVSLTGYRYEYDKSADKGVYLSLSLPWGDNSTISYNGNYGSGADSSQASLYHRIDDASHYTLSAGTSENHTSLDGYYSHDGTLAKVDLSANYHEGQYTSAGVSLQGGVTLTAHGGALHRTQNMGGTRLLIDADGVANVPVEGNGSAVYTNMFGKAVVADVNDYYRNQAYIDLNKLPENAEATQSVVQATLTEGAIGYRKFAVISGEKAMVVLRLQDGSHPPFGAEVKNDNQQQVGLVDDEGNVYLAGVKPGEHMTVFWEGESHCDISLPDPLPNDLFNGLLLPCQQKGGSAPVITHDIQPVIQEQTQQVTPMEPPMSVSSNQ

SEQ ID NO: 10417 - protein, 266 aa, Escherichia coli
MAKSLFRALVALSFLAPLWLNAAPRVITLSPANTELAFAAGITPVGVSSYSDYPPQAQKIEQVSTWQGMNLERIVALKPDLVIAWRGGNAERQVDQLASLGIKVMWVDATSIEQIANALRQLVPWSPQPDKAEQAAQSLLDQYAQLKAQYADKPKKRVFLQFGINPPFTSGKESIQNQVLEVCGGENIFKDSRVPWPQVSREQVLARAPQAIVITGGPDQIPKIKQYWGEQLKIPVIPLTSDWFERASPRIILAAQQLCNALSQVD

SEQ ID NO: 10418 - protein, 826 aa, Escherichia coli; identical to SEQ ID NO: 3078

SEQ ID NO: 10419 - protein, 237 aa, Escherichia coli; identical to SEQ ID NO: 3605

SEQ ID NO: 10420 - protein, 871 aa, Escherichia coli
MHQVLLLPRFARLTIALGLATAVFPVDAEYYFNPRFLSNDLAESVDLSAFTKGREAPPGTYRVDIYLNDEFMTSRDITFIADDNNADLIPCLSTDLLVSLGIKKSALLDNKEHSAEKHVSDNSACTPLRDRLADASSEFNVGQQHLSLSVPQIYVGRMARGYVSPDLWEEGINAGLLNYSFNGNSINNRSNHNAGKSNYAYLNLQSGINIGSWRLRDNSTWSYNSGSSNSSDSNKWQHINTSAERDIIPLRSRLTVGDSYTDGDIFDSVNFRGLKINSTEAMLPDSQHGFAPVIHGIARGTAQVSVKQNGYDVYQTTVPPGPFTIDDINSAANGGDLQVTIKEADGSIQTLYVPYSSVPVLQRAGYTRYALAMGEYRSGNNLQSSPKFIQGSLMHGLEGNWTPYGGMQIAEDYQAFNLGIGKDLGLFGAFSFDITQANTTLADGTRHSGQSIKSVYSKSFYQTGTNIQVAGYRYSTQGFYNLSDSAYSRMSGYTVKPPTGDSNEKTQFIDYFNLFYSKRGQEQISISQQLGNYGTTFFSASRQSYWNTSRSDQQISFGLNVPFSDITTSLNYSYSNNIWQNDRDHLLAFTLNVPFSHWMRTDSQSAFRNSNASYSMSNDLKGGMTNLSGVYGTLLPDNNLNYSVQVGNTHGGNTSSGTSGYSSLNYRGAYGNTNIGYSRSGDSSQIYYGMSGGIIAHADGITFGQPLGDTMVLVKAPGADNVKIENQTGIHTDWRGYAILPFATEYRENRVALNANSLADNVELDETVVTVIPTHGAIARATFNAQIGGKVLMTLKYGNKSVPFGAIVTHGENKNGSIVAENGQVYLTGLPQSGKLQVSWGKDKNSNCIVEYKLPEVSPGTLLNQQTAICR

SEQ ID NO: 10421 - protein, 880 aa, Escherichia coli
MPDHSFFRLRILPWCIALAMSGSYSSVWAEDDIQFDSRFLELKGDTKIDLKRFSSQGYVEPGKYNLQVQLNKQPLAEEYDIYWYAGEDDASKSYACLTQELVAQFGLKEDVAKNLQWSHDAKCLKSGQLEGMEIKADLSQSALVISLPQAYLEYTYPDWDPPSRWDDGISGIVADYSINAQTRHEENGGDDSNEISGNGTVGVNLGPWRMRADWQTNYQHTRSNDDDEFSGDETQKKWEWSRYYAWRALPSLKAKLALGEDYLRSDIFDGFNYVGGSVSTDDQMLPPNLRGYAPDISGVAHTTAKVTVSQMGRVIYETQVPAGPFRIQDLGDSVSGTLHIRIEEQNGQVQEYDISTASMPYLTRPGQVRYKIMMGRPQEWGHHVEGEFFSGAEASWGIANGWSLYGGALGDENYQSAALGVGRDLSTFGAVAFDVTHSHTKLDKDTAYGKGSLDGNSFRVSYSKDFDQLNSRVTFAGYRFSEENFMTMSEYLDASDSGMVRTGNDKEMYTATYNQNFRDAGVSVYLNYTRHTYWDREEQTNYNIMLSHYFNMGSIRNVSISMTGYRYEYDNQADKGMYISLSMPWGDNSTVSYNGNYGSGTDSSQVGYFSRVDDATHYQLNVGTSDKHTSVDGYYSHDGSLAQVDLSANYHEGQYTSAGLSLQGGATLTAHGGALHRTQNMGGTRLLIDADGVADVPVEGNGAAVYTNMFGKAVVSDVNNYYRNQAYIDLNKLPENAEATQSVVQATLTEGAIGYRKFAVISGQKAMAVLRLQDGSHPPFGAEVKNDNEQTVGLVDDDGNVYLAGVKPGEHMSVFWSGVAHCDINLPDPLPADLFNGLLLPCQHKGNVAPVVPDDIKPVIQEQTQQVTPTNPPVSVSANQ

SEQ ID NO: 10422 - protein, 351 aa, Escherichia coli; identical to SEQ ID NO: 9352

SEQ ID NO: 10423 - protein, 386 aa, Escherichia coli; identical to SEQ ID NO: 3094

SEQ ID NO: 10424 - protein, 45 aa, Escherichia coli; identical to SEQ ID NO: 6471

SEQ ID NO: 10425 - protein, 243 aa, Escherichia coli; identical to SEQ ID NO: 2910

SEQ ID NO: 10426 - protein, 387 aa, Escherichia coli; identical to SEQ ID NO: 3101

SEQ ID NO: 10427 - protein, 446 aa, Escherichia coli; identical to SEQ ID NO: 9296

SEQ ID NO: 10428 - protein, 784 aa, Escherichia coli; identical to SEQ ID NO: 2244

SEQ ID NO: 10429 - protein, 266 aa, Escherichia coli; identical to SEQ ID NO: 1894

SEQ ID NO: 10430 - protein, 641 aa, Escherichia coli; identical to SEQ ID NO: 9297

SEQ ID NO: 10431 - protein, 161 aa, Escherichia coli; identical to SEQ ID NO: 2582

SEQ ID NO: 10432 - protein, 162 aa, Escherichia coli; identical to SEQ ID NO: 1973

SEQ ID NO: 10433 - protein, 274 aa, Escherichia coli; identical to SEQ ID NO: 3160

SEQ ID NO: 10434 - protein, 230 aa, Escherichia coli; identical to SEQ ID NO: 3019

SEQ ID NO: 10435 - protein, 869 aa, Escherichia coli
MKIPTTTDIPQRYTWCLAGICYSSLAILPSFLSYAESYFNPAFLLENGTSVADLSRFERGNHQPARVYRVDLWRNDEFIGSQDIVFESTTENTGDKSGGLMPCFNQVLLERIGLNSSAFPELAQQQNNKCINLLKAVPDATINFDFAAMRLNITIPQIALLSSAHGYIPPEEWDEGIPALLLNYNFTGNRGNGNDSYFFSELSGINIGPWRLRNNGSWNYFRGNGYHSEQWNNIGTWVQRAIIPLKSELVMGDGNTGSDIFDGVGFRGIRLYSSDNMYPDSQQGFAPTVRGIARTAAQLTIRQNGFIIYQSYVSPGAFEITDLHPTSSNGDLDVTIDERDGNQQNYTIPYSTVPILQREGRFKFDLTAGDFRSGNSQQSSPFFFQGTALGGLPQEFTAYGGTQLSANYTAFLLGLGRNLGNWGAVSLDVTHARSQLADDSRHEGDSIRFLYAKSMNTFGTNFQLMGYRYSTQGFYTLDDVAYRRMEGYEYDYDYDGEHRDELIIVNYHNLRFSRKDRLQLNISQSLNDFGSLYISGTHQKYWNTSDSDTWYQVGYTSSWVGISYSLSFSWNESVGIPDNERIVGLNVSVPFNVLTKRRYTRENALDRAYASFNANRNSNGQNSWLAGVGGTLLEGHNLSYHVSQGDTSNNGYTGSATANWQAAYGTLGVGYNYDRDQHDVNWQLSGGVVGHENGITLSQPLGDTNVLIKAPGAGGVRIENQTGILTDWRGYAVMPYATVYRYNRIALDTNTMGNSIDVEKNISSVVPTQGALVRANFDTRIGVRALITVTQGGKPVPFGSLVRENSTGITSMVGDDGQVYLSGAPLSGELLVQWGDGANSRCIAHYVLPKQSLQQAVTVISAVCTHPGS

SEQ ID NO: 10436 - protein, 518 aa, Escherichia coli; identical to SEQ ID NO: 2349

SEQ ID NO: 10437 - protein, 360 aa, Escherichia coli; identical to SEQ ID NO: 3062

SEQ ID NO: 10438 - protein, 331 aa, Escherichia coli; identical to SEQ ID NO: 2700

SEQ ID NO: 10439 - protein, 203 aa, Escherichia coli; identical to SEQ ID NO: 2201

SEQ ID NO: 10440 - protein, 826 aa, Escherichia coli; identical to SEQ ID NO: 3078

SEQ ID NO: 10441 - protein, 361 aa, Escherichia coli; identical to SEQ ID NO: 3061

SEQ ID NO: 10442 - protein, 224 aa, Escherichia coli; identical to SEQ ID NO: 3165

SEQ ID NO: 10443 - protein, 229 aa, Escherichia coli; identical to SEQ ID NO: 3277

SEQ ID NO: 10444 - protein, 686 aa, Escherichia coli; identical to SEQ ID NO: 3129

SEQ ID NO: 10445 - protein, 232 aa, Escherichia coli; identical to SEQ ID NO: 2087

SEQ ID NO: 10446 - protein, 565 aa, Escherichia coli; identical to SEQ ID NO: 2662

SEQ ID NO: 10447 - protein, 231 aa, Escherichia coli; identical to SEQ ID NO: 3055

SEQ ID NO: 10448 - protein, 838 aa, Escherichia coli
MPQRHHQGHKRTPKQLALIIKRCLPMVLTGSGMLCTTANAEEYYFDPIMLETTKSGMQTTDLSRFSKKYAQLPGTYQVDIWLNKKKVSQKKITFTANAEQLLQPQFTVEQLRELGIKVDEIPALAEKDDDSVINSLEQIIPGTAAEFDFNHQRLNLSIPQIALYRDARGYVSTSRWDDGIPTLFTNYSFTGSDNRYRQGNRSQRQYLNMQNGANFGPWRLRNYSTWTRNDQASSWNTISSYLQRDIKALKSQLLLGESATSGSIFSSYTFTGVQLASDDNMLPNSQRGFAPTVRGIANSSAIVTIRQNGYVIYQSNVPAGAFEINDLYPSSNSGDLEVTIEESDGTQRRFIQPYSSLPMMQRPGHLKYSATAGRYRADANSDSKEPEFAEATAIYGLNNTFTLYGGLLGSEDYYALGIGIGGTLGALGALSMDINRADTQFDNRHSFHGYQWRTQYIKDIPETNTNIAVSYYRYTNDGYFSFDEANTRNWDYNSRQKSEIQFNISQTIFDGVSLYASGSQQDYWGNNDKNRNISVGVSGQQWGIGYSLNYQYSRYTDQNNDRALSLNLSIPLERWLPRSRVSYQMTSQKDRPTQHEMRLDGSLLDDGRLSYSLEQSLDDDNNHNSSLNASYRSPYGTFSAGYSYGNDSSQYNYGVTGGVVIHPHGVTLSQYLGNAFALIDANGASGVRIQNYPGIATDPFGYAVVPYLTTYQENRLSVDTTQLPDNVDLEQTTQFVVPNRGAMVAARFNANIGYRVLVTVSDRNGKPLPFGALASNDETGQQSIVDEGGILYLSGISSKSQSWTVRWGNQADQQCQFAFSTPDSEPTTSVLQGTAQCH

SEQ ID NO: 10449 - protein, 224 aa, Escherichia coli; identical to SEQ ID NO: 3115

SEQ ID NO: 10450 - protein, 478 aa, Escherichia coli; identical to SEQ ID NO: 3436

SEQ ID NO: 10451 - protein, 747 aa, Escherichia coli; identical to SEQ ID NO: 2072

SEQ ID NO: 10452 - protein, 258 aa, Escherichia coli
MKNITFIFVILLASPLYANGDKLYRADSRPPDEIKRSGGLMPRGHNEYFDRGTQMNINLYDHARGTQTGFVRYDDGYVSTSLSLRSAHLAGQSILSGYSTYYIYVIATAPNMFNVNDVLGVYSPHPYEQEVSALGGIPYSQIYGWYRVNFGVIDERLHRNREYRDRYYRNLNIAPAEDGYRLAGFPPDHQAWREEPWIHHAPQGCGNLSRTITDDTCNEETQNLSTIYLREYQSKVKRQIFTDYQSEVDIYNRIRDEL

SEQ ID NO: 10453 - protein, 760 aa, Escherichia coli
MENNRNFPARQFNSLTFFAGLCIGITPVAQALAAEGQTNADDTLVVEASTPSLYAPQQSADPKFSRPVADTTRTMTVISEQVIKDQGATNLTDALKNVPGVGAFFAGENGNSTTGDAIYMRGADTSNSIYIDGIRDIGSVSRDTFNTEQVEVIKGPSGTDYGRSAPTGSINMISKQPRNDSGIDASASIGSAWFRRGTLDVNQVIGDTTAVRLNVMGEKTHDAGRDKVKNERYGVAPSVAFGLGTANRLYLNYLHVTQHNTPDGGIPTIGLPGYSAPSAGTAALNHSGKVDTHNFYGTDSDYDDSTTDTATMRFEHDINDNTTIRNTTRWSRVKQDYLMTAIMGGASNITQPTSDVNSWTWSRTANTKDVSNKILTNQTNLTSTFYTGSIGHDVSTGVEFTRETQTNYGVNPVTLPAVNIYHPDSSIHPGGLKRNGANANGQTDTFAIYAFDTLQITRDFELNGGIRLDNYHTEYDSATACGGSGRGAITCPTGVAKGSPVTTVDTAKSGNLMNWKAGALYHLTENGNVYINYAVSQQPPGGNNFALAQSGSGNSANRTDFKPQKANTSEIGTKWQVLDKRLLLTAALFRTDIENEVEQNDDGTYSQYGKKRVEGYEISVAGNITPAWQVIGGYTQQKATIKNGKDVAQDGSSSLPYTPEHAFTLWSQYQATDDISVGAGARYIGSMHKGSDGAVGTPAFTEGYWVADAKLGYRVNRNLDFQLNVYNLFDTDYVASINKSGYRYHPGEPRTFLLTANMHF

SEQ ID NO: 10454 - protein, 249 aa, Escherichia coli; identical to SEQ ID NO: 3492

SEQ ID NO: 10455 - protein, 120 aa, Escherichia coli
MDAVLSVQGASAPVKKKSFFSKFTRLNMLRLARAVIPAAVLMMFFPQLAMAAQGQDLMASGNTTVKATFGKDSSVVKWVVLAEVLVGAVMYMMTKNVKFLAGFAIISVFIAVGMAVVGLK

SEQ ID NO: 10456 - protein, 765 aa, Escherichia coli; identical to SEQ ID NO: 9275

SEQ ID NO: 10457 - protein, 614 aa, Escherichia coli; identical to SEQ ID NO: 9373

SEQ ID NO: 10458 - protein, 866 aa, Escherichia coli
MTIKSTKKYHNHLTRIATFCALLYSNSALCAELVEYDHTFLMGKDASNIDLSRYTEGNPTLPGIYDVSVYVNDQPIMSQSIAFTVIEGKKNAQACITQKNLLQFHISSPDKNSEKAILLKRDEDLGDCLNLAEMIPQSSIRYDVNDQRLDIDVPQAWIMKNYQNYVDPSLWENGINAAMLSYNLNGYHSESPGRTNDSIYAAFNGGINLGAWRLRASGNYNWMTNVHSDYDFQNRYLQRDLASLRSQLVIGESYTTGETFDSVSIRGIRLYSDSRMLPPVLASFAPIIHGVANTNAKVTVMQNGYKIYETTVPPGAFAIDDLSPSGYGSDLIVTIEEADGTKRTFSQPFSSVVQMLRPGVGRWDISAGQVLKDSIQDEPNLFQASYYYGLNNYLTGYTGIQLTDNNYTAGLLGLGMNTPVGAFSVDVTHSNVSIPDDKTYQGQSYRISWNKLFENTSTSLNIAAYRYSTQHYLGLNDALTLIDEVEHPEQDLEPKSMRNYSRMKNQVTVSINQPLKFEKKDYGSFYLSGSWSDYWASGQNSTNYSIGYSNSASWGSYSISAQRSLNEDGQTDDSIYLSFTIPIENLLGTEHRSSGFQSIDTQLNSDFKGNNQLNISSSGYSDTNRISYSVNTGYMMNKSSDDLSYIGGYASYESPWGTLSGSASASSDNSRQFSLNTDGGFVLHSGGLTFSNDSFSDSDTLAVIQAPGAKGARINYGNSTVDRWGYGVTSALSPYHENRIALDINDLENDVELKSTSTVAVPRQGAVVFADFETVQGQSAIMNIVRSDGKNIPFAADIYDEQNNIIGNVGQGGQAFVRGIGQEGNIRITWIEEGKPVSCFAHYQQNTTSEKIAQSIILNGLRCQIQ

SEQ ID NO: 10459 - protein, 746 aa, Escherichia coli; identical to SEQ ID NO: 3031

SEQ ID NO: 10460 - protein, 368 aa, Escherichia coli
MNKTITALAIIMASFAANASVLPETPVPFKSGTGAIDNDTVYIGLGSAGTAWYKLDTQAKDKKWTALAAFPGGPRDQATSAFIDGNLYVFGGIGKNSEGLTQVFNDVHKYNPKTNSWVKLMSHAPMGMAGHVTFVHNGKAYVTGGVNQNIFNGYFEDLNEAGKDSATIDKINAHYFDKKAEDYFFNKFLLSFDPSTQQWSYAGESPWYGTTGAAVVNKGDKTWLINGEAKPGLRTDAVFELDFTGNNLKWNKLAPVSSPDGVAGGFAGISNDSLIFAGGAGFKGSRENYQNGKNYAHEGLKKSYSTDIHLWHNGKWDKSGELSQGRAYGVSLPWNNSLLIIGGETAGGKAVTDSVLISVKDNKVTVQN

SEQ ID NO: 10461 - protein, 170 aa, Escherichia coli [sequence omitted]

SEQ ID NO: 10462 - protein, 856 aa, Escherichia coli
MAGFFVRLFVACAFAAQAPLSSAELYFNPRFLADDPQAVADLSRFENGQELPPGTYRVDIYLNNGYMATRDVTFNTGDSEQGIVPCLTRAQLASMGLNTASVSGMNLLADDACVPLTSMIHDATAHLDVGQQRLNLTIPQAFMSNRARGYIPPELWDPGINAGLLNYNFSGNSVQNRIGGNSHYAYLNLQSGLNIGAWRLRDNTTWSYNRSDRSSGSKNKWQHINTWLERDIIPLRSRLTLGDGYTQGDIFDGINFRGAQLASDDNMLPDSQRGFAPVIHGIARGTAQVTIKQNGYDIYNSTVPPGPFTINDIYAAGNSGDLQVTIKEADGSTQIFTVPYSSVPLLQREGHTRYSITAGEYRSGNAQQEKPRFFQSTLLHGLPAGWTIYGGTQLADRYRAFNFGIGKNMGALGALSVDMTQANSTLPDDSQHDGQSVRFLYNKSLNESGTDIQLVGYRYSTSGYFNFADTTYSRMNGYNIETQDGVIQVKPKFTDYYNLAYNKRGKLQLTVTQQLGRTSTLYLSGSHQTYWGTSNVDEQFQAGLNTAFEDINWTLSYSLTKNAWQKGRDQMLALNVNIPFSHWLRSDSKSQWRHASASYSMSHDLNGRMTNLAGVYGTLLEDNNLSYSVQTGYAGGGDGNSGSTGYATLNYRGGYGNANIGYSHSDDIKQLYYGVSGGVLAHANGVTLGQPLNETVVLVKAPGAKDAKVENQTGVRTDWRGYAVLPYATEYRENRVALDTNTLADNVDLDNAVANVVPTRGAIVRAEFKARVGIKLLMTLTHNNKPLPFGAMVTSESSQSSGIVADNGQVYLSGMPLAGKVQVKWGEEENAHCIANYQLPPESQQQLLTQLSAECR

SEQ ID NO: 10463 - protein, 816 aa, Escherichia coli
MNIYRLSFISCLVMAIPSALAVEFNLNVLDKSMRDRIDISLLKEKGGIAPGEYFVSVTVNNNQISNGQKIDWKKNGDQTIPCINDLLVDKFGLKPEVRQSLPRLNQCVDFSSRPEILFIFDQASQQLNITIPQAWLAWHSDNWTPPSTWKEGVAGVLMDYNLFASSYRPQDGSNSTNLNAYGTAGINAGAWRLRSDYQLNQTDSDDNHEQSGEISRTYLFRPLPQLGSKLTLGETDFSSNIFDGFSYTGAALASDDRMLPWELRGYAPQISGIAQTNATVTVSHSGRVIYQKKVPPGPFIIDDLNQSVQGTLDVKVTEEDGRANNFQVSAASTPFLTRQGQVRYKLAAGQPRTSMSHQTENETFFSNEVSWGMLSNTSLYGGLLISGDDYHSAAMGIGQNMLWLGALSFDVTWASSQFDTQQDERGLSYRFNYSKQVDATDSTISLAAYRFSDRHFHSYANYLDHKYNNSDAQDEKQTISLSVGQPITPLNLNLYANLLHQTWWNADASTTANITAGFNVDIGNWRDISISTSFNTTHYEDKDRDNQIYLSISLPFGNGGRVGYDMQNSSHSTTHRMSWNDTLDERNSWGMSTGLQSDRPDNGVQVSGNYQHLSSAGEWDISGTYAANDYSSVSSSWSGSFTATQYGAAFHRRSSTNEPRLMVSTDGVADIPVQGNLDYTNHFGIAVVPLISSYQPSTVAVNMNDLPDGVTVAENVIKETWIEGAIGYKSLASRSGKDVNVIIRNASGQFPPLGADIRQDNSGISVGMVGEEGHAWLSGVAENQMLTVVWGDSQHCSLHLPEHMEDTANRLILPCH

SEQ ID NO: 10464 - protein, 367 aa, Escherichia coli; identical to SEQ ID NO: 4158

SEQ ID NO: 10465 - protein, 191 aa, Escherichia coli; identical to SEQ ID NO: 4195

SEQ ID NO: 10466 - protein, 432 aa, Escherichia coli; identical to SEQ ID NO: 2026

SEQ ID NO: 10467 - protein, 200 aa, Escherichia coli; identical to SEQ ID NO: 1784

SEQ ID NO: 10468 - protein, 213 aa, Escherichia coli; identical to SEQ ID NO: 4186

SEQ ID NO: 10469 - protein, 207 aa, Escherichia coli; identical to SEQ ID NO: 2211

SEQ ID NO: 10470 - protein, 430 aa, Escherichia coli; identical to SEQ ID NO: 2617

SEQ ID NO: 10471 - protein, 228 aa, Escherichia coli; identical to SEQ ID NO: 4179

SEQ ID NO: 10472 - protein, 241 aa, Escherichia coli; identical to SEQ ID NO: 2851

SEQ ID NO: 10473 - protein, 111 aa, Escherichia coli; identical to SEQ ID NO: 3370

SEQ ID NO: 10474 - protein, 834 aa, Escherichia coli; identical to SEQ ID NO: 3095

SEQ ID NO: 10475 - protein, 843 aa, Escherichia coli; identical to SEQ ID NO: 3163

SEQ ID NO: 10476 - protein, 207 aa, Escherichia coli; identical to SEQ ID NO: 2213

SEQ ID NO: 10477 - protein, 193 aa, Escherichia coli; identical to SEQ ID NO: 2246

SEQ ID NO: 10478 - protein, 368 aa, Escherichia coli
MNKTITALTIIMASFAANASVLPETPVPFKSGTGAIDNDTVYIGLGSAGTAWYKLDTQAKDKKWTALAAFPGGPRDQATSAFIDGNLYVFGGIGKNSEGLTQVFNDVHKYNPKTNSWVKLMSHAPMGMAGHVTFVHNGKAYVTGGVNQNIFNGYFEDLNEAGKDSTAIDKINAHYFDKKAEDYFFNKFLLSFDPSTQQWSYAGESPWYGTAGAAVVNKGDKTWLINGEAKPGLRTDAVFELDFTGDNLKWNKLDPVSSPDGVAGGFAGISNDSLIFAGGAGFKGSRENYQNGKNYAHEGLKKSYSADIHLWHNGKWDKSGELSQGRAYGVSLPWNNSLLIIGGETAGGKAVTDSVLISVKDNKVTVQN

SEQ ID NO: 10479 - protein, 118 aa, Escherichia coli [sequence omitted]

SEQ ID NO: 10480 - protein, 816 aa, Escherichia coli; identical to SEQ ID NO: 9317

SEQ ID NO: 10481 - protein, 900 aa, Escherichia coli
MKLNIFTKSMIGMGLVCSALPALAMEVWNNQQGGNKYQVIFDGKIYENAWWVSSTNCPGKAKANDATNPWRLKRTATAAEISQFGNTLSCEKSGSSSSSNSNTPASNTPANGGSATPAQGTVPSNSSVVAWNKQQGGQTWYVVFNGAVYKNAWWVASSNCPGDAKGNDASNPWRYVRAATATEISETSNPQSCTSAPQPAPDVKPAPDVKPAPDVQPAPADKSNDNYAVVAWKGQEGSSTWYVIYNGGIYKNAWWVGAANCPGDAKENDASNPWRYVRAATATEISQYGNPGSCSVKPDNNSGAVTPVDPTPETPVTPVTPTPDNNEPSTPADSSNDYSLQAWSGQEGSEIYHVIFNGNVYQNAWWVGSEDCPRGTSAENSNNPWRLVRTATAAEMSQYGNPTTCEIDNGGVIVADGFQASKAYSANSIVDYNDAHYKTSVDQDAWGFVPGGDNPWKKYEPAKAWSASTVYVKGDRVVVDGQAYEALFWTQSDNPALVANQNATGSNSRPWKPLGKAQSYSNEELNNAPQFNPETLYASDTLIRFNGANYISQSKVQKVSPSDSNPWRVFVDWTGTKERVGTPKKAWPKHVYAPYVDFTLNTIPDLAALAKNHNVNHFTLAFVVSKDANTCLPTWGTAYGMQNYAQYSKIKALREAGGDVMLSIGGANNAPLAASCKNVDDLMQHYYDIVDNLNLRVLDFDIEGTWVADQASIERRNLAVKKVQDKWKSEGKDIAIWYTLPILPTGLTPEGMNVLSDAKAKGVELAGVNVMTMDYGNAICQSANTEGQNIHGKCATSAIANLHSQLKGLHPNKSDAEIDAMMGTTPMVGVNDVQGEVFYLSDARLVMQDAQKRNLGMVGIWSIARDLPGGTNLSPEFHGLTKEQAPKYAFSEIFAPFTKQ

SEQ ID NO: 10482 - protein, 230 aa, Escherichia coli; identical to SEQ ID NO: 3348

SEQ ID NO: 10483 - protein, 208 aa, Escherichia coli; identical to SEQ ID NO: 1949

SEQ ID NO: 10484 - protein, 851 aa, Escherichia coli
MPSFIGGLVVFVSAAFNAQAETWFDPAFFKDDPSMVADLSRFEKGQKITPGVYRVDIVLNQTIVDTRNVNFVEITPEKGIAACLTTESLDAMGVNTDAFPAFKQLDKQACVPLAEIIPDASVTFNVNKLRLEISVPQIAIKSNARGYVPPERWDEGINALLLGYSFSGANSIHSSADSDSGDSYFLNLNSGVNLGPWRLRNNSTWSRSSGQTAEWKNLSSYLQRAVIPLKGELTVGDDYTAGDFFDSVSFRGVQLASDDNMLPDSLKGFAPVVRGIAKSNAQITIKQNGYTIYQTYVSPGAFEISDLYSTSSSGDLLVEIKEADGSVNSYSVPFSSVPLLQRQGRIKYAVTLAKYRTNSNEQQESKFAQATLQWGGPWGTTWYGGGQYAEYYRAAMFGLGFNLGDFGAISFDATQAKSTLADQSEHKGQSYRFLYAKTLNQLGTNFQLMGYRYSTSGFYTLSDTMYKHMDGYEFNDGDDEDTPMWSRYYNLFYTKRGKLQVNISQQLGEYGSFYLSGSQQTYWHTDQQDRLLQFGYNTQIKDLSLGVSWNYSKSRGQPDADQVFALNFSLPLNLLLPRSNDSYTRKKNYAWMTSNTSSDNEGHITQNLGLTETLLDDGNLSYSVQQGYNSEGKTANGSASMDYKGAFADARVGYNYSDNGSQQQLNYALSGSLVAHSQGITLGQSLGETNVLIAAPGAENTRVANSTGLKTDWRGYTVVPYATSYRENRIALDAASLKRNVDLENAVVNVVPTKGALVLAEFNAHAGARVLMKTSKQGIPLRFGAIATLDGIQTNSGIIDDDGSLYMSGLPAQGAITVRWGEAPDQICHISYQLTEQQINSAITRMDAICR

SEQ ID NO: 10485 - protein, 203 aa, Escherichia coli; identical to SEQ ID NO: 2009

SEQ ID NO: 10486 - protein, 359 aa, Escherichia coli; identical to SEQ ID NO: 2328

SEQ ID NO: 10487 - protein, 729 aa, Escherichia coli; identical to SEQ ID NO: 4170

SEQ ID NO: 10488 - protein, 678 aa, Escherichia coli; identical to SEQ ID NO: 4148

SEQ ID NO: 10489 - protein, 161 aa, Escherichia coli; identical to SEQ ID NO: 2582

SEQ ID NO: 10490 - protein, 250 aa, Escherichia coli; identical to SEQ ID NO: 3048

SEQ ID NO: 10491 - protein, 237 aa, Escherichia coli; identical to SEQ ID NO: 3022

SEQ ID NO: 10492 - protein, 836 aa, Escherichia coli
MKDRIPFAVNNITCVILLSLFCNAASAVEFNTDVLDAADKKNIDFTRFSEAGYVLPGQYLLDVIVNGQSISPASLQISFVEPALSGDKAEKKLPQACLTSDMVRLMGLTAESLDKVVYWHDGQCADFHGLPGVDIRPDTGAGVLRINMPQAWLEYSDATWLPPSRWDDGIPGLMLDYNLNGTVSRNYQGGDSHQFSYNGTVGGNLGPWRLRADYQGSQEQSRYNGEKTTNRNFTWSRFYLFRAIPRWRANLTLGENNINSDIFRSWSYTGASLESDDRMLPPRLRGYAPQITGIAETNARVVVSQQGRVLYDSMVPAGPFSIQDLDSSVRGRLDVEVIEQNGRKKTFQVDTASVPYLTRPGQVRYKLVSGRSRGYGHETEGPVFATGEASWGLSNQWSLYGGAVLAGDYNALAAGAGWDLGVPGTLSADITQSVARIEGERTFQGKSWRLSYSKRFDNADADITFAGYRFSERNYMTMEQYLNARYRNDYSSREKEMYTVTLNKNVADWNTSFNLQYSRQTYWDIRKTDYYTVSVNRYFNVFGLQGVAVGLSASRSKYLGRDNDSAYLRISVPLGTGTASYSGSMSNDRYVNMAGYTDTFNDGLDSYSLNAGLNSGGGLTSQRQINAYYSHRSPLANLSANIASLQKGYTSFGVSASGGATITGKGAALHAGGMSGGTRLLVDTDGVGGVPVDGGQVVTNRWGTGVVTDISSYYRNITSVDLKRLPDDVEATRSVVESALTEGAIGYRKFSVLKGKRLFAILRLADGSQPPFGASVTSEKGRELGMVADEGLAWLSGVTPGETLSVNWDEKIQCQVNVPETAISDQQLLLPCTPQK

SEQ ID NO: 10493 - protein, 878 aa, Escherichia coli
MSYLNLRLYQRNTQCLHIRKHRLAGFFVRLFVACAFAVQAPLSSAELYFNPRFLADDPQAVADLSRFENGQELPPGTYRVDIYLNNGYMATRDVTFNTGDSEQGIVPCLTRAQLASMGLNTASVSGMNLLADDACVPLTSMIHDATAHLDVGQQRLNLTIPQAFMSNRARGYIPPELWDPGINAGLLNYNFSGNSVQNRIGSNSHYAYLNLQSGLNIGAWRLRDNTTWSYNSSDSSSGSKNKWQHINTWLERDIIPLRSRLTLGDGYTQGDIFDGINFRGAQLASDDNMLPDSQRGFAPVIHGIARGTAQVTIKQNGYDIYNSTVPPGPFTINDIYAAGNSGDLQVTIKEADGSTQIFTVPYSSVPLLQREGHTRYSITAGEYRSGNAQQEKPRFFQSTLLHGLPAGWTIYGGTQLADRYRAFNFGIGKNMGALGALSVDMTQANSTLPDDSQHDGQSVRFLYNKSLNESGTNIQLVGYRYSTSGYFNFADTTYSRMNGYNIETQDGVIQVKPKFTDYYNLAYNKRGKLQLTVTQQLGRTSTLYLSGSHQTYWGTNNVDEQFQAGLNTAFEDINWTLSYSLTKNAWQKGRDQMLALNVNIPFSHWLRSDSKSQWRHASASYSMSHDLNGRMTNLAGVYGTLLEDNNLSYSVQTGYAGGGDGNSGSTGYATLNYRGGYGNANIGYSHSDDIKQLYYGVSGGVLAHANGVTLGQPLNDTVVLVKAPGAKDAKVENQTGVRTDWRGYAVLPYATEYRENRVALDTNTLADNVDLDNAVANVVPTRGAIVRAEFKARVGIKLLMTLTHNNKPLPFGAMVTSESSQSSGIVADNGQVYLSGMPLAGKVQVKWGEEENAHCVANYQLPPESQQQLLTQLSAECR

SEQ ID NO: 10494 - protein, 243 aa, Escherichia coli; identical to SEQ ID NO: 3483

SEQ ID NO: 10495 - protein, 246 aa, Escherichia coli
MFFNTKHTAALCLASCMAFSSSAIADIVISGTRVVYKSEQKSVNVRLENKGNNPLLVQSWLDTGDDNAEPGSITVPFTATPPVSRIDAKRGQTIKLMYTASSALPKDRESVFWFNVLEVPPKPDAAKAANQSLLQLAFRTRIKLFYRPEGLSGIPSDAPLALKWSWATSEGKAALRVDNPTPYYVSFSSGDLEANGKRYPLDVKMIAPFSNDVIKVNGMSGRTSSAKVHFFAINDFGGSIEGNANL

SEQ ID NO: 10496 - protein, 351 aa, Escherichia coli; identical to SEQ ID NO: 5565

SEQ ID NO: 10497 - protein, 243 aa, Escherichia coli
MTFMKGLPLLLLVASLCSHAALQPDRTRIVFNANDKATSLRVDNRSDKLPYLAYSWLENEKGEKSDDLLVALPPIQRLEPKATTQVRIVKQASTTKLPGDRETLFFYNMREIPPSPEKNSGHAVLQVAIQSRIKVFWRPAALRKKAGEKVELQLQVSQQGNQLTLKNPTAYYLTIAYLGRNEKGVLPGFKTVMVAPFSTVITNTGSYSGSQFYLGYMDDYGALRMTTLNCSGQCRLQAVEAKK

SEQ ID NO: 10498 - protein, 200 aa, Escherichia coli; identical to SEQ ID NO: 4832

SEQ ID NO: 10499 - protein, 365 aa, Escherichia coli; identical to SEQ ID NO: 2403

SEQ ID NO: 10500 - protein, 432 aa, Escherichia coli; identical to SEQ ID NO: 2026

SEQ ID NO: 10501 - protein, 191 aa, Escherichia coli; identical to SEQ ID NO: 2727

SEQ ID NO: 10502 - protein, 232 aa, Escherichia coli; identical to SEQ ID NO: 2087

SEQ ID NO: 10503 - protein, 678 aa, Escherichia coli
MVPSTFSRLKAARCLPVVLAALIFAGCGTHTPDQSTAYMQGTAQADSAFYLQQMQQSSDDTRINWQLLAIRALVKEGKTGQAVELFNQLPQELNDSQRREKTLLAAEIKLAQKDFAGAQNLLAKITPADLEQNQQARYWQAKIDASQGRPSIDLLRALIAQEPLLGAKEKQQNIDATWQALSSMTQEQANTLVINADENILQGWLDLQRVWFDNRNDPDMMKAGIADWQKRYPNNPGAKMLPTQLVNVKAFKPASTNKIALLLPLNGQAAVFGRTIQQGFEAAKNIGTQPVAAQVAAAPAADVAEQPQPQTVDGVASPAQASVSELTGEQPAAQPVPVSAPATSTAAVSAPANPSAELKIYDTSSQPLSQILSQVQQDGASIVVGPLLKNNVEELLKSNTPLNVLALNQPENIENRVNICYFALSPEDEARDAARHIRDQGKQAPLVLIPRSSLGDRVANAFAQEWQKLGGGTVLQQKFGSTSELRAGVNGGSGIALTGSPITPRATTDSGMTTNNPTLQTTPTDDQFTNNGGRVDAVYIVATPGEIAFIKPMIAMRNGSQSGATLYASSRSAQGTAGPDFRLEMEGLQYSEIPMLAGGNLPLMQQALSAVNNDYSLARMYAMGVDAWSLANHFSQMRQVQGFEINGNTGSLTANPDCVINRKLSWLQYQQGQVVPAS

SEQ ID NO: 10504 - protein, 375 aa, Escherichia coli
MKVKVLSLLVPALLVAGAANAAEVYNKDGNKLDLYGKVDGLHYFSDDKSVDGDQTYMRLGFKGETQVTDQLTGYGQWEYQIQGNAPESENNSWTRVAFAGLKFQDIGSIDYGRNYGVVYDVTSWTDVLPEFGGDTYGSDNFMQQRGNGFATYRNTDFFGLVDGLNFAVQYQGQNGSVSGESDPDFTGHGITNNGRKALRQNGDGVGGSITYDYEGFGIGGAISSSKRTWDQNNTGLIGTGDRAETYTGGLKYDANNIYLAAQYTQTYNATRVGSLGWANKAQNFEAVAQYQFDFGLRPSVAYLQSKGKNLGTIGTRNYDDEDILKYVDVGATYYFNKNMSTYVDYKINLLDDNQFTRDAGINTDNIVALGLVYQF

SEQ ID NO: 10505 - protein, 412 aa, Escherichia coli
MKQWIAALLLMLIPGVQAAKPQKVTLMVDDVPVAQVLQALAEQEKLNLVVSPDVSGTVSLHLTDVPWKQALQTVVKSAGLITRQEGNILSVHSVAWQNDNIARQEAEQTRAQANLPLENRNITLQYADAGELAKAGEKLLSAKGSMTVDKRTNRLLLRDNKAALSALEQWVAQMDLPVGQVELSAHIVTINEKSLRELGVKWTLADAQHAGGVGQVTALGSDLSVATATTHVGFNIGRINGRLLDLELSALEQKQQLDIIASPRLLASHLQPASIKQGSEIPYQVSSGESGATSVEFKEAVLGMEVTPTVLQKGRIRLKLHISQNVPGQVLQQADGEVLAIDKQEIETQVEVKSGETLALGGIFTRKNKSGQDSVPLLGDIPWFGQLFRHDGKEDERRELVVFITPRLVSSE

SEQ ID NO: 10506 - protein, 250 aa, Escherichia coli
MKCIIGNKKWVYGFRDELKISQNIIRSGILFLLSILFINNASAGGFGLGVTRLIYPAESKQITLSVQNSGDNTSYLIQSWVDDSKTEKKSQDFVITPPLFMLPTRKEASLRIMFLGKTNLPTDRETLYWMNVKAIPPTDEKNTQKNTLQLALQNKIKLFYRPENLPVQPGKARNMLRFKYEGKQLKVINPSPYYLTLTGIKVQGSKLPNTFVPPKSDITVSSAVTLAGEITYQTINDFGATTERQKGIMQ

SEQ ID NO: 10507 - protein, 236 aa, Escherichia coli; identical to SEQ ID NO: 3482

SEQ ID NO: 10508 - protein, 243 aa, Escherichia coli
MSRKSCLIRLFKTTVSCKLFTAIILSVFLVQPALTYAGVVIGGTRVVYLSNNPDKSISVFSKEEKIPYLIQAWVDPFNKEDKIKAPFTVIPPVSRLEPAQEKVLRIIHTKGVSLPDDRESVFWLNIKNIPPSASNKAANSLEIAVKTRIKLFWRPASIRLIPEDAAPKVKWHREGRNLIAENPNPIHISVMDVIVDGHDVPLNMIRPFETLTLPLPANSAGGQMIWRFINDYGAVSDPIKMTL

SEQ ID NO: 10509 - protein, 774 aa, Escherichia coli
MTPLRVFRKTTPLVNAIRLSLLPLAGLSFSAFAAQVNIAPGSLDKALNQYAAHSGFTLSVDASLTRGKQSNGLHGDYDVESGLQQLLDGSGLQVKPLGNNSWTLEPAPAPKEDALTVVGDWLGDARENDVFEHAGARDVIRREDFAKTGATTMREVLNRIPGVSAPENNGTGSHDLAMNFGIRGLNPRLASRSTVLMDGIPVPFAPYGQPQLSLAPVSLGNMDAIDVVRGGGAVRYGPQSVGGVVNFVTRAIPQDFGIEAGVEGQLSPTSSQNNPKETHNLMVGGTADNGFGTALLYSGTRGSDWREHSATRIDDLMLKSKYAPDEVHTFNSLLQYYDGEADMPGGLSRADYDADRWQSTRPYDRFWGRRKLASLGYQFQPDSQHKFNIQGFYTQTLRSGYLEQGKRITLSPRNYWVRGIEPRYSQIFMIGPSAHEVGVGYRYLNESTHEMRYYTATSSGQLPSGSSPYDRDTRSGTEAHAWYLDDKIDIGNWTITPGMRFEHIESYQNNAITGTHEEVSYNAPLPALNVLYHLTDSWNLYANTEGSFGTVQYSQIGKAVQSGNVEPEKARTWELGTRYDDGALTAEMGLFLINFNNQYDSNQTNDTVTARGKTRHTGLETQARYDLGTLTPTLDNVSIYASYAYVNAEIREKGDTYGNLVPFSPKHKGTLGVDYKPGNWTFNLNSDFQSSQFADNANTVKESADGSTGRIPGFMLWDARVAYDFGPQMADLNLAFGVKNIFDQDYFIRSYNDNNKGIYAGQPRTLYMQGSLKF

SEQ ID NO: 10510 - protein, 614 aa, Escherichia coli
MIKKASLLTACSVTAFSAWAQDTSPDTLVVTANRFQEPLSAVLAPVTVVTREDIERWQVSSVNDVLRRLPGVAIAQNGGEGQLSTIFIRGTNSNHALVLIDGVRLNLAGVSGSADLSQFPIALVQRIEYIRGPRSAIYGSDAIGGVINIITSRENTGTEISAGWGSNSYQNYDISTQQQIGENTQVTLLGDYAYTRGFDVVAYGNTGMQPQSDRDGFLSKTLYGKLEHNFSDTWSGFVRGYGYDNRTKYDAWYSPGSPLIDTRKLYSQSWDAGLRYAGETLQSQLVSSYSHSKDYNYDPHYGRYDASANLDEMKQYNLQWTNSVTVGHGDVGAGIDWQKQSTTPGTGYLPKGYDQRNTGIYLTGLQKVGDFTLEGAVRNDDNSQFDRHTTWQSSVGWEFIEGYRFIASYGTAFKAPNLGQLYGYKGNPNLDPEKSKQWEGAFEGLTAGVNWRISGYRNDISDMINCTQNCERYYNDAKVHIKGIESTANFETGPLVHTVSYDYTDARNALTDKPLERRPKQQVKYQLDWQVFDFDWGVTYQYLGSRYDSDYSSWPYKSVKMGGVSLWDLAVAYPVTSHLTVRGKIANLFDKDYETVYGYQTAGREYTLSGSYTF

SEQ ID NO: 10511 - protein, 274 aa, Escherichia coli
MNKTAIVLLALLASSASLAATPWQKITQPVPGSAQSIGSFSNGCIVGADTLPIQSEHYQVMRTDQRRYFGHPDLVMFIQRLSRQVSNLGMGTVLIGDMGMPAGGRFNGGHASHQTGLDVDIFLQLPKTRWTSAQLLRPQALDLVSRDGKHVVPTLWKPEIFSLIKLAAQDKDVTRIFVNPAIKQQLCLDAGTDRDWLRKVRPWFQHRAHMHVRLRCPADSLECEDQPLPPPGDGCGAELQSWFEPPKPGTTKPEKKTPPPLPPSCQALLDEHVI

SEQ ID NO: 10512 - protein, 121 aa, Escherichia coli; identical to SEQ ID NO: 2522

SEQ ID NO: 10513 - protein, 682 aa, Escherichia coli; identical to SEQ ID NO: 6899

SEQ ID NO: 10514 - protein, 725 aa, Escherichia coli
MRTHKLLWPLTALLVGFNSQVSVAKSSDDDNDETLVVEATAEQILKQQPGVSVITSEDIKKSPPVNDISDIIRKMPGVNLTGNSASGTRGNNRQIDIRGMGPENTLILIDGVPVTSRNSVRYSWRGERDTRGDTNWVPPEQVERIEVIRGPAAARYGSGAAGGVVNIITKRPTNDWHASLSLYTNQPESSDEGATRRANFSLSGPMAGNALTTRLYGNLNKTDADSWDINSPVGTKNAAGHEGVRNKDINGVVSWKLNPQQILDFEAGYSRQGNIYAGDTQNSSSSAVTESLAKSGKETNRLYRQNYGITHNGIWDWGQSRFGVYYEKTNNTRMNEGLSGGGEGRILAGEKFTTNRLSSWRTSGELNIPLNVMVDQTLTVGAEWNRDKLDDPSSTSLTVNDRDISGISGSAADRSSKNHSQISALYIEDNIEPVPGTNIIPGLRFDYLSDSGGNFSPSLNLSQELGDYFKVKAGVARTFKAPNLYQSSEGYLLYSKGNGCPKDITSGGCYLIGNKDLDPEISVNKEIGLEFTWEDYHASVTYFRNDYQNKIVAGDNVIGQTASGAYILKWQNGGKALVDGIEASMSFPLVKDRLNWNTNATWMITSEQKDTGNPLSVIPKYTINNSLNWTITQAFSASVNWTLYGRQKPRTHAETRSEDTGGLSGKELGAYSLVGTNFNYDINKNLRLNVGVSNILNKQIFRSSEGANTYNEPGRAYYAGVTASF

SEQ ID NO: 10515 - protein, 541 aa, Escherichia coli
MAMAAVCGTSGIASLFSQAAFAADSDIADGQTQRFDFSILQSMAHDLAQTAWRGAPRPLPDTLATMTPQAYNSIQYDAEKSLWHNVENRQLDAQFFHMGMGFRRRVRMFSVDPATHLAREIHFRPELFKYNDAGVDTKQLEGQSDLGFAGFRVFKAPELARRDVVSFLGASYFRAVDDTYQYGLSARGLAIDTYTDSKEEFPDFTDFWFDTVKPGATTFTVYALLDSASITGAYKFTIHCEKSQVIMDVENHLYARKDIKQLGIAPMTSMFSCGTNERRMCDTIHPQIHDSDRLSMWRGNGEWICRPLNNPQKLQFNAYTDNNPKGFGLLQLDRDFSHYQDIMGWYNKRPSLWVEPRNKWGKGTIGLMEIPTTGETLDNIVCFWQPEKAVKAGDEFAFQYRLYWSAQPPVHCPLARVMATRTGMGGFPEGWAPGEHYPEKWARRFAVDFVGGDLKAAAPKGIEPVITLSSGEAKQIEILYIEPIDGYRIQFDWYPTSDSTDPVDMRMYLRCQGDAISETWLYQYFPPAPDKRQYVDDRVMS

SEQ ID NO: 10516 - protein, 729 aa, Escherichia coli
MARSKTAQPKHSLRKIAVVVATAVSGMSVYAQAAVEPKEDTITVTAAPAPQESAWGPAATIAAKHSATATKTDTPIEKTPQSISVVTNEEIQMHQFQSVKEALGYTPGVTVSSRGASNTYDFVIIRGFSSVGLNQNNYLDGLKLQGNFYNDAVIDPYMLERVELMRGPTSVLYGKSNPGGIISMVSKRPTTEPLKEIQFKMGTDNLFQTGFDFSDALDDNGEFSYRLTGLARSTNEQQKNSESQRYTIAPSFSWRPDDKTNFTFLSYFQNEPETGYYGWLPKEGTVEPLPNGKRLPTDFNEGASNNTYSRNQKMVGYSFEHGFNDTFTVRQNLRFSEMKTSQKSVYGTGIASDGHTLNRGTVVDNERLQNFSVDTQLESKFATGEVEHTLLTGVDFMRMRNDINASFGSAPSIDLYNKYHPEYFAFGNAEPYQMNESKQTGIYVQDQAEWNKWVFTLGGRYDWSKQATTVRENSYTPTEGYIERNDHQFTWRGGVNYLFDNGISPYFSYSQSFEPSAFDLWSNPRVSYKPSKGEQYEAGVKYVPNDMPVVVTGAVYQLTKTNNLTADPTNPLAQVPAGEIRARGVELEAKAALNANINLTASYTYTDAEYTKDTNLKGKTPEQVPEHMASLWGDYTFNEGPLSGLTLGTGGRFIGSSYGDPANTFKVGSAAVMDAVVKYDLARFGMAGSSLAVNVNNLLDREYVASCFQTYGCFWGAERQVVATATFRF

SEQ ID NO: 10517 - protein, 118 aa, Escherichia coli [sequence omitted]

SEQ ID NO: 10518 - protein, 259 aa, Escherichia coli
MRQYRLLSPMIKVVIVLFSLLFSTAQAGLVIGGTRFAYPENQSSISVELKNTSDRDMLVKVAVSPDDARQLTGTVESLPSYSETVFIATPPLFVLKPDKNTKIRINRVGGSLPTDRESLFILNVAALPTLENSHSVKTDNQLQIAVRNRMKIFYRPSNLSEDPNMSYQKLRWARKNEIVTVYNPGPRYVTLYNLHVDGKVIDGGMVAPFSHRQQSWCKSQGICEITWQTLDIYNNVLPALKVNMNPLQMDVSGSQFKTD

SEQ ID NO: 10519 - protein, 362 aa, Escherichia coli; identical to SEQ ID NO: 2827

SEQ ID NO: 10520 - protein, 686 aa, Escherichia coli
MFWRDMTLSIWRKKTTGLKTKKRLLPLMLAAALCSSPVWAEEATFTANFKDTDLKSFIETVGANLNKTIIMGPGVQGKVSIRTMTPLNERQYYQLFLNLLEAQGYAVVPMENDVLKVVKSSAAKVEPLPLVGEGSDNYAGDEMVTKVVPVRNVSVRELAPILRQMIDSAGSGNVVNYDPSNVIMLTGRASVVERLTEVIQRVDHAGNRTEEVIPLDNASASEIARVLESLTKNSGENQPATLKSQIVADERTNSVIVSGDPATRDKMRRLIRRLDSEMERSGNSQVFYLKYSKAEDLVDVLKQVSGTLTAAKEEAEGTVGSGREVVSIAASKHSNALIVTAPQDIMQSLQSVIEQLDIRRAQVHVEALIVEVAEGSNINFGVQWGSKDAGLMQFANGTQIPIGTLGAAISAAKPQKGSTVISENGATTINPDTNGDLSTLAQLLSGFSGTAVGVVKGDWMALVQAVKNDSSSNVLSTPSITTLDNQEAFFMVGQDVPVLTGSTVGSNNSNPFNTVERKKVGIMLKVTPQINEGNAVQMVIEQEVSKVEGQTSLDVVFGERKLKTTVLANDGELIVLGGLMDDQAGESVAKVPLLGDIPLIGNLFKSTADKKEKRNLMVFIRPTILRDGMAADGVSQRKYNYMRAEQIYRDEQGLTLMPHTAQPILPAQNQALPPEVRAFLNAGRTR

SEQ ID NO: 10521 - protein, 241 aa, Escherichia coli; identical to SEQ ID NO: 2922

SEQ ID NO: 10522 - protein, 193 aa, Escherichia coli; identical to SEQ ID NO: 2246

SEQ ID NO: 10523 - protein, 673 aa, Escherichia coli
MKMTRLYPLALGGLLLPAIANAQTSQQDESTLVVTASKQSSRSASANNVSSTVVSAPELSDAGVTASDKLPRVLPGLNIENSGNMLFSTISLRGVSSAQDFYNPAVTLYVDGVPQLSTNTIQALTDVQSVELLRGPQGTLYGKSAQGGIINIVTQQPDSTPRGYIEGGVSSRDSYRSKFNLSGPIQDGLLYGSVTLLRQVDDGDMINPATGSDDLGGTRASIGNVKLRLAPDDQPWEMGFAASRECTRATQDAYVGWNDIKGRKLSISDGSPDPYMRRCTDSQTLSGKYTTDDWVFNLISAWQQQHYSRTFPSGSLIVNMPQRWNQDVQELRAATLGDARTVDMVFGLYRQNTREKLNSAYDMPTMPYLSSTGYTTAETLAAYSDLTWHLTDRFDIGGGVRFSHDKSSTQYHGSMLGNPFGDQGKSNDDQVLGQLSAGYMLTDDWRVYTRVAQGYKPSGYNIVPTAGLDAKPFVAEKSINYELGTRYETADVTLQAATFYTHTKDMQLYSGPVGMQTLSNAGKADATGVELEAKWRFAPGWSWDINGNVIRSEFTNDSELYHDNRVPFVPRYGAGSSVNGVIDTRYGALMPRLAVNLVGPHYFDGDNQLRQGTYATLDSSLGWQATERMNISVYVDNLFDRRYRTYGYMNGSSAVAQVNMGRTVGINTRIDFF

SEQ ID NO: 10524 - protein, 162 aa, Escherichia coli; identical to SEQ ID NO: 1965

SEQ ID NO: 10525 - protein, 203 aa, Escherichia coli; identical to SEQ ID NO: 2201

SEQ ID NO: 10526 - protein, 243 aa, Escherichia coli
MKTFIFFIFTLLSFNTDAVQFVYRVDSRPPDVVFREGFRSHGANRNLQQHVRGDSCAAGSRDSAFIATTADINETYSIARQYFSSSTFHGNLYRYRIRANHEFYSLEPSVQLLRGRGVTFSRFEDIMMREQSEIVADGFIPTENIAEAIQLRYDRTSGVVSDGSGTSNPRYLNISTDSNPGVIPNIPVPQVSVRARINAFGSLLTACFSLRGTRDGGVYRSSNYYEEFYDARPLLKVLLVNGS

SEQ ID NO: 10527 - protein, 213 aa, Escherichia coli; identical to SEQ ID NO: 3368

SEQ ID NO: 10528 - protein, 518 aa, Escherichia coli
MKKLKINYLFIGILALLLAVALWPSIPWFGKADNRIAAIQARGELRVSTIHTPLTYNEINGKPVGLDYELAKQFADYLGVKLKVTVRQNISQLFDDLDNGNADLLAAGLVYNSERVKNYQPGPTYYSVSQQLVYKVGQYRPRTLGNLTAEQLTVAPGHVVVNDLQTLKETKFPELSWKVDDKKGSAELMEDVIEGKLDYTIADSVAISLFQRVHPELAVALDITDEQPVTWFSPLDGDNTLSAALLDFFNEMNEDGTLARIEEKYLGHGDDFDYVDTRTFLRAVDAVLPQLKPLFEKYAEEIDWRLLAAIAYQESHWDAQATSPTGVRGMMMLTKNTAQSLGITDRTDAEQSISGGVRYLQDMMSKVPESVPENERIWFALAAYNMGYAHMLDARALTAKTKGNPDSWADVKQRLPLLSQKPYYSKLTYGYARGHEAYAYVENIRKYQISLVGYLQEKEKQATEAAMQLAQDYPAVSPTELGKEKFPFLSFLSQSSSNYLTHSPSLLFSRKGSEEKQN

SEQ ID NO: 10529 - protein, 222 aa, Escherichia coli; identical to SEQ ID NO: 4712

SEQ ID NO: 10530 - protein, 208 aa, Escherichia coli; identical to SEQ ID NO: 1948

SEQ ID NO: 10531 - protein, 430 aa, Escherichia coli; identical to SEQ ID NO: 2617

SEQ ID NO: 10532 - protein, 565 aa, Escherichia coli
MKSPAASRPLKMALIPACIFLCFAALSVQAEETPVTPQPPDILLGPLFNDVQNAKLFPDQKTFADAVPNSDPLMILADYRMQQNQSGFDLRHFVNVNFTLPKEGEKYVPPEGQSLREHIDGLWPVLTRSTENTEKWDSLLPLPKPYVVPGGRFREVYYWDSYFTMLGLAESGHWDKVADMVANFAHEIDTYGHIPNGNRSYYLSRSQPPFFALMVELLAQHEGDAALKQYLPQMQKEYAYWMDGVENLQAGQQEKRVVKLQDGTLLNRYWDDRDTPRPESWVEDIATAKSNPNRPATEIYRDLRSAAASGWDFSSRWMDNPQQLNTLRTTSIVPVDLNSLMFKMEKILSRASKAAGDNAMANQYETLANARQKGIEKYLWNDQQGWYADYDLKSHKVRNQLTAAALFPLYVNAAAKDRASKMATATKTHLLQPGGLNTTSVKSGQQWDAPNGWAPLQWVATEGLQNYGQKEVAMDISWHFLTNVQHTYDREKKLVEKYDVSTTGTGGGGGEYPLQDGFGWTNGVTLKMLDLICPKEQPCDNVPATRPLSESTTQPLKQKEAEPTP

SEQ ID NO: 10533 - protein, 656 aa, Escherichia coli
MRLKKRYLCTALSLAFTQQAVAAQESDTLTVWSSPVSSTTTTVLDQPTMKALDKQNVAQALSVVPGVVLQKSGSRNEEQVKVRGFDSRQVPVYFDGVPIYVPYDGNLDLARILTNNLGAVEVSKGYSSLLQGPNQMGGAINITTQKPTKPLEANLGYRQGWSRSQDNAYDMHASFAASSDLGYLQVSGSQLKQDFLGLPHGVNNDIAGKHGKMINSSADDKRGIVKLGFTPRENDEYTLTYIKQDGEKDNPPYSGNSGQKSRYWQWPEYDKESFYYQGTTQLNDRFTLKSRLYRDTFENTLMMYNSLADLKNKKGSYSHYSDYSDGAGLQLAADVRENDLLSFAVNWKDDVHREKGAPHAAYDRYEDRTWSLASEYQWAAADNVDVVAGISYDWRDSVEAKKHEKDGSITHYDDNNQSAFNWQVMGKYHFANEDTLALSYYDRTRFPTLKERYTTSKPAYNQIAIVNPQLKPERARGVDLTWNGAFTHDWGFEVSVYYNRVSDAILSHNIDADTIQNQNSGTVDYSGLDAGIKGKISNILDVGLSYALIHADAKRKDIGKITDLPTQTMTAWMTLKPWEPLSVTLSEEARSSSYSNSDGSQKAAGFAVTHIRADYTLGHGFSVNASVNNLFDTKYAYSEGFIEEGRNFWAGIEYTF

SEQ ID NO: 10534 - protein, 359 aa, Escherichia coli; identical to SEQ ID NO: 2329

SEQ ID NO: 10535 - protein, 714 aa, Escherichia coli
MAPAVAQQTDDETFVVSANRSNRTVAEMAQTTWVIENAELEQQIQGGKELKDALAQLIPGLDVSSRSRTNYGMNVRGRPLVVLVDGVRLNSSRTDSRQLDSIDPFNIDHIEVISGATSLYGGGSTGGLINIVTKKGQPETMMEFEAGTKSGFSSSKDHDERIAGAVSGGNEHISGRLSVAYQKFGGWFDGNGDATLLDNTQTGLQYSDRLDIMGTGTLNIDESRQLQLITQYYTSQGDDDYGLNLGKGFSAIRGTSTPFVSNGLNSDRIPGTERHLISLQYSDSAFLGQELVGQVYYRDESLRFYPFPTVNANKQVTAFSSSQQDTDQYGMKLTLNSKPMDGWQITWGLDADHERFTSNQMFFDLAQASASGGLNNKKIYTTGRYPSYDITNLAAFLQSGYDINNLFTLNGGVRYQYTENKIDDFIGYAQQRQIAAGKATSADAIPGGSVDYDNFLFNAGLLMHITERQQAWLNFSQGVELPDPGKYYGRGIYGAAVNGHLPLTKSVNVSDSKLEGVKVDSYELGWRFTGNNLRTQIAAYYSISDKSVVANKDLTISVVDDKRRIYGVEGAVDYLIPDTDWSTGVNFNVLKTESKVNGTWQKYDVKTASPSKATAYIGWAPDPWSLRVQSTTSFDVSDAQGYKVDGYTTVDLLGSYQLPVGTLSFSIENLFDRDYTTVWGQRAPLYYSPGYGPASLYDYKGRGRTFGLNYSVLF

SEQ ID NO: 10536 - protein, 654 aa, Escherichia coli
MDSVMKGLNKITCCLLAALLMPCAGHAENEQYGANFNNADIRQFVEIVGQHLGKTILIDPSVQGTISVRSNDTFSQQEYYQFFLSILDLYGYSVITLDNGFLKVVRSANVKTSPGMIADSSRPGVGDELVTRIVPLENVPARDLAPLLRQMMDAGSVGNVVHYEPSNVLILTGRASTINKLIEVIKRVDVIGTEKQQIIHLEYASAEDLAEILNQLISESHGKSQMPALLSAKIVADKRTNSLIISGPEKARQRITSLLKSLDVEESEEGNTRVYYLKYAKATNLVEVLTGVSEKLKDEKGNERKPSSSGAMDNVAITADEQTNSLVITADQSVQEKLATVIARLDIRRAQVLVEAIIVEVQDGNGLNLGVQWANKNVGAQQFTNTGLPIFNAAQGVADYKKNGGITSANPAWDMFSAYNGMAAGFFNGDWGVLLTALASNNKNDILATPSIVTLDNKLASFNVGQDVPVLSGSQTTSGDNVFNTVERKTVGTKLKVTPQVNEGDAVLLEIEQEVSSVDSSSNSTLGPTFNTRTIQNAVLVKTGETVVLGGLLDDFSKEQVSKVPLLGDIPLVGQLFRYTSTERAKRNLMVFIRPTIIRDDDVYRSLSKEKYTRYRQEQQQRIDGKSKALVGSEDLPVLDENTFNSHTPAPSAR

SEQ ID NO: 10537 - protein, 729 aa, Escherichia coli
MLSTQFNRDNQYQTTSKPSLLAACIALALLPSAAFAAPATEETVIVEGSATTPVDDENDYSVTSTSAGTKMQMTQRDIPQSVTIVSQQRMEDQQLQTLGEVMENTLGISKSQADSDRALYYSRGFQIDNYMVDGIPTYFESRWNLGDALSDMALFERVEVVRGATGLMTGTGNPSAAINMVRKHATSREFKGDVSAEYGSWNKERYVADLQSPLTEDGKIRARIVGGYQNNDSWLDRYNSEKTFFSGIVDADLGDLTTLSAGYEYQRIDVNSPTWGGLPRWNTDGSSNSYDRARSTAPDWAYNDKEINKVFMTLKQRFADTWQATLNATHSEVEFDSKMMYVDAYVNKADGMLVGPYSNYGPGFDYVGGTGWNSGKRKVDALDLFADGSYELFGRQHNLMFGGSYSKQNNRYFSSWAYIFPDEIGSFYNFNGNFPQTDWSPQSLAQDDTTHMKSLYAATRVTLADPLHLILGARYTNWRVDTLTYSMEKNHTTPYAGLVFDINDNWSTYASYTSIFQPQNDRDSSGKYLAPITGNNYELGLKSDWMNSRLTTTLAIFRIEQDNVAQSTGTPIPGSNGETAYKAVDGTVSKGVEFELNGAITDNWQLTFGATRYIAEDNEGNAVNPNLPRTTVKMFTSYRLPVMPELTVGGGVNWQNRVYTDTVTPYGTFRAEQGSYALVDLFTRYQVTKNFSLQGNVNNLFDKTYDTNVEGSIVYGAPRNFSITGTYQF

SEQ ID NO: 10538 - protein, 332 aa, Escherichia coli; identical to SEQ ID NO: 2701

SEQ ID NO: 10539 - protein, 721 aa, Escherichia coli; identical to SEQ ID NO: 9824

SEQ ID NO: 10540 - protein, 713 aa, Escherichia coli; identical to SEQ ID NO: 6243

SEQ ID NO: 10541 - protein, 446 aa, Escherichia coli; identical to SEQ ID NO: 2177

SEQ ID NO: 10542 - protein, 478 aa, Escherichia coli; identical to SEQ ID NO: 2405

SEQ ID NO: 10543 - protein, 700 aa, Escherichia coli
MKIFSVRQTVFPALLVLSPTVFAADEQTMIVSAAPQVISELDTPAAVSVVDGEEMRLATPRINLSESLTGVPGLQVQNRQNYAQDLQLSIRGFGSRSTYGIRGIRLYVDGIPATMPDGQGQTSNIDLSSVQNVEVLRGPFSALYGNASGGVMNVITQTGQQPPTIEASSYYGSFGSWRYGLKATGATGDGTQPGDVDYTVSTTRFTTHGYRDHSGAQKNLANAKLGVRIDDASKLSLIFNSVDIKADDPGGLTEAEWKANPQQAPRAEQYDTRKTIKQTQAGLRYERSLSAQDDMSVMMYAGERETTQYQSIPMSPQLNPSHAGGVITLQRHYQGIDSRWTHRGELGVPVTFTTGLNYENMSENRKGYNNFRLNRGVPEYGQKGELRRDERNLMWNVDPYLQTQWQLTDKLSLDAGVRYSSVWFDSNDHYVTPGNGDDSGDASYHKWLPAGSLKYAMTDAWNVYLAAGRGFETPTINELSYRADGQSGMNFGLKPSTNDTIEIGSKTRIGDGLLSLALFQTDTDDEIVVDSSSGGRTTYKNAGKTRRQGAELAWDQRFAGDFRVKASWTWLDATYRSNVCNEQDCNGNRMPGIARNMGFASIGYVPEDGWYAGTEARYMGDIMADDENTAKAPSYTLVGLFTGYKYNYHNLTVDLFGRVDNLFDKEYVGSVIVNESNGRYYEPAPGRNYGVGMNIAWRFE

SEQ ID NO: 10544 - protein, 828 aa, Escherichia coli; identical to SEQ ID NO: 5894

SEQ ID NO: 10545 - protein, 249 aa, Escherichia coli
MTKHLSVKTLATVLSLLAATVSFSALASVTPDRTRLIFNESDKSISVTLRNNDPKQPYLAQSWIEDEKGVKISSPLAVLPPVQRIDAMMNGQVKIQGLPDIHKLPADRESIFYFNVREIPPKSNKANTLQIALQTRIKLFWRPKALEKASMQNPWQHKVTLTRNGQEFTVNNPTPYYVIFSNASAQKNGNPADGFSPIVMSPKTSAPLKVKMASVPVLTYVNDYGARMPLFFTCSGNSCQVDEEQSRKG

SEQ ID NO: 10546 - protein, 660 aa, Escherichia coli
MSRPQFTSLRLSLLALAVSATLPTFAFATETMTVTATGNARSSFEAPMMVSVIDTSAPENQTATSATDLLRHVPGITLDGTGRTNGQDVNMRGYDHRGVLVLVDGVRQGTDTGHLNGTFLDPALIKRVEIVRGPSALLYGSGALGGVISYDTVDAKDLLQEGQSSGFRVFGTGGTGDHSLGLGASAFGRTENLDGIVAWSSRDRGDLRQSNGETAPNDESINNMLAKGTWQIDSAQSLSGLVRYYNNDAREPKNPQAVEASESSNPMVDRSTIQRDAQLSYKLAPQGNDWLNADAKIYWSEVRINAQNTGSSGEYREQITKGARLENRSTLFADSFASHLLTYGGEYYRQEQHPGGATTGFPQAKIDFSSGWLQDEITLRDLPITLLGGTRYDSYRGSSDGYKDVDADKWSSRAGMTINPTNWLMLFGSYAQAFRAPTMGEMYNDSKHFSIGRFYTNYWVPNPNLRPETNETQEYGFGLRFDDLMLSNDALEFKASYFDTKAKDYISTTVDFAAATTMSYNVPNAKIWGWDVMTKYTTDLFSLDVAYNRTRGKDTDTGEYISSINPDTVTSTLNIPIAHSGFSVGWVGTFADRSTHISSSYSKQPGYGVNDFYVSYQGQQALKGMTTTLVLGNAFDKEYWSPQGIPQDGRNGKIFVSYQW

SEQ ID NO: 10547 - protein, 656 aa, Escherichia coli; identical to SEQ ID NO: 9895

SEQ ID NO: 10548 - protein, 244 aa, Escherichia coli; identical to SEQ ID NO: 2964

SEQ ID NO: 10549 - protein, 746 aa, Escherichia coli; identical to SEQ ID NO: 4130

SEQ ID NO: 10550 - protein, 517 aa, Escherichia coli; identical to SEQ ID NO: 2462

SEQ ID NO: 10551 - protein, 784 aa, Escherichia coli
MKKRIPTLLATMIATALYSQQGLAADLASQCMLGVPSYDRPLVQGDTNDLPVTINADHAKGDYPDDAVFTGSVDIMQGNSRLQADEVQLHQKEAPGQPEPVRTVDALGNVHYDDNQVILKGPKGWANLNTKDTNVWEGDYQMVGRQGRGKADLMKQRGENRYTILDNGSFTSCLPGSDTWSVVGSEIIHDREEQVAEIWNARFKVGPVPIFYSPYLQLPVGDKRRSGFLIPNAKYTTTNYFEFYLPYYWNIAPNMDATITPHYMHRRGNIMWENEFRYLSQAGAGLMELDYLPSDKVYEDEHPNDDSSRRWLFYWKHSGVMDQVWRFNVDYTKVSDPSYFNDFDNKYGSSTDGYATQKFSIGYAVQNFNATVSTKQFQVFSEQNTSSYSAEPQLDVNYYQNDVGPFDTRIYGQAVHFVNTRDDMPEATRVHLEPTINLPLSNNWGSINTEAKLLATHYQQTNLDWYNSRNTTRLAESANRVMPQFKVDGRMVFERDMEMLAPGYTQTLEPRAQYLYVPYRDQSKIYNYDSSLLQSDYSGLFRDRTYGGLDRIASANQVTTGVTSRIYDDAAVERFNISVGQIYYFTESRTGDDNITWENDDKTGSLVWAGDTYWRISDRWGLRGGIQYDTRLDNVATSNSSIEYRRDEDRLVQLNYRYASPEYIQATLPKYYSTAEQYKNGISQVGAVASWPIADRWSIVGAYYYDTNANKQADSMLGVQYSSCCYAIRVGYERKLNGWDNDKQHAVYDNAIGFNIELRGLSSNYGLGTQEMLRSNILPYQNTL

SEQ ID NO: 10552 - protein, 213 aa, Escherichia coli
MTKMSRYALITALAMFLAGCVGQRESAPVEEVKPAPEQPAEPQQPVPTVPSVPTIPQQPGPIEHEDQTAPPAPHIRHYDWNGAMQPMVSKMLGADGVTAGSVLLVDSVNNRTNGSLNAAEATETLRNALANNGKFTLVSAQQLSMAKQQLGLSPQDSLGTRSKAIGIARNVGAHYVLYSSASGNVNAPTLQMQLMLVQTGEIIWSGKGAVSQQ

SEQ ID NO: 10553 - protein, 836 aa, Escherichia coli
MKDRIPFAVNNITCVILLSLFCNAASAVEFNTDVLDAADKKNIDFTRFSEAGYVLPGQYLLDVIVNGQSISPASLQISFVEPALSGDKAEKKLPQACLTSDMVRLMGLTAESLDKVVYWHDGQCADFHGLPGVDIRPDTGAGVLRINMPQAWLEYSDATWLPPSRWDDGIPGLMLDYNLNGTVSRNYQGGDSHQFSYNGTVGGNLGPWRLRADYQGSQEQSRYNGEKTTNRNFTWSRFYLFRAIPRWRANLTLGENNINSDIFRSWSYTGASLESDDRMLPPRLRGYAPQITGIAETNARVVVSQQGRVLYDSMVPAGPFSIQDLDSSVRGRLDVEVIEQNGRKKTFQVDTASVPYLTRPGQVRYKLVSGRSRGYGHETEGPVFATGEASWGLSNQWSLYGGAVLAGDYNALAAGAGWDLGVPGTLSADITQSVARIEGERTFQGKSWRLSYSKRFDNADADITFAGYRFSERNYMTMEQYLNARYRNDYSSREKEMYTVTLNKNVADWNTSFNLQYSRQTYWDIRKTDYYTVSVNRYFNVFGLQGVAVGLSASRSKYLGRDNDSAYLRISVPLGTGTASYSGSMSNDRYVNMAGYTDTFNDGLDSYSLNAGLNSGGGLTSQRQINAYYSHRSPLANLSANIASLQKGYTSFGVSASGGATITGKGAALHAGGMSGGTRLLVDTDGVGGVPVDGGQVMTNRWGTGVVTDISSYYRNTTSVDLKRLPDDVEATRSVVESALTEGAIGYRKFSVLKGKRLFAILRLADGSQPPFGASVTSEKGRELGMVADEGLAWLSGVTPGETLSVNWDGKIQCQVNVPETAISDQQLLLPCTPQK

SEQ ID NO: 10554 - protein, 836 aa, Escherichia coli; identical to SEQ ID NO: 7852

SEQ ID NO: 10555 - protein, 883 aa, Escherichia coli
MTAFRAAFKAYRMHQVLILTRFARLTFALGLATAVFPVDAEYYFNPRFLSNDLAESVDLSAFTKGREAPPGTYRVDIYLNDEFMASRDITFIADDNNADLIPCLSTDLLVSLGIKKSALLDNKEHSADKHVPDNSACTPLQDRLADASSEFDVGQQHLSLSVPQIYVGRMARGYVSPDLWEEGINAGLLNYSFNGNSINNRSNHNAGKSNYAYLNLQSGINIGSWRLRDNSTWSYNSGSSNSSDSNKWQHINTSAERDIIPLRSRLTVGDSYTDGDIFDSVNFRGLKINSTEAMLPDSQHGFAPVIHGIARGTAQVSVKQNGYDVYQTTVPPGPFTIDDINSAANGGNLQVTIKEADGSIQTLYVPYSSVPVLQRAGYTRYALAMGEYRSGNNLQSTPKFVQASLMHGLKGNWTPYGGMQIAEDYQAFNLGIGKDLGLFGAFSFDITQANTTLADDTRHSGQSVKSVYSKSFYQTGTNIQVAGYRYSTQGFYNLSDSAYSRMSGYTVKPPTGDTSEQTLFIDYFNLFYSKRGQEQISISQQLGNYGTTFFSASRQSYWNTSRSDQQISFGLNVPFGDITTSLNYSYSNNIWQNDRDHLLAFTLNVPFSHWMRTDSQSAFHNSNASYSMSNDLKGGMTNLSGVYGTLLPDNNLNYSVQVGNTHGGNTSSGTSGYSSLNYRGAYGNTNVGYSRSGDSSQIYYGMSGGIIAHADGITFGQPLGDTMVLVKAPGADNVKIENQTGIHTDWRGYAILPFATEYRENRVALNANSLADNVELDETVVTVIPTHGAIARATFNVQIGGKVLMTLKYGNKSVPFGAIVTHGENKNGSIVAENGQVYLTGLPQSGKLQVSWGKDKNSNCIVEYKLPEVSPGTLLNQQTAICR

SEQ ID NO: 10556 - protein, 785 aa, Escherichia coli
MKKEIFIAAIIFHLLSKGALAEEFNYSFIRGGSKDIPDVLNSNKENVPGKYVVDVVFNGSKIASSTEMSIAKEDAEGICLSDEWLTENGIIINKDFYKNVYNSARQCYLLGNEANSKVAFDQSLQEVSIDLPQAGFQDAAKDGGVWDYGSNGFKIAYDVNTAKNSNQERTTYSSIDGQVNLGEWVLLGRGYAYQGENFDTNNLLLTRAIKSLKSDLQLGKTQLYNSLNNGFTFYGAQLKSNQDMYPWNSRAYSPVINGIARTHARVTIEQSGYTLKSIVVPPGPFVINDLNGVYSGDLIMKIYEEDGSVREQRFPVAVLPNLLRPGTYNYALAMGSKVNQDNGERDQESLFAQMSYDYGFEPFTLNSSLLLDKNYNNIGLGLIRSFGWFGAMSFSGNLSQAKYHNGKNLKGYSTSLKYAKALGDNANLQLIGYRFNSEDYIDYADFTYNSYSFIRNRPKQRYESIVTYQLPEKGMFLNFSAWKEDYWDNYNEVGANLSLTKSFDQITMTLNGGYSRLQNMDADYNVGLSLSVPLSLFDKTHYSFSNVNYDRRTGTSMNTGISGMINQRLSYNASVNQTRDTIGGTLSASYLFDWMQTSATYSQTGKNSSTSLQLGGSVIGVPEGGIIFTPVKNDQLAIVQMKDVPGVMFNGSLPGDKYGRAVIPLTAYNNNTISVNAEKLPKNIELTDNAINVTPTGNAIIYKNVKFKKINTYVVKLYGKNGYVVPMGSIAKNTQGKEVGYVNNGGILLMNLETHDEGVISLDQCQFNTQSLKKNHDQTQEIHCE

SEQ ID NO: 10557 - protein, 831 aa, Escherichia coli
MQELPMLRMTPLASAIVALLIGIEAYAAEETFDTHFMIGGMKDQQVSNIRLEDNQPLPGQYDIDIYVNKQWRGKYEIIVKDNPQETCLSREMIKRLGINTDSFASGKQCLTFKQLIQGGSYTWDIGVFRLDFSVPQAWVEELESGYVPPENWERGINAFYTSYYMSQYYSDYKASGNSKSTYVRFNSGLNLLGWQLHSDASFSKTNNNPGVWKSNTLYLERGFAQLLGTLRVGDMYTSSDIFDSVRFSGVRLFRDMQMLPNSKQNFTPRVQGIAQSNVLVTIEQNGFVVYQKEVPPGPFAITDLQLAGGGADLDVSVKEADGSVTTYLVPYAAVPNMLQPGVSKYDFAAGRSHIEGASKQSDFVQAGHQYGFNNLLTLYGGSMVANNYYAFTLGTGWNTRIGAISVDATKSHSKQDNGDVFDGQSYQIAYNKFVSQTSTRFGLAAWRYSSRDYRTFNDHVWANNKDNYRRDENDIYDIADYYQNDFGRKNSFSANMSQSLPEGWGSVSLSTLWRDYWGRSGSSKDYQLSYSNNLRRISYTLAASHAYDENHHEEKRFNIFISIPFDWGDDVTTPRRQIYMSNSTTFDDQGVASNNTGLSGTVGSRDQFNYGVNLSYQYQGNETTAGANLTWNAPVATVNGSYSQSSAYRQAGASVSGGIVAWSGGVNLANRLSETFAVMNAPGIKDAYVNGQKYRTTNRNGVVVYDGMTPYRENYLMLDVSQSDSEAELRGNRKIAAPYRGAVVLVNFDTDQRKPWFIKALRADGQPLTFGYEVNDIHGHNIGVVGQGSQLFIRTNEVPPSVNVAIDKQQGLSCTITFGKEIDESRNYICQ

SEQ ID NO: 10558 - protein, 368 aa, Escherichia coli; identical to SEQ ID NO: 2372

SEQ ID NO: 10559 - protein, 229 aa, Escherichia coli; identical to SEQ ID NO: 6623

SEQ ID NO: 10560 - protein, 878 aa, Escherichia coli
MSYLNLRLYQRNTQCLHIRKHRLAGFFVRLFVACAFAAQAPLSSAELYFNPRFLADDPQAVADLSRFENGQELPPGTYRVDIYLNNGYMATRDVTFNTGDSEQGIVPCLTRAQLASMGLNTASVSGMNLLADDACVPLTSMIHDATAQLDVGQQRLNLTIPQAFMSNRARGYIPPELWDPGINAGLLNYNFSGNSVQNRIGGNSHYAYLNLQSGLNIGAWRLRDNTSWSYNSSDSSSGSKNKWQHINTWLERDIIPLRSRLTLGDGYTQGDIFDGINFRGAQLASDDNMLPDSQRGFAPVIHGIARGTAQVTIKQNGYDIYNSTVPPGPFTINDIYAAGNSGDLQVTIKEADGSTQIFTVPYSSVPLLQREGHTRYSITAGEYRSGNAQQEKPRFFQSTLLHGLPAGWTIYGGTQLADRYRAFNFGIGKNMGALGALSVDMTQANSTLPDDSQHDGQSVRFLYNKSLNESGTNIQLVGYRYSTSGYFNFADTTYSRMNGYNIETQDGVIQVKPKFTDYYNLAYNKRGKLQLTVTQQLGRTSTLYLSGSHQTYWGTSNVDEQFQAGLNTAFEDINWTLSYSLTKNAWQKGRDQMLALNVNIPFSHWLRSDSKSQWRHASASYSMSHDLNGRMTNLAGVYGTLLEDNNLSYSVQTGYAGGGDGNSGSTGYATLNYRGGYGNANIGYSHSDDIKQLYYGVSGGVLAHANGVTLGQPLNDTVVLVKAPGAKDAKVENQTGVRTDWRGYAVLPYATEYRENRVALDTNTLADNVDLDNAVANVVPTRGAIVRAEFKARVGIKLLMTLTHNNKPLPFGAMVTSESSQSSGIVADNGQVYLSGMPLAGKVQVKWGEEENAHCVANYQLPPESQQQLLTQLSAECR

SEQ ID NO: 10561 - protein, 861 aa, Escherichia coli
MITEDISKENLFWSKVIMNANNLSCLIYCRCSLLLFAALGLTVTNHSFAAEEAEFDSEFLHLDKGINAIDIRRFSHGNPVPEGRYYSDIYVNNVWKGKADLQYLRTANTGAPTLCLTPELLSLIDLVKDTMSGNTSCFPASTGLSSARINFDLSTLRLNIEIPQALLNTRPRGYISPAQWQSGVPAAFINYDANYYQYSSSGTSNEQTYLGLKAGFNLWGWALRHRGSESWNNSYPAGYQNIETSIMHDLAPLRAQFTLGDFYTNGELMDSLSLRGVRLASDERMLPGSLRGYAPAVRGIANSNAKVTIYQNAHILYETTVPAGPFVINDLYPSGYAGDLLVKITESNGQTRMFTVPFAAVAQLIRPGFSRWQMSVGKYRYANKTYNDLIAQGTYQYGLTNDITLNSGLTTASGYTAGLAGLAFNTPLGAIASDITLSRTAFRYSGVTRKGYSLHSSYSINIPASNTNITLAAYRYSSKDFYHLKDALSANHNAFIDDVSVKSTAFYRPRNQFQISINQELGEKWGGMYLTGTTYNYWGHKGSRNEYQMGYSNFWKQLGYQIGLSQSRDNEQQRRDDRFYINFTLPLGGSVQSPVFSTVLNYSKEEKNSIQTSISGTGGEDNQFSYGISGNSQENGPSGYAMNGGYRSPYVNITTTVGHDTQNNNQRSFGASGAVVAHPYGVTLSNDLSDTFAIIHAEGAQGAVINNASGSRLDFWGNGVVPYVTPYEKNQISIDPSNLDLNVELSATEQEIIPRANSATLVKFDTKTGRSLLFDIRMSTGNPPPMASEVLDEHGQLAGYVAQAGKVFTRGLPEKGHLSVVWGPDNKDRCSFVYHVAHNKDDMQSQLVPVLCIQHPNQEKT

SEQ ID NO: 10562 - protein, 846 aa, Escherichia coli
MKLNIFTKSMIGMGLVCSALPALAMEAWNNQQGGNKYQVIFDGKIYENAWWVSSTNCPGKAKANDATNPWRLKRTATAAEISQFGNTLSCEKSGSSSSSNSNTPASNTPANGGSATPAQGTVPSNSSVVAWNKQQGGQTWYVVFNGAVYKNAWWVASSNCPGDAKGNDASNPWRYVRAATATEISETSNPQSCTSAPQPAPDVKPAPDVKPAPDVQPAPADKSNDNYAVVAWKGQEGSSTWYVIYNGGIYKNAWWVGAANCPGDAKENDASNPWRYVRAATATEITQYGNPGSCSVKPDNNGGAVTPVDPTPETPETPVTPTPDNNEPSTPADSSNDYSLQAWSGQEGSEIYHVIFNGNVYQNAWWVGSEDCPRGTSVENSNNPWRLVRTATAAEMSQYGNPTTCEIDNGGVIIANGFQASKAYSANSIVDYNDAHYKTSVDQDAWGFVPGGDNPWKKYEPAKAWSASTVYVKGDRVVVDGQAYEALFWTQSDNPALVANQNATGSNSRPWKPLGKTQSYSNEELNNAPQFNPETLYASDTLIRFNGENYISQSKVQKVSPSDSNPWRVFVDWTGTKERVGTPKKAWPKHVYAPYVDFTLNTIPDLAALAKNHNVNHFTLAFVVSKDANTCLPTWGTAYGMQNYAQYSKIKALREAGGDVMLSIGGANNAPLAASCKNVDDLMQHYYDIVDNLNLRVLDFDIEGTWVADQASIERRNLAVKKVQDKWKSEGKDIAIWYTLPILPTGLTPEGMNVLSDAKAKGVELAGVNVMTMDYGNAICQSANTEGQNIHGKCATSAIANLHAQLKGLYGNKSDAEIDAMMGTTPMVGVNDVQGEVFYLSDARLV

SEQ ID NO: 10563 - protein, 876 aa, Escherichia coli
MFSGDGGQLLSDKSLTGSAGGGNNRMRFNILPLAFFIGIIVSPARAELYFNPRFLSDDPDAVADLSAFTQGQELPPGVYRVDIYLNDTYISTRDVQFQMSQDGKQLAPCLSPEHMSAMGVNRYAVPGMERLPADTCTSLNSMIQGATFRFDVGQQRLYLTVPQIYMSNQARGYIAPEYWDNGITAALLNYDFSGNRVRDSYGGTSDYAYLNLKTGLNIGSWRLRDNTSWSYSAGKGYSQNNWQHINTWLERDIVPLRSRLTMGDSYTRGDIFDGVNFRGIQLASDDNMVPDSQRGYAPTIHGISRGTSRISIRQNGYEIYQSTLPPGPFEINDIYPAGSGGDLQVTLQEADGSVQRFNVPWSSVPVLQREGHLKYALSAGEFRSGGHQQDNPRFAEGTLKYGLPAGWTVYGGAWIAERYRAFNLGVGKNMGWLGAVSLDATRANARLPDESRYDGQSYRFLYNKSLTETGTNIQLIGYRYSTRGYFSFADTAWKKMSGYSVLTQDGVIQIQPKYTDYYNLAYNKRGRVQVSISQQTGESSTLYLSGSHQSYWGTDRTDRQLNAGFNSSVNDISWSLNYSLSRNAWQHETDRILSFDVSIPFSHWMRSDSTSAWRNASARYSQTLEAHGQAASTAGLYGTLLEDNNLGYSIQSGYTRGGYEGSSKTGYASLNYRGGYGNASAGYSHSGGYRQLYYGLSGGILAHANGLTLSQPLGDTLILVRAPGASDTRIENQTGVSTDWRGYAVLPYATDYRENRVALDTNTLADNVDIENTVVSVVPTHGAVVRADYKTRVGVKVLMTLMRNGKAVPFGSVVTARNGGSSIAGENGQVYLSGMPLSGQVSVKWGSQTTDQCTADYKLPKESAGQILSHVTVSCR

SEQ ID NO: 10564 - protein, 207 aa, Escherichia coli; identical to SEQ ID NO: 5917

SEQ ID NO: 10565 - protein, 591 aa, Escherichia coli; identical to SEQ ID NO: 6507

SEQ ID NO: 10566 - protein, 856 aa, Escherichia coli; identical to SEQ ID NO: 5908

SEQ ID NO: 10567 - protein, 161 aa, Escherichia coli; identical to SEQ ID NO: 2582

SEQ ID NO: 10568 - protein, 878 aa, Escherichia coli; identical to SEQ ID NO: 10560

SEQ ID NO: 10569 - protein, 836 aa, Escherichia coli
MKDRIPFAVNNITCVILLSLFCNAASAVEFNTDVLDAADKKNIDFTRFSEAGYVLPGQYLLDVIVNGQSISPASLQISFVEPQSSGDKAEKKLPQACLTSDMVRLMGLTAESLDKVVYWHDGQCADFHGLPGVDIRPDTGAGVLRINMPQAWLEYSDATWLPPSRWDDGIPGLMLDYNLNGTVSRNYQGGDSHQFSYNGTVGGNLGPWRLRADYQGSQEQSRYNGEKTTNRNFTWSRFYLFRAIPRWRANLTLGENNINSDIFRSWSYTGASLESDDRMLPPRLRGYAPQITGIAETNARVVVSQQGRVLYDSMVPAGPFSIQDLDSSVRGRLDVEVIEQNGRKKTFQVDTASVPYLTRPGQVRYKLVSGRSRGYGHETEGPVFATGEASWGLSNQWSLYGGAVLAGDYNALAAGAGWDLGVPGTLSADITQSVARIEGERTFQGKSWRLSYSKRFDNADADITFAGYRFSERNYMTMEQYLNARYRNDYSSREKEMYTVTLNKNVADWNTSFNLQYSRQTYWDIRKTDYYTVSVNRYFNVFGLQGVAVGLSASRSKYLGRDNDSAYLRISVPLGTGTASYSGSMSNDRYVNMAGYTDTFNDGLDSYSLNAGLNSGGGLTSQRQINAYYSHRSPLANLSANIASLQKGYTSFGVSASGGATITGKGAALHAGGMSGGTRLLVDTDGVGGVPVDGGQVVTNRWGTGVVTDISSYYRNITSVDLKRLPDDVEATRSVVESALTEGAIGYRKFSVLKGKRLFAILRLADGSQPPFGASVTSEKGRELGMVADEGLAWLSGVTPGETLSVNWDEKIQCQVNVPETAISDQQLLLPCTPQK

SEQ ID NO: 10570 - protein, 836 aa, Escherichia coli
MAACTLLYTGNTEARTYSFDASMLKGGGKGVDLTLFEEGAQLPGIYPVDIILNGSRVDSRDMAFRTEKDAEGKTYLKTCLTREMLARYGVMTEEYPELFHGDDGKEADACAELSVIPQATETYQFASQQLLLSIPQVALRPPLRGIAPEALWDDGIPAFLLNWQANTSRSEYRGYGKSVTDNYWVTLEPGINLGPWRVRNLTTWNRSSGQPGQWESAYIRAERGINSLRSRLTLGEDYTPSDIFDSVPFRGVMLGSDESMVPYNQREFAPVVRGIARTQARIEVRQNGYLIDSRTVAPGAFALTDLPLTGSGGDLQVTVQESDGTAQVLTVPYTTPAIALREGYMKYSIAGGEYRSSDDAVEHSPLGQMSVMYGLPWGLTAFGGAQMSSHYQSAALGLGWSMGRLGAVSVDGIHSRGQQKGRDTETGETWRLRYNKSFELTNTDLTAARYQYTSSGFHTLSDVLSTFRNDNFRAYSYSGDRSRRTTLRLNQSLGSLGYMSLYGSRDEFRHNRQKQDSFGMSYGTSWKNISWYVNWSRNYSTNAYYQRGHIEDSINLWMNIPLGQWIGGRDNDINVTTQTQRTTGQNTWYETGLNGRAFDRRLYWDVSERIAPGSENNVDSSRLNLRWFGTYGELAGMYSYSSHIRQMSAGISGGMVLHNEGITLGQKGEDTVALVVAPGVNGASVGSLPGVRTDTRGYTLVNHVSPYQENLITLDPTTFPENVEVSQTDTRVVPTKGAVVRAKFITRVGGRALITLSRSDGSRLPFGAVVTEEGKKGQMPGGAGVVGDNGEVYLSGLDETGQLKVQWGRNSSCRANYRLPEEKEATGIFLVRTVCM

SEQ ID NO: 10571 - protein, 825 aa, Escherichia coli
MGKDASNIDLSRYTEGNPTLPGIYDVSVYVNDQPIMSQSIAFAVIEGKKNAQACITQKNLLQFHISSPDKNSEKAILLKRDEDLGDCLNLAEMIPQSSIRYDVNDQRLDIDVPQAWIMKNYQNYVDPSLWENGINAAMLSYNLNGYHSESPGRTNDSIYAAFNGGINLGAWRLRASGNYNWMTNVHSDYDFQNRYLQRDLASLRSQLVIGESYTTGETFDSVSIRGIRLYSDSRMLPPVLASFAPIIHGVANTNAKVTVMQNGYKIYETTVPPGAFAIDDLSPSGYGSDLIVTIEEADGTKRTFSQPFSSVVQMLRPGVGRWDISAGQVLKDSIQDEPNLFQASYYYGLNNYLTGYTGIQLTDNNYTAGLLGLGMNTPVGAFSVDVTHSNVSIPDDKTYQGQSYRISWNKLFENTSTSLNIAAYRYSTQHYLGLNDALTLIDEVEHPEQELEPKSMRNYSRMKNQVTVSINQPLKFEKKDYGSFYLSGSWSDYWASGQNSTNYSIGYSNSASWGSYSISAQRSLNEDGQTDDSIYLSFTIPIENLLGTEHRSSGFQSIDTQLNSDFKGNNQLNISSSGYSDTNRISYSVNTGYMMNKSSDDLSYIGGYASYESPWGTLSGSASASSDNSRQFSLNTDGGFVLHSGGLTFSNDSFSDSDTLAVIQAPGAKGARINYGNSTVDRWGYGVTSALSPYHENRIALDINDLENDVELKSTSTVAVPRQGAVVFADFETVQGQSAIMNIVRSDGKNIPFAADIYDEQNNIIGNVGQGGQAFVRGIGQEGNIRITWIEEGKPVSCFAHYQQNTTSEKIAQSIILNGLRCQIQ

SEQ ID NO: 10572 - protein, 266 aa, Escherichia coli; identical to SEQ ID NO: 3745

SEQ ID NO: 10573 - protein, 831 aa, Escherichia coli
MQELPMLRMTPLASAIVALLIGIEAYAAEETFDTHFMIGGMKDQQVSNIRLEDNQPLPGQYDIDIYVNKQWRGKYEIIVKDNPQETCLSREMIKRLGINTDNFASGKQCLTFKQLIQGGSYTWDIGVFRLDFSVPQAWVEELESGYVPPENWERGINAFYTSYYVSQYYSDYKASGNSKSTYVRFNSGLNLLGWQLHSDASFSKTNNNPGGWKSNTLYLERGFAQLLGTLRVGDMYTSSDIFDSVRFSGVRLFRDMQMLPNSKQNFTPRVQGIAQSNALVTIEQNGFVVYQKEVPPGPFAITDLQLAGGGADLDVSVKEADGSVTTYLVPYAAVPNMLQPGVSKYDFAAGRSHIEGASKQSDFVQAGHQYGFNNLLTLYGGSMVANNYYAFTLGTGWNTRIGAISVDATKSHSKQDNGDVFDGQSYQIAYNKFVSQTSTRFGLAAWRYSSRDYRTFNDHVWANNKDNYRRDENDIYDIADYYQNDFGRKNSFSANMSQSLPEGWGSVSLSTLWRDYWGRSGSSKDYQLSYSNNLRRISYTLAASHAYDENHHEEKRFNIFISIPFDWGDDVTTPRRQIYMSNSTTFDDQGVASNNTGLSGTVGSRDQFNYGVNLSYQYQGNETTAGANLTWNAPVATVNGSYSQSSAYRQAGASVSGGIVAWSGGVNLANRLSETFAVMNAPGIKDAYVNGQKYRTTNRNGVVVYDGMTPYRENYLMLDVSQSDSEAELRGNRKIAAPYRGAVVLVNFDTDQRKPWFIKALRADGQPLTFGYEVNDIHGHNIGVVGQGSQLFIRTNEVPPSVNVAIDKQQGLSCTITFGKEIDESKNYICQ

SEQ ID NO: 10574 - protein, 882 aa, Escherichia coli
MPNHSNFRLRGIACYIALAISGGSVNAWADDSIQFDPRFLELKGDTKIDLGKFSKKGYVDAGKYNLRVFINKQPLSDEYDINWYVSENDPTKNYACLTPELVAALGLEEGIAKSLQWTHNDECLKPGQLDGMEVENDLSQSALLLTVPQAYLEYTSSDWDPPSRWDDGIPGLIADYSLNAQTRHQEQGGEDSHDISGNGTVGANLGAWRFRADWQSDYQHTRSNDDDDDSSNSTTSKHWDWSRYYAWRALPSLKAKLSLGEDYLNSDIFDGFNYIGSSVSTDDQMLPPNLRGYAPDVSGVAHSSAKVTISQMGRVLYETQVPAGPFRIQDIGDSVSGTLHVRVEEQNGQVQEYDVTTASMPFLTRQGQVRYKVMMGRPEDWNHKTEGGFFSGGEASWGVADGWSLYGGALADKHYQSAAMGVGRDLAQFGALAFDVTHSHVNLDHDSAYGKGKLDGNSFRVSYAKDFDELNSRVTFAGYRFSEKNFMTMSEYLDANQSDMARTGNDKEMYTITYNQNFAAAGVSIYLNYSHRTYWDRPEQTNYNLMFSHYFNMGSIRNMSISVTGYRYEYDDNADKGMYLSMSIPWSDSSTVTYNGSYGSGSDSSQVGYFKRVDDATHYQVNVGTSEQHGSVDGYLSHDGSLAKVDLSANYHEGEYRSAGIALQGGATLTAHGGALHRTQNMGGTRLLIDADGIANVPVESNGAPVYTNMFGKAVVADINNYYRNQAYIDLNNLPEDAEATQSVVQATLTEGAIGYRKFKVISGQKAMAVLRLRDGSYPPFGAEVKNDEQQQVGIVDDEGNVYLAGVNAGEHMMVFWEGSAQCEIVLPKPLPADLFSGLLLPCEQKGTAAPDSSAPEIKPVIQDQTRQVTPTEAPTSISATQ

SEQ ID NO: 10575 - protein, 825 aa, Escherichia coli
MGKDASNIDLSRYTEGNPTLPGIYDVSVYVNDQPIMSQSIAFAVIEGKKNAQACITQKNLLQFHISSPDKNSEKAILLKRDEDLGDCLNLAEMIPQSSIRYDVNDQRLDIDVPQAWIMKNYQNYVDPSLWENGINAAMLSYNLNGYHSESPGRTNDSIYAAFNGGINLGAWRLRASGNYNWMTNVHSDYDFQNRYLQRDLASLRSQLVIGESYTTGETFDSVSIRGIRLYSDSRMLPPVLASFAPIIHGVANTNAKVTVMQNGYKIYETTVPPGAFAIDDLSPSGYGSDLIVTIEEADGTKRTFSQPFSSVVQMLRPGVGRWDISAGQVLKDSIQDEPNLFQASYYYGLNNYLTGYTGIQLTDNNYTAGLLGLGMNTPVGAFSVDVTHSNVSIPDDKTYQGQSYRISWNKLFENTSTSLNIAAYRYSTQHYLGLNDALTLIDEVEHPEQDLEPKSMRNYSRMKNQVTVSINQPLKFEKKDYGSFYLSGSWSDYWASGQNSTNYSIGYSNSASWGSYSISAQRSLNEDGQTDDSIYLSFTIPIENLLGTEHRSSGFQSIDTQLNSDFKGNNQLNISSSGYSDTNRISYSVNTGYMMNKSSDDLSYIGGYASYESPWGTLSGSASASSDNSRQFSLNTDGGFVLHSGGLTFSNDSFSDSDTLAVIQAPGAKGARINYGNSTVDRWGYGVTSALSPYHENRIALDINDLENDVELKSTSTVAVPRQGAVVFADFETVQGQSAIMNIVRSDGKNIPFAADIYDEQNNIIGNVGQGGQAFVRGIGQEGNIRITWIEEGKPVSCFAHYQQNTTSEKIAQSIILNGLRCQIQ

SEQ ID NO: 10576 - protein, 229 aa, Escherichia coli; identical to SEQ ID NO: 6623

SEQ ID NO: 10577 - protein, 900 aa, Escherichia coli
MKLNIFTKSMIGMGLVCSALPALAMEAWNNQQGGNKYQVIFDGKIYENAWWVSSTNCPGKAKANDATNPWRLKRTATAAEISQFGNTLSCEKSGSSSSSTSNTPASNTPANGGSATPAQGTVPSNSSVVAWNKQQGGQTWYVVFNGAVYKNAWWVASSNCPGDAKGNDASNPWRYVRAATATEISETSNPQSCTSAPQPAPDVKPAPDVKPAPDVQPAPADKSNDNYAVVAWKGQEGSSTWYVIYNGGIYKNAWWVGAANCPGDAKENDASNPWRYVRAATATEITQYGNPASCSVKPDNNGGAVTPVDPTPETPETPVTPTPDNNEPSTPADSSNDYSLQAWSGQEGSEIYHVIFNGNVYQNAWWVGSEDCPRGTSVENSNNPWRLVRTATAAEMSQYGNPTTCEIDNGGVIIADGFQASKAYSANSIVDYNDAHYKTSVDQDAWGFVPGGDNPWKKYEPAKAWSASTVYVKGDRVVVDGQAYEALFWTQSDNPALIANQNATGSNSRPWKPLGKTQSYSNEELNNAPQFNPETLYASDTLIRFNGENYISQSKVQKVSPSDSNPWRVFVDWTGTKERVGTPKKAWPKHVYAPYVDFTLNTIPDLAALAKNHNVNHFTLAFVVSKDANTCLPTWGTAYGMQNYAQYSKIKALREAGGDVMLSIGGANNAPLAASCKNVDDLMQHYYDIVDNLNLRVLDFDIEGTWVADQASIERRNLAVKKVQDKWKSEGKDIAIWYTLPILPTGLTPEGMNVLSDAKAKGVELAGVNVMTMDYGNAICQSANTEGQNIHGKCATSAIANLHSQLKGLHPNKSDAEIDAMMGTTPMVGVNDVQGEVFYLSDARLVMQDAQKRNLGMVGIWSIARDLPGGTNLSPEFHGLTKEQAPKYAFSEIFAPFTKQ

SEQ ID NO: 10578 - protein, 771 aa, Escherichia coli; identical to SEQ ID NO: 5903

SEQ ID NO: 10579 - protein, 883 aa, Escherichia coli
MTAFRAAFKAYRMHQVLILPRFARLTFALGLATAVFPVDAEYYFNPRFLSNDLAESVDLSAFTKGREAPPGTYRVDIYLNDEFMASRDITFIADDNNADLIPCLSTDLLVSLGIKKSALLDNKEHSADKHVPDNSACTPLQDRLADASSEFDVGQQHLSLSVPQIYVGRMARGYVSPDLWEEGINAGLLNYSFNGNSINNRSNHNAGKSNYAYLNLQSGINIGSWRLRDNSTWSYNSGSSNSSDSNKWQHINTSAERDIIPLRSRLTVGDSYTDGDIFDSVNFRGLKINSTEAMLPDSQHGFAPVIHGIARGTAQVSVKQNGYDVYQTTVPPGPFTIDDINSAANGGDLQVTIKEADGSIQTLYVPYSSVPVLQRAGYTRYALAMGEYRSGNNLQSSPKFVQASLMHGLKGNWTPYGGMQIAEDYQAFNLGIGKDLGLFGAFSFDITQANTTLADDTRHSGQSVKSVYSKSFYQTGTNIQVAGYRYSTQGFYNLSDSAYSRMSGYTVKPPTGDTSEQTLFIDYFNLFYSKRGQEQISISQQLGNYGTTFFSASRQSYWNTSRSDQQISFGLNVPFGDITTSLNYSYSNNIWQNDRDHLLAFTLNVPFSHWMRTDSQSAFRNSNASYSMSNDLKGGMTNLSGVYGTLLPDNNLNYSVQVGNTQGGNTSSGTSGYSSLNYRGAYGNTNVGYSRSGDSSQIYYGMSGGIIAHADGITFGQPLGDTIVLVKAPGADNVKIENQTGIHTDWRGYAILPFATEYRENRVALNANSLADNVELDETVVTVIPTHGAIARATFNAQIGGKVLMTLKYGNKSVPFGAIVTHGENKNGSIVAENGQVYLTGLPQSGKLQVSWGNDKNSNCIVDYKLPAVSPGTLLNQQTAICR

SEQ ID NO: 10580 - protein, 266 aa, Escherichia coli; identical to SEQ ID NO: 1894

SEQ ID NO: 10581 - protein, 161 aa, Escherichia coli; identical to SEQ ID NO: 2582

SEQ ID NO: 10582 - protein, 820 aa, Escherichia coli; identical to SEQ ID NO: 5921

SEQ ID NO: 10583 - protein, 368 aa, Escherichia coli; identical to SEQ ID NO: 5919

SEQ ID NO: 10584 - protein, 843 aa, Escherichia coli
MHWMHLPLDHYRAHFSFSLLALTIASALPAYGGKFNPKFLENVQGIDQHVDLSVYDSPVGQQIPGKYRVFVFVNEEKMASRTLDFSTASEAQRKASGESLMPCLSRVQLEEMGVRVDSFPALKILPPEACVAFDEIIPQATSRFDFNTQTLHLTFPQAAMMMTARGTVDPSRWDEGIPALLLDYSFSGSNGRNEGSGSSPDSTSDSYYLNLRSGLNVGPWRLRNNSIWNRTDGKNQWDNVGTSLNRAIIPLKSQITLGDTATPGEIFDSVQMRGALLASDDEMLPDSQRGFAPVVRGIAKSNAEVSIEQNGYVIYRTFVQPGAFEINDLYATSGSGDLTVIIKESDGSEQRFIQPFSAVAIFQREGYLKYSLAAGEYRAGNYDSGKPRFGQFTAMYGLPWGMTAYGGALLSADYNALALGLGKNFGTIGAVSVDVTQAKSQLRNNEKDEGQSYRFLYSKSFEGGTDLRLLGYKYSTSGYYTFQEATDVRSDADSDYRRYHKRSQIQGNITQQLGDYGSVYFNMTQQDYWNVDGKENSLSAGYHGHIGRVNYSIAYTWTRSPEWDEDDRLWSFSLSIPLGGAWGSYRMTTDQNGKTSQQASVSGTLLEDRNLNYNVQQGYTSNGVGNSGSVNMGYMGGSGNIDVGYNYSKDNQQVNYGVRGGVIVHSEGITLSQPLGESLAIVSAPGARGGHVVNSSGVEVDWMGNAVVPYLTPYRETIVELRSDTLGQNLELQEAFQKVVPTRGAIVRSRFDTRVGYRVLMSLKRANGNAVPFGATAALSDESKPASSIVGEEGQLYISGMPEEGELQVSWGHEQAQRCRVPFRLPEKKDNSGIVMVNAVCDK

SEQ ID NO: 10585 - protein, 882 aa, Escherichia coli
MPNHSNFRLRGIACYIALAISGGSVNAWADDSIQFDPRFLELKGDTKIDLGKFSKKGYVDAGKYNLRVFINKQPLSDEYDINWYVSENDPTKNYACLTPELVAALGLKEGIAKSLQWTHNDECLKPGQLDGMEVENDLSQSALLLTVPQAYLEYTSSDWDPPSRWDDGIPGLIADYSLNAQTRHQEQGGEDSHDISGNGTVGANLGAWRFRADWQSDYQHTRSNDDDDDSSNSTTSKHWDWSRYYAWRALPSLKAKLSLGEDYLNSDIFDGFNYIGSSVSTDDQMLPPNLRGYAPDVSGVAHSSAKVTISQMGRVLYETQVPAGPFRIQDIGDSVSGTLHVRVEEQNGQVQEYDVTTASMPFLTRQGQVRYKVMMGRPEDWNHKTEGGFFSGGEASWGVADGWSLYGGALADKHYQSAAMGVGRDLAQFGALAFDVTHSHVNLDHDSAYGKGKLDGNSFRVSYAKDFDELNSRVTFAGYRFSEKNFMTMSEYLDANQSDMARTGNDKEMYTITYNQNFAAAGVSIYLNYSHRTYWDRPEQTNYNLMFSHYFNMGSIRNMSISVTGYRYEYDDNADKGMYLSMSIPWSDSSTVTYNGSYGSGSDSSQVGYFKRVDDATHYQVNVGTSEQHGSADGYLSHDGSLAKVDLSANYHEGEYRSAGIALQGGATLTAHGGALHRTQNMGGTRLLIDADGIANVPVESNGAPVYTNMFGKAVVADINNYYRNQAYIDLNNLPEDAEATQSVVQATLTEGAIGYRKFKVISGQKAMAVLRLRDGSYPPFGAEVKNDEQQQVGIVDDEGNVYLAGVNAGEHMMVFWEGSAQCEIVLPKPLPADLFSGLLLPCEQKGTAAPDSSAPEIKPVIQDQTRQVTPTEAPTSISATQ

SEQ ID NO: 10586 - protein, 603 aa, Escherichia coli; identical to SEQ ID NO: 5910

SEQ ID NO: 10587 - protein, 831 aa, Escherichia coli; identical to SEQ ID NO: 5915

SEQ ID NO: 10588 - protein, 825 aa, Escherichia coli
MGQNASNIDLSRYSEGNPAIPGMYDVSVYVNDQPIINQSITFIEIEGKKNAQACITLKNLLQFHINSPDINNEKAVLLARDETLGNCLNLTEIIPQASVRYDVNEQRLDIDVPQAWVMKNYQNYVDPSLWENGINAAMLSYNLNGYHSETPGRRNDSIYAAFNGGMNLGAWRLRASGNYNWMTDSGSNYDFKNRYIQRDIASLRSQLILGESYTTGETFDSVSIRGIRLYSDSRMLPPTLASFAPIIHGVANTNAKVTITQGGYKIYETTVPPGAFVIDDLSPSGYGSDLIVTVEESDGSKRTFSQPFSSVVQMLRPGVGRWDISGGQVLKDDIQDEPNLFQASYYYGLNNYLTGYTGIQITDNNYTAGLLGLGLNTSVGAFSFDVTHSNVRIPDDKTYQGQSYRVSWNKLFEETSTSLNIAAYRYSTQNYLGLNDALTLIDEVKHPEQDLEPKSMRNYSRMKNQVTVSINQPLKFEKKDYGSFYLSGSWSDYWASGQNRSNYSIGYSNSASWGSYSVSAQRSWNEDGDTDDSVYLSFTIPIEKLLDTEQRTSGFQSIDTQMSSDFKGNNQLNVSSSGYSDNARLSYSVNTGYTMNKASKDLSYVGGYASYESPWGTLAGSVSANSDNSRQVSLSTDGGFVLHSGGLTFSNDSFSDSDTLAVVQAPGAQGARINYGNSTIDRWGYGVTSALSPYHENRIALDINDLENDVELKSTSAVAVPRQGSVVFADFETVQGQSAIMNITRSDGKNIPFAADIYDEQGNVIGNVGQGGQAFVRGIEQQGNISIKWLEESKPVSCLAHYQQSSEAEKIAQSIILNGIRCQIE

SEQ ID NO: 10589 - protein, 368 aa, Escherichia coli; identical to SEQ ID NO: 2372

SEQ ID NO: 10590 - protein, 862 aa, Escherichia coli; identical to SEQ ID NO: 5913

SEQ ID NO: 10591 - protein, 883 aa, Escherichia coli; identical to SEQ ID NO: 5904

SEQ ID NO: 10592 - protein, 161 aa, Escherichia coli; identical to SEQ ID NO: 2582

SEQ ID NO: 10593 - protein, 794 aa, Escherichia coli; identical to SEQ ID NO: 5918

SEQ ID NO: 10594 - protein, 219 aa, Escherichia coli; identical to SEQ ID NO: 3328

SEQ ID NO: 10595 - protein, 819 aa, Escherichia coli; identical to SEQ ID NO: 5920

SEQ ID NO: 10596 - protein, 266 aa, Escherichia coli; identical to SEQ ID NO: 1894

SEQ ID NO: 10597 - protein, 700 aa, Escherichia coli
MKIFSVRQTVLPALLVLSPVVFAADEQTMIVSAAPQVVSELDTPAAVSVVDGEEMRLATPRINLSESLTGVPGLQVQNRQNYAQDLQLSIRGFGSRSTYGIRGIRLYVDGIPATMPDGQGQTSNIDLSSVQNVEVLRGPFSALYGNASGGVMNVTTQTGQQPPTIEASSYYGSFGSWRYGLKATGATGDGTQPGDVDYTVSTTRFTTHGYRDHSGAQKNLANAKLGVRIDDASKLSLIFNSVDIKADDPGGLTEAEWKANPQQAPRAEQYDTRKTIKQTQAGLRYERSLSAQDDMSVMMYAGERETTQYQSIPMAPQLNPSHAGGVITLQRHYQGIDSRWTQRGELGVPVTFTTGLNYENMSENRKGYNNFRLNRGVPEYGQKGELRRDERNLMWNVDPYLQTQWQLTDKLSLDAGVRYSSVWFDSNDHYVTPGNGDDSGDASYHKWLPAGSLKYAMTDAWNVYLAAGRGFETPTINELSYRADGQSGMNFGLKPSTNDTIEIGSKTRIGDGLLSLALFQTDTDDEIVVDSSSGGRTTYKNAGKTRRQGAELAWDQRFAGDFRVKASWTWLDATYRSNVCNEQDCNGNRMPGIARNMAFASIGYIPEDGWYAGTEARYMGDIMADDENTAKAPSYTLVGLFTGYKYNYHNFTVDLFGRVDNLFDKEYVGSVIVNESNGRYYEPAPGRNYGVGINIAWRFE

SEQ ID NO: 10598 - protein, 541 aa, Escherichia coli; identical to SEQ ID NO: 4576

SEQ ID NO: 10599 - protein, 732 aa, Escherichia coli; identical to SEQ ID NO: 3068

SEQ ID NO: 10600 - protein, 505 aa, Escherichia coli
MYKKTTLAVLIALLTGATTVHAQTDISSIESRLAALEQRLKNAESRAQAAEARAKTAELQVQKLAETQQQNQLTTQEVAQRTVQLEQKSAENSGFEFHGYARSGLLMNDAASSSKSGPYLTPAGETGGAVGRLGNEADTYVELNVEHKQTLDNGATTRFKAMLADGQRDYNDWTGGSSNLNIRQAFAELGALPSFTGAFKDSTVWAGKRFDRDNFDIHWLDSDVVFLAGTGGGIYDVKWNDTFRSNFSLYGRNFGDLDDIDNNVQNYILTMNHYAGPFQLMVSGLRAKDNDDRKDANGDLIQTDAANTGVHALVGLHNDTFYGLREGTAKTALLYGHGLGAEVKGIGSDGALLSEANTWRFASYGTTPLGSGWYVAPAILAQSSKDRYVKGDSYEWVTFNTRLIKEVTQNFALAFEGSYQYMDLKPKGYQNHNAVNGSFYKLTFAPTLKANDINNFFSRPELRLFATWMDWSSKLDDFASNDAFGSSGFNTGGEWNFGVQMETWF

SEQ ID NO: 10601 - protein, 578 aa, Escherichia coli
MALFERVEVVRGATGLMTGTGNPSAAINMVRKHATSREFKGDVSAEYGSWNKERYVADLQSPLTEDGKIRARIVGGYQNNDSWLDRYNSEKTFFSGIVDADLGDLTMLSAGYEYQRIDVNSPTWGGLPRWNTDGSSNSYDRARSTAPDWAYNDKEINKVFMTLKQRFADTWQATLNATHSEVEFDSKMMYVDAYVNKADGMLVGPYSNYGPGFDYVGGTGWNSGKRKVDALDLFADGSYELFGRQHNLMFGGSYSKQNNRYFSSWANIFPDEIGSFYNFNGNFPQTDWSPQSLAQNDTTHMKSLYAATRVTLADPLHLILGARYTNWRVDTLTYSMEKNHTTPYAGLVFDINDNWSTYASYTSIFQPQNDRDSSGKYLTPITGNNYELGLKSDWMNSRLTTTLAIFRIEQDNVAQSTGTPIPGSNGETAYKAVDGTVSKGVEFELNGAITDNWQLTFGATRYIAEDNEGNAVNPNLPRTTFKMFTSYRLPVMPELTVGGGVNWQNRVYTDTVTPYGTFRAEQGSYALVDLFTRYQVTKNFSLQGNVNNLFDKTYDTNVEGSIVYGAPRNFSITGTYQF

SEQ ID NO: 10602 - protein, 222 aa, Escherichia coli; identical to SEQ ID NO: 1956

SEQ ID NO: 10603 - protein, 554 aa, Escherichia coli; identical to SEQ ID NO: 6649

SEQ ID NO: 10604 - protein, 213 aa, Escherichia coli; identical to SEQ ID NO: 2232

SEQ ID NO: 10605 - protein, 681 aa, Escherichia coli
MTLSVWRKKTTGLKTKKRLLPLVLAAALCSSPVWAEEATFTANFKDTDLKSFIETVGANLNKTIIMGPGVQGKVSIRTMTPLNERQYYQLFLNLLEAQGYAVVPMENDVLKVVKSSAAKVEPLPLVGEGSDNYAGDEMVTKVVPVRNVSVRELAPILRQMIDSAGSGNVVNYDPSNVIMLTGRASVVERLTEVIQRVDHAGNRTEEVIPLDNASASEIARVLESLTKNSGENQPATLKSQIVADERTNSVIVSGDPATRDKMRRLIRRLDSEMERSGNSQVFYLKYSKAEDLVDVLKQVSGTLTAAKEEAEGTVGSGREVVSIAASKHSNALIVTAPQDIMQSLQSVIEQLDIRRAQVHVEALIVEVAEGSNINFGVQWGSKDAGLMQFANGTQIPIGTLGAAISAAKPQKGSTVISENGATTINPDTNGDLSTLAQLLSGFSGTAVGVVKGDWMALVQAVKNDSSSNVLSTPSITTLDNQEAFFMVGQDVPVLTGSTVGSNNSNPFNTVERKKVGIMLKVTPQINEGNAVQMVIEQEVSKVEGQTSLDVVFGERKLKTTVLANDGELIVLGGLMDDQAGESVAKVPLLGDIPLIGNLFKSTADKKEKRNLMVFIRPTILRDGMAADGVSQRKYNYMRAEQIYRDEQGLSLMPHTAQPILPAQNQALPPEVRAFLNAGRTR

SEQ ID NO: 10606 - protein, 733 aa, Escherichia coli; identical to SEQ ID NO: 2881

SEQ ID NO: 10607 - protein, 700 aa, Escherichia coli
MKIFSVRQTVLPALLVLSPVVFAADEQTMIVSAASQVVSELDTPAAVSVVDGEEMRLATPRINLSESLTGVPGLQVQNRQNYAQDLQLSIRGFGSRSTYGIRGIRLYVDGIPATMPDGQGQTSNIDLSSVQNVEVLRGPFSALYGNASGGVMNVTTQTGQQPPTIEASSYYGSFGSWRYGLKATGATGDGTQPGDVDYTVSTTRFTTHGYRDHSGAQKNLANAKLGVRIDDASKLSLIFNSVDIKADDPGGLTKAEWKANPQQAPRAEQYDTRKTIKQTQAGLRYERSLSAQDDMSVMMYAGERETTQYQSIPMAPQLNPSHAGGVITLQRHYQGIDSRWTHRGELGVPLTFTTGLNYENMSENRKGYNNFRLNSGVPEYGQKGELRRDERNLMWNVDPFLQTQWQLSEKLSLDAGVRYSSVWFDSNDHYVTPGNGDDSGDASYHKWLPAGSLKYAMTDAWNIYLAAGRGFETPTINELSYRADGQSGMNFGLKPSTNDTIEIGSKTRIGDGLLSLALFQTDTDDEIVVDSSSGGRTTYKNAGKTRRQGAELAWDQRFAGDFRVKASWTWLDATYRSNVCNEQDCNGNRMPGIARNMGFASIGYIPEDGWYAGTEARYMGDIMADDENTAKAPSYTLVGLFTGYKYNYHNFTVDLFGRVDNLFDKEYVGSVIVNESNGRYYEPAPGRNYGVGINIAWRFE

SEQ ID NO: 10608 - protein, 554 aa, Escherichia coli; identical to SEQ ID NO: 5969

SEQ ID NO: 10609 - protein, 191 aa, Escherichia coli; identical to SEQ ID NO: 2727

SEQ ID NO: 10610 - protein, 235 aa, Escherichia coli; identical to SEQ ID NO: 4365

SEQ ID NO: 10611 - protein, 729 aa, Escherichia coli; identical to SEQ ID NO: 3979

SEQ ID NO: 10612 - protein, 365 aa, Escherichia coli; identical to SEQ ID NO: 3084

SEQ ID NO: 10613 - protein, 331 aa, Escherichia coli; identical to SEQ ID NO: 5963

SEQ ID NO: 10614 - protein, 733 aa, Escherichia coli; identical to SEQ ID NO: 5314

SEQ ID NO: 10615 - protein, 252 aa, Escherichia coli; identical to SEQ ID NO: 3400

SEQ ID NO: 10616 - protein, 518 aa, Escherichia coli; identical to SEQ ID NO: 2349

SEQ ID NO: 10617 - protein, 517 aa, Escherichia coli; identical to SEQ ID NO: 2462

SEQ ID NO: 10618 - protein, 249 aa, Escherichia coli
MIKVVIVLFSLLFSTAQAGLVIGGTRFAYPENQSSISVELKNTSDRDMLVKVAVSPDDARQLTGTVESLPSYSETVFIATPPLFILKPDKNTKIRINRVGGSLPADRESLFILNVAALPTLENSHSVKTDNQLQIAVRNRMKIFYRPSNLSEDPNMSYQKLRWARKNEIVTVYNPGPRYVTLYNLHVDGKVIDGGMVAPFSHRQQSWCKSQGVCEIAWQTLDIYNNVLPILKVKLNPSQLDVTGFAFSQ

SEQ ID NO: 10619 - protein, 224 aa, Escherichia coli
MKGLLALLISSMVLPAHAGIVIYGTRIIYPAEHKEVMVQLMNQGNRSSLMQAWIDDGDTSLPPEKIQVPFMLTPPVAKIGANSGQQVKIKIMPNKLPTNKESIFYLNVLDIPPNSPEQEGKNALKFAMQNRIKLFYRPAGIAPVNKATFKKLLVNRSGNGLVIKNDSANWVTISDVKANNVKVNYETIMIAPLESQGVNVKSNNANNWHLTIIDDHGNYISDKI

SEQ ID NO: 10620 - protein, 541 aa, Escherichia coli
MAMAAVCGTSGIASLFSQAAFAADSDIADGQTQRFDFSILQSMAHDLAQTAWRGAPRPLPDTLATMTPQAYNSIQYDAEKSLWHNVENRQLDAQFFHMGMGFRRRVRMFSVDPATHLAREIHFRPELFKYNDAGVDTKQLEGQSDLGFAGFRVFKAPELARRDVVSFLGASYFRAVDDTYQYGLSARGLAIDTYTDSKEEFPDFTAFWFDTVKPGATTFTVYALLDSASITGAYKFTIHCEKNQVIMDVENHLYARKDIKQLGIAPMTSMFSCGTNERRMCDTIHPQIHDSDRLSMWRGNGEWICRPLNNPQKLQFNAYTDNNLKGFGLLQLDRDFSHYQDIMGWYNKRPSLWVEPRNKWGKGTIGLMEIPTTGETLDNIVCFWQPEKAVKAGDEFAFQYRLYWSAQPPVHCPLARVMATRTGMGGFPEGWAPGEHYPEKWARRFAVDFVGGDLKAAAPKGIEPVITLSSGEAKQIEILYIEPIDGYRIQFDWYPTSDSTDPVDMRMYLRCQGDAISETWLYQYFPPAPDKRQYVDDRVMS

SEQ ID NO: 10621 - protein, 376 aa, Escherichia coli
MKVKVLSLLVPALLVAGAANAAEVYNKDGNKLDLYGKVDGLHYFSDDKSVDGDQTYMRLGFKGETQVTDQLTGYGQWEYQIQGNSAENENNSWTRVAFAGLKFQDVGSFDYGRNYGVVYDVTSWTDVLPEFGGDTYGSDNFMQQRGNGFATYRNTDFFGLVDGLNFAVQYQGKNGSVDGEGMTNNGRGALRQNGDGVGGSITYDYEGFGIGAAVSSSKRTDAQNGTYVSDNNVVRNYIGTGDRAETYTGGLKYDANNIYLAAQYTQTYNATRVGSLGWANKAQNFEAVAQYQFDFGLRPSLAYLQSKGKNLGVINGRNYDDEDILKYVDVGATYYFNKNMSTYVDYKINLLDDNQFTRDAGINTDNIVALGLVYQF

SEQ ID NO: 10622 - protein, 243 aa, Escherichia coli; identical to SEQ ID NO: 2910

SEQ ID NO: 10623 - protein, 331 aa, Escherichia coli
MKKPVVIGLAVVVLAAVVAGGYWWYQSRQDNGLTLYGNVDIRTVNLSFRVGGRVESLAVDEGDAIKAGQVLGELDHKPYEIALMQAKAGVSVAQAQYDLMLAGYRDEEIAQAAAAVKQAQAAYDYAQNFYNRQQGLWKSRTISANDLENARSSRDQAQATLKSAQDKLRQYRSGNREQDIAQAKASLEQAQAQLAQAELNLQDSTLVAPSDGTLLTRAVEPGTVLNEGGTVFTVSLTRPVWVRAYVDERNLDQAQPGRKVLLYTDGRPDKPYHGQIGFVSPTAEFTPKTVETPDLRTDLVYRLRIVVTDADDALRQGMPVTVQFGDEAGHE

SEQ ID NO: 10624 - protein, 719 aa, Escherichia coli; identical to SEQ ID NO: 4573

SEQ ID NO: 10625 - protein, 122 aa, Escherichia coli; identical to SEQ ID NO: 2915

SEQ ID NO: 10626 - protein, 713 aa, Escherichia coli
MAMFTPSFSGLKGRALFSLLFAAPMIHATDSVTTKDGETITVTADANTATEATDGYQPLSTSTATLTDMPMLDIPQVVNTVSDQVLENQNATTLDEALYNVSNVVQTNTLGGTQDAFVRRGFGANRDGSIMTNGLRTVLPRSFNAATERVEVLKGPASTLYGILDPGGLINVVTKRPEKTFHGSVSATSSSFGGGTGQLDITGPIEGTQLAYRLTGEVQDEDYWRNFGKERSTFIAPSLTWFGDNATVTMLYSHRDYKTPFDRGTIFDLTTKQPVNVDRKIRFDEPFNITDGQSDLAQLNAEYHLNSQWTARFDYSYSQDKYSDNQARVTAYDATTGTLTRRVDATQGSTQRMHATRADLQGNVDIAGFYNEILGGVSYEYYDLLRTDMIRCKKAKDFNIYNPVYGNTNKCTTVSASDSDQTIKQESYSAYAQDALYLTDNWIAVAGIRYQYYTQYAGKGRPFNVNTDSRDEQWTPKLGLVYKLTPSVSLFANYSQTFMPQSSIASYIGDLPPESSNAYEVGAKFELFDGITADIALFDIHKRNVLYTESIGDETIAKTAGRVRSRGVEVDLAGALTENINIIASYGYTDAKVLEDPDYAGKPLPNVPRHTGSLFLTYDIHNMPGNNTLTFGGGGHGVSRRSATNGADYYLPGYFVADAFAAYKMKLQYPVTLQLNVKNLFDKTYYTSSIATNNLGNQIGDPREVQFTVKMEF

SEQ ID NO: 10627 - protein, 367 aa, Escherichia coli
MKVKVLSLLVPALLVAGAANAAEVYNKDGNKLDLYGKVDGLHYFSDDKSVDGDQTYMRLGFKGETQVTDQLTGYGQWEYQIQGNSAENENNSWTRVAFAGLKFQDVGSFDYGRNYGVVYDVTSWTDVLPEFGGDTYGSDNFMQQRGNGFATYRNTDFFGLVDGLNFAVQYQGKNGSVSGEGMTNNGRDALRQNGDGVGGSITYDYEGFGIGGAISSSKRTDAQNTAAYIGNGDRAETYTGGLKYDANNIYLAAQYTQTYNATRVGSLGWANKAQNFEAVAQYQFDFGLRPSVAYLQSKGKNLGTIGTRNYDDEDILKYVDVGATYYFNKNMSTYVDYKINLLDDNQFTRDAGINTDNIVALGLVYQF

SEQ ID NO: 10628 - protein, 169 aa, Escherichia coli; identical to SEQ ID NO: 3373

SEQ ID NO: 10629 - protein, 431 aa, Escherichia coli; identical to SEQ ID NO: 3408

SEQ ID NO: 10630 - protein, 192 aa, Escherichia coli
MKSKKYFIILLALAAIAGLGTHAAWSSNGLPRIDNKTLARLAQQHPVVVLFRHAERCDRSTNQCLSDKTGITVKGTQDARELGNAFSADIPDFNLYSSNTVRTIQSATWFSAGKKLTVDKRFLQCGNEIYSAIKDLQRKAPDKNIVIFTHNHCLTYIAKDKRDATFKPDYLDGLVMHVEKGKVYLDGEFVNH

SEQ ID NO: 10631 - protein, 191 aa, Escherichia coli; identical to SEQ ID NO: 6650

SEQ ID NO: 10632 - protein, 760 aa, Escherichia coli
MENNRNFPARQFHSLTFFAGLCIGITPVAQALAAEGQANADDTLVVEASTPSLYAPQQSADPKFSRPVADTTRTMTVISEQVIKDQGATNLTDALKNVPGVGAFFAGENGNSTTGDAIYMRGADTSNSIYIDGIRDIGSVSRDTFNTEQVEVIKGPSGTDYGRSAPTGSINMISKQPRNDSGIDASASIGSAWFRRGTLDVNQVIGDTTAVRLNVMGEKTHDAGRDKVKNERYGVAPSVAFGLGTANRLYLNYLHVTQHNTPDGGIPTIGLPGYSAPSAGTAALNHSGKVDTHNFYGTDSDYDDSTTDTATMRFEHDINDNTTIRNTTRWSRVKQDYLMTAIMGGASNITQPTSDVNSWTWSRTANTKDVSNKILTNQTNLTSTFYTGAIGHDVSTGVEFTRETQTNYGVNPVTLPAVNIYHPDSSIHPGGLTRNGANANGQTDTFAIYAFDTLQITRDFELNGGIRLDNYHTEYDSATACGGSGRGAITCPAGVAKGSPVTTVDTAKSGNLVNWKAGALYHLTENGNVYINYAVSQQPPGGNNFALAQSGSGNSANRTDFKPQKANTSEIGTKWQVLDKRLLLTAALFRTDIENEVEQNDDGTYSQYGKKRVEGYEISVAGNITPAWQMIGGYTQQKATIKNGKDVAQDGSSSLPYTPEHAFTLWSQYQATDDISVGAGARYIGSMHKGSDGAVGTPAFTEDYWVADAKLGYRVNRNLDFQLNVYNLFDTDYVASINKSGYRYHPGEPRTFLLTANMHF

SEQ ID NO: 10633 - protein, 303 aa, Escherichia coli
MMKKYLALALIAPLLISCSTTKKGDTYNEAWVKDTNGFDILMGQFAHNIENIWGFKEVVIAGPKDYVKYTDQYQTRSHINFDDGTITIETIAGTEPAAHLRRAIIKTLLMGDDPSSVDLYSDVDDITISKEPFLYGQVVDNTGQPIRWEGRASNFADYLLKNRLKSRSNGLRIIYSVTINMVPNHLDKRAHKYLGMVRQASRKYGVDESLILAIMQTESSFNPYAVSRSDALGLMQVVQHTAGKDVFRSQGKSGTPSRSFLFDPASNIDTGTAYLAMLNNVYLGGIDNPTSRRYAVITAYNGG

SEQ ID NO: 10634 - protein, 192 aa, Escherichia coli; identical to SEQ ID NO: 6643

SEQ ID NO: 10635 - protein, 121 aa, Escherichia coli; identical to SEQ ID NO: 2522

SEQ ID NO: 10636 - protein, 304 aa, Escherichia coli
MMKKYLALALIAPLLISCSTTKKGNTYNEAWVKDTNGFDILMGQFAHNIENIWGFKEVVIAGPKDYVKYTDQYQTRSHINFDDGTITIETIAGTEPAAHLRRAIIKTLLMGDDPSSVDLYSDVDDITISKEPFLYGQVVDNTGQPIRWEGRANNFADYLLKNRLKSRSNGLRIIYSVTINMVPNHLDKRAHKYLGMVRQASRKYGVDESLILAIMQTESSFNPYAVSRSDALGLMQVVQHTAGKDVFRSQGKSGTPSRSFLFDPASNIDTGTAYLAMLNNVYLGGIDNPTSRRYAVITAYNGGA

SEQ ID NO: 10637 - protein, 518 aa, Escherichia coli
MKKLKINYLFIGILALLLAVALWPSIPWFGKADNRIAAIQARGELRVSTIHTPLTYNEINGKPFGLDYELAKQFADYLGVKLKVTVRQNISQLFDDLDNGNADLLAAGLVYNSERVKNYQPGPTYYSVSQQLVYKVGQYRPRTLGNLTAEQLTVAPGHVVVNDLQTLKDTKFPELSWKVDDKKGSVELMEDVIEGKLDYTIADSVAISLFQRVHPELAVALDITDEQPVTWFSPLDGDNTLSAALLDFFNEMNEDGTLARIEEKYLGHGDDFDYVDTRTFLRAVDAVLPQLKPLFEKYAEEIDWRLLAAIAYQESHWDAQATSPTGVRGMMMLTKNTAQSLGITDRTDAEQSISGGVRYLQDMMSKVPESVPENERIWFALAAYNMGYAHMLDARALTAKTKGNPDSWADVKQRLPLLSQKPYYSKLTYGYARGHEAYAYVENIRKYQISLVGYLQEKEKQATEAAMQLAQDYPAVSPTELGKEKFPFLSFLSQSSSNYLTHSPSLLFSRKGSEEKQN

SEQ ID NO: 10638 - protein, 673 aa, Escherichia coli; identical to SEQ ID NO: 2919

SEQ ID NO: 10639 - protein, 103 aa, Escherichia coli
MCATKRTVIRPAWIWNTWNQTGLELGWFKQQNKTQQGVTLNESAYKTTLWHALKVGESILGSRPEIRFYGTYINILDNELSNFKFNENSKDEFMAGIQAEVWW

SEQ ID NO: 10640 - protein, 250 aa, Escherichia coli
MIKVVIVLFSLLFSTAQAGLVIGGTRFAYPENQSSISVELKNTSDRDMLVKVAVSPDDARQLTGTVESLPSYSETVFIATPPLFVLKPDKNTKIRINRVGGSLPADRESLFILNVAALPTLENSHSVKTDNQLQIAVRNRMKIFYRPSNLSEDPNMSYQKLRWARKNEIVTVYNPGPRYVTLYNLHVDGKVIDGGMVAPFSHRQQSWCKSQGVCEIAWQTLDIYNNVLPAWKVNMNLLQMDVSGSQVKTD

SEQ ID NO: 10641 - protein, 250 aa, Escherichia coli; identical to SEQ ID NO: 9497

SEQ ID NO: 10642 - protein, 386 aa, Escherichia coli; identical to SEQ ID NO: 5575

SEQ ID NO: 10643 - protein, 784 aa, Escherichia coli; identical to SEQ ID NO: 2242

SEQ ID NO: 10644 - protein, 213 aa, Escherichia coli; identical to SEQ ID NO: 2232

SEQ ID NO: 10645 - protein, 233 aa, Escherichia coli; identical to SEQ ID NO: 3276

SEQ ID NO: 10646 - protein, 360 aa, Escherichia coli; identical to SEQ ID NO: 3862

SEQ ID NO: 10647 - protein, 431 aa, Escherichia coli; identical to SEQ ID NO: 3408

SEQ ID NO: 10648 - protein, 244 aa, Escherichia coli; identical to SEQ ID NO: 2964

SEQ ID NO: 10649 - protein, 230 aa, Escherichia coli; identical to SEQ ID NO: 3019

SEQ ID NO: 10650 - protein, 650 aa, Escherichia coli; identical to SEQ ID NO: 5934

SEQ ID NO: 10651 - protein, 746 aa, Escherichia coli; identical to SEQ ID NO: 4389

SEQ ID NO: 10652 - protein, 784 aa, Escherichia coli
MKKRIPTLLATMIATALYSQQGLAADLASQCMLGVPSYDRPLVQGDTNDLPVTINADHAKGDYPDDAVFTGSVDIMQGNSRLQADEVQLHQKEAPGQPEPVRTVDALGNVHYDDNQVILKGPKGWANLNTKDTNVWEGDYQMVGRQGRGKADLMKQRGENRYTILDNGSFTSCLPGSDTWSVVGSEIIHDREEQVAEIWNARFKVGPVPIFYSPYLQLPVGDKRRSGFLIPNAKYTTTNYFEFYLPYYWNIAPNMDATITPHYMHRRGNIMWENEFRYLSQAGAGLMELDYLPSDKVYKDEHPNDDSSRRWLFYWKHSGVMDQVWRFNVDYTKVSDPSYFNDFDNKYGSSTDGYATQKFSVGYAVQNFNATVSTKQFQVFSEQNTSSYSAEPQLDVNYYQNDVGPFDTRIYGQAVHFVNTRDDMPEATRVHLEPTINLPLSNNWGSINTEAKLLATHYQQTNLDWYNSRNTTRLAESANRVMPQFKVDGRMVFERDMEMLAPGYTQTLEPRAQYLYVPYRDQSKIYNYDSSLLQSDYSGLFRDRTYGGLDRIASANQVTTGVTSRIYDDAAVERFNISVGQIYYFTESRTGDDNITWENDDKTGSLVWAGDTYWRISDRWGLRGGIQYDTRLDNVATSNSSIEYRRDEDRLVQLNYRYASPEYIQATLPKYYSTAEQYKNGISQVGAVASWPIADRWSIVGAYYYDTNANKQADSMLGVQYSSCCYAIRVGYERKLNGWDNDKQHAVYDNAIGFNIELRGLSSNYGLGTQEMLRSNILPYQNTL

SEQ ID NO: 10653 - protein, 122 aa, Escherichia coli; identical to SEQ ID NO: 2915

SEQ ID NO: 10654 - protein, 353 aa, Escherichia coli; identical to SEQ ID NO: 6704

SEQ ID NO: 10655 - protein, 446 aa, Escherichia coli; identical to SEQ ID NO: 2177

SEQ ID NO: 10656 - protein, 367 aa, Escherichia coli; identical to SEQ ID NO: 4285

SEQ ID NO: 10657 - protein, 255 aa, Escherichia coli; identical to SEQ ID NO: 5972

SEQ ID NO: 10658 - protein, 360 aa, Escherichia coli; identical to SEQ ID NO: 3354

SEQ ID NO: 10659 - protein, 478 aa, Escherichia coli; identical to SEQ ID NO: 2405

SEQ ID NO: 10660 - protein, 250 aa, Escherichia coli; identical to SEQ ID NO: 3048

SEQ ID NO: 10661 - protein, 728 aa, Escherichia coli
MIIVIVCIIVTPQSKKADKSEAVPAFWDDHLHTNKSTAMLPYARGRKEDVSDTHFIFVVTSWRYGMFRLNPFVRVGLCLSAISCAWPVLAVDDDGETMVVTASSVEQNLKDAPASISVITQEDLQRKPVQNLKDVLKEVPGVQLTNEGDNRKGVSIRGLDSSYTLILVDGKRVNSRNAVFRHNDFDLNWIPVDSIERIEVVRGPMSSLYGSDALGGVVNIITKKIGQKWSGTVTVDTTVQEHRDRGDTYNGQFFTSGPLIDGVLGMKAYGSLAKREKDDPQNSTTTDTGETPRIEGFSSRDGNVEFAWTPNQNHDFTAGYGFDRQERDSDSLDKNRLERQNYSVSHNGRWDYGTSELKYYGEKVENKNPGNSSPITSESNTVDGKYTLPLTAINQFLTVGGEWRHDKLSDAVNLTGGTSSKTSASQYALFVEDEWRIFEPLALTTGVRMDDHETYGEHWSPRAYLVYNATDTVTVKGGWATAFKAPSLLQLSPDWTSNSCRGACKIVGSPELKPETSESWELGLYYMGEEGWLEGVESSVTVFRNDVKDRISISRTSDVNAAPGYQNFVGFETGANGRRIPVFSYYNVNKARIQGVETELKIPFNDEWKLSINYTYNDGRDVSNGENKPLSDLPFHTANGTLDWKPLALEDWSFYVSGHYTGQKRADSATAKTPGGYTIWNTGAAWQVTKDVKLRAGVLNLGDKDLSRDDYSYNEDGRRYFMAVDYRF

SEQ ID NO: 10662 - protein, 681 aa, Escherichia coli; identical to SEQ ID NO: 6654

SEQ ID NO: 10663 - protein, 654 aa, Escherichia coli; identical to SEQ ID NO: 5571

SEQ ID NO: 10664 - protein, 386 aa, Escherichia coli; identical to SEQ ID NO: 3094

SEQ ID NO: 10665 - protein, 239 aa, Escherichia coli; identical to SEQ ID NO: 5968

SEQ ID NO: 10666 - protein, 111 aa, Escherichia coli; identical to SEQ ID NO: 3419

SEQ ID NO: 10667 - protein, 169 aa, Escherichia coli; identical to SEQ ID NO: 3373

SEQ ID NO: 10668 - protein, 274 aa, Escherichia coli; identical to SEQ ID NO: 2313

SEQ ID NO: 10669 - protein, 241 aa, Escherichia coli; identical to SEQ ID NO: 5957

SEQ ID NO: 10670 - protein, 208 aa, Escherichia coli; identical to SEQ ID NO: 1948

SEQ ID NO: 10671 - protein, 228 aa, Escherichia coli
MKRISLAVLALLMTAQQCFAGGVALSTTRVIYDGGKKEASLTVENHNKNEEFLIQSWIDDVNGNKKTPFIITPPLFKLDPDKNNVLRIVNIEDTLPKDRESVYWINVKAIPAKSAENENKNVLQIAVRTRLKLFYRPKGLPGSNLEAMKQLRFQRQNNQIVVNNDSAYNLTFNQISINGQKIERAGMVLAKGTLNINLPAGTGNANEVKYSIINDFGVAGEMLTKSIN

SEQ ID NO: 10672 - protein, 628 aa, Escherichia coli; identical to SEQ ID NO: 9810

SEQ ID NO: 10673 - protein, 722 aa, Escherichia coli; identical to SEQ ID NO: 5958

SEQ ID NO: 10674 - protein, 686 aa, Escherichia coli; identical to SEQ ID NO: 3129

SEQ ID NO: 10675 - protein, 733 aa, Escherichia coli; identical to SEQ ID NO: 5945

SEQ ID NO: 10676 - protein, 721 aa, Escherichia coli; identical to SEQ ID NO: 4575

SEQ ID NO: 10677 - protein, 446 aa, Escherichia coli; identical to SEQ ID NO: 2189

SEQ ID NO: 10678 - protein, 242 aa, Escherichia coli
MLVSTALMAMLTTASLTAHASVTPDRTRLVFNESDKSISVTLRNNNEKLPYLAQSWLEDEKGNKIISPLAVLPPVQRIDAMMNGQVKIQALPDIHTLPSDRESLFYYNVREIPPKSGKANTLQIALQTRIKLFWRPKALENIDMRKPWQFKVTLTRSGQDYTVNNPTPYHVIISDASTQKKGLTAAGFKPLVMPPKTSQPLKAKMASAPVLTYINDYGARMPLIFRCEGNTCKVDEDQSSKG

SEQ ID NO: 10679 - protein, 721 aa, Escherichia coli; identical to SEQ ID NO: 9824

SEQ ID NO: 10680 - protein, 192 aa, Escherichia coli
MKSKKYFIILLALAAIAGLGTHAAWSSNGLPRIDNKTLARLAQQHPVVVLFRHAERCDRSTNQCLSDKTGITVKGTQDARELGNAFSADIPDFDLYSSNTVRTIQSATWFSAGKKLTVDERFLQCGNEIYSAIKDLQRKAPDKNIVIFTHNHCLTYIAKDKRDATFKPDYLDGLVMHVEKGKVYLDGEFVNH

SEQ ID NO: 10681 - protein, 245 aa, Escherichia coli; identical to SEQ ID NO: 3410

SEQ ID NO: 10682 - protein, 231 aa, Escherichia coli; identical to SEQ ID NO: 5923

SEQ ID NO: 10683 - protein, 241 aa, Escherichia coli; identical to SEQ ID NO: 2890

SEQ ID NO: 10684 - protein, 362 aa, Escherichia coli
MMKRNILAVIVPALLVAGTANAAEIYNKDGNKVDLYGKAVGLHYFSKGNGENSYGGNGDMTYARLGFKGETQINSDLTGYGQWEYNFQGNNSEGADAQTGNKTRLAFAGLKYADVGSFDYGRNYGVVYDALGYTDMLPEFGGDTAYSDDFFVGRVGGVATYRNSNFFGLVDGLNFAVQYLGKNERDTARRSNGDGVGGSISYEYEGFGIVGAYGAADRTNLQEESPLGKGKKAEQWATGLKYDANNIYLAANYGETRNATPITNKFTNTSGFANKTQDVLLVAQYQFDFGLRPSIAYTKSKAKDVEGIGDVDLVNYFEVGATYYFNKNMSTYVDYIINQIDSDNKLGVGSDDTVAVGIVYQF

SEQ ID NO: 10685 - protein, 111 aa, Escherichia coli; identical to SEQ ID NO: 3096

SEQ ID NO: 10686 - protein, 213 aa, Escherichia coli; identical to SEQ ID NO: 2232

SEQ ID NO: 10687 - protein, 828 aa, Escherichia coli; identical to SEQ ID NO: 2388

SEQ ID NO: 10688 - protein, 700 aa, Escherichia coli; identical to SEQ ID NO: 5975

SEQ ID NO: 10689 - protein, 713 aa, Escherichia coli
MAMFTPSFSGLKGRALFSLLFAAPMIHATDSVTTKDGETITVTADANTATEATDGYQPLSTSTATLTDMPMLDIPQVVNTVSDQVLENQNATTLDEALYNVSNVVQTNTLGGTQDAFVRRGFGANRDGSIMTNGLRTVLPRSFNAATERVEVLKGPASTLYGILDPGGLINVVTKRPEKTFHGSVSATSSSFGGGTGQLDITGPIEGTQLAYRLTGEVQDEDYWRNFGKERSTFIAPSLTWFGDNATVTMLYSHRDYKTPFDRGTIFDLTTKQPVNVDRKIRFDEPFNITDGQSDLAQLNAEYHLNSQWTARFDYSYSQDKYSDNQARVTAYDATTGTLTRRVDATQGSTQRMHATRADLQGNVDIAGFYNEILGGVSYEYYDLLRTDMIRCKKAKDFNIYNPVYGNTSKCTTVSASDSDQTIKQESYSAYAQDALYLTDNWIAVAGIRYQYYTQYAGKGRPFNVNTDSRDEQWTPKLGLVYKLTPSVSLFANYSQTFMPQSSIASYIGDLPPESSNAYEVGAKFELFDGITADIALFDIHKRNVLYTESVGDETIAKTAGRVRSRGVEVDLAGALTENINIIASYGYTDAKVLEDPDYAGKPLPNIPRHTGSLFLTYDIHNMPGNNTLTFGGGGHGVSRRSATNGADYYLPGYFVADAFAAYKMKLQYPVTLQLNVKNLFDKTYYTSSIATNNLGNQIGDPREVQFTVKMEF

SEQ ID NO: 10690 - protein, 656 aa, Escherichia coli
MRLKKRYLCTVLSLAFTQQAVAAQESDTLTVWSSPVSSTTTTVLDQPTMKALDKQNVAQALSVVPGVVLQKSGSRNEEQVKVRGFDSRQVPVYFDGVPIYVPYDGNLDLARILTNNLGAVEVSKGYSSLLQGPNQMGGAINITTQKPTKPLEANLGYRQGWSRSHDNAYDMHASFAASSDLGYLQVSGSQLKQDFLGLPHGVNNDIAGKHGKMINSSADDKHGIVKLGFTPRENDEYTLTYIKQDGEKDNPPYSGNSGQKSRYWQWPEYDKESFYYQGTTQLNDRFTLKSRLYRDTFENTLMMYNSLADLKNKKGSYSHYSDYSDGAGLQLAADVRENDLLSFAVNWKDDVHREKGAPHAAYDRYEDRTWSLASEYQWAAADNVDVVAGISYDWRDSVEAKKHEKDGSITHYDDNNQSAFNWQVMGKYHFANEDTLALSYYDRTRFPTLKERYTTSKPAYNQIAIVNPQLKPERARGVDLTWNGAFTHDWGFEVSVYYNRVSDAILSHNIDADTIQNQNSGTVDYSGLDAGIKGKISNILDVGLSYALIHADAKRKDIGKITDLPTQTMTAWMTLKPWEPLSVTLSEEARSSSYSNSDGSQKAAGFAVTHIRADYTLGHGFSVNASVNNLFDTKYAYSEGFIEEGRNFWAGIEYTF

SEQ ID NO: 10691 - protein, 673 aa, Escherichia coli
MKMTRLYPLALGGLLLPAIANAQTSQQDESTLVVTASKQSSRSASANNVSSTVVSAPELSDAGVTASDKLPRVLPGLNIENSGNMLFSTISLRGVSSAQDFYNPAVTLYVDGVPQLSTNTIQALTDVQSVELLRGPQGTLYGKSAQGGIINIVTQQPDSTPRSYIEGGVSSRDSYRSKFNLSGPIQDGLLYGSVTLLRQVDDGDMINPATGSDDLGGTRASIGNVKLRLAPDDQPWEMGFAASRECTRATQDAYVGWNDIKGRKLSISDGSPDPYMRRCTDSQTLSGKYTTDDWVFNLISAWQQQHYSRTFPSGSLIVNMPQRWNQDVQELRAATLGDARTVDMVFGLYRQNTREKLNSAYDMPTMPYLSSTGYTTAETLAAYSDLTWHLTDRFDIGGGVRFSHDKSSTQYHGSMLGNPFGDQGKSNDDQVLGQLSAGYMLTDDWRVYTRVAQGYKPSGYNIVPTAGLDAKPFVAEKSINYELGTRYETADVTLQAATFYTHTKDMQLYSGPVGMQTLSNAGKADATGVELEAKWRFAPGWSWDINGNVIRSEFTNDSELYHGNRVPFVPRYGAGSSVNGVIDTRYGALMPRLAVNLVGPHYFDGDNQLRQGTYATLDSSLGWQATERMNISVYVDNLFDRRYRTYGYMNGSSAVAQVNMGRTVGINTRIDFF

SEQ ID NO: 10692 - protein, 231 aa, Escherichia coli
MMKHMRIWAVLASFLVFFYIPQSYAGVALGATRVIYPEGQKQVQLAVTNNDDKSSYLIQSWIENAEGKKDARFVITPPLFSMQGKKENTLRIIDATNGQMPEDRESLFWVNVKAIPAMDKAKTGENYLQFAIVSRIKLLYRPQGLVIPPEQAPGKLEFTRENGGLTLFNPTPYYLTVTDLKAGNKSLENTMVPPQGKVTVNIPGGYTGGDITYKTINDYGALTEQVRGVVK

SEQ ID NO: 10693 - protein, 242 aa, Escherichia coli
MLVSTALMALLTTASLTAHASVTPDRTRLVFNESDKSISVTLRNNNEKLPYLAQSWLEDEKGNKITSPLAVLPPVQRIDAMMNGQVKIQALPDIHTLPSDRESLFYYNVREIPPKSGKANTLQIALQTRIKLFWRPKALEKIDMRKPWQFKVTLTRSGQDYTVNNPTPYHVIISDASTQKKGLTAAGFKPLVMPPKTSQPLKAKMASAPVLTYINDYGARMPLIFRCEGNTCKVDEDQSSKG

SEQ ID NO: 10694 - protein, 1024 aa, Escherichia coli
MPTITTAQIKSTLQSAKQSAANKLHSAGQSTKDALKKAAEQTRNAGNRLILLIPKDYKGQGSSLNDLVRTADELGIEVQYDEKNGTAITKQVFGTAEKLIGLTERGVTIFAPQLDKLLQKYQKAGNKLGGSAENIGDNLGKAGSVLSTFQNFLGTALSSMKIDELIKKQKSGSNVSSSELAKASIELINQLVDTAASINNNVNSFSQQLNKLGSVLSNTKHLNGVGNKLQNLPNLDNIGAGLDTVSGILSAISASFILSNADADTGTKAAAGVELTTKVLGNVGKGISQYIIAQRAAQGLSTSAAAAGLIASVVTLAISPLSFLSIADKFKRANKIEEYSQRFKKLGYDGDSLLAAFHKETGAIDASLTTISTVLASVSSGISAAATTSLVGAPVSALVGAVTGIISGILEASKQAMFEHVASKMADVIAEWEKKHGKNYFENGYDARHAAFLEDNFKILSQYNKEYSVERSVLITQQHWDMLIGELASVTRNGDKTLSGKSYIDYYEEGKRLERRPKEFQQQIFDPLKGNIDLSDSKSSTLLKFVTPLLTPGEEIRERRQSGKYEYITELLVKGVDKWTVKGVQDKGSVYDYSNLIQHASVGNNQYREIRIESHLGDGDDKVFLSAGSANIYAGKGHDVVYYDKTDTGYLTIDGTKATEAGNYTVTRVLGGDVKVLQEVVKEQEVSVGKRTEKTQYRSYEFTHINGKNLTETDNLYSVEELIGTTRADKFFGSKFTDIFHGADGDDHIEGNDGNDRLYGDKGNDTLRGGNGDDQLYGGDGNDKLIGGTGNNYLNGGDGDDELQVQGNSLAKNVLSGGKGNDKLYGSEGADLLDGGEGNDLLKGGYGNDIYRYLSGYGHHIIDDEGGKDDKLSLADIDFRDVAFKREGNDLIMYKAEGNVLSIGHKNGITFKNWFEKESDDLSNHQIEQIFDKDGRVITPDSLKKAFEYQQSNNKVSYVYGHDASTYGSQDNLNPLINEISKIISAAGNFDVKEERSAASLLQLSGNASDFSYGRNSITLTASA

SEQ ID NO: 10695 - protein, 362 aa, Escherichia coli; identical to SEQ ID NO: 4554

SEQ ID NO: 10696 - protein, 353 aa, Escherichia coli
MKMKKSTLALVVMGIVASVSVQAAEIYNKDGNKLDVYGKVKAMHYMSDNDSKDGDQSYIRFGFKGETQINDQLTGYGRWEAEFAGNKAESDTAQQKTRLAFAGLKYKDLGSFDYGRNLGALYDVEAWTDMFPEFGGDSSAQTDNFMTKRASGLATYRNTDFFGVIDGLNLTLQYQGKNENRDVKKQNGDGFGTSLTYDFGGSDFAISGAYTNSDRTNEQNLQSRGTGKRAEAWATGLKYDANNIYLATFYSETRKMTPISGGFANKTQNFEAVAQYQFDFGLRPSLGYVLSKGKDIEGIGDEDLVNYVDVGATYYFNKNMSAFVDYKINQLESDNKLNINNDDIVAVGMTYQF

SEQ ID NO: 10697 - protein, 331 aa, Escherichia coli; identical to SEQ ID NO: 2713

SEQ ID NO: 10698 - protein, 267 aa, Escherichia coli; identical to SEQ ID NO: 5971

SEQ ID NO: 10699 - protein, 446 aa, Escherichia coli; identical to SEQ ID NO: 2176

SEQ ID NO: 10700 - protein, 771 aa, Escherichia coli
MRRVDGDHARQLQFVAKMQEKTMNKKIHSLALLVNLGIYGVALPVLAEETSDNAVSHDDTIVVTAAEQNLQAPGVSTITADEIRKNPVARDVSEIIRTMPGVNLTGNSTSGQRGNNRQIDIRGMGPENTLILIDGKPVSSRNSVRQGWRGERDTRGDTSWVPPEMIERIEVLRGPAAARYGNGAAGGVVNIITKKGSGEWHGSWDAYFNAPEHKEEGATKRTNFSLTGPLGDEFSFRLYGNLDKTQADAWDINQGHQSARAGTYATTLPAGREGVINKDINGVVRWDFAPLQSLELEAGYSRQGNLYAGDTQNTNSDAYTRSKYGDETNRLYRQNYSLTWNGGWDNGVTTSNWVQYEHTRNSRIPEGLAGGTEGKFNEKAAQDFVDIDLDDVMLHSEVNLPIDFLVNQTLTLGTEWNQQRMKDLSSNTQALTGTNTGGAIDGVSATDRSPYSKAEIFSLFAENNMELTDSTIVTPGLRFDHHSIVGNNWSPALNISQSLGDDFTLKMGIARAYKAPSLYQTNPNYILYSKGQGCYASAGGCYLQGNDDLKAETSINKEIGLEFKRDGWLAGVTWFRNDYRNKIEAGYVAVGQNAVGTDLYQWDNVPKAVVEGLEGSLNVPVSETVMWTNNITYMLKSENKTTGDRLSIIPEYTLNSTLSWQAREDLSMQTTFTWYGKQQPKKYNYKGQPAVGPETKEISPYSIVGLSATWDVTKNVSLTGGVDNLFDKRLWRAGNAQTTGDLAGANYIAGAGAYTYNEPGRTWYMSINTHF

SEQ ID NO: 10701 - protein, 274 aa, Escherichia coli; identical to SEQ ID NO: 2313

SEQ ID NO: 10702 - protein, 353 aa, Escherichia coli; identical to SEQ ID NO: 4626

SEQ ID NO: 10703 - protein, 614 aa, Escherichia coli
MIKKASLLTACSVTAFSAWAQDTSPDTLVVTANRFEQPRSTVLAPTTVVTRQDIDRWQSTSVNDVLRRLPGVDITQNGGSGQLSSIFIRGTNASHVLVLIDGVRLNLAGVSGSADLSQFPIALVQRVEYIRGPRSAVYGSDAIGGVVNIITTRDHPGTEISAGWGSNSYQNYDVSTQQQLGDKTRVTLLGDYAHTHGYDVVAYGNTGTQAQPDNDGFLSKTLYGALEHNFTDVWSGFVRGYGYDNRTNYDAYYSPGLPLVDTRKLYSQSWDAGLRYNGELIKSQLISSYSHSKDYNYDPHYGRYDSSATLDEMKQYTVQWANNIIIGHGNIGAGVDWQKQSTAPGTAYVEDGYDQRNTGIYLTGLQQVGDFTFEGAGRSDDNSQFGRHGTWQTSAGWEFIEGYRFIASYGTSYKAPNLGQLYGTYGNPNLNPEKSKQWEGAFEGLTAGVNWRISGYRNDVSDLIDYDDHTLKYYNEGKARIKGVEATANFDTGPLTHTVSYDYVDARNAITDTPLLRRAKQQVKYQLDWQLYDFDWGITYQYLGTRYDKDYSSYPYQTVKMGGVSLWDLAVAYPVTSHLTVRGKIANLFDKDYETVYGYQTAGREYTLSGSYTF

SEQ ID NO: 10704 - protein, 230 aa, Escherichia coli; identical to SEQ ID NO: 3348

SEQ ID NO: 10705 - protein, 654 aa, Escherichia coli; identical to SEQ ID NO: 5571

SEQ ID NO: 10706 - protein, 236 aa, Escherichia coli; identical to SEQ ID NO: 5931

SEQ ID NO: 10707 - protein, 274 aa, Escherichia coli; identical to SEQ ID NO: 6497

SEQ ID NO: 10708 - protein, 204 aa, Escherichia coli; identical to SEQ ID NO: 2957

SEQ ID NO: 10709 - protein, 191 aa, Escherichia coli; identical to SEQ ID NO: 5619

SEQ ID NO: 10710 - protein, 784 aa, Escherichia coli; identical to SEQ ID NO: 5933

SEQ ID NO: 10711 - protein, 517 aa, Escherichia coli; identical to SEQ ID NO: 2462

SEQ ID NO: 10712 - protein, 111 aa, Escherichia coli; identical to SEQ ID NO: 3419

SEQ ID NO: 10713 - protein, 729 aa, Escherichia coli
MLSTQFNRDNQHQAIIKPSLLAGCIALALLPSAAFAAPVTEETVIVEGSATAPDDGENDYNVTSTSAGTKMQMTQRDIPQSVTIVSQQRMEDQQLQTLGEVMENTLGISKSQADSDRALYYSRGFQIDNYMVDGIPTYFESRWNLGDALSDMALFERVEVVRGATGLMTGTGNPSAAINMVRKHATSREFKGDVSAEYGSWNKERYVADLQSPLTEDGKIRARIVGGYQNNDSWLDRYNSEKTFFSGIVDADLGDLTMLSAGYEYQRIDVNSPTWGGLPRWNTDGSSNSYDRARSTAPDWAYNDKEINKVFMTLKQRFADTWQATLNATHSEVEFDSKMMYVDAYVNKADGMLVGPYSNYGPGFDYVGGTGWNSGKRKVDALDLFADGSYELFGRQHNLMFGGSYSKQNNRYFSSWANIFPDEIGSFYNFNGNFPQTDWSPQSLAQNDTTHMKSLYAATRVTLADPLHLILGARYTNWRVDTLTYSMEKNHTTPYAGLVFDINDNWSTYASYTSIFQPQNDRDSSGKYLTPITGNNYELGLKSDWMNSRLTTTLAIFRIEQDNVAQSTGTPIPGSNGETAYKAVDGTVSKGVEFELNGAITDNWQLTFGATRYIAEDNEGNAVNPNLPRTTVKMFTSYRLPVMPELTVGGGVNWQNRVYTDTVTPYGTFRAEQGSYALVDLFTRYQVTKNFSLQGNVNNLFDKTYDTNVEGSIVYGAPRNFSITGTYQF

SEQ ID NO: 10714 - protein, 241 aa, Escherichia coli; identical to SEQ ID NO: 2890

SEQ ID NO: 10715 - protein, 541 aa, Escherichia coli; identical to SEQ ID NO: 3377

SEQ ID NO: 10716 - protein, 204 aa, Escherichia coli; identical to SEQ ID NO: 2957

SEQ ID NO: 10717 - protein, 224 aa, Escherichia coli; identical to SEQ ID NO: 4306

SEQ ID NO: 10718 - protein, 230 aa, Escherichia coli; identical to SEQ ID NO: 4598

SEQ ID NO: 10719 - protein, 774 aa, Escherichia coli; identical to SEQ ID NO: 5966

SEQ ID NO: 10720 - protein, 719 aa, Escherichia coli; identical to SEQ ID NO: 4573

SEQ ID NO: 10721 - protein, 224 aa, Escherichia coli; identical to SEQ ID NO: 3792

SEQ ID NO: 10722 - protein, 235 aa, Escherichia coli; identical to SEQ ID NO: 4365

SEQ ID NO: 10723 - protein, 432 aa, Escherichia coli; identical to SEQ ID NO: 2026

SEQ ID NO: 10724 - protein, 478 aa, Escherichia coli; identical to SEQ ID NO: 5942

SEQ ID NO: 10725 - protein, 629 aa, Escherichia coli
MTVTATGNARSSFEAPMMVSVIDTSAPENQTATSATDLLRYVPGITLDGTGRTNGQDVNMRGYDHRGVLVLVDGVRQGTDTGHLNGTFLDPALIKRVEIVRGPSALLYGSGALGGVISYDTVDAKDLLQEGQSSGFRVFGTGGTGDHSLGLGASAFGRTENLDGIVAWSSRDRGDLRQSNGETAPNDESINNMLAKGTWQIDSAQSLSGLVRYYNNDAREPKNPQTVEASDSSNPMVDRSTIQRDAQLSYKLAPQGNDWLNADAKIYWSEVRINAQNTGSSGEYREQITKGARLENRSTLFADSFASHLLTYGGEYYRQEQHPGGATTGFPQAKIDFSSGWLQDEITLRDLPITLLGGTRYDSYRGSSDGYKDVDADKWSSRAGMTINPTNWLMLFGSYAQAFRAPTMGEMYNDSKHFSIGRFYTNYWVPNPNLRPETNETQEYGFGLRFDDLMLSNDALEFKASYFDTKAKDYISTTVDFAAATTMSYNVPNAKIWGWDVMTKYTTDLFSLDVAYNRTRGKDTDTGEYISSINPDTVTSTLNIPIAHSGFSVGWVGTFADRSTHISSSYSKQPGYGVNDFYVSYQGQQALKGMTTTLVLGNAFDKEYWSPQGIPQDGRNGKIFVSYQW

SEQ ID NO: 10726 - protein, 726 aa, Escherichia coli
MSVYAQAAVEPKEDTITVTAAPAPQESAWGPAATIAARQSATGTKTDTPIQKVPQSISVVTAEEMALHQPKSVKEALSYTPGVAVGTRGASNTYDYLIIRGFAADGQSQNNYLNGLKLQGNFYNDAVIDPYMLERAEIMRGPVSVLYGKSSPGGLLNMVSKRPTTEPLKEVQFKAGTDSLFQTGFDFSDALDDDGVYSYRLTGLARSANAQQKGSEEQRYAIAPAFTWRPDDKTNFTFLSYFQNEPETGYYGWLPKEGTVEPLPNGKRLPTDFNEGAKNNTYSRNEKMIGYSFDHEFNDTFTVRQNLRFAQNKVSQKSVYGYGMCSDPLYTKDQEALKASPCLSIPQSQWGHTLTRQYVIDNEKLENFSVDTQLQSKFATGSVDHTLLTGVDFMRMRNDIDSWFGYAGSVAPSDIYNLDRSDFDFGAHPNPSGPYRVLLKQKQTGLYVQDQAQWDKVLVTLGGRYDWADQSSFNRDYGNKSERDDKEFTWRGGVNYLFDNGVTPYFSYSESFEPASQTDANGDLFAPSKGKQYEVGVKYVPEDRPIVVTGALYQLTKTNNLMADPNGSLFSVEGGEIRARGVELEAKAALSASVNVVGSYTYTDAEYTTDTTYKGNTPAQVPKHMASLWADYTFFDGPLSGLTLGTGGRYTGSSYGDPANSFKVGSYTVVDALVRYDLARVGMAGSNVALHVNNLFDREYVASCFNTYGCFWGAERQVVATATFRF

SEQ ID NO: 10727 - protein, 224 aa, Escherichia coli; identical to SEQ ID NO: 4578

SEQ ID NO: 10728 - protein, 721 aa, Escherichia coli; identical to SEQ ID NO: 9824

SEQ ID NO: 10729 - protein, 421 aa, Escherichia coli; identical to SEQ ID NO: 2809

SEQ ID NO: 10730 - protein, 673 aa, Escherichia coli
MKMTRLYPLALGGLLLPAIANAQTSQQDESTLVVTASKQSSRSASANNVSSTVVSAPELSDAGVTASDKLPRVLPGLNIENSGNMLFSTISLRGVSSAQDFYNPAVTLYVDGVPQLSINTIQALTDVQSVELLRGPQGTLYGKSAQGGIINIVTQQPDSTPRGYIEGGVSSRDSYRSKFNLSGPIQDGLLYGSVTLLRQVDDGDMINPATGSDDLGGTRASIGNVKLRLAPDDQPWEMGFAASRECTRATQDAYVGWNDIKGRKLSISDGSPDPYMRRCTDSQTLSGKYTTDDWVFNLISAWQQQHYSRTFPSGSLIVNMPQRWNQDVQELRAATLGDARTVDMVFGLYRQNTREKLNSAYDMPTMPYLSSTGYTTAETLAAYSDLTWHLTDRFDIGGGVRFSHDKSSTQYHGSMLGNPFGDQGKSNDDQVLGQLSAGYMLTDDWRVYTRVAQGYKPSGYNIVPTAGLDAKPFVAEKSINYELGTRYETADVTLQAATFYTHTKDMQLYSGPVGMQTLSNAGKADATGVELEAKWRFAPGWSWDINGNVIRSEFTNDSELYHGNRVPFVPRYGAGSSVNGVIDTRYGALMPRLAVNLVGPHYFDGDNQLRQGTYATLDSSLGWQATERMNISVYVDNLFDRRYRTYGYMNGSSAVAQVNMGRTVGINTRIDFF

SEQ ID NO: 10731 - protein, 478 aa, Escherichia coli; identical to SEQ ID NO: 2405

SEQ ID NO: 10732 - protein, 275 aa, Escherichia coli; identical to SEQ ID NO: 6678

SEQ ID NO: 10733 - protein, 614 aa, Escherichia coli; identical to SEQ ID NO: 1886

SEQ ID NO: 10734 - protein, 517 aa, Escherichia coli; identical to SEQ ID NO: 2462

SEQ ID NO: 10735 - protein, 386 aa, Escherichia coli
MVDDVPVAQVLQALAEQEKLNLVVSPDVSGTVSLHLTDVPWKQALQTVVKSAGLITRQEGNILSVHSVAWQNDNVARQEVEQTRAQANLPLENRNITLQYADAGELAKAGEKLLSAKGSMTVDKRTNRLLLRDNKTALSTLEQWVSQMDLPVGQVELSAHIVTINEKSLRELGVKWTLADAQQAGGVGQVTTLGSDLSVATATTHIGFNIGRINGRLLDLELSALEQKQQLDIIASPRLLASHLQPASIKQGSEIPYQVSSGESGATSVEFKEAVLGMEVTPTVLQKGRIRLKLHISQNVPGQVLQQADGEVLAIDKQEIETQVEVKSGETLALGGIFTRKNKSGQDSVPLLGDIPWFGQLFRHDGKEDERRELVVFITPRLVSSE

SEQ ID NO: 10736 - protein, 728 aa, Escherichia coli; identical to SEQ ID NO: 4574

SEQ ID NO: 10737 - protein, 432 aa, Escherichia coli; identical to SEQ ID NO: 2026

SEQ ID NO: 10738 - protein, 505 aa, Escherichia coli; identical to SEQ ID NO: 10600

SEQ ID NO: 10739 - protein, 122 aa, Escherichia coli; identical to SEQ ID NO: 2915

SEQ ID NO: 10740 - protein, 244 aa, Escherichia coli
MWELSMIRKKILMAAIPLFVISGADAAVSLDRTRAVFDGSEKSMTLDISNDNKQLPYLAQAWIENENQEKIITGPVIATPPVQRLEPGAKSMVRLSTTPDISKLPQDRESLFYFNLREIPPRSEKANVLQIALQTKIKLFYRPAAIKTRPNEVWQDQLILNKVSGGYRIENPTPYYVTVIGLGGSEKQAEEGEFETVMLSPRSEQTVKSANYNTPYLSYINDYGGRPVLSFICNGSRCSVKKEK

SEQ ID NO: 10741 - protein, 725 aa, Escherichia coli
MRINKILWSLTVLLVGLNSQVSVAKYSDDDNDETLVVEATAEQVLKQQPGVSVITSEDIKKTPPVNDLSDIIRKMPGVNLTGNSASGTRGNNRQIDIRGMGPENTLILIDGVPVTSRNSVRYSWRGERDTRGDTNWVPPEQVERIEVIRGPAAARYGSGAAGGVVNIITKRPTNDWHGSLSLYTNQPESSEEGATRRANFSLSGPLAGDALTTRLYGNLNKTDADSWDINSPVGTKNAAGHEGVRNKDINGVISWKLNPQQILDFEAGYSRQGNIYAGDTQNSSSSAVTESLAKSGKETNRLYRQNYGITHNGIWDWGQSRFGIYYEKTNNTRMNEGLSGGGEGRILAGEKFTTNRLSSWRTSGELNIPLNVMVDQTLTVGAEWNRDKLDDPSSTSLTVNDRDISGISGSAADRSSKNHSQISALYIEDNIEPVPGTNIIPGLRFDYLSDSGGNFSPSLNLSQELGDYFKVKAGVARTFKAPNLYQSSEGYLLYSKGNGCPKDITSGGCYLIGNKDLDPEISVNKEIGLEFTWEDYHASVTYFRNDYQNKIVAGDNVIGQTASGAYILKWQNGGKALVDGIEASMSFPLVKDRLNWNTNATWMITSEQKDTGNPLSVIPKYTINNSLNWTITQAFSANVNWTLYGRQKPRTHAETRSEDTGGLSGKELGAYSLVGTNFNYDINKNLRLNVGVSNILNKQIFRSSEGANTYNEPGRAYYAGVTASF

SEQ ID NO: 10742 - protein, 432 aa, Escherichia coli; identical to SEQ ID NO: 2026

SEQ ID NO: 10743 - protein, 230 aa, Escherichia coli
MAFSSSAIADIVISGTRVVYKSEQKNVNVRLENKGNNPLLVQSWLDTGDDNAEPGSITVPFTATPPVSRIDAKRGQTIKLMYTASSALPKDRESVFWFNVLEVPPKPDAAKAANQSLLQLAFRTRIKLFYRPEGLSGISSDAPLALKWSWATSEGKAALRVDNPTPYYVSFSSGDLEANGKRYPLDMTMIAPFSNDVIKVNGMSGRTSSAKVHFFAINDFGGSIEGNANL

SEQ ID NO: 10744 - protein, 629 aa, Escherichia coli
MTVTATGNARSSFEAPMMVSVIDTSAPENQTATSATDLLRHVPGITLDGTGRTNGQDVNMRGYDHRGVLVLVDGVRQGTDTGHLNGTFLDPALIKRVEIVRGPSALLYGSGALGGVISYDTVDAKDLLQEGQSSGFRVFGTGGTGDHSLGLGASAFGRTENLDGIVAWSSRDRGDLRQSNGETAPNDESINNMLAKGTWQIDSAQSLSGLVRYYNNDAREPKNPQTVEASDSSNPMVDRSTIQRDAQLSYKLAPQGNDWLNADAKIYWSEVRINAQNTGSSGEYREQITKGARLENRSTLFADSFASHLLTYGGEYYRQEQHPGGATTGFPQAKIDFSSGWLQDEITLRDLPITLLGGTRYDSYRGSSDGYKDVDADKWSSRAGMTINPTNWLMLFGSYAQAFRAPTMGEMYNDSKHFSIGRFYTNYWVPNPNLRPETNETQEYGFGLRFDDLMLSNDALEFKASYFDTKAKDYISTTVDFAAATTMSYNVPNAKIWGWDVMTKYTTDLFSLDVAYNRTRGKDTDTGEYISSINPDTVTSTLNIPIAHSGFSVGWVGTFADRSTHISSSYSKQPGYGVNDFYVSYQGQQALKGMTTTLVLGNAFDKEYWSPQGIPQDGRNGKIFVSYQW

SEQ ID NO: 10745 - protein, 729 aa, Escherichia coli; identical to SEQ ID NO: 5961

SEQ ID NO: 10746 - protein, 224 aa, Escherichia coli
MATVLLLLLFACHSTIANAAVALGATRVIYPANQKQVLLPVTNNDPASVYLIQSWIENAGDQKDTQFVITPPLFSMQGKKENTLRIINATNHQLPGDRESLFWVNVKAIPAMEKDQKNENTLQLAIISRIKMFYRPTHLAMAPEEAPAMLRFRRSGSKFTLINPTPYFITVTNMKAGNSNLPNTMVPPKGEVSVDIPHAVTGDISFQTINDYGALTPRIKATMQ

SEQ ID NO: 10747 - protein, 518 aa, Escherichia coli; identical to SEQ ID NO: 2350

SEQ ID NO: 10748 - protein, 175 aa, Escherichia coli
MLRFVLFFFTLSVSAVVQGSVVIMGTRVVYPATQKSISIRLNNDNESPALVQSWLDDGDAAAPPESVHVPFIITPPIFRMDSKSGQTVRIVYTGESLPKDRESLFYLNVLDIPAKPRAKKDSDNSEQRNNNYLQLAIRSRIKFFFRPAHLKLTPNDAYLKVTWHHAKWHLNRSQF

SEQ ID NO: 10749 - protein, 208 aa, Escherichia coli
MKKIWLALAGLVLAFSASAAQYEDGKQYTTLEKQVAGAPQVLEFFSFFCPHCYQFEEVLHISDNVKKKLPEGVKMTKYHVNFMGGDLGKELTQAWAVAMALGVEDKVTVPLFEGVQKTQTIRSASDIRDVFINAGIKGEEYDAAWNSFVVKSLVAQQEKAAADVQLRGVPAMFVNGKYQLNPQGMDTSNMDVFVQQYADTVKYLSEKK

SEQ ID NO: 10750 - protein, 656 aa, Escherichia coli
MRLKKRYLCTVLSLAFTQQAVAAQESDTLTVWSSPVSSTTTTVLDQPTMKALDKQNVAQALSVVPGVVLQKSGSRNEEQVKVRGFDSRQVPVYFDGVPIYVPYDGNLDLARILTNNLGAVEVSKGYSSLLQGPNQMGGAINITTQKPTKPLEASLGYRQGWSRSQDNAYDMHASFAASSDLGYLQVSGSQLKQDFLGLPHGVNNDIAGKHGKMINSSADDKRGIVKLGFTPRENDEYTLTYIKQDGEKDNPPYSGNSGQKSRYWQWPEYDKESFYYQGTTQLNDRFTLKSRLYHDTFENTLMMYNSLADLKNKKGSYSHYSDYSDGAGLQLAADVRENDLLSFAVNWKDDVHREKGAPHAAYDRYEDRTWSLASEYQWAAADNVDVVAGISYDWRDSVEAKKHEKDGSITHYDDNNQSAFNWQVMGKYHFANEDTLALSYYDRTRFPTLKERYTTSKPAYNQIAIVNPQLKPERARGVDLTWNGAFTHDWGFEVSVYYNRVSDAILSHNIDADTIQNQNSGTVDYSGLDAGIKGKISNILDVGLSYALIHADAKRKDIGKITDLPTQTMTAWMTLKPWEPLSVTLSEEARSSSYSNSDGSQKAAGFAVTHIRADYTLGHGFSVNASVNNLFDTKYAYSEGFIEEGRNFWAGIEYTF

SEQ ID NO: 10751 - protein, 725 aa, Escherichia coli; identical to SEQ ID NO: 2986

SEQ ID NO: 10752 - protein, 413 aa, Escherichia coli
MDSRGNPTIEVDVITQCNTFARASVPSGASTGSREAIERRDDDKTHFGGKGVLKAIESVNTEINDSLKGHDVRDQRGIDDIMIALDGTENKARLGANAILGVSLATARLAAQLSHTPLYRYLGGIGANLLPVPCMNIINGGVHARGQGADFQEYMIAPCGAPTFREAVRWGSEVYHSLRQVLLEKGMLTGVGDEGGFAPVVSSNREPLELIVLAIEKAGYRPGEDIVICMDPASSEFYRDGKYHLRTENTELTSQEMTNYYQALVKNFPIALIEDGLAEDDWAGWKILHGALGEQIELVGDDLFVTNVKYIQRGIDENLANSALIKLNQIGSLSETFDAVQLCHDNNWGTFISHRSGETVDSFIADMTVAMRAGHLKMGAPCRGERIEKYNQLMRIEDELGSSAQFAGKSAFK

SEQ ID NO: 10753 - protein, 746 aa, Escherichia coli; identical to SEQ ID NO: 4597

SEQ ID NO: 10754 - protein, 663 aa, Escherichia coli; identical to SEQ ID NO: 5939

SEQ ID NO: 10755 - protein, 146 aa, Escherichia coli; identical to SEQ ID NO: 5964

SEQ ID NO: 10756 - protein, 250 aa, Escherichia coli; identical to SEQ ID NO: 9497

SEQ ID NO: 10757 - protein, 121 aa, Escherichia coli; identical to SEQ ID NO: 2522

SEQ ID NO: 10758 - protein, 226 aa, Escherichia coli
MKKINLMPVLALLLICFNSHAAFVLNSTRYIFAGDKDNISVQVNNESSQEYGGQIWIDNANARDQNVYFAPSPTFFKVSGGHKQILRVLKINDSLPKDKESLFWVNVQEIPKAPKEGTNSLAIALHTQVKMIYRPESLKEGREDAEKNIKIIHEGGNTILYNNSPYYFAVINVKQNGHDVKLSEETKNKIAAFAPFEKVSLGSKLSGKDISIVSFDDYGVDREYKL

SEQ ID NO: 10759 - protein, 204 aa, Escherichia coli; identical to SEQ ID NO: 2957

SEQ ID NO: 10760 - protein, 431 aa, Escherichia coli; identical to SEQ ID NO: 3408

SEQ ID NO: 10761 - protein, 169 aa, Escherichia coli; identical to SEQ ID NO: 3373

SEQ ID NO: 10762 - protein, 222 aa, Escherichia coli; identical to SEQ ID NO: 1956

SEQ ID NO: 10763 - protein, 682 aa, Escherichia coli
MKNKYIIAPGIAVMCSAVISSGYASSDKKEDTLVVTASGFTQQLRNAPASVSVITSEQLQKKPVSDLVDAVKDVEGISITGGNEKPDISIRGLSGDYTLILVDGRRQSGRESRPNGSGGFEAGFIPPVEAIERIEVIRGPMSSLYGSDAIGGVINIITKPVNNQTWDGVLGLGGIIQEHGKFGNSTTNDFYLSGPLIKDKLGLQLYGGMNYRKEDSISQGTPAKDNKNITATLQFTPTESQKFVFEYGKNNQVHTLTPGESLDAWTMRGNLKQPNSKRETHNSRSHWVAAWNAQGEILHPEIAVYQEKVIREIKSGKKDKYNHWDLNYESRKPEITNTIIDAKVTAFLPENVLTIGGQFQHAELRDDSATGKKTTETQSVSIKQKAVFIENEYAATDSLALTGGLRLDDHEIYGSYWNPRLYAVYNLTDNLTLKGGIAKAFRAPSIREVSPGFGTLTQGGASIMYGNRDLKPETSVTEEIGIIYSNDSGFSASATLFNTDFKNKLTSYDIGTKDPVTGLNTFIYDNVGEANIRGVELATQIPVYDKWHVSANYTFTDSRRKSDDESLNGKSLKGEPLERTPRHAANAKLEWDYTQDITFYSSLNYTGKQIWAAQRNGAKVPRVRNGFTSMDIGLNYQILPDTLINFAVLNVTDRKSEDIDTIDGNWQVDEGRRYWANVRVSF

SEQ ID NO: 10764 - protein, 208 aa, Escherichia coli; identical to SEQ ID NO: 1949

SEQ ID NO: 10765 - protein, 760 aa, Escherichia coli
MENNRNFPARQFHSLTFFAGLCIGITPVAQALAAEGQANADDTLVVEASTPSLYAPQQSADPKFSRPVADTTRTMTVISEQVIKDQGATNLTDALKNVPGVGAFFAGENGNSTTGDAIYMRGADTSNSIYIDGIRDIGSVSRDTFNTEQVEVIKGPSGTDYGRSAPTGSINMISKQPRNDSGIDASASIGSVWFRRGTLDVNQVIGDTTAVRLNVMGEKTHDAGRDKVKNERYGVAPSVAFGLGTANRLYLNYLHVTQHNTPDGGIPTIGLPGYSAPSAGTAALNHSGKVDTHNFYGTDSDYDDSITDTATMRFEHDINDNATIRNTTRWSRVKQDYLMTAIMGGASNITQPTSDVNSWTWSRTANTKDVSNKILTNQTNLTSTFYTGAIGHDLSTGVEFTRETQTNYGVNPVTLPAVNIYHPDSSIHPGGLTRNGANANGQTDTFAIYAFDTLQITRDFELNGGIRLDNYHTEYDSATACGGSGRGAITCPAGVAKGSPVTTVDTAKSGNLVNWKAGALYHLTENGNVYINYAVSQQPPGGNNFALAQSGSGNSANRTDFKPQKANTSEIGTKWQVLDKRLLLTAALFRTDIENEVEQNDDGTYSQYGKKRVEGYEISVAGNITPAWQMIGGYTQQKATIKNGKDVAQDGSSSLPYTPEHAFTLWSQYQATDDISVGAGARYIGSMHKGSDGAVGTPAFTEGYWVADAKLGYRVNRNLDFQLNVYNLFDTDYVASINKSGYRYHPGEPRTFLLTANMHF

SEQ ID NO: 10766 - protein, 430 aa, Escherichia coli; identical to SEQ ID NO: 2617

SEQ ID NO: 10767 - protein, 191 aa, Escherichia coli; identical to SEQ ID NO: 2727

SEQ ID NO: 10768 - protein, 826 aa, Escherichia coli
MLRMTPLASAIVALLLGIEAHAAEETFDTHFMMGGMKGEQVTNLRLDDNQPLPGQYDIDIYVNKQWRGKYEIIVKDNPHETCLTREIVKRLGINSDNFARENQCLTFEQLVQGGSYSWDIGIFRLDLAVPQAWVEELENGYVPPENWERGINAFYTSYYVSQYYSDYKASGNSKSTYVRFNSGLNLLGWQLHSDASFSKTDNNPGEWKSNALYLEHGFSQILGTLRIGDMYTSADIFDSVRFTGVRLFRDMQMLPNSKQNFTPRVQGIAQSNALVTIEQNGFVVYQKEVPPGPFSISDLQLAGGGADLDVSVKEADGSVTTYLVPYAAVPNMLQPGVSKYDFAAGRSHIEGASKQSDFVQAGYQYGFNNLLTLYGGTMVANNYYAFTLGTGWNTRIGAISVDATKSHSKQDNGDVFDGQSYQIAYNKFLSQTSTRFGLAAWRYSSRDYRTFNDYVWANNKDNYRRDKNDVYDIADYYQNDFGRKNSFSANMSQSLPEGWGSVSLSTLWRDYWGRSGSSKDYQLSYSNNWRRISYTLAASQAYDENHAEEKRFNIFISIPFDWGDDVTTPRRQIYMSNSTTFDDQGFASNNTGLSGTVGNRDQFNYGINLSHQHQGNETTAGANLTWTAPAATVNGSYSQSSTYRQVGASVSGGLVAWSGGVNLANRLSETFAVMHAPGIKDAYVNGQKYRTTNCNGVVVYDGLTPYRENHLMMDVSQSDSETELRGNRKMTAPYRGAVVLVDFDTDQRKPWFIKALRSDGQPLTFGYEVNDMHGHNIGVVGQGSQIFIRTNEIPPAVNVAIDKQQGLSCTITFGKEIDESKNYICR

SEQ ID NO: 10769 - protein, 367 aa, Escherichia coli; identical to SEQ ID NO: 6155

SEQ ID NO: 10770 - protein, 630 aa, Escherichia coli
MQRAVIPLKGELTVGDDYTAGDFFDSVSFRGVQLASDDNMLPDSLKGVAPVVRGIAKSNAQITIKQNGYTIYQTYVSPGAFEISDIYSTSSSGDLLVEIKEADGSVNSYSVPFSSVPLLQRQGRIKYAVTLAKYRTNSNEQQESKFAQATLQWGGPWGTTWYGGGQYAEYYRAAMFGLGFNLGDFGAISFDVTQAKSTLADQSEHKGQSYRFLYAKTLNQLGTNFQLMGYRYSTSGFYTLSDTMYKHMDGYEFNDGDDEDTPMWSRYYNLFYTKRGKLQVNISQQLSEYGSFYLSGSQQTYWHTDQQDRLLQFGYNTQIKDLSLGISWNYSKSRGQPDADQVFALNFSLPLNLLLSRSNDSYTSKKNYAWMTSNTSIDNEGHTTQNLGLTETLLDDGNLSYSVQQGYNSEGKTANGSASMDYKGVFADARVGYNYSDNGSQQQLNYALSGSLVAHSQGITLGQSLGETNVLIAAPGAENTRVANSTGLKTDWRGYTVVPYATSYRENRIALDAASLKRNVDLENAVVNVVPTKGALVLAEFNAHAGARVLMKTSKQGISLRFGAIATLDGVQTNSGIIDDDGSLYMAGLPAKGTITVRWGEAPDQICHISYELTEQQINSAITRMDAICR

SEQ ID NO: 10771 - protein, 203 aa, Escherichia coli; identical to SEQ ID NO: 2009

SEQ ID NO: 10772 - protein, 162 aa, Escherichia coli; identical to SEQ ID NO: 1969

SEQ ID NO: 10773 - protein, 713 aa, Escherichia coli; identical to SEQ ID NO: 3523

SEQ ID NO: 10774 - protein, 998 aa, Escherichia coli; identical to SEQ ID NO: 2918

SEQ ID NO: 10775 - protein, 838 aa, Escherichia coli; identical to SEQ ID NO: 2916

SEQ ID NO: 10776 - protein, 700 aa, Escherichia coli; identical to SEQ ID NO: 8081

SEQ ID NO: 10777 - protein, 366 aa, Escherichia coli; identical to SEQ ID NO: 3520

SEQ ID NO: 10778 - protein, 650 aa, Escherichia coli; identical to SEQ ID NO: 3057

SEQ ID NO: 10779 - protein, 331 aa, Escherichia coli; identical to SEQ ID NO: 2705

SEQ ID NO: 10780 - protein, 243 aa, Escherichia coli; identical to SEQ ID NO: 3561

SEQ ID NO: 10781 - protein, 591 aa, Escherichia coli; identical to SEQ ID NO: 4273

SEQ ID NO: 10782 - protein, 241 aa, Escherichia coli; identical to SEQ ID NO: 2887

SEQ ID NO: 10783 - protein, 208 aa, Escherichia coli; identical to SEQ ID NO: 1949

SEQ ID NO: 10784 - protein, 121 aa, Escherichia coli
MNVKAIPAMEKDQKNENTLQLAIISRIKMFYRPTNLAMAPEEAPAMLRFRRSGSKLTLINPTPYFITVTNMKAGNSNLPNTMVPPKGEVSVDIPHAATGDISFQTINDYGALTPRIKATMQ

SEQ ID NO: 10785 - protein, 161 aa, Escherichia coli; identical to SEQ ID NO: 2582

SEQ ID NO: 10786 - protein, 111 aa, Escherichia coli; identical to SEQ ID NO: 7471

SEQ ID NO: 10787 - protein, 869 aa, Escherichia coli
MKILTTTDIPQRYTWCLAGICYSSLAILPSFLSYAESYFNPAFLLENGTFVADLSRFERGNHQPAGVYRVDLWRNDEFIGSQDIVFESTTENTGDKSGGLMPCFNQVLLERIGLNSSAFPELAQQQNNKCINLLKAVPDATINFDFAAMRLNITIPQIALLSSAHGYIPPEEWDEGIPALLLNYNFTGNRGNGNDSYFFSELSGINIGPWRLRNNGSWNYFRGNGYHSEQWNNIGTWVQRAIIPLKSELVMGDGNTGSDIFDGVGFRGVRLYSSDNMYPDSQQGFAPTVRGIARTAAQLTIRQNGFIIYQSYVSPGAFEITDLHPTSSNGDLDVTIDERDGNQQNYTIPYSTVPILQREGRFKFDLTAGDFRSGNSQQSSPFFFQGTALGGLPQEFTAYGGTQLSANYTAFLLGLGRNLGNWGAVSLDVTHARSQLADDSRHEGDSIRFLYAKSMNTFGTNFQLMGYRYSTQGFYTLDDVAYRRMEGYEYDYDYDGEHRDEPIIVNYHNLRFSRKDRLQLNISQSLNDFGSLYISGTHQKYWNTSDSDTWYQVGYTSSWVGISYSLSFSWNESVGIPDNERIVGLNVSVPFNVLTKRRYTRENALDRAYASFNANRNSNGQNSWLAGVGGTLLEGHNLSYHVSQGDTSNNGYTGSATANWQAAYGTLGVGYNYDRDQHDVNWQLSGGVVGHENGITLSQPLGDTNVLIKAPGAGGVRIENQTGILTDWRGYAVMPYATVYRYNRIALDTNTMGNSIDVEKNISSVVPTQGALVRANFDTRIGVRALITVTQGGKPVPFGSLVRENSTGITSMVGDDGQVYLSGAPLSGELLVQWGDGANSRCIAHYVLPKQSLQQAVTVISAVCTHPGS

SEQ ID NO: 10788 - protein, 820 aa, Escherichia coli; identical to SEQ ID NO: 8131

SEQ ID NO: 10789 - protein, 715 aa, Escherichia coli
MLYNIPCRIYILSTLSLCISGIVSTATATSSETKISNEETLVVTTNRSASNLWESPATIQVIDQQTLQNSTNASIADNLQDIPGVEITDNSLAGRKQIRIRGEASSRVLILIDGQEVTYQRAGDNYGVGLLIDESALERVEVVKGPYSVLYGSQAIGGIVNFITKKGGDKLASGVVKAVYNSATAGWEESIAVQGSIGGFDYRINGSYSDQGNRDTPDGRLPNTNYRNNSQGVWLGYNSENHRFGLSLDRYRLATQTYYEDPDGSYEAFSVKIPKLEREKVGVFYDTDVDGDYLKKIHFDAYEQTIQRQFANEVKTTQPVPSPMIQALTVHNKTDTHDKQYTQAVTLQSHFSLPANNELVTGAQYKQDRVSQRSGGMTSSKSLTGFINKETRTRSYYESEQSTVSLFAQNDWQFADHWTWTMGVRQYWLSSKLTRGDGVSYTAGIISDTSLARESASDHEMVTSTSLRYSGFDNLELRAAFAQGYVFPTLSQLFMQTSAGGSVTYGNPDLKAEHSNNFELGARYNGNQWLIDSAVYYSEAKDYIASLICDGSIVCNGNTNSSRSSYYYYDNIDRAKTWGLEISAEYNGWVFSPYISGNLIRRQYETSTLKTTNTGEPAINGRIGLKHTLVMGQANIISDVFIRAASSAKDDSNGTETNVPGWATLNFAVNTEFGNEDQYRINLALNNLTDKRYRTAHETIPAAGFNAAIGFVWNF

SEQ ID NO: 10790 - protein, 430 aa, Escherichia coli; identical to SEQ ID NO: 2617

SEQ ID NO: 10791 - protein, 193 aa, Escherichia coli; identical to SEQ ID NO: 2246

SEQ ID NO: 10792 - protein, 203 aa, Escherichia coli; identical to SEQ ID NO: 2201

SEQ ID NO: 10793 - protein, 860 aa, Escherichia coli; identical to SEQ ID NO: 3544

SEQ ID NO: 10794 - protein, 230 aa, Escherichia coli; identical to SEQ ID NO: 3348

SEQ ID NO: 10795 - protein, 230 aa, Escherichia coli; identical to SEQ ID NO: 3019

SEQ ID NO: 10796 - protein, 209 aa, Escherichia coli; identical to SEQ ID NO: 3547

SEQ ID NO: 10797 - protein, 224 aa, Escherichia coli; identical to SEQ ID NO: 3578

SEQ ID NO: 10798 - protein, 368 aa, Escherichia coli; identical to SEQ ID NO: 2370

SEQ ID NO: 10799 - protein, 241 aa, Escherichia coli; identical to SEQ ID NO: 2922

SEQ ID NO: 10800 - protein, 662 aa, Escherichia coli; identical to SEQ ID NO: 8124

SEQ ID NO: 10801 - protein, 478 aa, Escherichia coli; identical to SEQ ID NO: 2404

SEQ ID NO: 10802 - protein, 700 aa, Escherichia coli; identical to SEQ ID NO: 2926

SEQ ID NO: 10803 - protein, 207 aa, Escherichia coli; identical to SEQ ID NO: 2211

SEQ ID NO: 10804 - protein, 266 aa, Escherichia coli; identical to SEQ ID NO: 1892

SEQ ID NO: 10805 - protein, 252 aa, Escherichia coli; identical to SEQ ID NO: 3543

SEQ ID NO: 10806 - protein, 224 aa, Escherichia coli; identical to SEQ ID NO: 3115

SEQ ID NO: 10807 - protein, 746 aa, Escherichia coli; identical to SEQ ID NO: 2949

SEQ ID NO: 10808 - protein, 641 aa, Escherichia coli
MLAVDDDGETMVVTASSVEQNLKDAPASISVITQEDLQRKPVQNLKDVLKEVPGVQLTNEGDNRKGVSIRGLDSSYTLILVDGKRVNSRNAVFRHNDFDLNWIPVDSIERIEVVRGPMSSLYGSDALGGVVNIITKKIGQKWSGTVTVDTTIQEHRDRGDTYNGQFFTSGPLIDGVLGMKAYGSLAKREKDDPQNSTTTDTGETPRIEGFSSRDGNVEFAWTPNQNHDFTAGYGFDRQDRDSDSLDKNRLERQNYSVSHNGRWDYGTSELKYYGEKVENKNPGNSSPITSESNTVDGKYTLPLTAINQFLTVGGEWRHDKLSDAVNLTGGTSSKTSASQYALFVEDEWRIFEPLALTTGVRMDDHETYGEHWSPRAYLVYNATDTVTVKGGWATAFKAPSLLQLSPDWTSNSCRGACKIVGSPDLKPETSESWELGLYYMGEEGWLEGVESSVTVFRNDVKDRISISRTSDVNAAPGYQNFVGFETGANGRRIPVFSYYNVNKARIQGLETELKIPFNDEWKLSINYTYNDGRDVSNGENKPLSDLPFHTANGTLDWKPLALEDWSFYVSGHYTGQKRADSATAKTPGGYTIWNTGAAWQVTKDVKLRAGVLNLGDKDLSRDDYSYNEDGRRYFMAVDYRF

SEQ ID NO: 10809 - protein, 274 aa, Escherichia coli; identical to SEQ ID NO: 3471

SEQ ID NO: 10810 - protein, 331 aa, Escherichia coli; identical to SEQ ID NO: 2700

SEQ ID NO: 10811 - protein, 203 aa, Escherichia coli; identical to SEQ ID NO: 2201

SEQ ID NO: 10812 - protein, 361 aa, Escherichia coli; identical to SEQ ID NO: 3061

SEQ ID NO: 10813 - protein, 204 aa, Escherichia coli; identical to SEQ ID NO: 7477

SEQ ID NO: 10814 - protein, 130 aa, Escherichia coli; identical to SEQ ID NO: 3706

SEQ ID NO: 10815 - protein, 518 aa, Escherichia coli; identical to SEQ ID NO: 2349

SEQ ID NO: 10816 - protein, 774 aa, Escherichia coli; identical to SEQ ID NO: 7443

SEQ ID NO: 10817 - protein, 89 aa, Escherichia coli; identical to SEQ ID NO: 2833

SEQ ID NO: 10818 - protein, 191 aa, Escherichia coli; identical to SEQ ID NO: 2727

SEQ ID NO: 10819 - protein, 232 aa, Escherichia coli; identical to SEQ ID NO: 2087

SEQ ID NO: 10820 - protein, 359 aa, Escherichia coli; identical to SEQ ID NO: 2328

SEQ ID NO: 10821 - protein, 432 aa, Escherichia coli; identical to SEQ ID NO: 2026

SEQ ID NO: 10822 - protein, 207 aa, Escherichia coli; identical to SEQ ID NO: 2211

SEQ ID NO: 10823 - protein, 539 aa, Escherichia coli; identical to SEQ ID NO: 3050

SEQ ID NO: 10824 - protein, 249 aa, Escherichia coli; identical to SEQ ID NO: 3492

SEQ ID NO: 10825 - protein, 729 aa, Escherichia coli; identical to SEQ ID NO: 2948

SEQ ID NO: 10826 - protein, 324 aa, Escherichia coli
MKDGVDYISVIKQTEQKVPDVVFTYRPKYRSVSYLSAMLNSVVSSGAFSNHIQSVDYLSGGVSGITTTDSASTRMSIATDAEVLVYSGPAASVRQIEKILPRIDVPAEQVTVSGYVLGVQTTDRNATGLQIIADLFRNKLGMSVGARLDGGNSFTLNVGGLNAFYSLIKEDSRFNVVSNPRLTVLSGSKSQFTVGQEVPVLDSVSYQGSSGTPVQSVTYRNSGAIFTVTPVVLDGLITLDISQQLSDFVKTTTGVNSSPTLTKREISTKVDVKDGELLVLGGLASSKLTQSRTGFSFLPGFTGKSDENNRTDIIVVLQARRVGK

SEQ ID NO: 10827 - protein, 721 aa, Escherichia coli; identical to SEQ ID NO: 7494

SEQ ID NO: 10828 - protein, 368 aa, Escherichia coli; identical to SEQ ID NO: 7478

SEQ ID NO: 10829 - protein, 863 aa, Escherichia coli; identical to SEQ ID NO: 8025

SEQ ID NO: 10830 - protein, 412 aa, Escherichia coli; identical to SEQ ID NO: 4058

SEQ ID NO: 10831 - protein, 784 aa, Escherichia coli; identical to SEQ ID NO: 2244

SEQ ID NO: 10832 - protein, 170 aa, Escherichia coli [sequence omitted]

SEQ ID NO: 10833 - protein, 232 aa, Escherichia coli; identical to SEQ ID NO: 2087

SEQ ID NO: 10834 - protein, 567 aa, Escherichia coli; identical to SEQ ID NO: 3518

SEQ ID NO: 10835 - protein, 359 aa, Escherichia coli; identical to SEQ ID NO: 2332

SEQ ID NO: 10836 - protein, 656 aa, Escherichia coli; identical to SEQ ID NO: 4901

SEQ ID NO: 10837 - protein, 678 aa, Escherichia coli; identical to SEQ ID NO: 2902

SEQ ID NO: 10838 - protein, 539 aa, Escherichia coli; identical to SEQ ID NO: 3050

SEQ ID NO: 10839 - protein, 111 aa, Escherichia coli; identical to SEQ ID NO: 2911

SEQ ID NO: 10840 - protein, 386 aa, Escherichia coli; identical to SEQ ID NO: 3600

SEQ ID NO: 10841 - protein, 747 aa, Escherichia coli; identical to SEQ ID NO: 2954

SEQ ID NO: 10842 - protein, 629 aa, Escherichia coli; identical to SEQ ID NO: 3597

SEQ ID NO: 10843 - protein, 229 aa, Escherichia coli; identical to SEQ ID NO: 3589

SEQ ID NO: 10844 - protein, 871 aa, Escherichia coli; identical to SEQ ID NO: 3519

SEQ ID NO: 10845 - protein, 446 aa, Escherichia coli; identical to SEQ ID NO: 2180

SEQ ID NO: 10846 - protein, 118 aa, Escherichia coli [sequence omitted]

SEQ ID NO: 10847 - protein, 191 aa, Escherichia coli
MSTSYDFDFGLSLGAAYSNSDRTDNQVHKGTHNTRYGDRFDATAGGETAVAWTVGAKYDANNVYLAAMYAEPRNMTGYGDADAIANKTQNFEVVAQYQFDFGLRPSIAYLQSKGKDLGGVNSDNFDSQGNHHYTNKDLVKYVDIGMTYYFNKNMSTYVDYKINLLDNDDDFYKENGIATDDIVAVGLVYQF

SEQ ID NO: 10848 - protein, 208 aa, Escherichia coli; identical to SEQ ID NO: 1949

SEQ ID NO: 10849 - protein, 834 aa, Escherichia coli; identical to SEQ ID NO: 8080

SEQ ID NO: 10850 - protein, 518 aa, Escherichia coli; identical to SEQ ID NO: 2351

SEQ ID NO: 10851 - protein, 614 aa, Escherichia coli; identical to SEQ ID NO: 1883

SEQ ID NO: 10852 - protein, 230 aa, Escherichia coli; identical to SEQ ID NO: 2995

SEQ ID NO: 10853 - protein, 224 aa, Escherichia coli; identical to SEQ ID NO: 7845

SEQ ID NO: 10854 - protein, 193 aa, Escherichia coli; identical to SEQ ID NO: 2250

SEQ ID NO: 10855 - protein, 367 aa, Escherichia coli; identical to SEQ ID NO: 2431

SEQ ID NO: 10856 - protein, 200 aa, Escherichia coli; identical to SEQ ID NO: 1788

SEQ ID NO: 10857 - protein, 816 aa, Escherichia coli; identical to SEQ ID NO: 4456

SEQ ID NO: 10858 - protein, 209 aa, Escherichia coli
MRIITALLMSFFILPVHAGVVIYGTRIIYPEKNREVLVQLMNQSKNASLIQAWIDDGNTTIAPEKIQVTFILTPPVSRVAGGSGQQLKIRKMPNNLPHNKESLFYLNVLDIPPNNPQNAGKNKIKLALQNRIKLLWRPSGIAPVDKKSLSQLNIKKKNNAISINNETANWITVTTIKAQNVKVNNESILLPPFSHNDITLKITTHQNMN

SEQ ID NO: 10859 - protein, 816 aa, Escherichia coli; identical to SEQ ID NO: 3562

SEQ ID NO: 10860 - protein, 170 aa, Escherichia coli; identical to SEQ ID NO: 2565

SEQ ID NO: 10861 - protein, 760 aa, Escherichia coli; identical to SEQ ID NO: 2078

SEQ ID NO: 10862 - protein, 274 aa, Escherichia coli; identical to SEQ ID NO: 2304

SEQ ID NO: 10863 - protein, 241 aa, Escherichia coli; identical to SEQ ID NO: 3582

SEQ ID NO: 10864 - protein, 170 aa, Escherichia coli; identical to SEQ ID NO: 3540

SEQ ID NO: 10865 - protein, 863 aa, Escherichia coli; identical to SEQ ID NO: 3946

SEQ ID NO: 10866 - protein, 359 aa, Escherichia coli
MVVNTVASENPDEAGRYSMDVEYGQYSVILLVEGFPPSHAGTITVYEDSQPGTLNDFLGAMSEDDVRPEALRRFELMVEEAARHAEEAKKNAGEAETSARNAGISASQAEESAANADTSAGDASESARQAAESAAAAKQSEEASSSSASAAAQKASESSQSAAEAELSRKTAESAAGNAARDATTATEKARESAESAQSAEQSRIAAEEAVNRIPTVVGPPGPKGEQGPAGPQGPKGDKGERGDTGPAGATGERGPAGDAGPAGPQGPKGDRGERGETGLTGNAGPQGPKGDTGAAGPAGPQGPKGETGAAGPVGATGPQGPKGDPGETQIRFRWGRRALLRQTAMAGSRVQMVRSSPD

SEQ ID NO: 10867 - protein, 365 aa, Escherichia coli; identical to SEQ ID NO: 3878

SEQ ID NO: 10868 - protein, 231 aa, Escherichia coli; identical to SEQ ID NO: 3055

SEQ ID NO: 10869 - protein, 669 aa, Escherichia coli
MNYIANYYNVAYSGQNAHSQRSLWASFNGGINLGAWQYRQLSNMTWDNDKGNQWNNIRSYLQRPLPAINSQLMMGQLITSGRFFSGLSYHGVSLATDERMLPDSMRGYAPTIRGVAATNARVSVMQNGHEIYQTTVAPGPFEINDLYPTSYSGDLDVTVTEANGAVSRFSVPFSAVPESMRPGTSRYNVEVGKTQDSGDDSMFGDLTWQHGMTNTLTFNSGSRIADGYQALMLGGVYGSSLGAFGANLTWSHARVPESEAQSGWMSQLTWSKTFQPTSTTVSLAGYRYSTSGYRDLADVLGERHAASNKQSWDSSQWRQQSRFDLTLSQSLANYGNLFVSGSTQNYRGGKSRDTQLQLGYSNSFSHGISMNLSVGRQRMGGYKDNSDDMQTVTSLSFSFPLGGNGPRVPSLSNSWTHSTDGSSQLQSSLTGMLDEAQTTNYSLNVMRDQQYKQTTLSGNMQKRFSQTTVGLNASKGQDYWQASGNVQGAMAVHGGGITFGPYLGETFALVEAKGAEGAKVYNSSQLEINDSGYALVPAVTPYRYNRISLDPQGMDGDAELVDSERQVAPVAGAAVKVIFRTRPGKALLIKSRMADGSELPMGADVLDENNTVVGIAGQGGQIYLRTEQTKGHLSVRWGEGANDSCQLPFDISGKDSNSPIIRLNETCQS

SEQ ID NO: 10870 - protein, 155 aa, Escherichia coli
MEAAAGQALRLLYTGNNLPQDRESVFWFSFSQLPYLNKNDKSQNQLILALTNRVKIFYRPSSIVGKSSDAPKNLTYQVKQNRIEVTNPTGYYVTIRAAELLNNGKKVPLANSVMIAPQSTTEWTLPSGISVAPGAQIHLVTVNDYGVNVTSEHAL

SEQ ID NO: 10871 - protein, 432 aa, Escherichia coli; identical to SEQ ID NO: 2026

SEQ ID NO: 10872 - protein, 669 aa, Escherichia coli; identical to SEQ ID NO: 3677

SEQ ID NO: 10873 - protein, 765 aa, Escherichia coli; identical to SEQ ID NO: 7498

SEQ ID NO: 10874 - protein, 747 aa, Escherichia coli; identical to SEQ ID NO: 2072

SEQ ID NO: 10875 - protein, 266 aa, Escherichia coli; identical to SEQ ID NO: 1894

SEQ ID NO: 10876 - protein, 161 aa, Escherichia coli; identical to SEQ ID NO: 2582

SEQ ID NO: 10877 - protein, 118 aa, Escherichia coli [sequence omitted]

SEQ ID NO: 10878 - protein, 351 aa, Escherichia coli; identical to SEQ ID NO: 2872

SEQ ID NO: 10879 - protein, 614 aa, Escherichia coli; identical to SEQ ID NO: 1884

SEQ ID NO: 10880 - protein, 826 aa, Escherichia coli; identical to SEQ ID NO: 7491

SEQ ID NO: 10881 - protein, 243 aa, Escherichia coli; identical to SEQ ID NO: 3483

SEQ ID NO: 10882 - protein, 658 aa, Escherichia coli; identical to SEQ ID NO: 7476

SEQ ID NO: 10883 - protein, 446 aa, Escherichia coli; identical to SEQ ID NO: 5547

SEQ ID NO: 10884 - protein, 162 aa, Escherichia coli; identical to SEQ ID NO: 1973

SEQ ID NO: 10885 - protein, 367 aa, Escherichia coli; identical to SEQ ID NO: 4285

SEQ ID NO: 10886 - protein, 200 aa, Escherichia coli; identical to SEQ ID NO: 1784

SEQ ID NO: 10887 - protein, 108 aa, Escherichia coli; identical to SEQ ID NO: 3602

SEQ ID NO: 10888 - protein, 203 aa, Escherichia coli; identical to SEQ ID NO: 2009

SEQ ID NO: 10889 - protein, 236 aa, Escherichia coli; identical to SEQ ID NO: 3970

SEQ ID NO: 10890 - protein, 98 aa, Escherichia coli
MTPITGGFANKTQNFEAVAQYQFDFGLRPSLGYVLSKGKDIEGIGDEDLVNYIDVGATYYFNKNMSAFVDYKINQLDSDNKLNINNDDIVAVGMTYQF

SEQ ID NO: 10891 - protein, 475 aa, Escherichia coli
MNRSVSTNDQGYAANPFPTSSAAKPDAVLVKNEEKNASETGSIYSSMTLKDFSKFVKDEIGFSYNGYYRSGWGTASHGSPKSWAIGSLGRFGNEYSGWFDLQLKQRVYNENGKRVDAVVMMDGNVGQQYSTGWFGDNAGGENFMQFSDMYVTTKGFLPFAPEADFWVGKHGAPKIEIQMLDWKTQRTDAAAGVGLENWKVGPGKIDIALVREDVDDYDRSLQNKQQINTNAIDLRYKDIPLWDKATLMVSGRYVTANESASEKDNQDNNGYYDWKDTWMFGTSLTQKFDKGGFNEFSFLVANNSIASNFGRYAGASPFTTFNGRYYGDHTGGTAVRLTSQGEAYIGDHFIVANAIVYSFGNDIYSYETGAHSDFESIRAVVRPAYIWDQYNQTGVELGYFTQQNKDANSNKFNESGYKTTLFHTFKVNTSMLTSRPEIRFYATYIKALENELDGFTFEDNKDDQFAVGAQAEIWW

SEQ ID NO: 10892 - protein, 729 aa, Escherichia coli; identical to SEQ ID NO: 2948

SEQ ID NO: 10893 - protein, 361 aa, Escherichia coli; identical to SEQ ID NO: 3601

SEQ ID NO: 10894 - protein, 213 aa, Escherichia coli; identical to SEQ ID NO: 2232

SEQ ID NO: 10895 - protein, 760 aa, Escherichia coli; identical to SEQ ID NO: 3923

SEQ ID NO: 10896 - protein, 213 aa, Escherichia coli; identical to SEQ ID NO: 2232

SEQ ID NO: 10897 - protein, 512 aa, Escherichia coli; identical to SEQ ID NO: 2974

SEQ ID NO: 10898 - protein, 565 aa, Escherichia coli; identical to SEQ ID NO: 2678

SEQ ID NO: 10899 - protein, 746 aa, Escherichia coli; identical to SEQ ID NO: 7482

SEQ ID NO: 10900 - protein, 250 aa, Escherichia coli; identical to SEQ ID NO: 3048

SEQ ID NO: 10901 - protein, 514 aa, Escherichia coli; identical to SEQ ID NO: 3590

SEQ ID NO: 10902 - protein, 627 aa, Escherichia coli
MVVTASSVEQNLKDAPASISVITQEDLQRKPVQNLKDVLKEVPGVQLTNEGDNRKGVSIRGLDSSYTLILVDGKRVNSRNAVFRHNDFDLNWIPVDSIERIEVVRGPMSSLYGSDALGGVVNIITKKIGQKWSGTVTVDTTIQEHRDRGDTYNGQFFTSGPLIDGVLGMKAYGSLAKREKDDPQNSTTTDTGETPRIEGFSSRNGNVEFAWTPNQNHDFTAGYGFDRQDRDSDSLDKNRLERQNYSVSHNGRWDYGTSELKYYGEKVENKNPGNSSPITSESNTVDGKYTLPLTAINQFLTVGGEWRHDKLSDAVNLTGGTSSKTSASQYALFVEDEWRIFEPLALTTGVRMDDHETYGEHWSPRAYLVYNATDTVTVKGGWATAFKAPSLLQLSPDWTSNSCRGACKIVGSPDLKPETSESWELGLYYMGEEGWLEGVESSVTVFRNDVKDRISISRTSDVNAAPGYQNFVGFTANGVPVFSYYNVNKARIQGVETELKIPFNDEWKLSLNYTYNDGRDVSNGENKPLSDLPFHTANGTLDWKPLALEDWSFYVSGHYTGQKRADSATAKTPGGYTIWNTGAAWQVTKDVKLRAGVLNLGDKDLSRDDYSYNEDGRRYFMAVDYRF

SEQ ID NO: 10903 - protein, 880 aa, Escherichia coli; identical to SEQ ID NO: 3110

SEQ ID NO: 10904 - protein, 231 aa, Escherichia coli; identical to SEQ ID NO: 2868

SEQ ID NO: 10905 - protein, 353 aa, Escherichia coli
MTERELSIIRALGEEFSTVLADLQRTFEGKMAAQAQAFEEKLASLSAVLQKHVTVDEVHPVLQAMVDDAVGTIPVPRDGRDYDPDVLQQAVNDAVANIPVPADGKSITPDDVRPMLEQMVKEAVSHIPAPRDGRDYDPEVLKQAVNDAVANIPVPADGKSITPDDVRPMLEQMVKEAVSHIPAPRDGRDYDPEVLKQAVLEAVNALPAPQDGRDATALEVLPAIDDQKSFPRGTYATHLGGLWRAYEKTHGMRGWECLVDGVADIDVSMTDERLFSVVIRQSSGQCTEKTFSLPVMLYRGVFRAGETYHPGDTVTWGGSLWHCNSMTGDKPGEAHSSGWTLAAKRGRDAGGGK

SEQ ID NO: 10906 - protein, 331 aa, Escherichia coli; identical to SEQ ID NO: 2700

SEQ ID NO: 10907 - protein, 111 aa, Escherichia coli; identical to SEQ ID NO: 7471

SEQ ID NO: 10908 - protein, 838 aa, Escherichia coli; identical to SEQ ID NO: 3764

SEQ ID NO: 10909 - protein, 843 aa, Escherichia coli; identical to SEQ ID NO: 3163

SEQ ID NO: 10910 - protein, 207 aa, Escherichia coli; identical to SEQ ID NO: 2211

SEQ ID NO: 10911 - protein, 203 aa, Escherichia coli; identical to SEQ ID NO: 2009

SEQ ID NO: 10912 - protein, 232 aa, Escherichia coli
MQKNAAHTYAISSLLVLSLTGCAWIPSTPLVQGATSAQPVPGPTPVANGSIFQSAQPINYGYQPLFEDRRPRNIGDTLTIVLQENVSASKSSSANASRDGKTNFGFDTVPRYLQGLFGNARADVEASGGNTFNGKGGANASNTFSGTLTVTVDQVLVNGNLHVVGEKQIAINQGTESIRFSGVVNPRTISGSNTVPSTQVADARIEYVGNGYINEAQNMGWLQRFFLNLSPM

SEQ ID NO: 10913 - protein, 856 aa, Escherichia coli; identical to SEQ ID NO: 9924

SEQ ID NO: 10914 - protein, 243 aa, Escherichia coli; identical to SEQ ID NO: 3483

SEQ ID NO: 10915 - protein, 836 aa, Escherichia coli; identical to SEQ ID NO: 7852

SEQ ID NO: 10916 - protein, 729 aa, Escherichia coli; identical to SEQ ID NO: 2948

SEQ ID NO: 10917 - protein, 591 aa, Escherichia coli; identical to SEQ ID NO: 4273

SEQ ID NO: 10918 - protein, 721 aa, Escherichia coli; identical to SEQ ID NO: 7494

SEQ ID NO: 10919 - protein, 368 aa, Escherichia coli; identical to SEQ ID NO: 2370

SEQ ID NO: 10920 - protein, 368 aa, Escherichia coli; identical to SEQ ID NO: 3872

SEQ ID NO: 10921 - protein, 266 aa, Escherichia coli; identical to SEQ ID NO: 1892

SEQ ID NO: 10922 - protein, 161 aa, Escherichia coli; identical to SEQ ID NO: 2582

SEQ ID NO: 10923 - protein, 831 aa, Escherichia coli; identical to SEQ ID NO: 3367

SEQ ID NO: 10924 - protein, 826 aa, Escherichia coli; identical to SEQ ID NO: 7491

SEQ ID NO: 10925 - protein, 208 aa, Escherichia coli; identical to SEQ ID NO: 1949

SEQ ID NO: 10926 - protein, 819 aa, Escherichia coli; identical to SEQ ID NO: 3875

SEQ ID NO: 10927 - protein, 514 aa, Escherichia coli; identical to SEQ ID NO: 8138

SEQ ID NO: 10928 - protein, 720 aa, Escherichia coli; identical to SEQ ID NO: 6178

SEQ ID NO: 10929 - protein, 825 aa, Escherichia coli; identical to SEQ ID NO: 9934

SEQ ID NO: 10930 - protein, 207 aa, Escherichia coli; identical to SEQ ID NO: 2211

SEQ ID NO: 10931 - protein, 834 aa, Escherichia coli
MYKKLKLTTISELIKNIYCSLSVLIIGCASAYAVEFNKDLIEAEDRENVNLSQFETDGQLPVGKYSLNALINNKRTPIHLDLQWVLIDNQTAVCLTPEQLTLLGFTDEIIEEAQQNLIDGCYPIEKEKQITTYLDKGKMQLSISAPQAWLKYKDANWTPPELWDHGIAGAFLDYNLYASHYAPHQGDNSQNISSYGQAGVNLGAWRLRTDYQYDQSFNNGKSQANNLDFPRIYLFRPIPAINAKLTIGQYDTESSIFDSFHFSGVSLKSDENMLPPDLRGYAPQITGVAQTNAKVTVSQNNRIIYQENVPPGPFAITNLFNTLQGQLDVKVEEEDGQVTQWQVASNSIPYLTRKGQIRYTTAMGKPTSVGGDSLQQPFFWTGEFSWGWLNNVSLYGGSVLTNRDYQSLAAGVGFNLNSLGSLSFDVTRSDAQLHNQDKETGYSYRANYSKRFESTGSQLTFAGYRFSDKNFVTMNEYINDTNHYTNYQNEKESYIVTFNQYLESLRLNTYVSLARNTYWDASSNVNYSLSLSRDFDIGPLKNVSTSLTFSRINWEEDNQDQLYLNISIPWGTSRTLSYGMQRNQDNKISHTASWYDSSDRNNSWSVSASGDNDEFKDMKASLRASYQHNTENGRLYLSGTSQRDSYYSLNASWNGSFTATRHGAAFHDYSGSADSRFMIDADGAEDIPLNNKRAVTNRYGIGVIPSVSSYITTSLSVDTRNLPENVDIENSVITTTLTEGAIGYAKLDTRKGYQIMGVIRLADGSHPPLGISVKDKTSHKELGLVADGCFVYLNGIQDDSKLTLRWGDKSCFIQPPNSSNLTTGTVILPCISQN

SEQ ID NO: 10932 - protein, 236 aa, Escherichia coli; identical to SEQ ID NO: 3482

SEQ ID NO: 10933 - protein, 840 aa, Escherichia coli; identical to SEQ ID NO: 3591

SEQ ID NO: 10934 - protein, 249 aa, Escherichia coli; identical to SEQ ID NO: 3492

SEQ ID NO: 10935 - protein, 266 aa, Escherichia coli; identical to SEQ ID NO: 1894

SEQ ID NO: 10936 - protein, 121 aa, Escherichia coli; identical to SEQ ID NO: 2522

SEQ ID NO: 10937 - protein, 765 aa, Escherichia coli; identical to SEQ ID NO: 7498

SEQ ID NO: 10938 - protein, 659 aa, Escherichia coli; identical to SEQ ID NO: 8368

SEQ ID NO: 10939 - protein, 266 aa, Escherichia coli; identical to SEQ ID NO: 1894

SEQ ID NO: 10940 - protein, 118 aa, Escherichia coli [sequence omitted]

SEQ ID NO: 10941 - protein, 128 aa, Escherichia coli; identical to SEQ ID NO: 7495

SEQ ID NO: 10942 - protein, 784 aa, Escherichia coli; identical to SEQ ID NO: 2244

SEQ ID NO: 10943 - protein, 860 aa, Escherichia coli; identical to SEQ ID NO: 6118

SEQ ID NO: 10944 - protein, 834 aa, Escherichia coli; identical to SEQ ID NO: 3095

SEQ ID NO: 10945 - protein, 207 aa, Escherichia coli; identical to SEQ ID NO: 2211

SEQ ID NO: 10946 - protein, 816 aa, Escherichia coli; identical to SEQ ID NO: 4456

SEQ ID NO: 10947 - protein, 869 aa, Escherichia coli; identical to SEQ ID NO: 2903

SEQ ID NO: 10948 - protein, 351 aa, Escherichia coli; identical to SEQ ID NO: 2872

SEQ ID NO: 10949 - protein, 856 aa, Escherichia coli; identical to SEQ ID NO: 3551

SEQ ID NO: 10950 - protein, 367 aa, Escherichia coli; identical to SEQ ID NO: 6155

SEQ ID NO: 10951 - protein, 228 aa, Escherichia coli; identical to SEQ ID NO: 3034

SEQ ID NO: 10952 - protein, 843 aa, Escherichia coli; identical to SEQ ID NO: 3042

SEQ ID NO: 10953 - protein, 518 aa, Escherichia coli; identical to SEQ ID NO: 2350

SEQ ID NO: 10954 - protein, 207 aa, Escherichia coli; identical to SEQ ID NO: 2211

SEQ ID NO: 10955 - protein, 813 aa, Escherichia coli; identical to SEQ ID NO: 4302

SEQ ID NO: 10956 - protein, 252 aa, Escherichia coli; identical to SEQ ID NO: 3400

SEQ ID NO: 10957 - protein, 252 aa, Escherichia coli; identical to SEQ ID NO: 3543

SEQ ID NO: 10958 - protein, 614 aa, Escherichia coli; identical to SEQ ID NO: 1883

SEQ ID NO: 10959 - protein, 89 aa, Escherichia coli; identical to SEQ ID NO: 2810

SEQ ID NO: 10960 - protein, 230 aa, Escherichia coli; identical to SEQ ID NO: 3348

SEQ ID NO: 10961 - protein, 331 aa, Escherichia coli; identical to SEQ ID NO: 9972

SEQ ID NO: 10962 - protein, 746 aa, Escherichia coli; identical to SEQ ID NO: 4275

SEQ ID NO: 10963 - protein, 219 aa, Escherichia coli; identical to SEQ ID NO: 3328

SEQ ID NO: 10964 - protein, 154 aa, Escherichia coli; identical to SEQ ID NO: 3616

SEQ ID NO: 10965 - protein, 851 aa, Escherichia coli; identical to SEQ ID NO: 3458

SEQ ID NO: 10966 - protein, 208 aa, Escherichia coli; identical to SEQ ID NO: 1949

SEQ ID NO: 10967 - protein, 353 aa, Escherichia coli; identical to SEQ ID NO: 4626

SEQ ID NO: 10968 - protein, 883 aa, Escherichia coli; identical to SEQ ID NO: 9925

SEQ ID NO: 10969 - protein, 274 aa, Escherichia coli; identical to SEQ ID NO: 2318

SEQ ID NO: 10970 - protein, 869 aa, Escherichia coli; identical to SEQ ID NO: 9935

SEQ ID NO: 10971 - protein, 204 aa, Escherichia coli; identical to SEQ ID NO: 2957

SEQ ID NO: 10972 - protein, 111 aa, Escherichia coli; identical to SEQ ID NO: 3096

SEQ ID NO: 10973 - protein, 366 aa, Escherichia coli; identical to SEQ ID NO: 3520

SEQ ID NO: 10974 - protein, 173 aa, Escherichia coli; identical to SEQ ID NO: 8970

SEQ ID NO: 10975 - protein, 245 aa, Escherichia coli; identical to SEQ ID NO: 3410

SEQ ID NO: 10976 - protein, 729 aa, Escherichia coli; identical to SEQ ID NO: 9980

SEQ ID NO: 10977 - protein, 446 aa, Escherichia coli; identical to SEQ ID NO: 2176

SEQ ID NO: 10978 - protein, 861 aa, Escherichia coli; identical to SEQ ID NO: 9933

SEQ ID NO: 10979 - protein, 360 aa, Escherichia coli; identical to SEQ ID NO: 9943

SEQ ID NO: 10980 - protein, 998 aa, Escherichia coli; identical to SEQ ID NO: 2918

SEQ ID NO: 10981 - protein, 650 aa, Escherichia coli; identical to SEQ ID NO: 3057

SEQ ID NO: 10982 - protein, 407 aa, Escherichia coli
MTERELSIIRALGEEFSTVLADLQRTFEGKMAAQAQAFEEKLASLSAVLQKHVTVDEVHPVLQAMVDDAVGTIPVPRDGRDYDPDVLQQAVNDAVANIPVPADGKSITPDDVRPMLEQMVKEAVSHIPAPRDGRDYDPEVLKQAVNDAVANIPVPADGKSITPDDVRPMLEQMVKEAVSHIPAPRDGRDYDPEVLKQAVNDAVANIPVPADGKSITPDDVRPMLEQMVKEAVSHIPVPRDGRDYDPDVLQKAVLDAVRALPAPQDGRDATALEIIPAIDDQKSFPRGTYATHQGGLWRAYEKTHGMRGWECLVDGVADIDVSMTGERSFTVVVRQSSGQRTEKTFSLPVMLYRGVFRAGETYHPGDTVTWGGSLWHCNSMTGDKPGEAHSSGWTLAAKRGRDAGGGK

SEQ ID NO: 10983 - protein, 231 aa, Escherichia coli; identical to SEQ ID NO: 2868

SEQ ID NO: 10984 - protein, 678 aa, Escherichia coli; identical to SEQ ID NO: 2902

SEQ ID NO: 10985 - protein, 839 aa, Escherichia coli
MGWRSLFQAVAEPFAGAWQQGVKADPETVLSFHAVFSCISLISQDIAKMRLRLMQTDVQGIRREKRQGDTARLCRRPNAQQNRIQFFELWLNSKLRHGNTVVLKIRTPRGQIKELRILDWNRVEPLVADDGEVFYRITPDRNCGITESVTVPAREVIHDRFNCFFHPLVGLPPVYAAGLAAMQGHHIQANSTYFFRNGGRPSGVIEVPGSITEENAKKLKGNWDSGYTGENAGKTAILSNGAKYSPTTFSPVDAQTVEQLKMTAEIVCSVFRVPAYKIGVGHPPSSDNVEALEQQYYSQCLQTLIESIELLLDEALETGENESTEFDVTTLLRMDSERRMKTLGDAVKNTLLTPNEARKRENLPPLAGGDALYLQQQNYSLEALSRRDAREDPFASAGKTVSSQLPDGASDGNKAISETEHDAVKAMFRGDTEKMTERELSIIRALGEEFSTVLADLQRTFEGKMASQAQAFEEKLTSLSAVLQKHVTVDEVRPVLQAMVDDAVGAIPVPRDGRDYDPDVLQQAVNDAVANIPQPADGKSLTPDDVRPMLEQMVKEAVSHIPVPRDGRDYDPEVLQKAVNDAVANIPQPADGKSLTPDDVRPMLEQMVKEAVSHIPVPRDGRDYDPEVLQKAVNDAVANIPQPADGKSLTPDDVRPMLEQMVKEAVSHIPVPRDGRDYDPDVLQKAVLDAVSALPAPQDGRDATALEILPAIDDQKSFPRGTYATHQGGLWRAYEKTHGMRGWECLVDGVADIDVSMTGERLFSVVVRQSSGQRTEKTFSLPVMLYRGVFRAGETYHPGDTVTWGGSLWHCNSMTEDKPGEAHSSAWTLAAKRGRDAGG

SEQ ID NO: 10986 - protein, 111 aa, Escherichia coli; identical to SEQ ID NO: 2911

SEQ ID NO: 10987 - protein, 386 aa, Escherichia coli; identical to SEQ ID NO: 3600

SEQ ID NO: 10988 - protein, 108 aa, Escherichia coli; identical to SEQ ID NO: 3602

SEQ ID NO: 10989 - protein, 331 aa, Escherichia coli; identical to SEQ ID NO: 2705

SEQ ID NO: 10990 - protein, 233 aa, Escherichia coli; identical to SEQ ID NO: 3548

SEQ ID NO: 10991 - protein, 446 aa, Escherichia coli; identical to SEQ ID NO: 2180

SEQ ID NO: 10992 - protein, 237 aa, Escherichia coli; identical to SEQ ID NO: 2816

SEQ ID NO: 10993 - protein, 430 aa, Escherichia coli; identical to SEQ ID NO: 2617

SEQ ID NO: 10994 - protein, 224 aa, Escherichia coli; identical to SEQ ID NO: 3578

SEQ ID NO: 10995 - protein, 362 aa, Escherichia coli; identical to SEQ ID NO: 2998

SEQ ID NO: 10996 - protein, 203 aa, Escherichia coli; identical to SEQ ID NO: 2201

SEQ ID NO: 10997 - protein, 729 aa, Escherichia coli; identical to SEQ ID NO: 2948

SEQ ID NO: 10998 - protein, 213 aa, Escherichia coli; identical to SEQ ID NO: 2232

SEQ ID NO: 10999 - protein, 161 aa, Escherichia coli; identical to SEQ ID NO: 2582

SEQ ID NO: 11000 - protein, 828 aa, Escherichia coli; identical to SEQ ID NO: 2381

SEQ ID NO: 11001 - protein, 663 aa, Escherichia coli; identical to SEQ ID NO: 1910

SEQ ID NO: 11002 - protein, 170 aa, Escherichia coli [sequence omitted]

SEQ ID NO: 11003 - protein, 765 aa, Escherichia coli; identical to SEQ ID NO: 3739

SEQ ID NO: 11004 - protein, 230 aa, Escherichia coli; identical to SEQ ID NO: 3348

SEQ ID NO: 11005 - protein, 747 aa, Escherichia coli; identical to SEQ ID NO: 2072

SEQ ID NO: 11006 - protein, 161 aa, Escherichia coli; identical to SEQ ID NO: 2582

SEQ ID NO: 11007 - protein, 380 aa, Escherichia coli
MLVPALLVAGAANAAEIYNKNGNKLDLYGKVDARHTFSDNPGDDGDETIIELGFKGETQITDQLTGYGQALTKTKASDTEGSDNTYVKLAFAGLKFGEMGSFDYGRNYGVIYDVEAWTDMLPVFGGDSYTWTDNFMAGRANGVATYRNSDFFGLVEGLNFALQYQGNNEGSNAGEDQEGTKNGHEDVRFQNGDGFGLSTSYDFDFGLSLGAAYSNSDRTNSQVALGGYHYNEYSKFAGGDTAEAWTFGAKYDANNVYLAMMYAETRNMTPYGNVGIANKTQNFEAVAQYQFDFGLRPSLAYVYSKGKDLGGNDYNNNGHQEYVDQDLVNYVEIGATYYFNKNFSTYVDYKINLLDKDDDFYDNNGIATDDVVGVGLVYQF

SEQ ID NO: 11008 - protein, 209 aa, Escherichia coli; identical to SEQ ID NO: 3547

SEQ ID NO: 11009 - protein, 446 aa, Escherichia coli; identical to SEQ ID NO: 2176

SEQ ID NO: 11010 - protein, 869 aa, Escherichia coli; identical to SEQ ID NO: 3738

SEQ ID NO: 11011 - protein, 828 aa, Escherichia coli; identical to SEQ ID NO: 5894

SEQ ID NO: 11012 - protein, 833 aa, Escherichia coli
MAALSPPFIKYLSGMDTVNIYRLSFVSCLVVAMPCALAVEFNLNVLDKSMRDRIDISLLKEKGVIAPGEYFVSVAVNNNQISNGQKINWHKNDDKTIPCINDLLVDKFGLKPEVRQSLPLINQCVDFSSRPEMLFNFDQANQQLNITIPQAWLAWHSENWTPPSTWKEGVAGVLMDYNLFASSYRPQDGSSSTNLNAYGTAGINTGAWRLRSDYQLNQTDSDDNHEQSGEISRTYLFRPLPQLGSKLTLGETDFSSNIFDGFSYTGAALASDDRMLPWELRGYAPQISGIAQTNATVTISQSGRVIYQKKVPPGPFIIDDLNQSVQGTLDVKVTEEDGRVNNFQVSAASTPFLTRQGQVRYKLAAGQPRPSMSHQTENETFFSNEVSWGMLSNTSLYGGLLLSGDDYHSAAIGIGQNMLWLGALSFDVTWASSHFDTQQDERGLSYRFNYSKQVDATNSTISLAAYRFSDRHFHSYANYLDHKYNDSDAQDEKQTISLSVGQPITPLNLNLYANLLHQTWWNADASTTANITAGFNVDIGDWRDISISTSFNTTHYEDKDRDNQIYLSISLPFGNGGRVGYDMQNSSHSTTHRMSWNDTLDERNSWGMSAGLQSDRPDNGAQVSGNYQHLSSAGEWDISGTYAANDYSSVSSSWSGSFTATQYGAAFHRRSSTNEPRLMVSTDGVADIPVQGNLDYTNHFGIAVVPLISSYQPSTVAVNMNDLPDGVTVAENVIKETWIEGAIGYKSLASRSGKDVNVIIRNASGQFPPLGADIRQDDSGISVGMVGEEGHAWLSGVAENQKFTVVWGDSQHCSLHLPEHMEDTANRLILPCH

SEQ ID NO: 11013 - protein, 224 aa, Escherichia coli; identical to SEQ ID NO: 3165

SEQ ID NO: 11014 - protein, 274 aa, Escherichia coli; identical to SEQ ID NO: 3721

SEQ ID NO: 11015 - protein, 66 aa, Escherichia coli
MVGPPGPKGEQGPAGPQGPKGDKGERGDTGPVGATGERGPAGDAGPAGPQGPKGDRGEGESGERPV

SEQ ID NO: 11016 - protein, 331 aa, Escherichia coli; identical to SEQ ID NO: 2700

SEQ ID NO: 11017 - protein, 760 aa, Escherichia coli; identical to SEQ ID NO: 6545

SEQ ID NO: 11018 - protein, 232 aa, Escherichia coli; identical to SEQ ID NO: 2087

SEQ ID NO: 11019 - protein, 729 aa, Escherichia coli; identical to SEQ ID NO: 3778

SEQ ID NO: 11020 - protein, 367 aa, Escherichia coli; identical to SEQ ID NO: 4285

SEQ ID NO: 11021 - protein, 200 aa, Escherichia coli; identical to SEQ ID NO: 1784

SEQ ID NO: 11022 - protein, 274 aa, Escherichia coli; identical to SEQ ID NO: 3471

SEQ ID NO: 11023 - protein, 250 aa, Escherichia coli; identical to SEQ ID NO: 3048

SEQ ID NO: 11024 - protein, 230 aa, Escherichia coli; identical to SEQ ID NO: 3019

SEQ ID NO: 11025 - protein, 820 aa, Escherichia coli; identical to SEQ ID NO: 8131

SEQ ID NO: 11026 - protein, 241 aa, Escherichia coli; identical to SEQ ID NO: 2922

SEQ ID NO: 11027 - protein, 193 aa, Escherichia coli; identical to SEQ ID NO: 2246

SEQ ID NO: 11028 - protein, 430 aa, Escherichia coli; identical to SEQ ID NO: 2617

SEQ ID NO: 11029 - protein, 518 aa, Escherichia coli; identical to SEQ ID NO: 2349

SEQ ID NO: 11030 - protein, 823 aa, Escherichia coli
MTPLASAIVALLLGIEAYAAEETFDTHFMIGGMKDQQVANIRLDDNQPLPGQYDIDIYVNKQWRGKYEIIVKDNPQETCLSIEVIKRLGINSDNFASGKQCLTFEQLVQGGSYTWDIGVFRLDFSVPQAWVEELESGYVPPENWERGINAFYTSYYVSQYYSDYKASGNSKSTYVRFNSGLNLLGWQLHSDASFSKTNNNPGGWKSNTLYLERGFAQLLGTLRVGDMYTSSDIFDSVRFSGVRLFRDMQMLPNSKQNFTPRVQGIAQSNALVTIEQNGFVVYQKEVPPGPFAITDLQLAGGGADLDVSVKEADGSVTTYLVPYAAVPNMLQPGVSKYDFAAGRSHIEGASKQSDFVQAGYQYGFNNLLTLYGGSMVANNYYAFTLGTGWNTRIGAISVDATKSHSKQDNGDVFDGQSYQIAYNKFVSQTSTRFGLAAWRYSSRDYRTFNDHVWANNKDNYRRDENDVYDIADYYQNDFGRKNSFSANMSQSLPEGWGSVSLSTLWRDYWGRSGSSKDYQLSYSNNWRRISYILAASQAYDENHHEEKRFNIFISIPFDWGDDVTTPRRQIYMSNSTTFDDQGFASNNTGLSGTVGSRDQFNYGVNLSYQNQGNETTAGANLTWNAPVATVNGSYSQSSTYRQAGASVSGGIVAWSGGVNLANRLSETFAVMNAPGIKDAYVNGQKYRTTNRNGVVVYDGMTPYRENHLMLDVSQSDSEAELRGNRKIAAPYRGAVVLVNFDTDQRKPWFIKALRADGQPLMFGYEVNDIHGHNIGVVGQGSQLFIRTNEVPPSVNVAIDKQQGLSCTITFGKEIDESRNYICQ

SEQ ID NO: 11031 - protein, 641 aa, Escherichia coli; identical to SEQ ID NO: 3774

SEQ ID NO: 11032 - protein, 539 aa, Escherichia coli; identical to SEQ ID NO: 3050

SEQ ID NO: 11033 - protein, 646 aa, Escherichia coli; identical to SEQ ID NO: 6626

SEQ ID NO: 11034 - protein, 89 aa, Escherichia coli; identical to SEQ ID NO: 2810

SEQ ID NO: 11035 - protein, 368 aa, Escherichia coli; identical to SEQ ID NO: 2371

SEQ ID NO: 11036 - protein, 241 aa, Escherichia coli
MSNKNVNVRKSQEITFCLLAGILMFMAMMVAGRAEAGVALGATRVIYPAGQKQVQLAVTNNDENSTYLIQSWVENADDVKDGRFIVTPPLFAMKGKKENTLRILDATNNQLPQDRESLFWMNVKAIPSMDKSKLTENTLQLAIISRIKLYYRPAKLALPPDQAAEKLRFRRSANSLTLINPTPYYLTVTELNAGARVLENALVPPMGESTVKLPSDAGSNITYRTINDYGALTPKMTGVME

SEQ ID NO: 11037 - protein, 863 aa, Escherichia coli; identical to SEQ ID NO: 3741

SEQ ID NO: 11038 - protein, 111 aa, Escherichia coli; identical to SEQ ID NO: 3096

SEQ ID NO: 11039 - protein, 203 aa, Escherichia coli; identical to SEQ ID NO: 2201

SEQ ID NO: 11040 - protein, 361 aa, Escherichia coli; identical to SEQ ID NO: 3061

SEQ ID NO: 11041 - protein, 432 aa, Escherichia coli; identical to SEQ ID NO: 2026

SEQ ID NO: 11042 - protein, 191 aa, Escherichia coli; identical to SEQ ID NO: 2727

SEQ ID NO: 11043 - protein, 359 aa, Escherichia coli; identical to SEQ ID NO: 2328

SEQ ID NO: 11044 - protein, 822 aa, Escherichia coli
MIKNIYCSLSVLIIGCASAYAVEFNKDLIEAEDRENVNLSQFETDGQLPVGKYSLNALINNKRTPIHLDLQWALIDNQTAVCLTPEQLTLLGFTDEIIEVAQQNLIDGCYPIEKEKQITTYLDKGKMQLSISAPQAWLKYKDANWTPPELWDHGIAGAFLDYNLYASHYAPHQGDNSQNISSYGQAGVNLGAWRLRTDYQYDQSFNNGKSQANNLDFPRIYLFRPIPAINAKLTIGQYDTESSIFDSFHFSGVSLKSDENMLPPDLRGYAPQITGVAQTNAKVTVSQNNRIIYQENVPPGPFAITNLFNTLQGQLDVKVEEEDGQVTQWQVASNSIPYLTRKGQIRYTTAMGKPTSVGGDSLQQPFFWTGEFSWGWLNNVSLYGGSVLTNRDYQSLAAGVGFNLNSLGSLSFDVTRSDAQLHNQDKETGYSYRANYSKRFESTGSQLTFAGYRFSDKNFVTMNEYINDTNHYTNYQNEKESYIVTFNQYLESLRLNTYVSLARNTYWDASSNVNYSLSLSRDFDIGPLKNVSTSLTFSRINWEEDNQDQLYLNISIPWGTSRTLSYGMQRNQDNKISHTASWYDSSDRNNSWSVSASGDNDEFKDMKASLRASYQHNTENGRLYLSGTSQRDSYYSLNASWNGSFTATRHGAAFHDYSGSADSRFMIDADGAEDIPLNNKRAVTNRYGIGVIPSVSSYITTSLSVDTRNLPENVDIENSVITTTLTEGAIGYAKLDTRKGYQIMGVIRLADGSHPPLGISVKDKTSHKELGLVADGGFVYLNGIQDDSKLTLRWGDKSCFIQPPNSSNLTTGTVILPCISQN

SEQ ID NO: 11045 - protein, 565 aa, Escherichia coli; identical to SEQ ID NO: 2678

SEQ ID NO: 11046 - protein, 231 aa, Escherichia coli; identical to SEQ ID NO: 3055

SEQ ID NO: 11047 - protein, 386 aa, Escherichia coli; identical to SEQ ID NO: 3094

SEQ ID NO: 11048 - protein, 662 aa, Escherichia coli; identical to SEQ ID NO: 8124

SEQ ID NO: 11049 - protein, 614 aa, Escherichia coli
MIKKASLLTACSVTAFSAWAQDTSPDTLVVTANRFEQPRSTVLAPTTVVTRQDIDRWQSTSVNDVLRRLPGVDITQNGGSGQLSSIFIRGTNASHVLVLIDGVRLNLAGVSGSADLSQFPIALVQRVEYIRGPRSAVYGSDAIGGVVNIITTRDEPGTEISAGWGSNSYQNYDVSTQQQLGDKTRVTLLGDYAHTHGYDVVAYGNTGTQAQTDNDGFLSKTLYGALEHNFTDAWSGFVRGYGYDNRTNYDAYYSPGSPLLDTRKLYSQSWDAGLRYNGELIKSQLITSYSHSKDYNYDPHFGRYDSSATLDEMKQYTVQWANNVIVGHGSIGAGVDWQKQTTTPGTGYVENGYDQRNTGIYLTGLQQVGDFTFEGAARSDDNSQFGCHGTWQTSAGWEFIEGYRFIASYGTSYKAPNLGQLYGFYGNPNLDPEKSKQWEGAFEGLTAGVNWRISGYRNDVSDLIDYDDHTLKYYNEGKARIKGVEATANFDTGPLTHTVSYDYVDARNAITDTPLLRRAKQQVKYQLDWQLYDFDWGITYQYLGTRYDKDYSSYPYQTVKMGGVSLWDLAVAYPVTSHLTVRGKIANLFDKDYETVYGYQTAGREYTLSGSYTF

SEQ ID NO: 11050 - protein, 170 aa, Escherichia coli [sequence omitted]

SEQ ID NO: 11051 - protein, 246 aa, Escherichia coli; identical to SEQ ID NO: 3021

SEQ ID NO: 11052 - protein, 446 aa, Escherichia coli; identical to SEQ ID NO: 5547

SEQ ID NO: 11053 - protein, 266 aa, Escherichia coli; identical to SEQ ID NO: 1894

SEQ ID NO: 11054 - protein, 161 aa, Escherichia coli; identical to SEQ ID NO: 2582

SEQ ID NO: 11055 - protein, 368 aa, Escherichia coli; identical to SEQ ID NO: 3872

SEQ ID NO: 11056 - protein, 478 aa, Escherichia coli; identical to SEQ ID NO: 7448

SEQ ID NO: 11057 - protein, 700 aa, Escherichia coli; identical to SEQ ID NO: 9951

SEQ ID NO: 11058 - protein, 192 aa, Escherichia coli; identical to SEQ ID NO: 3894

SEQ ID NO: 11059 - protein, 89 aa, Escherichia coli; identical to SEQ ID NO: 2833

SEQ ID NO: 11060 - protein, 747 aa, Escherichia coli; identical to SEQ ID NO: 2072

SEQ ID NO: 11061 - protein, 871 aa, Escherichia coli
MHQVLLLPRFARLTIALSLATAVFPVDAEYYFNPRFLSNDLAESVDLSAFTKGREAPPGTYRVDIYLNDEFMTSRDITFITDDNNADLIPCLSTDLLVSLGIKKSALLDNKEHSAEKHVPDNSACTPLQDRLVDASTEFDVGQQHLSLSVPQIYVGRMARGYVSPDLWEEGINAGLLNYSFNGNSINNRSNHNAGKSNYAYLNLQSGINIGSWRLRDNSTWSYNSGSSNSSDSNKWQHINTSAERDIIPLRSRLTVGDSYTDGDIFDSVNFRGLKINSTEAMLPDSQHGFAPVIHGIARGTAQVSVKQNGYDVYQTTVPPGPFTIDDINSAANGGDLQVTIKEADGSIQTLYVPYSSVPVLQRAGYTRYALAMGEYRSGNNLQSSPRFIQGSLMHGLEGNWTPYGGMQIAEDYQAFNLGIGKDLGLFGAFSFDITQANTTLADGTRHSGQSVKSVYSKSFYQTGTNIQVAGYRYSTQGFYNLSDSAYSRMSGYTVKPPTGDSNEQTQFIDYFNLFYSKRDQEQISISQQLGNYGATFFSASRQSYWNTSRSDQQISFGLNVPFGDITTSLNYSYSNNIWQNDRDHLLAFTLNVPFSHWMRTDSQSAFRNSNASYSMSNDLKGGMTNLSGVYGTLLPDNNLNYSVQVGNTHGGNTSSGTSGYSTLNYRGAYGNTNVGYSRSGDSSQIYYGMSGGIIAHADGITFGQPLGDTMVLVKAPGADNVKIENQTGIHTDWRGYAILPFATEYRENRVALNANSLADNVELDETVVTVIPTHGAIARATFNAQIGGKVLMTLKYGNKSVPFGAIVTHGENKNGSIVAENGQVYLTGLPQSGKLQVSWGNDKNSNCIVDYKLPEVSPGTLLNQQTAICR

SEQ ID NO: 11062 - protein, 243 aa, Escherichia coli; identical to SEQ ID NO: 3483

SEQ ID NO: 11063 - protein, 591 aa, Escherichia coli; identical to SEQ ID NO: 3668

SEQ ID NO: 11064 - protein, 517 aa, Escherichia coli; identical to SEQ ID NO: 2462

SEQ ID NO: 11065 - protein, 863 aa, Escherichia coli; identical to SEQ ID NO: 3959

SEQ ID NO: 11066 - protein, 227 aa, Escherichia coli; identical to SEQ ID NO: 3570

SEQ ID NO: 11067 - protein, 656 aa, Escherichia coli; identical to SEQ ID NO: 4901

SEQ ID NO: 11068 - protein, 241 aa, Escherichia coli; identical to SEQ ID NO: 3582

SEQ ID NO: 11069 - protein, 360 aa, Escherichia coli; identical to SEQ ID NO: 3354

SEQ ID NO: 11070 - protein, 125 aa, Escherichia coli; identical to SEQ ID NO: 3090

SEQ ID NO: 11071 - protein, 169 aa, Escherichia coli; identical to SEQ ID NO: 3373

SEQ ID NO: 11072 - protein, 193 aa, Escherichia coli; identical to SEQ ID NO: 6614

SEQ ID NO: 11073 - protein, 132 aa, Escherichia coli; identical to SEQ ID NO: 9984

SEQ ID NO: 11074 - protein, 235 aa, Escherichia coli; identical to SEQ ID NO: 9977

SEQ ID NO: 11075 - protein, 359 aa, Escherichia coli; identical to SEQ ID NO: 2332

SEQ ID NO: 11076 - protein, 191 aa, Escherichia coli; identical to SEQ ID NO: 2727

SEQ ID NO: 11077 - protein, 747 aa, Escherichia coli; identical to SEQ ID NO: 6089

SEQ ID NO: 11078 - protein, 351 aa, Escherichia coli; identical to SEQ ID NO: 2519

SEQ ID NO: 11079 - protein, 128 aa, Escherichia coli; identical to SEQ ID NO: 7495

SEQ ID NO: 11080 - protein, 250 aa, Escherichia coli; identical to SEQ ID NO: 4332

SEQ ID NO: 11081 - protein, 696 aa, Escherichia coli; identical to SEQ ID NO: 4038

SEQ ID NO: 11082 - protein, 232 aa, Escherichia coli; identical to SEQ ID NO: 2087

SEQ ID NO: 11083 - protein, 213 aa, Escherichia coli; identical to SEQ ID NO: 2232

SEQ ID NO: 11084 - protein, 241 aa, Escherichia coli; identical to SEQ ID NO: 2887

SEQ ID NO: 11085 - protein, 686 aa, Escherichia coli; identical to SEQ ID NO: 3129

SEQ ID NO: 11086 - protein, 856 aa, Escherichia coli
MAGFFVRLFVACAFAAQAPLSSAELYFNPRFLADDPQAVADLSRFENGQELPPGTYRVDIYLNNGYMATRDVTFNTGDSEQGIVPCLTRAQLASMGLNTASVSGMNLLADDACVPLTTMIQDATAHLDVGQQRLNLTIPQAFMSNRARGYIPPELWDPGINAGLLNYNFSGNSVQNRIGGNSHYAYLNLQSGLNIGAWRLRDNTTWSYNSSDRSSGSKNKWQHINTWLERDIIPLRSRLTLGDGYTQGDIFDGINFRGAQLASDDNMLPDSQRGFAPVIHGIARGTAQVTIKQNGYDIYNSTVPPGPFTINDIYAAGNSGDLQVTIKEADGSTQIFTVPYSSVPLLQREGHTRYSITAGEYRSGNAQQEKPRFFQSTLLHGLPAGWTIYGGTQLADRYRAFNFGIGKNMGALGALSVDMTQANSTLPDDSQHDGQSVRFLYNKSLNESGTNIQLVGYRYSTSGYFNFADTTYSRMNGYNIETQDGVIQVKPKFTDYYNLAYNKRGKLQLTVTQQLGRTSTLYLSGSHQTYWGTSNVDEQFQAGLNTAFEDINWTLSYSLTKNAWQKGRDQMLALNVNIPFSHWLRSDSKSQWRHASASYSMSHDLNGRMTNLAGVYGTLLEDNNLSYSVQTGYAGGGDGNSGSTGYATLNYRGGYGNANIGYSHSDDIKQLYYGVSGGVLAHANGVTLGQPLNDTVVLVKAPGAKDAKVENQTGVRTDWRGYAVLPYATEYRENRVALDTNTLADNVDLDNAVANVVPTRGAIVRAEFKARVGIKLLMTLTHNNKPLPFGAMVTSESSQSSGIVADNGQVYLSGMPLAGKVQVKWGEEENAHCVANYQLPPESQQQLLTQLSAECR

SEQ ID NO: 11087 - protein, 746 aa, Escherichia coli
MNKKIHSLALLVNLGIYGVAQAQEPTDTPVSHDDTIVVTAAEQNLQAPGVSTITADEIRKNPVARDVSEIIRTMPGVNLTGNSTSGQRGNNRQIDIRGMGPENTLILIDGKPVSSRNSVRQGWRGERDTRGDTSWVPPEMIERIEVLRGPAAARYGNGAAGGVVNIITKKGSGEWHGSWDAYFNAPEHKEEGATKRTNFSLTGPLGDEFSFRLYGNLDKTQADAWDINQGHQSARAGTYVTTLPAGREGVINKDINGVVRWDFAPLQSLELEAGYSRQGNLYAGDTQNTNSDAYTRSKYGDETNRLYRQNYALTWNGGWDNGVTTSNWVQYEHTRNSRIPEGLAGGTEGKFNEKATQDFVDIDLDDVMLHSEVNLPIDFLVNQTLTLGTEWNQQRMKDLSSNTQALTGANTGGAIDGVSATDRSPYSKAEIFSLFAENNMELTDSTIVTPGLRFDHHSIVGNNWSPALNISQGLGDDFTLKMGIARAYKAPSLYQTNPNYILYSKGQGCYASAGGCYLQGNDDLKAETSINKEIGLEFKRDGWLAGVTWFRNDYRNKIEAGYVAVGQNAVGTDLYQWDNVPKAVVEGLEGSLNVPVSETVMWTNNITYMLKSENKTTGDRLSIIPEYTLNSTLSWQAREDLSMQTTFTWYGKQQPKKYNYKGQPAVGPETKEISPYSIVGLSATWDVTKNVSLTGGVDNLFDKRLWRAGNAQTTGDLAGANYIAGAGAYTYNEPGRTWYMSVNTHF

SEQ ID NO: 11088 - protein, 539 aa, Escherichia coli; identical to SEQ ID NO: 3050

SEQ ID NO: 11089 - protein, 368 aa, Escherichia coli
MKVKVLSLLVPALLVAGAANAAEVYNKDGNKLDLYGKVDGLHYFSDNKDVDGDQTYMRLGFKGETQVTDQLTGYGQWEYQIQGGNSAENENNSWTRVAFAGLKFQDVGSFDYGRNYGVVYDVTSWTDVLPEFGGDTYGSDNFMQQRGNGFATYRNTDFFGLVDGLNFAVQYQGKNGSVNGEGMTNNGRDALRQNGDGVGGSITYDYEGFGIGAAVSSSKRTDAQNTAAYIGNGDRAETYTGGLKYDANNIYLAAQYTQTYNATRVGSLGWANKAQNFEAVAQYQFDFGLRPSVAYLQSKGKNLGTIAGRNYDDEDILKYVDVGATYYFNKNMSTYVDYKINLLDDNQFTRDAGINTDNIVALGLVYQF

SEQ ID NO: 11090 - protein, 224 aa, Escherichia coli; identical to SEQ ID NO: 4306

SEQ ID NO: 11091 - protein, 213 aa, Escherichia coli; identical to SEQ ID NO: 2232

SEQ ID NO: 11092 - protein, 614 aa, Escherichia coli; identical to SEQ ID NO: 1884

SEQ ID NO: 11093 - protein, 746 aa, Escherichia coli; identical to SEQ ID NO: 2949

SEQ ID NO: 11094 - protein, 386 aa, Escherichia coli; identical to SEQ ID NO: 3094

SEQ ID NO: 11095 - protein, 700 aa, Escherichia coli; identical to SEQ ID NO: 8081

SEQ ID NO: 11096 - protein, 880 aa, Escherichia coli
MPDHSLFRLRILPWCIALAMSGSYSSVWAEDDIQFDSRFLELKGDTKIDLKRFSSQGYVEPGKYNLQVQLNKQPLAEEYDIYWYAGEDDASKSYACLTPELVAQFGLKEDVANNLQWSHDAKCLKSGQLEGMEIKADLSQSALVISLPQAYLEYTYPDWDPPSRWDDGISGIVADYSINAQTRHEENGGDDSNEISGNGTVGVNLGPWRMRADWQTNYQHTRSNDDDEFSGDETQKKWEWSRYYAWRALPSLKAKLALGEDYLRSDIFDGFNYVGGSVSTDDQMLPPNLRGYAPDISGVAHTTAKVTVSQMGRVIYETQVPAGPFRIQDLGDSVSGTLHIRIEEQNGQVQEYDISTASMPYLTRPGQVRYKIMMGRPQEWGHHVEGEFFSGAEASWGIANGWSLYGGALGDENYQSAALGVGRDLSTFGAVAFDVTHSHTKLDKDTAYGKGSLDGNSFRVSYSKDFDQLNSRVTFAGYRFSEENFMTMSEYLDASDSGMVRTGNDKEMYTATYNQNFRDAGVSVYLNYTRHTYWDREEQTNYNIMLSHYFNMGSIRNVSISMTGYRYEYDNQADKGMYISLSMPWGDNSTVSYNGNYGSGTDSSQVGYFSRVDDATHYQLNVGTSDKHTSVDGYYSHDGSLAQVDLSANYHEGQYTSAGLSLQGGATLTAHGGALHRTQNMGGTRLLIDADGVADVPVEGNGAAVYTNMFGKAVVSDVNNYYRNQAYIDLNKLPENAEATQSVVQATLTEGAIGYRKFAVISGQKAMAVLRLQDGSHPPFGAEVKNDNEQTVGLVDDDGNVYLAGVKPGEHMSVFWSGVAHCDINLPYPLPADLFNGLLLPCQHKGNVAPVVPDDIKPVIQEQTQQVTPTNPPVSVSANQ

SEQ ID NO: 11097 - protein, 641 aa, Escherichia coli; identical to SEQ ID NO: 3774

SEQ ID NO: 11098 - protein, 230 aa, Escherichia coli; identical to SEQ ID NO: 4274

SEQ ID NO: 11099 - protein, 660 aa, Escherichia coli; identical to SEQ ID NO: 6740

SEQ ID NO: 11100 - protein, 627 aa, Escherichia coli; identical to SEQ ID NO: 3529

SEQ ID NO: 11101 - protein, 224 aa, Escherichia coli; identical to SEQ ID NO: 3115

SEQ ID NO: 11102 - protein, 360 aa, Escherichia coli; identical to SEQ ID NO: 3062

SEQ ID NO: 11103 - protein, 367 aa, Escherichia coli; identical to SEQ ID NO: 2431

SEQ ID NO: 11104 - protein, 760 aa, Escherichia coli
MENNRNFPARQFHSLTFFAGLCIGITPVAQALAAEGQTNADDTLVVEASTPSLYAPQQSADPKFSRPVADTTRTMTVISEQVIKDQGATNLTDALKNVPGVGAFFAGENGNSTTGDAIYMRGADTSNSIYIDGIRDIGSVSRDTFNTEQVEVIKGPSGTDYGRSAPTGSINMISKQPRNDSGIDASASIGSAWFRRGTLDVNQVIGDTTAVRLNVMGEKTHDAGRDKVKNERYGVAPSIAFGLGTANRLYLNYLHVTQHNTPDGGIPTIGLPGYSAPSAGTAALNHSGKVDTHNFYGTDSDYDDSTTDTATMRFEHDINDNTTIRNTTRWSRVKQDYLMTAIMGGASNITQPTSDVNSWTWSRTANTKDVSNKILTNQTNLTSTFYTGSIGHDVSTGVEFTRETQTNYGVNPVTLPAVNIYHPDSSIHPGGLTRNGANANGQTDTFAIYAFDTLQITRDFELNGGIRLDNYHTEYDSATACGGSGRGAITCPAGVAKGSPVTTVDTAKSGNLVNWKAGALYHLTENGNVYINYAVSQQPPGGNNFALAQSGSGNSANRTDFKPQKANTSEIGTKWQVLDKRLLLTAALFRTDIENEVEQNDDGTYSQYGKKRVEGYEISVAGNITPAWLVIGGYTQQKATIKNGKDVAQDGSSSLPYTPEHAFTLWSQYQATDDISVGAGARYIGSMHKGSDGAVGTPAFTEGYWVADAKLGYRVNRNLDFQLNVYNLFDTDYVASINKSGYRYHPGEPRTFLLTANMHF

SEQ ID NO: 11105 - protein, 89 aa, Escherichia coli; identical to SEQ ID NO: 2833

SEQ ID NO: 11106 - protein, 228 aa, Escherichia coli; identical to SEQ ID NO: 3034

SEQ ID NO: 11107 - protein, 224 aa, Escherichia coli; identical to SEQ ID NO: 3165

SEQ ID NO: 11108 - protein, 191 aa, Escherichia coli; identical to SEQ ID NO: 2727

SEQ ID NO: 11109 - protein, 224 aa, Escherichia coli; identical to SEQ ID NO: 3115

SEQ ID NO: 11110 - protein, 274 aa, Escherichia coli; identical to SEQ ID NO: 2304

SEQ ID NO: 11111 - protein, 162 aa, Escherichia coli; identical to SEQ ID NO: 1965

SEQ ID NO: 11112 - protein, 699 aa, Escherichia coli
MSASRSNRTVAEMAQTTWVIENAELEQQIQGGKELKDALAQLIPGLDVSSQSRTNYGMNMRGRPLVVLIDGVRLNSSRSDSRQLDSVDPFNIDHIEVISGATALYGGGSTGGLINIVTKKGQPETMMEFEAGTKSGFNSSKDHDERIAGAVSGGNDHISGRLSVAYQKFGGWFDGNGDATLLDNTQTGLQHSNRLDIMGTGTLNIDESRQLQLITQYYKSQGDDNYGLNLGKGFSAISGSSTPYVSKGLNSDRIPGTERHLISLQYSDSDFLRQELVGQVYYRDESLRFYPFPTVNANKQATAFSSSQQDTDQYGMKLTLNSQLMDGWQITWGLDAEHERFTSNQMFFDLAQASASGGLNNHKIYTTGRYPSYDITNLAAFLQSSYDINDIFTVSGGVRYQYTENRVDDFIDYTQQQKIAAGKAISADAIPGGSVDYDNFLFNAGLLMHITERQQAWFNFSQGVALPDPGKYYGRGIYGAAVNGHLPLTKSVNVSDSKLEGVKVDSYELGWRFTGDNLRTQIAAYYSLSNKSVERNKDLTISVKDDRRRIYGVEGAVDYLIPDTDWSTGVNFNVLKTESKVNGQWQKYDVKESSPSKATAYISWAPEPWSLRVQSTTSFDVSDAEGNDINGYTTVDFISSWLLPVGTLSFSVENLFDRDYTTVWGQRAPLYYSPGYGPASLYDYKGRGRTFGLNYSVLF

SEQ ID NO: 11113 - protein, 461 aa, Escherichia coli
MTERELSIIRALGEEFSTVLADLQRTFEGKMASQAQAFEEKLTSLSAVLQKHVTVDEVRPVLQAMVDDAVGAIPVPRDGRDYDPDVLQQAVNDAVANIPQPADGKSLTPDDVRPMLEQMVKEAVSHIPVPRDGRDYDPEVLKQAVNDAVANIPQPADGKSLTPDDVRPMLEQMVKEAVSHIPVPRDGRDYDPDVLQKAVNDAVANIPQPADGKSLTPDDVRPMLEQMVKEAVSHIPVPRDGRDYDPEVLQKAVNDAVANIPVPADGKSITPDDVRPMLEQMVKEAVSHIPVPRDGRDYDPDVLQKAVLDAVRALPAPQDGRDATALEIIPAIDDQKSFPRGTYATHLGGLWRAYEKTHGMRGWECLVDGVADIDVSMTGERSFTVVVRQSSGQRTEKTFSLPVMLYRGVFRAGETYHPGDTVTWGGSLWHCNSMTGDKPGEAHSSGWTLAAKRGRDAGGGK

SEQ ID NO: 11114 - protein, 432 aa, Escherichia coli; identical to SEQ ID NO: 2026

SEQ ID NO: 11115 - protein, 862 aa, Escherichia coli
MSGSYSSVWAEDDIQFDSRFLELKGDTKIDLKRFSSQGYVEPGKYNLQVQLNKQPLAEEYDIYWYAGEDDASKSYACLTPELVAQFGLKEDVAKNLQWSHDAKCLKSGQLEGMEIKADLSQSALVISLPQAYLEYTYPDWDPPSRWDDGISGIVADYSINAQTRHEENGGDDSNEISGNGTVGVNLGPWRMRADWQTNYQHTRSNDDDDEFSGDETQKKWEWSRYYAWRALPSLKAKLALGEDYLRSDIFDGFNYVGGSVSTDDQMLPPNLRGYAPDISGVAHTTAKVTVSQMGRVIYETQVPAGPFRIQDLGDSVSGTLHIRIEEQNGQVQEYDISTASMPYLTRPGQVRYKIMMGRPQEWGHHVEGEFFSGAEASWGIANGWSLYGGALGDENYQSAALGVGRDLSTFGAVAFDVTHSHTKLDKDTAYGKGSLDGNSFRVSYSKDFDQLNSRVTFAGYRFSEENFMTMSEYLDASDSGMVRTGNDKEMYTATYNQNFRDAGVSVYLNYTRHTYWDREEQTNYNIMLSHYFNMGSIRNVSISMTGYRYEYDNQADKGMYISLSMPWGDNSTVSYNGNYGSGTDSSQVGYFSRVDDATHYQLNVGTSDKHTSVDGYYSHDGSLAQVDLSANYHEGQYTSAGLSLQGGATLTAHGGALHRTQNMGGTRLLIDADGVADVPVEGNGAAVYTNMFGKAVVSDVNNYYRNQAYIDLNRLPENAEATQSVVQATLTEGAIGYRKFAVISGQKAMAVLRLSDGSHPPFGAEVKNDNEQTVGLVDDDGNVYLAGVKPGEHMSVFWSGVAHCDINLPDPLPADLFNGLLLPCQHKGNVAPITSPAVKPAIQEQTQRVTPTEPPTSISVNQ

SEQ ID NO: 11116 - protein, 203 aa, Escherichia coli; identical to SEQ ID NO: 2201

SEQ ID NO: 11117 - protein, 826 aa, Escherichia coli; identical to SEQ ID NO: 3563

SEQ ID NO: 11118 - protein, 715 aa, Escherichia coli; identical to SEQ ID NO: 3971

SEQ ID NO: 11119 - protein, 208 aa, Escherichia coli; identical to SEQ ID NO: 1949

SEQ ID NO: 11120 - protein, 630 aa, Escherichia coli; identical to SEQ ID NO: 4909

SEQ ID NO: 11121 - protein, 233 aa, Escherichia coli; identical to SEQ ID NO: 3276

SEQ ID NO: 11122 - protein, 200 aa, Escherichia coli; identical to SEQ ID NO: 1788

SEQ ID NO: 11123 - protein, 669 aa, Escherichia coli; identical to SEQ ID NO: 3677

SEQ ID NO: 11124 - protein, 432 aa, Escherichia coli; identical to SEQ ID NO: 2026

SEQ ID NO: 11125 - protein, 231 aa, Escherichia coli; identical to SEQ ID NO: 3055

SEQ ID NO: 11126 - protein, 431 aa, Escherichia coli; identical to SEQ ID NO: 3408

SEQ ID NO: 11127 - protein, 478 aa, Escherichia coli; identical to SEQ ID NO: 2404

SEQ ID NO: 11128 - protein, 713 aa, Escherichia coli; identical to SEQ ID NO: 5996

SEQ ID NO: 11129 - protein, 122 aa, Escherichia coli; identical to SEQ ID NO: 2915

SEQ ID NO: 11130 - protein, 224 aa, Escherichia coli; identical to SEQ ID NO: 3604

SEQ ID NO: 11131 - protein, 243 aa, Escherichia coli; identical to SEQ ID NO: 2910

SEQ ID NO: 11132 - protein, 518 aa, Escherichia coli; identical to SEQ ID NO: 2349

SEQ ID NO: 11133 - protein, 678 aa, Escherichia coli; identical to SEQ ID NO: 3014

SEQ ID NO: 11134 - protein, 230 aa, Escherichia coli; identical to SEQ ID NO: 3723

SEQ ID NO: 11135 - protein, 363 aa, Escherichia coli; identical to SEQ ID NO: 3347

SEQ ID NO: 11136 - protein, 229 aa, Escherichia coli; identical to SEQ ID NO: 3589

SEQ ID NO: 11137 - protein, 267 aa, Escherichia coli; identical to SEQ ID NO: 5971

SEQ ID NO: 11138 - protein, 236 aa, Escherichia coli; identical to SEQ ID NO: 3438

SEQ ID NO: 11139 - protein, 512 aa, Escherichia coli
MKKISFFIFTALFCCSAQAAPSSLEKRLGKNEYFIITKSSPVRVILNDFAANYSIPVFISSSVNDDFSGEIKNEKPVKVLEKLSKLYHLTWYYDENILYIYKTNEISRSIITPTYLDIDSLLKYLSDTISVNKNSCNVRKITTFNSIEVRGVPECIKYITSLSESLDKEAQSKAKNKDVVKVFKLNYASATDITYKYRDQNVVVPGVVSILKTMASNGSLPSTGKGAVERSGNLFDNSVTISADPRLNAVVVKDREITMDIYQQLISELDIEQRQIEISVSIIDVDANDLQQLGVNWSGTLNAGQGTIAFNSSTAQANISSSVISNASNFMIRVNALQQNSKAKILSQPSIITLNNMQAILDKNVTFYTKVSGEKVASLESITSGTLLRVTPRILDDSSNSLTGKRRERVRLLLDIQDGNQSTNQSNAQDASSTLPEVQNSEMTTEATLSAGESLLLGGFIQDKESSSKDGIPLLSDIPVIGSLFSSTVKQKHSVVRLFLIKATPIKSASSE

SEQ ID NO: 11140 - protein, 241 aa, Escherichia coli; identical to SEQ ID NO: 2884

SEQ ID NO: 11141 - protein, 700 aa, Escherichia coli; identical to SEQ ID NO: 2926

SEQ ID NO: 11142 - protein, 512 aa, Escherichia coli; identical to SEQ ID NO: 2813

SEQ ID NO: 11143 - protein, 208 aa, Escherichia coli; identical to SEQ ID NO: 1949

SEQ ID NO: 11144 - protein, 518 aa, Escherichia coli; identical to SEQ ID NO: 2351

SEQ ID NO: 11145 - protein, 746 aa, Escherichia coli; identical to SEQ ID NO: 3031

SEQ ID NO: 11146 - protein, 565 aa, Escherichia coli; identical to SEQ ID NO: 2678

SEQ ID NO: 11147 - protein, 554 aa, Escherichia coli; identical to SEQ ID NO: 3409

SEQ ID NO: 11148 - protein, 122 aa, Escherichia coli; identical to SEQ ID NO: 2915

SEQ ID NO: 11149 - protein, 541 aa, Escherichia coli; identical to SEQ ID NO: 3377

SEQ ID NO: 11150 - protein, 760 aa, Escherichia coli; identical to SEQ ID NO: 2078

SEQ ID NO: 11151 - protein, 193 aa, Escherichia coli; identical to SEQ ID NO: 2250

SEQ ID NO: 11152 - protein, 221 aa, Escherichia coli
MKNYLWLVALLPLLSGCESQAILVKKDDAYFAPPKTEAPPPADGRAGGVFETGYNWSLTADRRAYRVGDILTVILEESTQSSKQAKTNFGKSNTVDIGAPTIFGHTKDKLSGSIDANRDFDGSATSQQQNSLRGEITVSVHAVQPNGILEIRGEKWLTLNQGDEYIRLSGLARADDIQNDNSVSSQRIADARISYAGRGALSDANAAGWLTRLFNHPLFPI

SEQ ID NO: 11153 - protein, 386 aa, Escherichia coli; identical to SEQ ID NO: 3072

SEQ ID NO: 11154 - protein, 432 aa, Escherichia coli; identical to SEQ ID NO: 2026

SEQ ID NO: 11155 - protein, 784 aa, Escherichia coli; identical to SEQ ID NO: 2244

SEQ ID NO: 11156 - protein, 747 aa, Escherichia coli; identical to SEQ ID NO: 2072

SEQ ID NO: 11157 - protein, 162 aa, Escherichia coli; identical to SEQ ID NO: 1969

SEQ ID NO: 11158 - protein, 236 aa, Escherichia coli; identical to SEQ ID NO: 3286

SEQ ID NO: 11159 - protein, 221 aa, Escherichia coli; identical to SEQ ID NO: 3743

SEQ ID NO: 11160 - protein, 331 aa, Escherichia coli; identical to SEQ ID NO: 9962

SEQ ID NO: 11161 - protein, 214 aa, Escherichia coli
MTEGDVRPEALRRFELMVEEVARHAEEAKKNAGEAETSARNAGISVSQAEASAANADTSAGEASESARQAAESAASAKQSEDASSSSASAAAQKASESSQSAAEAELSKKTAESAAGNAARDATTATEKARESAESAQSAEQSRIAAEEAVNRIPTVVGPPGPKGEQGPAGPQGPKGDKGERGDTGPVGATGERGPAGDAGPAGPQGPKGDRGE

SEQ ID NO: 11162 - protein, 784 aa, Escherichia coli; identical to SEQ ID NO: 3822

SEQ ID NO: 11163 - protein, 191 aa, Escherichia coli; identical to SEQ ID NO: 2727

SEQ ID NO: 11164 - protein, 236 aa, Escherichia coli; identical to SEQ ID NO: 3970

SEQ ID NO: 11165 - protein, 230 aa, Escherichia coli; identical to SEQ ID NO: 2995

SEQ ID NO: 11166 - protein, 430 aa, Escherichia coli; identical to SEQ ID NO: 2617

SEQ ID NO: 11167 - protein, 231 aa, Escherichia coli; identical to SEQ ID NO: 9952

SEQ ID NO: 11168 - protein, 539 aa, Escherichia coli; identical to SEQ ID NO: 3050

SEQ ID NO: 11169 - protein, 351 aa, Escherichia coli; identical to SEQ ID NO: 2872

SEQ ID NO: 11170 - protein, 478 aa, Escherichia coli; identical to SEQ ID NO: 2404

SEQ ID NO: 11171 - protein, 361 aa, Escherichia coli; identical to SEQ ID NO: 3061

SEQ ID NO: 11172 - protein, 733 aa, Escherichia coli
MAQALAAEGQTNADDTLVVEASTPSLYAPQQSADPKFSRPVADTTRTMTVISEQVIKDQGATNLTDALKNVPGVGAFFAGENGNSTTGDAIYMRGADTSNSIYIDGIRDIGSVSRDTFNTEQVEVIKGPSGTDYGRSAPTGSINMISKQPRNDSGIDASASIGSAWFRRGTLDVNQVIGDTTAVRLNVMGEKTHDAGRDKVKNERYGVAPSIAFGLGTANRLYLNYLHVTQHNTPDGGIPTIGLPGYSAPSAGTAALNHSGKVDTHNFYGTDSDYDDSTTDTATMRFEHDINDNTTIRNTTRWSRVKQDYLMTAIMGGASNITQPTSDVNSWTWSRTANTKDVSNKILTNQTNLTSTFYTGSIGHDVSTGVEFTRETQTNYGVNPVTLPAVNIYHPDSSIHPGGLTRNGANANGQTDTFAIYAFDTLQITRDFELNGGIRLDNYHTEYDSATACGGSGRGAITCPAGVAKGSPVTTVDTAKSGNLVNWKAGALYHLTENGNVYINYAVSQQPPGGNNFALAQSGSGNSANRTDFKPQKANTSEIGTKWQVLDKRLLLTAALFRTDIENEVEQNDDGTYSQYGKKRVEGYEISVAGNITPAWQVIGGYTQQKATIKNGKDVAQDGSSSLPYTPEHAFTLWSQYQATDDISVGAGARYIGSMHKGSDGAVGTPAFTEGYWVADAKLGYRVNRNLDFQLNVYNLFDTDYVASINKSGYRYHPGEPRTFLLTANMHF

SEQ ID NO: 11173 - protein, 243 aa, Escherichia coli; identical to SEQ ID NO: 3561

SEQ ID NO: 11174 - protein, 250 aa, Escherichia coli; identical to SEQ ID NO: 3427

SEQ ID NO: 11175 - protein, 203 aa, Escherichia coli; identical to SEQ ID NO: 2009

SEQ ID NO: 11176 - protein, 118 aa, Escherichia coli [sequence omitted]

SEQ ID NO: 11177 - protein, 614 aa, Escherichia coli; identical to SEQ ID NO: 3736

SEQ ID NO: 11178 - protein, 331 aa, Escherichia coli; identical to SEQ ID NO: 2700

SEQ ID NO: 11179 - protein, 123 aa, Escherichia coli
MLWRKHEKRGAFLGLLLVSACASVFAANNETSKSVTFPKCEGLDAAGIAASVKRDYQQNRVARWADDQKIVGQADPVAWVSLQDIQGKDDKWSVPLTVRGKSADIHYQVSVDCKAGMAEYQRR

SEQ ID NO: 11180 - protein, 170 aa, Escherichia coli [sequence omitted]

SEQ ID NO: 11181 - protein, 266 aa, Escherichia coli; identical to SEQ ID NO: 3102

SEQ ID NO: 11182 - protein, 161 aa, Escherichia coli; identical to SEQ ID NO: 2582

SEQ ID NO: 11183 - protein, 224 aa, Escherichia coli; identical to SEQ ID NO: 3115

SEQ ID NO: 11184 - protein, 641 aa, Escherichia coli; identical to SEQ ID NO: 3104

SEQ ID NO: 11185 - protein, 367 aa, Escherichia coli; identical to SEQ ID NO: 3105

SEQ ID NO: 11186 - protein, 478 aa, Escherichia coli; identical to SEQ ID NO: 2404

SEQ ID NO: 11187 - protein, 192 aa, Escherichia coli; identical to SEQ ID NO: 3894

SEQ ID NO: 11188 - protein, 780 aa, Escherichia coli
MKIPTTTDIPQRYTWCLAGICYSSLAILPSFLSYAESYFNPAFLLENGTSVADLSRFERGNHQPARVYRVDLWRNDEFIGSQDIVFESTTENTGDKSGGLMPCFNQVLLERIGLNSSAFPELAQQQNNKCINLLKAVPDATINFDFAAMRLNITIPQITLLSSAHGYIPPEEWDEGIPALLLNYNFTGNRGNGNDSYFFSELSGINIGPWRLRNNGSWNYFRGNGYHSEQWNNIGTWVQRAIIPLKSELVMGDGNTGSDIFDGVGFRGVRLYSSDNMYPDSQQGFAPTVRGIARTAAQLTIRQNGFIIYQSYVSPGAFEITDLHPTSSNGDLDVTIDERDGNQQNYTIPYSTVPILQREGRFKFDLTAGDFRSGNSQQSSPFFFQGTALGGLPQEFTAYGGTQLSANYTAFLLGLGRNLGNWGAVSLDVTHARSQLADDSRHEGDSIRFLYAKSMNTFGTNFQLMGYRYSTQGFYTLDDVAYRRMEGYEYDYDYDGEHRDELIIVNYHNLRFSRKDRLQLNISQSLNDFGSLYISGTHQKYWNTSDSDTWYQVGYTSSWVGISYSLSFSWNESVGIPDNERIVGLNVSVPFNVLTKRRYTRENALDRAYASFNANRNSNGQNSWLAGVGGTLLEGHNLSYHVSQGDTSNNGYTGSATANWQATYGTLGVGYNYDRDQHDVNWQLSGGVVGHENGITLSQPLGDTNVLIKAPGAGGVRIENQTGILTDWRGYAVMPYATVYRYNRIALDTNTMGNSIDVEKILAALCRRKARWFVPILIPA

SEQ ID NO: 11189 - protein, 193 aa, Escherichia coli; identical to SEQ ID NO: 2246

SEQ ID NO: 11190 - protein, 760 aa, Escherichia coli
MENNRNFPARQFNSLTFFAGLCIGITPVAQALAAEGQTNTDDTLVVEASTPSLYAPQQSADPKFSRPVADTTRTMTVISEQVIKDQGATNLTDALKNVPGVGAFFAGENGNSTTGDAIYMRGADTSNSIYIDGIRDIGSVSRDTFNTEQVEVIKGPSGTDYGRSAPTGSINMISKQPRNDSGIDASASIGSAWFRRGTLDVNQVIGDTTAVRLNVMGEKTHDAGRDKVKNERYGVAPSIAFGLGTANRLYLNYLHVTQHNTPDGGIPTIGLPGYSAPSAGTAALNHSGKVDTHNFYGTDSDYDDSTTDTATMRFEHDINDNTTIRNTTRWSRVKQDYLMTAIMGGASNITQPTSDVNSWTWSRTANTKDVSNKILTNQTNLTSTFYTGSIGHDVSTGVEFTRETQTNYGVNPVTLPAVNIYHPDSSIHPGGLTRNGANANGQTDTFAIYAFDTLQITRDFELNGGIRLDNYHTEYDSATACGGSGRGAITCPAGVAKGSPVTTVDTAKSGNLVNWKAGALYHLTENGNVYINYAVSQQPPGGNNFALAQSGSGNSANRTDFKPQKANTSEIGTKWQVLDKRLLLTAALFRTDIENEVEQNDDGTYSQYGKKRVEGYEISVAGNITPAWQVIGGYTQQKATIKNGKDVAQDGSSSLPYTPEHAFTLWSQYQATDDISVGAGARYIGSMHKGSDGAVGTPAFTEGYWVADAKLGYRVNRNLDFQLNVYNLFDTDYVASINKSGYRYHPGEPRTFLLTANMHF

SEQ ID NO: 11191 - protein, 518 aa, Escherichia coli; identical to SEQ ID NO: 2349

SEQ ID NO: 11192 - protein, 662 aa, Escherichia coli
MTAEEMALHQPKSVKEALSYTPGVSVGTRGASNTYDHLIIRGFAAEGQSQNNYLNGLKLQGNFYNDAVIDPYMLERAEIMRGPVSVLYGKSSPGGLLNMVSKRPTTEPLKEVQFKAGTDSLFQTGFDFSDSLDDDGVYSYRLTGLARSANAQQKGSEEQRYAIAPAFTWRPDDKTNFTFLSYFQNEPETGYYGWLPKEGTVEPLPNGKRLPTDFNEGAKNNTYSRNEKMVGYSFDHEFNDTFTVRQNLRFAENKTSQNSVYGYGVCSDPANAYSKQCAALAPADKGHYLARKYVVDDEKLQNFSVDTQLQSKFATGDIDHTLLTGVDFMRMRNDINAWFGYDDSVPLLNLYNPVNTDFDFNAKDPANSGPYRILNKQKQTGVYVQDQAQWDKVLVTLGGRYDWADQESLNRVAGTTDKRDDKQFTWRGGVNYLFDNGVTPYFSYSESFEPSSQVGKDGNIFAPSKGKQYEVGVKYVPEDRPIVVTGAVYNLTKTNNLMADPEGSFFSVEGGEIRARGVEIEAKAALSASVNVVGSYTYTDAEYTTDTTYKGNTPAQVPKHMASLWADYTFFDGPLSGLTLGTGGRYTGSSYGDPANSFKVGSYTVVDALVRYDLARVGMAGSNVALHVNNLFDREYVASCFNTYGCFWGAERQVVATATFRF

SEQ ID NO: 11193 - protein, 231 aa, Escherichia coli; identical to SEQ ID NO: 3055

SEQ ID NO: 11194 - protein, 721 aa, Escherichia coli; identical to SEQ ID NO: 6558

SEQ ID NO: 11195 - protein, 861 aa, Escherichia coli
MSGSYSSVWAEDDIQFDSRFLELKGDTKIDLKRFSSQGYVEPGKYNLQVQLNKQPLAEEYDIYWYAGEDDASKSYACLTPELVAQFGLKEDVANNLQWSHDAKCLKSGQLEGMEIKADLSQSALVISLPQAYLEYTYPDWDPPSRWDDGISGIVADYSINAQTRHEENGGDDSNEISGNGTVGVNLGPWRMRADWQTNYQHTRSNDDDEFSGDETQKKWEWSRYYAWRALPSLKAKLALGEDYLRSDIFDGFNYVGGSVSTDDQMLPPNLRGYAPDISGVAHTTAKVTVSQMGRVIYETQVPAGPFRIQDLGDSVSGTLHIRIEEQNGQVQEYDISTASMPYLTRPGQVRYKIMMGRPQEWGHHVEGEFFSGAEASWGIANGWSLYGGALGDENYQSAALGVGRDLSTFGAVAFDVTHSHTKLDKDTAYGKGSLDGNSFRVSYSKDFDQLNSRVTFAGYRFSEENFMTMSEYLDASDSGMVRTGNDKEMYTATYNQNFRDAGVSVYLNYTRHTYWDREEQTNYNIMLSHYFNMGSIRNVSISMTGYRYEYDNQADKGMYISLSMPWGDNSTVSYNGNYGSGTDSSQVGYFSRVDDATHYQLNVGTSDKHTSVDGYYSHDGSLAQVDLSANYHEGQYTSAGLSLQGGATLTAHGGALHRTQNMGGTRLLIDADGVADVPVEGNGAAVYTNMFGKAVVSDVNNYYRNQAYIDLNKLPENAEATQSVVQATLTEGAIGYRKFAVISGQKAMAVLRLQDGSHPPFGAEVKNDNEQTVGLVDDDGNVYLAGVKPGEHMSVFWSGVAHCDINLPDPLPADLFNGLLLPCQHKGNVAPVVPDDIKPVIQEQTQQVTPTNPPVSVSANQ

SEQ ID NO: 11196 - protein, 432 aa, Escherichia coli; identical to SEQ ID NO: 2026

SEQ ID NO: 11197 - protein, 361 aa, Escherichia coli; identical to SEQ ID NO: 3135

SEQ ID NO: 11198 - protein, 203 aa, Escherichia coli; identical to SEQ ID NO: 2009

SEQ ID NO: 11199 - protein, 207 aa, Escherichia coli; identical to SEQ ID NO: 2211

SEQ ID NO: 11200 - protein, 700 aa, Escherichia coli; identical to SEQ ID NO: 3128

SEQ ID NO: 11201 - protein, 840 aa, Escherichia coli; identical to SEQ ID NO: 6560

SEQ ID NO: 11202 - protein, 871 aa, Escherichia coli; identical to SEQ ID NO: 7881

SEQ ID NO: 11203 - protein, 111 aa, Escherichia coli; identical to SEQ ID NO: 3096

SEQ ID NO: 11204 - protein, 746 aa, Escherichia coli; identical to SEQ ID NO: 3108

SEQ ID NO: 11205 - protein, 359 aa, Escherichia coli; identical to SEQ ID NO: 2328

SEQ ID NO: 11206 - protein, 208 aa, Escherichia coli; identical to SEQ ID NO: 1949

SEQ ID NO: 11207 - protein, 140 aa, Escherichia coli
MRLLRTESDILPVDRETLFELSIASVPSGKVENQSVKVAMRSVFKLFWRPEGLPGDPLEAYQQLRWTRNSQGVQLTNPTPYYINLIQLSVNGKALSNAGVVPPKSQRQTSWCQAIAPCHVAWRAINDYGGLSAKKEQNLP

SEQ ID NO: 11208 - protein, 822 aa, Escherichia coli
MIKNIYCSLSVLIIGCASAYAVEFNKDLIEAEDRENVNLSQFETDGQLPVGKYSLNALINNKRTPIHLDLQWVLIDNQTAVCLTPEQLTLLGFTDEIIEVAQQNLIDGCYPIEKEKQITTYLDKGKMQLSISAPQAWLKYKDANWTPPELWDHGIAGAFLDYNLYASHYAPHQGDNSQNISSYGQAGVNLGAWRLRTDYQYDQSFNNGKSQANNLDFPRIYLFRPIPAINAKLTIGQYDTESSIFDSFHFSGVSLKSDENMLPPDLRGYAPQITGVAQTNAKVTVSQNNRIIYQENVPPGPFAITNLFNTLQGQLDVKVEEEDGQVTQWQVASNSIPYLTRKGQIRYTTAMGKPTSVGGDSLQQPFFWTGEFSWGWLNNVSLYGGSVLTNRDYQSLAAGVGFNLNSLGSLSFDVTRSDAQLHNQDKETGYSYRANYSKRFESTGSQLTFAGYRFSDKNFVTMNEYINDTNHYTNYQNEKESYIVTFNQYLESLRLNTYVSLARNTYWDASSNVNYSLSLSRDFDIGPLKNVSTSLTFSRINWEEDNQDQLYLNISIPWGTSRTLSYGMQRNQDNKISHTASWYDSSDRNNSWSVSASGDNDEFKDMKASLRASYQHNTENGRLYLSGTSQRDSYYSLNASWNGSFTATRHGAAFHDYSGSADSRFMIDADGAEDIPLNNKRAVTNRYGIGVIPSVSSYITTSLSVDTRNLPENVDIENSVITTTLTEGAIGYAKLDTRKGYQIMGVIRLADGSHPPLGISVKDKTSHKELGLVADGGFVYLNGIQDDSKLTLRWGDKSCFIQPPNSSNLTTGTVILPCISQN

SEQ ID NO: 11209 - protein, 203 aa, Escherichia coli; identical to SEQ ID NO: 2201

SEQ ID NO: 11210 - protein, 250 aa, Escherichia coli; identical to SEQ ID NO: 3048

SEQ ID NO: 11211 - protein, 198 aa, Escherichia coli; identical to SEQ ID NO: 3645

SEQ ID NO: 11212 - protein, 446 aa, Escherichia coli; identical to SEQ ID NO: 2176

SEQ ID NO: 11213 - protein, 863 aa, Escherichia coli; identical to SEQ ID NO: 3113

SEQ ID NO: 11214 - protein, 387 aa, Escherichia coli
MKRKVLAMLVPALLVAGAANAAEIYNKNGNKLDLYGKVDARHTFSDNPGDDGDETIIELGFKGETQITDQLTGYGQALTKTKASDTEGSDNTYVKLAFAGLKFGEMGSFDYGRNYGVIYDVEAWTDMLPVFGGDFYTWTDNFMAGRANGVATYRNSDFFGLVEGLNFALQYQGNNEGSNAGEDQEGTKNGHEDVRFQNGDGFGLSTSYDFDFGLSLGAAYSNSDRTNSQVALGGYHYNEYSKFAGGDTAEAWTFGAKYDANNVYLAMMYAETRNMTPYGNVGIANKTQNFEAVAQYQFDFGLRPSLAYVYSKGKDLGGNDYNNNGHQEYVDQDLVNYVEIGATYYFNKNFSTYVDYKINLLDKDDDFYDNNGIATDDVVGVGLVYQF

SEQ ID NO: 11215 - protein, 241 aa, Escherichia coli; identical to SEQ ID NO: 2922

SEQ ID NO: 11216 - protein, 230 aa, Escherichia coli; identical to SEQ ID NO: 3348

SEQ ID NO: 11217 - protein, 228 aa, Escherichia coli; identical to SEQ ID NO: 4179

SEQ ID NO: 11218 - protein, 816 aa, Escherichia coli; identical to SEQ ID NO: 3172

SEQ ID NO: 11219 - protein, 274 aa, Escherichia coli; identical to SEQ ID NO: 3160

SEQ ID NO: 11220 - protein, 765 aa, Escherichia coli; identical to SEQ ID NO: 7818

SEQ ID NO: 11221 - protein, 222 aa, Escherichia coli; identical to SEQ ID NO: 7372

SEQ ID NO: 11222 - protein, 826 aa, Escherichia coli; identical to SEQ ID NO: 3078

SEQ ID NO: 11223 - protein, 191 aa, Escherichia coli; identical to SEQ ID NO: 2727

SEQ ID NO: 11224 - protein, 430 aa, Escherichia coli; identical to SEQ ID NO: 2617

SEQ ID NO: 11225 - protein, 224 aa, Escherichia coli; identical to SEQ ID NO: 3165

SEQ ID NO: 11226 - protein, 784 aa, Escherichia coli; identical to SEQ ID NO: 2244

SEQ ID NO: 11227 - protein, 386 aa, Escherichia coli; identical to SEQ ID NO: 3094

SEQ ID NO: 11228 - protein, 614 aa, Escherichia coli; identical to SEQ ID NO: 1888

SEQ ID NO: 11229 - protein, 237 aa, Escherichia coli; identical to SEQ ID NO: 3022

SEQ ID NO: 11230 - protein, 213 aa, Escherichia coli; identical to SEQ ID NO: 2232

SEQ ID NO: 11231 - protein, 365 aa, Escherichia coli; identical to SEQ ID NO: 3084

SEQ ID NO: 11232 - protein, 678 aa, Escherichia coli; identical to SEQ ID NO: 3014

SEQ ID NO: 11233 - protein, 729 aa, Escherichia coli; identical to SEQ ID NO: 2948

SEQ ID NO: 11234 - protein, 351 aa, Escherichia coli; identical to SEQ ID NO: 3103

SEQ ID NO: 11235 - protein, 162 aa, Escherichia coli; identical to SEQ ID NO: 1973

SEQ ID NO: 11236 - protein, 162 aa, Escherichia coli
MTFMKGLPLLLLVASLCSHAALQPDRTRIVFNANDKATSLRVDNRSDKLPYLAYSWLENEKGEKSDDLLVALPPIQRLEPKATTQVRIVKQASTTKLPGDRETLFFYNMREIPPAPEKTATMPFCKSPFRVVSRCSGDRLHYARKQEKRSNCSYRSASRATN

SEQ ID NO: 11237 - protein, 232 aa, Escherichia coli; identical to SEQ ID NO: 2087

SEQ ID NO: 11238 - protein, 615 aa, Escherichia coli
MFWRDITLSVWRKKTTGLKTKKRLLPLVLAAALCSSPVWAEEATFTANFKDTDLKSFIETVGANLNKTIIMGPGVQGKVSIRTMTPLNERQYYQLFLNLLEAQGYAVVPMENDVLKVVKSSAAKVEPLPLVGEGSDNYAGDEMVTKVVPVRNVSVRELAPILRQMIDSAGSGNVVNYDPSNVIMLTGRASVVERLTEVIQRVDHAGNRTEEVIPLDNASASEIARVLESLTKNSGENQPATLKSQIVADERTNSVIVSGDPATRDKMRRLIRRLDSEMERSGNSQVFYLKYSKAEDLVDVLKQVSGTLTAAKEEAEGTVGSGREIVSIAASKHSNALIVTAPQDIMQSLQSVIEQLDIRRAQVHVEALIVEVAEGSNINFGVQWASKDAGLMQFANGTQIPIGTLGAAISQAKPQKGSTVISENGATTINPDTNGDLSTLAQLLSGFSGTAVGVVKGDWMALVQAVKNDSSSNVLSTPSITTLDNQEAFFMVGQDVPVLTGSTVGSNNSNPFNTVERKKVGIMLKVTPQINEGNAVQMVIEQEVSKVEGQTSLDVVFGERKLKTTVLANDGELIVLGGLMDDQAGESVAKVPLLGDIPLIGNLFKSTADKKENVT

SEQ ID NO: 11239 - protein, 851 aa, Escherichia coli
MPSFIGGLVVFVSAAFNAQAETWFDPAFFKDDPSMVADLSRFEKGQKITPGVYRVDIVLNQTIVDTRNVNFVEITPEKGIAACLTTESLDAMGVNTDAFPAFKQLDKQACVPLAEIIPDASVTFNVNKLRLEISVPQIAIKSNARGYVPPERWDEGINALLLGYSFSGANSIHSSADSDSGDSYFLNLNSGVNLGPWRLRNNSTWSRSSGQTAEWKNLSSYLQRAVIPLKGELTVGDDYTAGDFFDSVSFRGVQLASDDNMLPDSLKGFAPVVRGIAKSNAQITIKQNGYTIYQTYVSPGAFEISDLYSTSSSGDLLVEIKEADGSVNSYSVPFSSVPLLQRQGRINYAVTLAKYRTNSNEQQESKFAQATLQWGGPWGTTWYGGGQYAEYYRAAMFGLGFNLGDFGAISFDATQAKSTLADQSEHKGQSYRFLYAKTLNQLGTNFQLMGYRYSTSGFYTLSDTMYKHMDGYEFNDGDDEDTPMWSRYYNLFYTKRGKLQVNISQQLGEYGSFYLSGSQQTYWHTDQQDRLLQFGYNTQIKDLSLGVSWNYSKSRGQPDADQVFALNFSLPLNLLLPRSNDSYTRKKNYAWMTSNTSIDNEGHITQNLGLTETLLDDGNLSYSVQQGYNSEGKTANGSASMDYKGAFADARVGYNYSDNGSQQQLNYALSGSLVAHSQGITLGQSLGETNVLIAAPGAENTRVANSTGLKTDWRGYTVVPYATSYRENRIALDAASLKRNVDLENAVVNVVPTKGALVLAEFNAHAGARVLMKTSKQGIPLRFGAIATLDGIQTNSGIIDDDGSLYMSGLPAQGAITVRWGEAPDQICHISYQLTEQQINSAITRMDAICR

SEQ ID NO: 11240 - protein, 565 aa, Escherichia coli; identical to SEQ ID NO: 3091

SEQ ID NO: 11241 - protein, 249 aa, Escherichia coli; identical to SEQ ID NO: 3492

SEQ ID NO: 11242 - protein, 539 aa, Escherichia coli; identical to SEQ ID NO: 3050

SEQ ID NO: 11243 - protein, 236 aa, Escherichia coli; identical to SEQ ID NO: 3093

SEQ ID NO: 11244 - protein, 243 aa, Escherichia coli; identical to SEQ ID NO: 3483

SEQ ID NO: 11245 - protein, 430 aa, Escherichia coli; identical to SEQ ID NO: 2617

SEQ ID NO: 11246 - protein, 760 aa, Escherichia coli; identical to SEQ ID NO: 3923

SEQ ID NO: 11247 - protein, 203 aa, Escherichia coli; identical to SEQ ID NO: 2201

SEQ ID NO: 11248 - protein, 866 aa, Escherichia coli; identical to SEQ ID NO: 8338

SEQ ID NO: 11249 - protein, 224 aa, Escherichia coli; identical to SEQ ID NO: 3165

SEQ ID NO: 11250 - protein, 130 aa, Escherichia coli; identical to SEQ ID NO: 3706

SEQ ID NO: 11251 - protein, 432 aa, Escherichia coli; identical to SEQ ID NO: 2026

SEQ ID NO: 11252 - protein, 232 aa, Escherichia coli; identical to SEQ ID NO: 2087

SEQ ID NO: 11253 - protein, 729 aa, Escherichia coli; identical to SEQ ID NO: 2948

SEQ ID NO: 11254 - protein, 834 aa, Escherichia coli; identical to SEQ ID NO: 3095

SEQ ID NO: 11255 - protein, 512 aa, Escherichia coli; identical to SEQ ID NO: 2974

SEQ ID NO: 11256 - protein, 721 aa, Escherichia coli; identical to SEQ ID NO: 7494

SEQ ID NO: 11257 - protein, 386 aa, Escherichia coli; identical to SEQ ID NO: 3094

SEQ ID NO: 11258 - protein, 228 aa, Escherichia coli
MKRISFAVLALLMTAQQCFAGGVALSTTRVIYDGGKKEASLTVENHNKNEEFLIQSWIDDVNSNKKTPFIITPPLFKLDPDKNNVLRIVNIEDTLPKDRESVYWINVKAIPAKSAENENKNVLQIAVRTRLKLFYRPKGLPGSNLEAMKQLRFQRQNNQIVVNNDSAYNLTFNQFSINGQKIERAGMVLAKGKLNINLPAGTGNAHEVKYSIINDFGVAGEMLTKPIN

SEQ ID NO: 11259 - protein, 118 aa, Escherichia coli [sequence omitted]

SEQ ID NO: 11260 - protein, 161 aa, Escherichia coli; identical to SEQ ID NO: 2582

SEQ ID NO: 11261 - protein, 820 aa, Escherichia coli; identical to SEQ ID NO: 8131

SEQ ID NO: 11262 - protein, 826 aa, Escherichia coli; identical to SEQ ID NO: 7491

SEQ ID NO: 11263 - protein, 351 aa, Escherichia coli; identical to SEQ ID NO: 2872

SEQ ID NO: 11264 - protein, 367 aa, Escherichia coli; identical to SEQ ID NO: 4285

SEQ ID NO: 11265 - protein, 193 aa, Escherichia coli; identical to SEQ ID NO: 2246

SEQ ID NO: 11266 - protein, 232 aa, Escherichia coli; identical to SEQ ID NO: 2087

SEQ ID NO: 11267 - protein, 331 aa, Escherichia coli; identical to SEQ ID NO: 5128

SEQ ID NO: 11268 - protein, 567 aa, Escherichia coli; identical to SEQ ID NO: 3518

SEQ ID NO: 11269 - protein, 203 aa, Escherichia coli; identical to SEQ ID NO: 2201

SEQ ID NO: 11270 - protein, 355 aa, Escherichia coli; identical to SEQ ID NO: 5115

SEQ ID NO: 11271 - protein, 203 aa, Escherichia coli; identical to SEQ ID NO: 2009

SEQ ID NO: 11272 - protein, 231 aa, Escherichia coli; identical to SEQ ID NO: 2868

SEQ ID NO: 11273 - protein, 191 aa, Escherichia coli; identical to SEQ ID NO: 2727

SEQ ID NO: 11274 - protein, 232 aa, Escherichia coli; identical to SEQ ID NO: 2087

SEQ ID NO: 11275 - protein, 359 aa, Escherichia coli; identical to SEQ ID NO: 2329

SEQ ID NO: 11276 - protein, 678 aa, Escherichia coli; identical to SEQ ID NO: 6376

SEQ ID NO: 11277 - protein, 213 aa, Escherichia coli; identical to SEQ ID NO: 2232

SEQ ID NO: 11278 - protein, 366 aa, Escherichia coli; identical to SEQ ID NO: 3520

SEQ ID NO: 11279 - protein, 700 aa, Escherichia coli; identical to SEQ ID NO: 2926

SEQ ID NO: 11280 - protein, 386 aa, Escherichia coli; identical to SEQ ID NO: 3600

SEQ ID NO: 11281 - protein, 203 aa, Escherichia coli; identical to SEQ ID NO: 2007

SEQ ID NO: 11282 - protein, 207 aa, Escherichia coli; identical to SEQ ID NO: 2212

SEQ ID NO: 11283 - protein, 686 aa, Escherichia coli; identical to SEQ ID NO: 9611

SEQ ID NO: 11284 - protein, 266 aa, Escherichia coli; identical to SEQ ID NO: 1892

SEQ ID NO: 11285 - protein, 863 aa, Escherichia coli; identical to SEQ ID NO: 3946

SEQ ID NO: 11286 - protein, 539 aa, Escherichia coli; identical to SEQ ID NO: 3050

SEQ ID NO: 11287 - protein, 170 aa, Escherichia coli; identical to SEQ ID NO: 2565

SEQ ID NO: 11288 - protein, 629 aa, Escherichia coli; identical to SEQ ID NO: 6084

SEQ ID NO: 11289 - protein, 228 aa, Escherichia coli; identical to SEQ ID NO: 5492

SEQ ID NO: 11290 - protein, 236 aa, Escherichia coli; identical to SEQ ID NO: 3482

SEQ ID NO: 11291 - protein, 386 aa, Escherichia coli
MDNAPLPQVISMVWQRVFNRPYQLSPDIAGDTRLVSFYLSKNQEPRSFFISYLKRLNISVTSMKDGVDYISVIKQTEQKVPDVVFTYRPKYRSVSYLSAMLNSVVSSGAFSNHIQSVDYLSGGVSGITTTDSASTRMSIATDAEVLVYSGPAASVRQIEKILPRIDVPAEQVTVSGYVLEVQTTDRNATGLQIIADLFRNKLGMSVGARLDGGNSFTLNVGGLNAFYSLIKEDSRFNVVSNPRLTVLSGSKSQFTVGQEVPVLDSVSYQGSSGTPVQSVTYRNSGAIFTVTPVVLDGLITLDISQQLSDFVKTTTGVNSSPTLTKREISTKVDVKDGELLVLGGLASSKLTQSRTGFSFLPGFTGKSDENNRTDIIVVLQARRVGK

SEQ ID NO: 11292 - protein, 450 aa, Escherichia coli
MNDDFSGEIKNEKPVKVLEKLSKLYHLTWYYDENILYIYKTNEISRSIITPTYLDIDSLLKYLSDTISVNKNSCNVRKITTFNSIEVRGVPECIKYITSLSESLDKEAQSKAKNKDVVKVFKLNYASATDITYKYRDQNVVVPGVVSILKTMASNGSLPSTGKGAVERSGNLFDNSVTISADPRLNAVVVKDREITMDIYQQLISELDIEQRQIEISVSIIDVDANDLQQLGVNWSGTLNAGQGTIAFNSSTAQANISSSVISNASNFMIRVNALQQNSKAKILSQPSIITLNNMQAILDKNVTFYTKVSGEKVASLESITSGTLLRVTPRILDDSSNSLTGKRRERVRLLLDIQDGNQSTNQSNAQDASSTLPEVQNSEMTTEATLSAGESLLLGGFIQDKESSSKDGIPLLSDIPVIGSLFSSTVKQKHSVVRLFLIKATPIKSASSE

SEQ ID NO: 11293 - protein, 857 aa, Escherichia coli
MDGRFAHLHFFFPFSLSVLALTVAGSFSATAGKFNPRFLEDTAGINQHVDLSMYETDHGAQLPGTYRVSLIVNEQKMETRTLEFKAATESQRKEMGEFLIPCLSRTQLADMGVRVDSFSALNLIPAEACVAFNEIIPQATSHFDFSEQKLVMSFPQAAMQQVARGTVPESRWDDGVPALLLDYSFSGSNSSHDTKSYNRYIDENGNHHQDKNETSQTNDSYYLSMRSGLNLGAWSLRNYSNWSYSNGEKQWDNIGTYVTRAIVPLKAQLTLGDTATPSDIFDSVQMRGALLASDEEMLPDSQRGFAPVVRGIAKSNAEVSIEQNGYVIYRAFVQPGAFEINDLYPTANSGDLTVIVKEADGSEQRFIQPFSSVAVFQREGHLKYSLSAGEYRAGNYDSANPRFGQFNAMYGLPFGMTTYGGALISKDYNAFALGLGKNFGSIGAISVDITQAKSTLNNNATDQGQSYRFLYSKSFASGTDFRLLGYKYSTSGFYTFQEATDVRSGADSDYGRYHKRSEIQGNLTQQLGTYGSVYFNMTQQDYWNDDGKRLSLATGYNGRIGRVNYSIAYSWNKSPEWDENDQLWSFNISIPFGRAWSNYRVTTDQDGRTIQQLGVNGTLLEDRNLSYNVQEGYSSNGVGNSGNASLAYQGGAGNISVGYSYGKDYQQTNYSLRGGIVAHSEGISLSQPLGETIAIVSAPGARGAKVLNNSGVSVDWQGNAVVPYLSIYRENDVSIRSETLNDSVDMNSAFQTIVPTRGAVVRAHFDTRVGYRVLMTLIRQNGVSVPFGATATLVSDTTEQISGIVGEDGQLYISGMPKTGNVKIVWGKDTSQQCVAKYELPVEEKNSGIISVTANCQ

SEQ ID NO: 11294 - protein, 199 aa, Escherichia coli; identical to SEQ ID NO: 5136

SEQ ID NO: 11295 - protein, 191 aa, Escherichia coli; identical to SEQ ID NO: 2996

SEQ ID NO: 11296 - protein, 512 aa, Escherichia coli; identical to SEQ ID NO: 2973

SEQ ID NO: 11297 - protein, 193 aa, Escherichia coli; identical to SEQ ID NO: 2250

SEQ ID NO: 11298 - protein, 614 aa, Escherichia coli; identical to SEQ ID NO: 1883

SEQ ID NO: 11299 - protein, 446 aa, Escherichia coli; identical to SEQ ID NO: 2177

SEQ ID NO: 11300 - protein, 208 aa, Escherichia coli; identical to SEQ ID NO: 1948

SEQ ID NO: 11301 - protein, 720 aa, Escherichia coli; identical to SEQ ID NO: 6178

SEQ ID NO: 11302 - protein, 368 aa, Escherichia coli; identical to SEQ ID NO: 5102

SEQ ID NO: 11303 - protein, 241 aa, Escherichia coli; identical to SEQ ID NO: 2890

SEQ ID NO: 11304 - protein, 627 aa, Escherichia coli; identical to SEQ ID NO: 3529

SEQ ID NO: 11305 - protein, 238 aa, Escherichia coli; identical to SEQ ID NO: 8905

SEQ ID NO: 11306 - protein, 641 aa, Escherichia coli; identical to SEQ ID NO: 6206

SEQ ID NO: 11307 - protein, 274 aa, Escherichia coli; identical to SEQ ID NO: 2301

SEQ ID NO: 11308 - protein, 173 aa, Escherichia coli; identical to SEQ ID NO: 8970

SEQ ID NO: 11309 - protein, 669 aa, Escherichia coli; identical to SEQ ID NO: 3677

SEQ ID NO: 11310 - protein, 208 aa, Escherichia coli; identical to SEQ ID NO: 1949

SEQ ID NO: 11311 - protein, 266 aa, Escherichia coli; identical to SEQ ID NO: 1894

SEQ ID NO: 11312 - protein, 161 aa, Escherichia coli; identical to SEQ ID NO: 2582

SEQ ID NO: 11313 - protein, 826 aa, Escherichia coli; identical to SEQ ID NO: 3256

SEQ ID NO: 11314 - protein, 200 aa, Escherichia coli; identical to SEQ ID NO: 1788

SEQ ID NO: 11315 - protein, 266 aa, Escherichia coli; identical to SEQ ID NO: 5141

SEQ ID NO: 11316 - protein, 162 aa, Escherichia coli; identical to SEQ ID NO: 1965

SEQ ID NO: 11317 - protein, 237 aa, Escherichia coli; identical to SEQ ID NO: 3793

SEQ ID NO: 11318 - protein, 998 aa, Escherichia coli; identical to SEQ ID NO: 2918

SEQ ID NO: 11319 - protein, 838 aa, Escherichia coli; identical to SEQ ID NO: 3041

SEQ ID NO: 11320 - protein, 518 aa, Escherichia coli; identical to SEQ ID NO: 2351

SEQ ID NO: 11321 - protein, 209 aa, Escherichia coli; identical to SEQ ID NO: 3547

SEQ ID NO: 11322 - protein, 193 aa, Escherichia coli; identical to SEQ ID NO: 2246

SEQ ID NO: 11323 - protein, 700 aa, Escherichia coli; identical to SEQ ID NO: 5110

SEQ ID NO: 11324 - protein, 614 aa, Escherichia coli; identical to SEQ ID NO: 1884

SEQ ID NO: 11325 - protein, 359 aa, Escherichia coli; identical to SEQ ID NO: 2332

SEQ ID NO: 11326 - protein, 631 aa, Escherichia coli; identical to SEQ ID NO: 3058

SEQ ID NO: 11327 - protein, 826 aa, Escherichia coli; identical to SEQ ID NO: 3563

SEQ ID NO: 11328 - protein, 213 aa, Escherichia coli; identical to SEQ ID NO: 2232

SEQ ID NO: 11329 - protein, 713 aa, Escherichia coli; identical to SEQ ID NO: 5996

SEQ ID NO: 11330 - protein, 747 aa, Escherichia coli; identical to SEQ ID NO: 2072

SEQ ID NO: 11331 - protein, 747 aa, Escherichia coli; identical to SEQ ID NO: 6089

SEQ ID NO: 11332 - protein, 162 aa, Escherichia coli; identical to SEQ ID NO: 1973

SEQ ID NO: 11333 - protein, 826 aa, Escherichia coli; identical to SEQ ID NO: 5098

SEQ ID NO: 11334 - protein, 368 aa, Escherichia coli; identical to SEQ ID NO: 3872

SEQ ID NO: 11335 - protein, 274 aa, Escherichia coli; identical to SEQ ID NO: 2304

SEQ ID NO: 11336 - protein, 367 aa, Escherichia coli; identical to SEQ ID NO: 6155

SEQ ID NO: 11337 - protein, 880 aa, Escherichia coli; identical to SEQ ID NO: 3110

SEQ ID NO: 11338 - protein, 565 aa, Escherichia coli; identical to SEQ ID NO: 5118

SEQ ID NO: 11339 - protein, 200 aa, Escherichia coli; identical to SEQ ID NO: 1784

SEQ ID NO: 11340 - protein, 863 aa, Escherichia coli
MHIRKHRLAGFFVRLFVACAFAAQAPLSSAELYFNPRFLADDPQAVADLSRFENGQELPPGTYRVDIYLNNGYMATRDVTFNTGDSEQGIVPCLTRAQLASMGLNTASVSGMNLLADDACVPLTTMIQDATAHLDVGQQRLNLTIPQAFMSNRARGYIPPELWDPGINAGLLNYNFSGNSVQNRIGGNSHYAYLNLQSGLNIGAWRLRDNTTWSYNSSDRSSGSKNKWQHINTWLERDIIPLRSRLTLGDGYTQGDIFDGINFRGAQLASDDNMLPDSQRGFAPVIHGIARGTAQVTIKQNGYDIYNSTVPPGPFTINDIYAAGNSGDLQVTIKEADGSTQIFTVPYSSVPLLQREGHTRYSITAGEYRSGNAQQEKPRFFQSTLLHGLPAGWTIYGGTQLADRYRAFNFGIGKNMGALGALSVDMTQANSTLPDDSQHDGQSVRFLYNKSLNESGTNIQLVGYRYSTSGYFNFADTTYSRMNGYNIETQDGVIQVKPKFTDYYNLAYNKRGKLQLTVTQQLGRTSTLYLSGSHQTYWGTSNVDEQFQAGLNTAFEDINWTLSYSLTKNAWQKGRDQMLALNVNIPFSHWLRSDSKSQWRHASASYSMSHDLNGRMTNLAGVYGTLLEDNNLSYSVQTGYAGGGDGNSGSTGYATLNYRGGYGNANIGYSHSDDIKQLYYGVSGGVLAHANGVTLGQPLNDTVVLVKAPGAKDAKVENQTGVRTDWRGYAVLPYATEYRENRVALDTNTLADNVDLDNAVANVVPTRGAIVRAEFKARVGIKLLMTLTHNNKPLPFGAMVTSESSQSSGIVADNGQVYLSGMPLAGKVQVKWGEEENAHCVANYQLPPESQQQLLTQLSAECR

SEQ ID NO: 11341 - protein, 662 aa, Escherichia coli; identical to SEQ ID NO: 8124

SEQ ID NO: 11342 - protein, 837 aa, Escherichia coli; identical to SEQ ID NO: 4687

SEQ ID NO: 11343 - protein, 359 aa, Escherichia coli; identical to SEQ ID NO: 2328

SEQ ID NO: 11344 - protein, 113 aa, Escherichia coli; identical to SEQ ID NO: 3594

SEQ ID NO: 11345 - protein, 790 aa, Escherichia coli; identical to SEQ ID NO: 5114

SEQ ID NO: 11346 - protein, 161 aa, Escherichia coli; identical to SEQ ID NO: 2582

SEQ ID NO: 11347 - protein, 241 aa, Escherichia coli; identical to SEQ ID NO: 3582

SEQ ID NO: 11348 - protein, 816 aa, Escherichia coli; identical to SEQ ID NO: 4456

SEQ ID NO: 11349 - protein, 331 aa, Escherichia coli; identical to SEQ ID NO: 2705

SEQ ID NO: 11350 - protein, 843 aa, Escherichia coli; identical to SEQ ID NO: 3042

SEQ ID NO: 11351 - protein, 207 aa, Escherichia coli; identical to SEQ ID NO: 2211

SEQ ID NO: 11352 - protein, 274 aa, Escherichia coli; identical to SEQ ID NO: 3471

SEQ ID NO: 11353 - protein, 386 aa, Escherichia coli; identical to SEQ ID NO: 5575

SEQ ID NO: 11354 - protein, 200 aa, Escherichia coli; identical to SEQ ID NO: 5121

SEQ ID NO: 11355 - protein, 430 aa, Escherichia coli; identical to SEQ ID NO: 2617

SEQ ID NO: 11356 - protein, 713 aa, Escherichia coli; identical to SEQ ID NO: 6243

SEQ ID NO: 11357 - protein, 213 aa, Escherichia coli; identical to SEQ ID NO: 2232

SEQ ID NO: 11358 - protein, 208 aa, Escherichia coli; identical to SEQ ID NO: 1949

SEQ ID NO: 11359 - protein, 446 aa, Escherichia coli; identical to SEQ ID NO: 5547

SEQ ID NO: 11360 - protein, 252 aa, Escherichia coli; identical to SEQ ID NO: 3543

SEQ ID NO: 11361 - protein, 729 aa, Escherichia coli; identical to SEQ ID NO: 5131

SEQ ID NO: 11362 - protein, 432 aa, Escherichia coli; identical to SEQ ID NO: 2026

SEQ ID NO: 11363 - protein, 746 aa, Escherichia coli; identical to SEQ ID NO: 5132

SEQ ID NO: 11364 - protein, 478 aa, Escherichia coli; identical to SEQ ID NO: 7448

SEQ ID NO: 11365 - protein, 161 aa, Escherichia coli; identical to SEQ ID NO: 2582

SEQ ID NO: 11366 - protein, 368 aa, Escherichia coli; identical to SEQ ID NO: 2370

SEQ ID NO: 11367 - protein, 111 aa, Escherichia coli; identical to SEQ ID NO: 7471

SEQ ID NO: 11368 - protein, 869 aa, Escherichia coli; identical to SEQ ID NO: 2903

SEQ ID NO: 11369 - protein, 746 aa, Escherichia coli; identical to SEQ ID NO: 11087

SEQ ID NO: 11370 - protein, 203 aa, Escherichia coli; identical to SEQ ID NO: 2009

SEQ ID NO: 11371 - protein, 151 aa, Escherichia coli
MRIITALLMSFFILPVHAGVVIYGTRIIYPEKNREVLVQLMNQSKNASLIQAWIDDGNTTIAPEKIQVTFILTPPVSRVAGGSGQQLKIRKMPNNLPHNKESLFYLNVLDIPPNNPQNAGKNKIKLALQNRIKLLWRPSGIAPVDKKAFLN

SEQ ID NO: 11372 - protein, 371 aa, Escherichia coli; identical to SEQ ID NO: 5126

SEQ ID NO: 11373 - protein, 230 aa, Escherichia coli; identical to SEQ ID NO: 3019

SEQ ID NO: 11374 - protein, 224 aa, Escherichia coli; identical to SEQ ID NO: 3115

SEQ ID NO: 11375 - protein, 840 aa, Escherichia coli; identical to SEQ ID NO: 3591

SEQ ID NO: 11376 - protein, 656 aa, Escherichia coli; identical to SEQ ID NO: 4901

SEQ ID NO: 11377 - protein, 843 aa, Escherichia coli; identical to SEQ ID NO: 3163

SEQ ID NO: 11378 - protein, 170 aa, Escherichia coli [sequence omitted]

SEQ ID NO: 11379 - protein, 760 aa, Escherichia coli; identical to SEQ ID NO: 5104

SEQ ID NO: 11380 - protein, 162 aa, Escherichia coli; identical to SEQ ID NO: 1969

SEQ ID NO: 11381 - protein, 879 aa, Escherichia coli; identical to SEQ ID NO: 5138

SEQ ID NO: 11382 - protein, 118 aa, Escherichia coli [sequence omitted]

SEQ ID NO: 11383 - protein, 361 aa, Escherichia coli; identical to SEQ ID NO: 3061

SEQ ID NO: 11384 - protein, 565 aa, Escherichia coli; identical to SEQ ID NO: 2678

SEQ ID NO: 11385 - protein, 233 aa, Escherichia coli; identical to SEQ ID NO: 3548

SEQ ID NO: 11386 - protein, 207 aa, Escherichia coli; identical to SEQ ID NO: 2211

SEQ ID NO: 11387 - protein, 860 aa, Escherichia coli; identical to SEQ ID NO: 6118

SEQ ID NO: 11388 - protein, 721 aa, Escherichia coli; identical to SEQ ID NO: 7755

SEQ ID NO: 11389 - protein, 660 aa, Escherichia coli; identical to SEQ ID NO: 6291

SEQ ID NO: 11390 - protein, 165 aa, Escherichia coli; identical to SEQ ID NO: 5130

SEQ ID NO: 11391 - protein, 880 aa, Escherichia coli; identical to SEQ ID NO: 3008

SEQ ID NO: 11392 - protein, 236 aa, Escherichia coli; identical to SEQ ID NO: 3482

SEQ ID NO: 11393 - protein, 866 aa, Escherichia coli; identical to SEQ ID NO: 3025

SEQ ID NO: 11394 - protein, 249 aa, Escherichia coli; identical to SEQ ID NO: 3492

SEQ ID NO: 11395 - protein, 731 aa, Escherichia coli; identical to SEQ ID NO: 6297

SEQ ID NO: 11396 - protein, 656 aa, Escherichia coli; identical to SEQ ID NO: 5108

SEQ ID NO: 11397 - protein, 430 aa, Escherichia coli; identical to SEQ ID NO: 2617

SEQ ID NO: 11398 - protein, 351 aa, Escherichia coli; identical to SEQ ID NO: 2872

SEQ ID NO: 11399 - protein, 200 aa, Escherichia coli; identical to SEQ ID NO: 1785

SEQ ID NO: 11400 - protein, 89 aa, Escherichia coli; identical to SEQ ID NO: 2810

SEQ ID NO: 11401 - protein, 518 aa, Escherichia coli; identical to SEQ ID NO: 2350

SEQ ID NO: 11402 - protein, 241 aa, Escherichia coli; identical to SEQ ID NO: 2922

SEQ ID NO: 11403 - protein, 331 aa, Escherichia coli
MKKPVVIGLAVVVLAAVVAGGYWWYQSRQDNGLTLYGNVDIRTVNLSFRVGGRVESLAVDEGDAIKAGQVLGELDHKPYEIALMQAKAGVSVALAQYDLMLAGYRDEEIAQAAAAVKQAQAAYDYAQNFYNRQQGLWKSRTISANDLENARSSRDQAQATLKSAQDKLRQYRSGNREQDIAQAKASLEQAQAQLAQAELNLQDSTLIAPSDGTLLTRAVEPGTVLNEGGTVFTVSLTRPVWVRAYVDERNLDQAQPGRKVLLYTDGRPDKPYHGQIGFVSPTAEFTPKTVETPDLRTDLVYRLRIVVTDADDALRQGMPVTVQFGNEAGHE

SEQ ID NO: 11404 - protein, 871 aa, Escherichia coli; identical to SEQ ID NO: 6388

SEQ ID NO: 11405 - protein, 365 aa, Escherichia coli; identical to SEQ ID NO: 3878

SEQ ID NO: 11406 - protein, 784 aa, Escherichia coli; identical to SEQ ID NO: 2244

SEQ ID NO: 11407 - protein, 111 aa, Escherichia coli; identical to SEQ ID NO: 2911

SEQ ID NO: 11408 - protein, 407 aa, Escherichia coli
MTERELSIIRALGEEFSTVLADLQRTFEGKMAAQAQAFEEKLASLSAVLQKHVTVDEVHPVLQAMVDDAVGTIPVPRDGRDYDPDVLQQAVNDAVANIPVPADGKSITPDDVRPMLEQMVKEAVSHIPAPRDGRDYDPEVLKQAVNDAVANIPVPADGKSITPDDVRPMLEQMVKEAVSHIPAPRDGRDYDPEVLKQAVNDAVANIPVPADGKSITPDDVRPMLEQMVKEAVSHIPAPRDGRDYDPEVLKQAVLEAVNALPAPQDGRDATALEVLPAIDDQKSFPRGTYATHLGGLWRAYEKTHGMRGWECLVDGVADIDVSMTDERLFSVVIRQSSGQCTEKTFSLPVMLYRGVFRAGETYHPGDTVTWGGSLWHCNSMTGDKPGEAHSSGWTLAAKRGRDAGGGK

SEQ ID NO: 11409 - protein, 729 aa, Escherichia coli; identical to SEQ ID NO: 2948

SEQ ID NO: 11410 - protein, 746 aa, Escherichia coli
MNKKIHSLALLVNLGIYGVAQAQEPTDTPVSHDDTIVVTAAEQNLQAPGVSTITADEIRKNPVARDVSEIIRTMPGVNLTGNSTSGQRGNNRQIDIRGMGPENTLILIDGKPVSSRNSVRQGWRGERDTRGDTSWVPPEMIERIEVLRGPAAARYGNGAAGGVVNIITKKGSGEWHGSWDAYFNAPEHKEEGATKRTNFSLTGPLGDEFSFRLYGNLDKTQADAWDINQGHQSARAGTYATTLPAGREGVINKDINGVVRWDFAPLQSLELEAGYSRQGNLYAGDTQNTNSDAYTRSKYGDETNRLYRQNYSLTWNGGWDNGVTTSNWVQYEHPRNSRIPEGLAGGTEGKFNEKATQDFVDNDLDDVMLHSEVNLPIDFLVNQTLTLGTEWNQQRMKDLSSNTQALTGTNTGGAIDGVSATDRSPYSKAEIFSLFAENNMELTDSTIVTPGLRFDHHSIVGNNWSPALNISQGLGDDFTLKMGIARAYKAPSLYQTNPNYILYSKGQGCYASAGGCYLQGNDDLKAETSINKEIGLEFKRDGWLAGITWFRNDYRNKIEAGYVAVGQNAVGTDLYQWDNVPKAVVEGLEGSLNVPVSETVMWTNNITYMLKSENKTTGDRLSIIPEYTLNSTLSWQAREDLSMQTTFTWYGKQQPKKYNYKGQPAVGPETKEISPYSIVGLSATWDVTKNVSLTGGVDNLFDKRLWRAGNAQTTGDLAGANYIAGAGAYTYNEPGRTWYMSVNTHF

SEQ ID NO: 11411 - protein, 361 aa, Escherichia coli; identical to SEQ ID NO: 3601

SEQ ID NO: 11412 - protein, 367 aa, Escherichia coli; identical to SEQ ID NO: 2431

SEQ ID NO: 11413 - protein, 237 aa, Escherichia coli; identical to SEQ ID NO: 2816

SEQ ID NO: 11414 - protein, 108 aa, Escherichia coli; identical to SEQ ID NO: 3602

SEQ ID NO: 11415 - protein, 203 aa, Escherichia coli; identical to SEQ ID NO: 2201

SEQ ID NO: 11416 - protein, 237 aa, Escherichia coli; identical to SEQ ID NO: 3022

SEQ ID NO: 11417 - protein, 250 aa, Escherichia coli; identical to SEQ ID NO: 3048

SEQ ID NO: 11418 - protein, 111 aa, Escherichia coli; identical to SEQ ID NO: 5097

SEQ ID NO: 11419 - protein, 370 aa, Escherichia coli; identical to SEQ ID NO: 3599

SEQ ID NO: 11420 - protein, 224 aa, Escherichia coli; identical to SEQ ID NO: 3578

SEQ ID NO: 11421 - protein, 243 aa, Escherichia coli; identical to SEQ ID NO: 3561

SEQ ID NO: 11422 - protein, 405 aa, Escherichia coli
MTERELSIIRALGEEFSTVLADLQRTFEGKMASQAQAFEEKLTSLSAVLQKHVTVDEVRPVLQAMVDDAVGAIPVPRDGRDYDPDVLQQAVNDAVANIPQPADGKSLTPDDVRPMLEQMVKEAVSHIPVPRDGRDYDPEVLQKAVNDAVANIPQPADGKSLTPDDVRPMLEQVVKEAVSHIPVPRDGRDYDPEVLQKAVNDAVANIPQPADGKSLTPDDVRPMLEQMVKEAVSHIPVPRDGRDYDPDVLQKAVLDAVSALPAPQDGRDATALEILPAIDDQKSFPRGTYATHQGGLWRAYEKTHGMRGWECLVDGVADIDVSMTGERLFSVVVRQSSGQRTEKTFSLPVMLYRGVFRAGETYHPGDTVTWGGSLWHCNSMTEDKPGEAHSSAWTLAAKRGRDAGG

SEQ ID NO: 11423 - protein, 539 aa, Escherichia coli; identical to SEQ ID NO: 3050

SEQ ID NO: 11424 - protein, 784 aa, Escherichia coli; identical to SEQ ID NO: 2240

SEQ ID NO: 11425 - protein, 869 aa, Escherichia coli; identical to SEQ ID NO: 3012

SEQ ID NO: 11426 - protein, 518 aa, Escherichia coli; identical to SEQ ID NO: 2349

SEQ ID NO: 11427 - protein, 230 aa, Escherichia coli; identical to SEQ ID NO: 3348

SEQ ID NO: 11428 - protein, 432 aa, Escherichia coli; identical to SEQ ID NO: 2026

SEQ ID NO: 11429 - protein, 700 aa, Escherichia coli; identical to SEQ ID NO: 8081

SEQ ID NO: 11430 - protein, 616 aa, Escherichia coli
MGPGVQGKVSIRTMTPLNERQYYQLFLNLLEAQGYAVVPMENDVLKVVKSSAAKVEPLPLVGEGSDNYAGDEMVTKVVPVRNVSVRELAPILRQMIDSAGSGNVVNYDPSNVIMLTGRASVVERLTEVIQRVDHAGNRTEEVIPLDNASASEIARVLESLTKNSGENQPATLKSQIVADERTNSVIVSGDPATRDKMRRLIRRLDSEMERSGNSQVFYLKYSKAEDLVDVLKQVSGTLTAAKEEAEGTVGSGREIVSIAASKHSNALIVTAPQDIMQSLQSVIEQLDIRRAQVHVEALIVEVAEGSNINFGVQWASKDAGLMQFANGTQIPIGTLGAAISQAKPQKGSTVISENGATTINPDTNGDLSTLAQLLSGFSGTAVGVVKGDWMALVQAVKNDSSSNVLSTPSITTLDNQEAFFMVGQDVPVLTGSTVGSNNSNPFNTVERKKVGIMLKVTPQINEGNAVQMVIEQEVSKVEGQTSLDVVFGERKLKTTVLANDGELIVLGGLMDDQAGESVAKVPLLGDIPLIGNLFKSTADKKEKRNLMVFIRPTILRDGMAADGVSQRKYNYMRAEQIYRDEQGLSLMPHTAQPVLPAQNQALPPEVRAFLNAGRTR

SEQ ID NO: 11431 - protein, 230 aa, Escherichia coli; identical to SEQ ID NO: 2995

SEQ ID NO: 11432 - protein, 224 aa, Escherichia coli; identical to SEQ ID NO: 3604

SEQ ID NO: 11433 - protein, 446 aa, Escherichia coli; identical to SEQ ID NO: 2180

SEQ ID NO: 11434 - protein, 170 aa, Escherichia coli; identical to SEQ ID NO: 2564

SEQ ID NO: 11435 - protein, 659 aa, Escherichia coli; identical to SEQ ID NO: 8368

SEQ ID NO: 11436 - protein, 118 aa, Escherichia coli [sequence omitted]

SEQ ID NO: 11437 - protein, 794 aa, Escherichia coli; identical to SEQ ID NO: 4850

SEQ ID NO: 11438 - protein, 883 aa, Escherichia coli; identical to SEQ ID NO: 4713

SEQ ID NO: 11439 - protein, 856 aa, Escherichia coli; identical to SEQ ID NO: 5125

SEQ ID NO: 11440 - protein, 551 aa, Escherichia coli; identical to SEQ ID NO: 2447

SEQ ID NO: 11441 - protein, 866 aa, Escherichia coli; identical to SEQ ID NO: 4866

SEQ ID NO: 11442 - protein, 231 aa, Escherichia coli; identical to SEQ ID NO: 3055

SEQ ID NO: 11443 - protein, 241 aa, Escherichia coli; identical to SEQ ID NO: 2887

SEQ ID NO: 11444 - protein, 871 aa, Escherichia coli; identical to SEQ ID NO: 3519

SEQ ID NO: 11445 - protein, 650 aa, Escherichia coli; identical to SEQ ID NO: 3057

SEQ ID NO: 11446 - protein, 121 aa, Escherichia coli; identical to SEQ ID NO: 5349

SEQ ID NO: 11447 - protein, 774 aa, Escherichia coli; identical to SEQ ID NO: 3426

SEQ ID NO: 11448 - protein, 678 aa, Escherichia coli; identical to SEQ ID NO: 2902

SEQ ID NO: 11449 - protein, 266 aa, Escherichia coli; identical to SEQ ID NO: 1894

SEQ ID NO: 11450 - protein, 760 aa, Escherichia coli; identical to SEQ ID NO: 2078

SEQ ID NO: 11451 - protein, 191 aa, Escherichia coli; identical to SEQ ID NO: 2727

SEQ ID NO: 11452 - protein, 851 aa, Escherichia coli; identical to SEQ ID NO: 6877

SEQ ID NO: 11453 - protein, 249 aa, Escherichia coli; identical to SEQ ID NO: 5120

SEQ ID NO: 11454 - protein, 191 aa, Escherichia coli; identical to SEQ ID NO: 2727

SEQ ID NO: 11455 - protein, 207 aa, Escherichia coli; identical to SEQ ID NO: 2211

SEQ ID NO: 11456 - protein, 89 aa, Escherichia coli; identical to SEQ ID NO: 2833

SEQ ID NO: 11457 - protein, 351 aa, Escherichia coli; identical to SEQ ID NO: 4688

SEQ ID NO: 11458 - protein, 539 aa, Escherichia coli; identical to SEQ ID NO: 3050

SEQ ID NO: 11459 - protein, 478 aa, Escherichia coli; identical to SEQ ID NO: 2404

SEQ ID NO: 11460 - protein, 102 aa, Escherichia coli; identical to SEQ ID NO: 1824

SEQ ID NO: 11461 - protein, 367 aa, Escherichia coli; identical to SEQ ID NO: 3016

SEQ ID NO: 11462 - protein, 118 aa, Escherichia coli [sequence omitted]

SEQ ID NO: 11463 - protein, 784 aa, Escherichia coli; identical to SEQ ID NO: 2244

SEQ ID NO: 11464 - protein, 673 aa, Escherichia coli; identical to SEQ ID NO: 3295

SEQ ID NO: 11465 - protein, 828 aa, Escherichia coli; identical to SEQ ID NO: 2380

SEQ ID NO: 11466 - protein, 200 aa, Escherichia coli; identical to SEQ ID NO: 1784

SEQ ID NO: 11467 - protein, 686 aa, Escherichia coli; identical to SEQ ID NO: 3015

SEQ ID NO: 11468 - protein, 193 aa, Escherichia coli; identical to SEQ ID NO: 2246

SEQ ID NO: 11469 - protein, 249 aa, Escherichia coli; identical to SEQ ID NO: 3028

SEQ ID NO: 11470 - protein, 430 aa, Escherichia coli; identical to SEQ ID NO: 2617

SEQ ID NO: 11471 - protein, 518 aa, Escherichia coli; identical to SEQ ID NO: 2349

SEQ ID NO: 11472 - protein, 233 aa, Escherichia coli; identical to SEQ ID NO: 3276

SEQ ID NO: 11473 - protein, 432 aa, Escherichia coli; identical to SEQ ID NO: 2026

SEQ ID NO: 11474 - protein, 402 aa, Escherichia coli; identical to SEQ ID NO: 4768

SEQ ID NO: 11475 - protein, 696 aa, Escherichia coli; identical to SEQ ID NO: 3314

SEQ ID NO: 11476 - protein, 191 aa, Escherichia coli; identical to SEQ ID NO: 2727

SEQ ID NO: 11477 - protein, 232 aa, Escherichia coli; identical to SEQ ID NO: 2087

SEQ ID NO: 11478 - protein, 565 aa, Escherichia coli; identical to SEQ ID NO: 2669

SEQ ID NO: 11479 - protein, 213 aa, Escherichia coli; identical to SEQ ID NO: 2232

SEQ ID NO: 11480 - protein, 446 aa, Escherichia coli; identical to SEQ ID NO: 2179

SEQ ID NO: 11481 - protein, 230 aa, Escherichia coli; identical to SEQ ID NO: 3019

SEQ ID NO: 11482 - protein, 362 aa, Escherichia coli; identical to SEQ ID NO: 2434

SEQ ID NO: 11483 - protein, 678 aa, Escherichia coli; identical to SEQ ID NO: 3014

SEQ ID NO: 11484 - protein, 203 aa, Escherichia coli; identical to SEQ ID NO: 2009

SEQ ID NO: 11485 - protein, 359 aa, Escherichia coli; identical to SEQ ID NO: 2328

SEQ ID NO: 11486 - protein, 208 aa, Escherichia coli; identical to SEQ ID NO: 1949

SEQ ID NO: 11487 - protein, 729 aa, Escherichia coli; identical to SEQ ID NO: 3052

SEQ ID NO: 11488 - protein, 89 aa, Escherichia coli; identical to SEQ ID NO: 2810

SEQ ID NO: 11489 - protein, 228 aa, Escherichia coli; identical to SEQ ID NO: 3034

SEQ ID NO: 11490 - protein, 360 aa, Escherichia coli; identical to SEQ ID NO: 3032

SEQ ID NO: 11491 - protein, 700 aa, Escherichia coli; identical to SEQ ID NO: 3047

SEQ ID NO: 11492 - protein, 243 aa, Escherichia coli; identical to SEQ ID NO: 2910

SEQ ID NO: 11493 - protein, 274 aa, Escherichia coli; identical to SEQ ID NO: 2303

SEQ ID NO: 11494 - protein, 246 aa, Escherichia coli; identical to SEQ ID NO: 3021

SEQ ID NO: 11495 - protein, 331 aa, Escherichia coli; identical to SEQ ID NO: 2700

SEQ ID NO: 11496 - protein, 614 aa, Escherichia coli; identical to SEQ ID NO: 3301

SEQ ID NO: 11497 - protein, 760 aa, Escherichia coli; identical to SEQ ID NO: 3026

SEQ ID NO: 11498 - protein, 732 aa, Escherichia coli; identical to SEQ ID NO: 4926

SEQ ID NO: 11499 - protein, 663 aa, Escherichia coli; identical to SEQ ID NO: 1910

SEQ ID NO: 11500 - protein, 746 aa, Escherichia coli; identical to SEQ ID NO: 3031

SEQ ID NO: 11501 - protein, 231 aa, Escherichia coli; identical to SEQ ID NO: 3055

SEQ ID NO: 11502 - protein, 774 aa, Escherichia coli; identical to SEQ ID NO: 3018

SEQ ID NO: 11503 - protein, 203 aa, Escherichia coli; identical to SEQ ID NO: 2201

SEQ ID NO: 11504 - protein, 229 aa, Escherichia coli; identical to SEQ ID NO: 3277

SEQ ID NO: 11505 - protein, 250 aa, Escherichia coli; identical to SEQ ID NO: 3048

SEQ ID NO: 11506 - protein, 351 aa, Escherichia coli; identical to SEQ ID NO: 3010

SEQ ID NO: 11507 - protein, 747 aa, Escherichia coli; identical to SEQ ID NO: 2072

SEQ ID NO: 11508 - protein, 224 aa, Escherichia coli; identical to SEQ ID NO: 3035

SEQ ID NO: 11509 - protein, 162 aa, Escherichia coli; identical to SEQ ID NO: 1965

SEQ ID NO: 11510 - protein, 209 aa, Escherichia coli; identical to SEQ ID NO: 4977

SEQ ID NO: 11511 - protein, 236 aa, Escherichia coli; identical to SEQ ID NO: 3286

SEQ ID NO: 11512 - protein, 875 aa, Escherichia coli
MNLRLYQRNTQCLHIRKHRLAGFFVRLFVACAFAAQAPLSSAELYFNPRFLADDPQAVADLSRFENGQELPPGTYRVDIYLNNGYMATRDVTFNTGDSEQGIVPCLTRAQLASMGLNTASVSGMNLLADDACVPLTSMIHDATAHLDVGQQRLNLTIPQAFMSNRARGYIPPELWDPGINAGLLNYNFSGNSVQNRIGGNSHYAYLNLQSGLNIGAWRLRDNTTWSYNRSDRSSGSKNKWQHINTWLERDIIPLRSRLTLGDGYTQGDIFDGINFRGAQLASDDNMLPDSQRGFAPVIHGIARGTAQVTIKQNGYDIYNSTVPPGPFTINDIYAAGNSGDLQVTIKEADGSTQIFTVPYSSVPLLQREGHTRYSITAGEYRSGNAQQEKPRFFQSTLLHGLPAGWTIYGGTQLADRYRAFNFGIGKNMGALGALSVDMTQANSTLPDDSQHDGQSVRFLYNKSLNESGTNIQLVGYRYSTSGYFNFADTTYSRMNGYNIETQDGVIQVKPKFTDYYNLAYNKRGKLQLTVTQQLGRTSTLYLSGSHQTYWGTSNVDEQFQAGLNTAFEDINWTLSYSLTKNAWQKGRDQMLALNVNIPFSHWLRSDSKSQWRHASASYSMSHDLNGRMTNLAGVYGTLLEDNNLSYSVQTGYAGGGDGNSGSTGYATLNYRGGYGNANIGYSHSDDIKQLYYGVSGGVLAHANGVTLGQPLNETVVLVKAPGAKDAKVENQTGVRTDWRGYAVLPYATEYRENRVALDTNTLADNVDLDNAVANVVPTRGAIVRAEFKARVGIKLLMTLTHNNKPLPFGAMVTSESSQSSGIVADNGQVYLSGMPLAGKVQVKWGEEENAHCVANYQLPPESQQQLLTQLSAECR

SEQ ID NO: 11513 - protein, 866 aa, Escherichia coli
MTIKPTKNYHNHLTRIATFCALLYCNSAFCAELVEYDHTFLMGQNASNIDLSRYSEGNPAIPGMYDVSVYVNDQPIINQSITFIEIEGKKNAQACITLKNLLQFHINSPDINNEKAVLLARDETLGNCLNLTEIIPQASVRYDVNEQRLDIDVPQAWVMKNYQNYVDPSLWENGINAAMLSYNLNGYHSETPGRRNDSIYAAFNGGMNLGAWRLRASGNYNWMTDSGSNYDFKNRYIQRDIASLRSQLILGESYTTGETFDSVSIRGIRLYSDSRMLPPTLASFAPIIHGVANTNAKVTITQGGYKIYETTVPPGAFVIDDLSPSGYGSDLIVTVEESDGSKRTFSQPFSSVVQMLRPGVGRWDISGGQVLKDDIQDEPNLFQASYYYGLNNYLTGYTGIQITDNNYTAGLLGLGLNTSVGAFSFDVTHSNVRIPDDKTYQGQSYRVSWNKLFEETSTSLNIAAYRYSTQNYLGLNDALTLIDEVKHPEQDLEPKSMRNYSRMKNQVTVSINQPLKFEKKDYGSFYLSGSWSDYWASGQSRSNYSIGYSNSASWGSYSVSAQRSWNEDGDTDDSVYLSFTIPIEKLLGTEQRTSGFQSIDTQMSSDFKGNNQLNVSSSGYSDNARVSYSVNTGYTMNKASKDLSYVGGYASYESPWGTLAGSVSANSDNSRQVSLSTDGGFVLHSGGLTFSNDSFSDSDTLAVVQAPGAQGARINYGNSTIDRWGYGVTSALSPYHENRIALDINDLENDVELKSTSAVAVPRQGSVVFADFETVQGQSAIMNITRSDGKNIPFAADIYDEQGNVIGNVGQGGQAFVRGIEQQGNISIKWLEESKPVSCLAHYQQSSEAEKIAQSIILNGIRCQIQ

SEQ ID NO: 11514 - protein, 237 aa, Escherichia coli; identical to SEQ ID NO: 3022

SEQ ID NO: 11515 - protein, 816 aa, Escherichia coli; identical to SEQ ID NO: 3172

SEQ ID NO: 11516 - protein, 837 aa, Escherichia coli
MEQMYKKLKLTTISELIKNIYCSLSVLIIGCASAYAVEFNKDLIEAEDRENVNLSQFETDGQLPVGKYSLNALINNKRTPIHLDLQWVLIDNQTAVCLTPEQLTLLGFTDEIIEVAQQNLIDGCYPIEKEKQITTYLDKGKMQLSISAPQAWLKYKDANWTPPELWDHGIAGAFLDYNLYASHYAPHQGDNSQNISSYGQAGVNLGAWRLRTDYQYDQSFNNGKSQANNLDFPRIYLFRPIPAINAKLTIGQYDTESSIFDSFHFSGVSLKSDENMLPPDLRGYAPQITGVAQTNAKVTVSQNNRIIYQENVPPGPFAITNLFNTLQGQLDVKVEEEDGQVTQWQVASNSIPYLTRKGQIRYTTAMGKPTSVGGDSLQQPFFWTGEFSWGWLNNVSLYGGSVLTNRDYQSLAAGVGFNLNSLGSLSFDVTRSDAQLHNQDKETGYSYRANYSKRFESTGSQLTFAGYRFSDKNFVTMNEYINDTNHYTNYQNEKESYIVTFNQYLESLRLNTYVSLARNTYWDASSNVNYSLSLSRDFDIGPLKNVSTSLTFSRINWEEDNQDQLYLNISIPWGTSRTLSYGMQRNQDNKISHTASWYDSSGRNNSWSVSASGDNDEFKDMKASLRASYQHNTENGRLYLSGTSQRDSYYSLNASWNGSFTATRHGAAFHDYSGSADSRFMIDADGAEDIPLNNKRAVTNRYGIGVIPSVSSYITTSLSVDTRNLPENVDIENSVITTTLTEGAIGYAKLDTRKGYQIMGVIRLADGSHPPLGISVKDKTSHKELGLVADGGFVYLNGIQDDSKLTLRWGDKSCFIQPPNSSNLTTGTVILPCISQN

SEQ ID NO: 11517 - protein, 838 aa, Escherichia coli; identical to SEQ ID NO: 3537

SEQ ID NO: 11518 - protein, 207 aa, Escherichia coli; identical to SEQ ID NO: 2211

SEQ ID NO: 11519 - protein, 785 aa, Escherichia coli
MKIKVLCVAIIFHLWSNEILADDFNYSFIRGGSKEVPEVLKNSGQNIPGKYVVDLLFNGSKTATSVDLAISNDDAEHICLSDEWLQKKGITINKEFYKAYLNPARNCYIIDKEKNSRVFFDPSLQELSIDMPQAGFIDTKKEGGTWDYGSTGFKLAYDLNTSKSSNQDRTTYGNIEGQINIGEWVLLGRGYAYQGEKFQSNNLLLTHAIKSIKSDILIGKTQSYNTLNNGFTFYGAQLKSNQDMYPWNSQSYAPVINGIARTHARVTVEQGGYTLKSFVVPPGPFVINDLTGVYSGDIILKIYEEDGTVKEQRFPVAVLPNLLKPGNYNYNIAIGSKVDQYSDKRDEDSLFAQMTYDYGFVPFTLNTSALVDKNYTNVGLGFIRSFGWFGAVAMSGNLSQAKYHNGKAMNGFSASVKYARALGENANLQLIGYRFNSENYIDYSDFNYRYYSLLNNRPKQRYESIITYQLPEMNVFLNMSAWKEDYWDRSSEVGANLNLSKSFNNISVSLNAGYSKLQGMENDYNAGVSLSVPFSVFDKSHYSFSGINYDRRNGTNFNTGVAGNINSRLSYNASINQSRNTTGSAVSASYLFDVVQTSASYSQMGSTSSSSFQVGGSIIGVPDAGILFTPVKNDEIAVVQMEDVPGVRFNGSMPGDKKGRAVIPLTAYNNNTITVNADNLPQSIELTENAINVTPTENAIIYKKVKYRKINTYIVKVISGNGFVIPMGSIAKNAENQEIGYVNNGGILLMNLEEKDEGIISVGDCKFDSRSLKKDMGKVQEIKCD

SEQ ID NO: 11520 - protein, 628 aa, Escherichia coli
MEDDMSLSRLPKISLLAMSIYTHLGYATDLNLDFIQGTSIIPSILKSDYVYPQGQYSVDVFVNNEKTGTAELNITPADEKNNMLCFSPEWINSAGVMLDASKYDDVYNREKKCYELAKKNHTQVVFDYSAQKLLLDVPQAYLLSKSAPSRWDYGVTGGRLKYYANFNKTTNDKLNAFGNVDLGFNVGRWVLSSNINVSRSGGETEFTSSDMTLSTAISQIQGDLLLGKSQTQTELFSDFNFYGVSVRSNSNMRPWEARGYAPDISGIASGPSRVTVTQNGYTIYSRMVPAGPYRLDDLRPTGNGDLVVTLEDDNGHKTVQVYPVTTLPTLLRPGDFQYDFAMGKKNQSNELNKAFSSDTGLFWLGSVDYGFSSATLNSAILLNNRYQSAGIGVTKPFGELGALSLSAQTAKARYNNGDEKKGQNVSIKYAKNFTDRTDLQFLTYRYQDKGYVDYAEFDPHRTVIHGNQKSRYEARLSHRFDTTYLSGAWWHQNYWDRDGSDTGATLSLSTSAFDSVSVFLNGSYNRYANTDKADYSASVSVSIPFDLRGVQHYASNSVGYNRSNGSTFNTSISASVNDRVNYNLNADISSRGQRGASASASYAFDAVQTNIGVSQTHSRQGDGQTSFS

SEQ ID NO: 11521 - protein, 826 aa, Escherichia coli; identical to SEQ ID NO: 3772

SEQ ID NO: 11522 - protein, 368 aa, Escherichia coli; identical to SEQ ID NO: 3872

SEQ ID NO: 11523 - protein, 266 aa, Escherichia coli; identical to SEQ ID NO: 1894

SEQ ID NO: 11524 - protein, 843 aa, Escherichia coli
MHWMHLPLYHYRAHFSFSLLALTIASSLPAYGGKFNPKFLENVQGIDQHIDLSVYDSPVGQQIPGKYRVSVFVNEEKMASRTLDFSTASEAKRKASGESLMPCLSRVQLEEMGVRVDSFPALKMSPPEACVAFDEIIPQATSRFDFNTQTLHLSFPQAAMMMTARGTVDPSRWDEGIPALLLDYSFSGSNGRNEGTGSSSDSTSDSYYLNLRSGLNVGPWRLRNNSIWNRTDGKNQWDNVGTSLNRAIIPLKSQITLGDTATPGEIFDSVQMRGALLASDDEMLPDSQRGFAPVVRGIAKSNAEVSIEQNGYVIYRTFVQPGAFEINDLYATSGSGDLTVIIKEADGSEQRFIQPFSAVAIFQREGYLKYSLAAGEYRAGNYDSDKPHFGQFTAMYGLPWGMTAYGGALLSADYSALALGLGKNFGTIGAVSVDVTQAKSQLRNNEKEEGQSYRFLYSKSFEGGTDLRLLGYKYSTSGYYTFQEATDVRSDADSDYRRYHKRSQIQGNITQQLGDYGSVYFNMTQQDYWNVDGKENSLSAGYHGHIGRVNYSVAYTWTRSPEWEEDDRLWSFSVSIPLGGAWSSYRMTTDQNGKTSQQASVSGTLLEDCNLSYNVQQGYTSNGVGYSGSVNMGYMGGSGNIDVGYNYSKDNQQVNYGVRGGVIVHSEGITLSQPLGESLAIVSAPGARGGHVVNSSGVEVDWMGNAVVPYLTPYRETIVELRSDTLGQNVELQEAFQKVVPTRGAVVRSRFDTRVGYRVLMSLKQANGNAVPFGATAALIDESKPASSIVGEEGQLYISGMPEEGELQVSWGNEQAQRCRVPFRLPENKDNAAIVMVNAVCEK

SEQ ID NO: 11525 - protein, 161 aa, Escherichia coli; identical to SEQ ID NO: 2582

SEQ ID NO: 11526 - protein, 866 aa, Escherichia coli; identical to SEQ ID NO: 7592

SEQ ID NO: 11527 - protein, 883 aa, Escherichia coli
MTAFRAAFKAYRMHQVLIMPRFARLTIALGLATAVFPVDAEYYFNPRFLSNDLAESVDLSAFTKGREAPPGTYRVDIYLNDEFMTSRDITFIADDNNAELIPCLSTDLLVSLGIKKIALLDNKEHSAEKHVPDNSACTPLQDRLADASTEFDVGQQHLSLSVPQIYVGRMARGYVSPDLWEEGINAGLLNYSFNGNSINNRSNHNAGKSNYAYLNLQSGINIGSWRLRDNSTWSYYSGSSNSSDSNKWQHINTSAERDIIPLRSRLTVGDSYTDGDIFDSVNFRGLKINSTEAMLPDSQHGFAPVIHGIARGTAQVSVKQNGYDVYQTTVPPGPFTIDDINSAANGGDLQVTIKEADGSIQTLYVPYSSVPVLQRAGYTRYALAMGEYRSGNNLQSSPKFIQGSLMHGLEGNWTPYGGMQIAEDYQAFNLGIGKDLGLFGAFSFDITQANTTLADGTRHSGQSVKSVYSKSFYQTGTNIQVAGYRYSTQGFYNLSDSAYSRMSGYTVKPPTGDTNEQTQFIDYFNLFYSKRGQEQISISQQLGNYGTTFFSASRQSYWNTSRSDQQISFGLNVPFGDITTSLNYSYSNNIWQNDRDHLLAFTLNVPFSHWMRTDSQSAFRNSNASYSMSNDLKGGMTNLSGVYGTLLPDNNLNYSVQVGNTHGGNTSSGTSGYSSLNYRGAYGNTNVGYSRSGDSSQIYYGMSGGIIAHADGITFGQPLGDTMVLVKAPGADNVKIENQTGIHTDWRGYAILPFATEYRENRVALNANSLADNVELNETVVTVIPTHGAIARATFNAQIGGKVLMTLKYGNKSVPFGAIVTHGENKNGSIVAENGQVYLTGLPQSGQLQVSWGKDKNSNCIVEYKLPEVSPGTLLNQQTAICR

SEQ ID NO: 11528 - protein, 881 aa, Escherichia coli
MPDHSLFRLRILPWCIALAMSGSYSSVWAEDDIQFDSRFLELKGDTKIDLKRFSSQGYVEPGKYNLQVQLNKQPLAEEYDIYWYAGEDEASKSYACLTPELVAQFGLKEDVAKNLQWSHDAKCLKSGQLEGMEIKADLSQSALVISLPQAYLEYTYPDWDPPSRWDDGISGIVADYSINAQTRHEENGGDDSNEISGNGTVGVNLGPWRMRADWQTNYQHTRSNDDDDEFSGDETQKKWEWSRYYAWRALPSLKAKLALGEDYLRSDIFDGFNYVGGSVSTDDQMLPPNLRGYAPDISGVAHTTAKVTVSQMGRVIYETQVPAGPFRIQDLGDSVSGTLHIRIEEQNGQVQEYDISTASMPYLTRPGQVRYKIMMGRPQEWGHHVEGEFFSGAEASWGIANGWSLYGGALGDENYQSAALGVGRDLSTFGAVAFDVTHSHTKLDKDTAYGKGSLDGNSFRVSYSKDFDQLNSRVTFAGYRFSEENFMTMSEYLDASDSGMVRTGNDKEMYTATYNQNFRDAGVSVYLNYTRHTYWDREEQTNYNIMLSHYFNMGSIRNVSISMTGYRYEYDNQADKGMYISLSMPWGDNSTVSYNGNYGSGTDSSQVGYFSRVDDATHYQLNVGTSDKHTSVDGYYSHDGSLAQVDLSANYHEGQYTSAGLSLQGGATLTAHGGALHRTQNMGGTRLLIDADGVADVPVEGNGAAVYTNMFGKAVVSDVNNYYRNQAYIDLNKLPENAEATQSVVQATLTEGAIGYRKFAVISGQKAMAVLRLQDGSHPPFGAEVKNDNEQTVGLVDDDGNVYLAGVKPGEHMSVFWSGVAHCDINLPDPLPADLFNGLLLPCQHKGNVAPVVPDDIKPVIQEQTQQVTPTNPPVSVSANQ

SEQ ID NO: 11529 - protein, 869 aa, Escherichia coli; identical to SEQ ID NO: 7594

SEQ ID NO: 11530 - protein, 351 aa, Escherichia coli; identical to SEQ ID NO: 2872

SEQ ID NO: 11531 - protein, 239 aa, Escherichia coli
MHQMQTTRTPYSISFMATVLLLLLFACHSTVANAAVALGATRVIYPANQKQVLLPVTNNDPASVYLIQSWIENAGDQKDTQFVITPPLFSMQGKKENTLRIINATNHQLPGDRESLFWVNVKAIPAMEKDQKNENTLQLAIISRIKMFYRPTNLAMAPEEAPAMLRFRRSGSKLTLINPTPYFITVTNMKAGNSNLPNTMVPPKGEVSVDITHAATGDISFQTINDYGALTPRIKATMQ

SEQ ID NO: 11532 - protein, 828 aa, Escherichia coli; identical to SEQ ID NO: 2388

SEQ ID NO: 11533 - protein, 274 aa, Escherichia coli; identical to SEQ ID NO: 3471

SEQ ID NO: 11534 - protein, 193 aa, Escherichia coli; identical to SEQ ID NO: 2246

SEQ ID NO: 11535 - protein, 614 aa, Escherichia coli
MIKKASLLTAFSVTAFSAWAQDTSPDTLVVTANRFEQPRSTVLAPTTVVTRQDIDRWQSTSVNDVLRRLPGVDITQNGGSGQLSSIFIRGTNASHVLVLIDGVRLNLAGVSGSADLSQFPIALVQRVEYIRGPRSAVYGSDAIGGVVNIITTRDEPGTEISAGWGSNSYQNYDVSTQQQLGDKTRVTLLGDYAHTHGYDVVAYGNTGTQAQTDNDGFLSKTLYGALEHNFTDAWSGFVRGYGYDNRTNYDAYYSPGSPLLDTRKLYSQSWDAGLRYNGELIKSQLITSYSHSKDYNYDPHFGRYDSSATLDEMKQYTVQWANNVIVGHGSIGAGVDWQKQTTTPGTGYVENGYDQRNTGIYLTGLQQVGDFTFEGAARSDDNSQFGRHGTWQTSAGWEFIEGYRFIASYGTSYKAPNLGQLYGFYGNPNLDPEKSKQWEGAFEGLTAGVNWRISGYRNDVSDLIDYDDHTLKYYNEGKARIKGVEATANFDTGPLTHTVSYDYVDARNAITDTPLLRRAKQQVKYQLDWQLYDFDWGITYQYLGTRYDKDYSSYPYQTVKMGGVSLWDLAVAYPVTSHLTVRGKIANLFDKDYETVYGYQTAGREYTLSGSYTF

SEQ ID NO: 11536 - protein, 747 aa, Escherichia coli; identical to SEQ ID NO: 2072

SEQ ID NO: 11537 - protein, 132 aa, Escherichia coli
MNAILSVQGASAPVEKKSFFSKFTRLKKYFSFRPSRLNMLRLVRAVIPAAVLMMFFPQLAMAAQGGGQDLMAGGNATVKATFGKDSSAVKWVILAEVLVGAIMYMMTKNVKFLAGFAIISVFITVGMAVVGL

SEQ ID NO: 11538 - protein, 446 aa, Escherichia coli; identical to SEQ ID NO: 2176

SEQ ID NO: 11539 - protein, 478 aa, Escherichia coli; identical to SEQ ID NO: 2404

SEQ ID NO: 11540 - protein, 678 aa, Escherichia coli; identical to SEQ ID NO: 3014

SEQ ID NO: 11541 - protein, 233 aa, Escherichia coli
MTKKNTLQKLFTFASLCLFTASSHAAFVLNSTRYVFDEKRENISVQVDNQSTQEYGGQIWIENQDQNDKNVYFVPSPTFFKVAEQHKQILRILKINDALPKDKESLFWINIQEIPKAPKDGTNTLSIALHTQVKMFYRPDALKEKRENAEQNIKAISSEGNTVLWNDTPYYFAIISVKQNGTAIKVSEDIKDKLSVFAPGEKVSLGKSVTSNSLSIVAFDDYGVDKEYKLNKS

SEQ ID NO: 11542 - protein, 243 aa, Escherichia coli; identical to SEQ ID NO: 3159

SEQ ID NO: 11543 - protein, 679 aa, Escherichia coli
MSVWRKKTTGLKTKKRLLPLVLAAALCSSPVWAEEATFTANFKDTDLKSFIETVGANLNKTIIMGPGVQGKVSIRTMTPLNERQYYQLFLNLLEAQGYAVVPMENDVLKVVKSSAAKVEPLPLVGEGSDNYAGDEMVTKVVPVRNVSVRELAPILRQMIDSAGSGNVVNYDPSNVIMLTGRASVVERLTEVIQRVDHAGNRTEEVIPLDNASASEIARVLESLTKNSGENQPATLKSQIVADERTNSVIVSGDPATRDKMRRLIRRLDSEMERSGNSQVFYLKYSKAEDLVDVLKQVSGTLTAAKEEAEGTVGSGREVVSIAASKHSNALIVTAPQDIMQSLQSVIEQLDIRRAQVHVEALIVEVAEGSNINFGVQWASKDAGLMQFANGTQIPIGTLGAAISQAKPQKGSTVISENGATTINPDTNGDLSTLAQLLSGFSGTAVGVVKGDWMALVQAVKNDSSSNVLSTPSITTLDNQEAFFMVGQDVPVLTGSTVGSNNSNPFNTVERKKVGIMLKVTPQINEGNAVQMVIEQEVSKVEGQTSLDVVFGERKLKTTVLANDGELIVLGGLMDDQAGESVAKVPLLGDIPLIGNLFKSTADKKEKRNLMVFIRPTILRDGMAADGVSQRKYNYMRAEQIYRDEQGLSLMPHTAQPVLPAQNQALPPEVRAFLNAGRTR

SEQ ID NO: 11544 - protein, 208 aa, Escherichia coli; identical to SEQ ID NO: 1949

SEQ ID NO: 11545 - protein, 230 aa, Escherichia coli; identical to SEQ ID NO: 6078

SEQ ID NO: 11546 - protein, 230 aa, Escherichia coli
MNKVAKTAIAGVLSFAFCSQTMAAFVLNGTRFIYDENKKNITFEVTNNAGQMYGGQVWVDNTSEGNSIYMVPQPPFFKVGAKQKQIIRIMKTDSSLPTDRESLFWLNVQEVPPKPDVKESRGSVLAIAMNSRVKLIYRPSGLKNGRENAEKKLTMEQRGDKTWIKNPTPYYMAIVGVQTNGRELKLSDKVTKELTLLAPFSSVSLGVSARGSLKIAAINDWGGVQNYEIH

SEQ ID NO: 11547 - protein, 360 aa, Escherichia coli; identical to SEQ ID NO: 6933

SEQ ID NO: 11548 - protein, 191 aa, Escherichia coli; identical to SEQ ID NO: 2727

SEQ ID NO: 11549 - protein, 213 aa, Escherichia coli; identical to SEQ ID NO: 2232

SEQ ID NO: 11550 - protein, 243 aa, Escherichia coli; identical to SEQ ID NO: 2910

SEQ ID NO: 11551 - protein, 122 aa, Escherichia coli; identical to SEQ ID NO: 2915

SEQ ID NO: 11552 - protein, 203 aa, Escherichia coli
MKKIAITCALLSSLVASSVWADAASDLKSRLDKVSSFHASFTQKVTDGSGAAVQEGQGDLWVKRPNLFNWHMTQPDESILVSDGKTLWFYNPFVEQATATWLKDATGNTPFMLIARNQSSDWQQYNIKQNGDDFVLTPKASNGNLKQFTINVGRDGTIHQFTAVEQDDQRSSYQLKSQQNGAVDAAKFTFTPPQGVTVDDQRK

SEQ ID NO: 11553 - protein, 246 aa, Escherichia coli; identical to SEQ ID NO: 3021

SEQ ID NO: 11554 - protein, 224 aa, Escherichia coli
MTVSLTTILLSCSSAWAAGKGGIGLAATRLVYSEGEEQISLGVRNTSPDVPYLIQSWVMTPDNKKSADFIITPPLFVLNPANENLLRIMYIGAPLAKDRETLFFTSVRAVPSTTKREEGNTLKIATQSVIKLFWRPKGLAYPLGEAPAKLRCTSSADMVTVSNPTPYFITLTDLKIGGKVVKNQMISPFDKYQFSLPKGAKNSSVTYRTINDYGAETPQLNCKS

SEQ ID NO: 11555 - protein, 565 aa, Escherichia coli; identical to SEQ ID NO: 2678

SEQ ID NO: 11556 - protein, 704 aa, Escherichia coli
MAFFMKIFSVRQTVLPALLVLSPVVFAADEQTMIVSAAPQVVSELDTPAAVSVVDGEEMRLATPRINLSESLTGVPGLQVQNRQNYAQDLQLSIRGFGSRSTYGIRGIRLYVDGIPATMPDGQGQTSNIDLSSVQNVEVLRGPFSALYGNASGGVMNVTTQTGQQPPTIEASSYYGSFGSWRYGLKATGATGDGTQPGDVDYTVSTTRFTTHGYRDHSGAQKNLANAKLGVRIDEASKLSLIFNSVDIKADDPGGLTKAEWKANPQQAPRAEQYDTRKTIKQTQAGLRYERSLSAQDDMSVMMYAGERETTQYQSIPMAPQLNPSHAGGVITLQRHYQGIDSRWTHRGELGVPVTFTTGLNYENMSENRKGYNNFRLNSGMPEYGQKGELRRDERNLMWNIDPYLQTQWQLSEKLSLDAGVRYSSVWFDSNDHYVTPGNGDDSGDASYHKWLPAGSLKYAMTDAWNIYLAAGRGFETPTINELSYRADGQSGMNFGLKPSTNDTIEIGSKTRIGDGLLSLALFQTDTDDEIVVDSSSGGRTTYKNAGKTRRQGAELAWDQRFAGDFRVNASWTWLDATYRSNVCNEQDCNGNRMPGIARNMGFASIGYVPEDGWYAGTEARYMGDIMADDENTAKAPSYTLVGLFTGYKYNYHNLTVDLFGRVDNLFDKEYVGSVIVNESNGRYYEPSPGRNYGVGMNIAWRFE

SEQ ID NO: 11557 - protein, 517 aa, Escherichia coli; identical to SEQ ID NO: 2462

SEQ ID NO: 11558 - protein, 232 aa, Escherichia coli; identical to SEQ ID NO: 2087

SEQ ID NO: 11559 - protein, 332 aa, Escherichia coli; identical to SEQ ID NO: 2703

SEQ ID NO: 11560 - protein, 261 aa, Escherichia coli
MNRIVFWFVTLVFISSTSYANDFYRADSRSPDEVRRSGGLIPRGQDEAYERGTPININLYDHARGTVTGNTRYNDGYVSTTTTLRQAHLIGQNMLGSFNEYYIYVIAPAPNLFDVNGILGTYSPYPSENEYAALGGVPLSQIIGWYRVTFGAIEGGMHRNRNYRRDLFRGLSVAPNEDGYHLAGFPDEFPAWREYPWIEFAPDQCHQNNKTNSFLTCDFITNELSQADLLKFKKLIKRKSTFLTLQSIDDFLVKNGDKDEL

SEQ ID NO: 11561 - protein, 224 aa, Escherichia coli; identical to SEQ ID NO: 3035

SEQ ID NO: 11562 - protein, 251 aa, Escherichia coli
MAYLILTLWGGYMLRKKALKITTKILIPYLFLASYVFANNDGGIGLDVTRVIFPSSAESVSLRSGNTSNNSVWLLRAWASDYTTNGTNTPFFITPPLVRINPKESIQFRINKLSDSSSLPSDRESVFSINVMAIPPQMDSQDGSKSHIQFSINNKIKLFYRPDSLNDSKIIEKIPESIQVKNNKSDIEIRNPTPYFVTLDKIKINNTELKNGDYMIAPFSSINIDWKGARDFTFQTINDYGGLTRPVHIYF

SEQ ID NO: 11563 - protein, 162 aa, Escherichia coli; identical to SEQ ID NO: 1965

SEQ ID NO: 11564 - protein, 425 aa, Escherichia coli
MSKIVKIIGREIIDSRGNPTVEAEVHLEGGFVGMAAAPSGASTGSREALELRDGDKSRFLGKGVTKAVAAVNGPIAQALIGKDAKDQAGIDKIMIDLDGTENKSKFGANAILAVSLANAKAAAAAKGMPLYEHIAELNGTPGKYSMPVPMMNIINGGEHADNNVDIQEFMIQPVGAKTVKEAIRMGSEVFHHLAKVLKAKGMNTAVGDEGGYAPNLGSNAEALAVIAEAVKAAGYELGKDITLAMDCAASEFYKDGKYVLAGEGNKAFTSEEFTHFLEELTKQYPIVSIEDGLDESDWDGFAYQTKVLGDKIQLVGDDLFVTNTKILKEGIEKGIANSILIKFNQIGSLTETLAAIKMAKDAGYTAVISHRSGETEDATIADLAVGTAAGQIKTGSMSRSDRVAKYNQLIRIEEALGRKSTVQRS

SEQ ID NO: 11565 - protein, 111 aa, Escherichia coli
MKKQIEGMTMKKVLALVVAAAMGLSSTAFAAETATTPAPTATTTKAAPAKTTHHKKQHKAAPAQKAQAAKKHHKNTKAEQKAPEQKAQAAKKHAGKHSHQQPAKPAAQPAA

SEQ ID NO: 11566 - protein, 200 aa, Escherichia coli; identical to SEQ ID NO: 1784

SEQ ID NO: 11567 - protein, 784 aa, Escherichia coli; identical to SEQ ID NO: 2244

SEQ ID NO: 11568 - protein, 249 aa, Escherichia coli; identical to SEQ ID NO: 3492

SEQ ID NO: 11569 - protein, 430 aa, Escherichia coli; identical to SEQ ID NO: 2617

SEQ ID NO: 11570 - protein, 760 aa, Escherichia coli; identical to SEQ ID NO: 3026

SEQ ID NO: 11571 - protein, 412 aa, Escherichia coli; identical to SEQ ID NO: 2161

SEQ ID NO: 11572 - protein, 241 aa, Escherichia coli; identical to SEQ ID NO: 2851

SEQ ID NO: 11573 - protein, 250 aa, Escherichia coli
MSDLLCSAKLGATTLALLLSAASLSAQASVTPDRTRLIFNESDKSISVTLRNNDPKLPYLAQSWIEDEKGNKISSPLTVLPPVQRIDSMMNGQVKVQGMPDINKLPADRESLFYFNVREIPPKSNKANTLQIALQTRIKLFWRPKALENVSMKNPWQYKVTLTRNGQEFTVNNPTPYYVIFSNASTQKNGNPAAGFSPIVMSPKTSAPLNVKMGSVLVLTYVNDYGARMPLFFTCNGNSCQVDEEQSRKG

SEQ ID NO: 11574 - protein, 203 aa, Escherichia coli; identical to SEQ ID NO: 2015

SEQ ID NO: 11575 - protein, 729 aa, Escherichia coli
MLSTQFNRDNQYQASTKPSLLAGCIALALLPSAAFAAPATEETVIVEGSATAPDDGENDYSVTSTSAGTKMQMTQRDIPQSVTIVSQQRMEDQQLQTLGEVMENTLGISKSQADSDRALYYSRGFQIDNYMVDGIPTYFESRWNLGDALSDMALFERVEVVRGATGLMTGTGNPSAAINMVRKHATSREFKGDVSAEYGSWNKERYVADLQSPLTEDGKIRARIVGGYQNNDSWLDRYNSEKTFFSGIVDADLGDLTTLSAGYEYQRIDVNSPTWGGLPRWNTDGSSNSYDRARSTAPDWAYNDKEINKVFMTLKQRFADTWQATLNATHSEVEFDSKMMYVDAYVNKADGMLVGPYSNYGPGFDYVGGTGWNSGKRKVDALDLFADGIYELFGRQHNLMFGGSYSKQNNRYFSSWANIFPDEIGSFYNFNGNFPQTDWSPQSLAQDDTTHMKSLYAATRVTLADPLHLILGARYTNWRVDTLTYSMEKNHTTPYAGLVFDINDNWSTYASYTSIFQPQNDRDSSGKYLAPITGNNYELGLKSDWMNSRLTTTLAIFRIEQDNVAQSTGTPIPGSNGETAYKAVDGTVSKGVEFELNGAITDNWQLTFGATRYIAEDNEGNAVNPNLPRTTVKMFTSYRLPVMPELTVGGGVNWQNRVYTDTVTPYGTFRAEQGSYALVDLFTRYQVTKNFSLQGNVNNLFDKTYDTNVEGSIVYGTPRNFSITGTYQF

SEQ ID NO: 11576 - protein, 231 aa, Escherichia coli; identical to SEQ ID NO: 3055

SEQ ID NO: 11577 - protein, 362 aa, Escherichia coli; identical to SEQ ID NO: 2434

SEQ ID NO: 11578 - protein, 375 aa, Escherichia coli
MKVKVLSLLVPALLVAGAANAAEVYNKDGNKLDLYGKVDGLHYFSDNKDVDGDQTYMRLGFKGETQVTDQLTGYGQWEYQIQGNSAENENNSWTRVAFAGLKFQDVGSFDYGRNYGVVYDVTSWTDVLPEFGGDTYGSDNFMQQRGNGFATYRNTDFFGLVDGLNFAVQYQGKNGSVSGEGMTNNGRDALRQNGDGVGGSITYDYEGFGIGAAVSSSKRTDDQNGSYISNGVARNYIGTGDRAETYTGGLKYDANNIYLAAQYTQTYNATRVGSLGWANKAQNFEAVAQYQFDFGLRPSVAYLQSKGKNLGVINGRNYDDEDILKYVDVGATYYFNKNMSTYVDYKINLLDDNQFTRDAGINTDNIVALGLVYQF

SEQ ID NO: 11579 - protein, 641 aa, Escherichia coli; identical to SEQ ID NO: 3774

SEQ ID NO: 11580 - protein, 360 aa, Escherichia coli; identical to SEQ ID NO: 3062

SEQ ID NO: 11581 - protein, 746 aa, Escherichia coli; identical to SEQ ID NO: 3031

SEQ ID NO: 11582 - protein, 87 aa, Escherichia coli; identical to SEQ ID NO: 2946

SEQ ID NO: 11583 - protein, 236 aa, Escherichia coli; identical to SEQ ID NO: 3438

SEQ ID NO: 11584 - protein, 518 aa, Escherichia coli; identical to SEQ ID NO: 2350

SEQ ID NO: 11585 - protein, 551 aa, Escherichia coli; identical to SEQ ID NO: 2446

SEQ ID NO: 11586 - protein, 228 aa, Escherichia coli; identical to SEQ ID NO: 3034

SEQ ID NO: 11587 - protein, 863 aa, Escherichia coli; identical to SEQ ID NO: 11340

SEQ ID NO: 11588 - protein, 871 aa, Escherichia coli
MHQVLILPRFARLTIALGLATAVFPVDAEYYFNPRFLSNDLAESVDLSAFTKGREAPPGTYRVDIYLNDEFMTSRDITFIADDNNADLIPCLSTDLLVSLGIKKSALLDNKEHSAEKHVPDNSACTPLQDRLADASTEFDVGQQHLSLSVPQIYVGRMARGYVSPELWEEGINAGLLNYSFNGNSINNRSNHNAGKSNYAYLNLQSGINIGSWRLRDNSTWSYNSGSSNSSNSNKWQHINTSAERDIIPLRSRLTVGDSYTDGDIFDSVNFRGLKINSTEAMLPDSQHGFAPVIHGIARGTAQVSVKQNGYDVYQTTVPPGPFTIDDINSAANGGDLQVTIKEADGSIQTLYVPYSSVPVLQRAGYTRYALAMGEYRSGNNLQSSPKFIQGSLMHGLEGNWTPYGGMQIAEDYQAFNLGIGKDLGLFGAFSFDITQANTTLADGTRHSGQSVKSVYSKSFYQTGTNIQVAGYRYSTQGFYNLSDSAYSRMSGYTVKPPTGDTNEQTQFIDYFNLFYSKRGQEQISISQQLGNYGTTFFSASRQSYWNTSRSDQQISFGLNVPFGDITTSLNYSYSNNIWQNDRDHLLAFTLNVPFSHWMRTDSQSAFRNSNASYSMSNDLKGGMTNLSGVYGTLLPDNNLNYSVQVGNTHGGNTSSGTSGYSSLNYRGAYGNTNVGYSRNGDSSQIYYGMSGGIIAHADGITFGQPLGDTMVLVKAPGADNVKIENQTGIHTDWRGYAILPFATEYRENRVALNANSLADNVELDETVVTVIPTHGAIARATFNAQIGGKVLMTLKYGNKSVPFGAIVTHGENKNGSIVAENGQVYLTGLPQSGKLQVSWGKDKNSNCIVEYKLPEVSPGTLLNQQTAICR

SEQ ID NO: 11589 - protein, 843 aa, Escherichia coli
MHWMHLPLYHYRAHFSFSLLALTIASSLPAYGGKFNPKFLENVQGIDQHIDLSVYDSPVGQQIPGKYRVSVFVNEEKMASRTLDFSTASEAKRKASGESLMPCLSRVQLEEMGVRVDSFPALKMSPPEACVAFDEIIPQATSRFDFNTQTLHLSFPQAAMMMTARGTVDPSRWDEGIPALLLDYSFSGSNGRNEGTGSSSDSTSDSYYLNLRSGLNVGPWRLRNNSIWNRTDGKNQWDNVGTSLNRAIIPLKSQITLGDTATPGEIFDSVQMRGALLASDDEMLPDSQRGFAPVVRGIAKSNAEVSIEQNGYVIYRTFVQPGAFEINDLYATSGSGDLTVIIKEADGSEQRFIQPFSAVAIFQREGYLKYSLAAGEYRAGNYDSDKPHFGQFTAMYGLPWGMTAYGGALLSADYNALALGLGKNFGTIGAVSVDVTQAKSQLRNNEKEEGQSYRFLYSKSFEGGTDLRLLGYKYSTSGYYTFQEATDVRSDADSDYRRYHKRSQIQGNITQQLGDYGSVYFNMTQQDYWNVDGKENSLSAGYHGHIGRVNYSVAYTWTRSPEWEEDDRLWSFSVSIPLGGAWSSYRMTTDQNGKTSQQASVSGTLLEDRNLSYNVQQGYTSNGVGYSGSVNMGYMGGSGNIDVGYNYSKDNQQVNYGVRGGVIVHSEGITLSQPLGESLAIVSAPGARGGHVVNSSGVEVDWMGNAVVPYLTPYRETIVELRSDTLGQNVELQEAFQKVVPTRGAVVRSRFDTRVGYRVLMSLKQANGNAVPFGATAALIDESKPASSIVGEEGQLYISGMPEEGELQVSWGNEQAQRCRVPFRLPENKDNAAIVMVHAVCEK

SEQ ID NO: 11590 - protein, 834 aa, Escherichia coli
MYKKLKLTTISELIKNIYCSLSVLIIGCASAYAVEFNKDLIEAEDRENVNLSQFETDGQLPVGKYSLNALINNKRTPIHLDLQWVLIDNQTAVCLTPEQLTLLGFTDEIIEVAQQNLIDGCYPIEKEKQITTYLDKGKMQLSISAPQAWLKYKDANWTPPELWDHGIAGAFLDYNLYASHYAPHQGDNSQNISSYGQTGVNLGAWRLRTDYQYDQSFNNGKSQANNLDFPRIYLFRPIPAINAKLTIGQYDTESSIFDSFHFSGVSLKSDENMLPPDLRGYAPQITGVAQTNAKVTVSQNNRIIYQENVPPGPFAITNLFNTLQGQLDVKVEEEDGQVTQWQVASNSIPYLTRKGQIRYTTAMGKPTSVGGDSLQQPFFWTGEFSWGWLNNVSLYGGSVLTNRDYQSLAAGVGFNLNSLGSLSFDVTRSDAQLHNQDKETGYSYRANYSKRFESTGSQLTFAGYRFSDKNFVTMNEYINDTNHYTNYQNEKESYIVTFNQYLESLRLNTYVSLARNTYWDASSNVNYSLSLSRDFDIGPLKNVSTSLTFSRINWEEDNQDQLYLNISIPWGTSRTLSYGMQRNQDNKISHTASWYDSSDRNNSWSVSASGDNDEFKDMKASLRASYQHNTENGRLYLSGTSQRDSYYSLNASWNGSFTATRHGAAFHDYSGSADSRFMIDADGAEDIPLNNKRAVTNRYGIGVIPSVSSYITTSLSVDTRNLPENVDIENSVITTTLTEGAIGYAKLDTRKGYQIMGVIRLADGSHPPLGISVKDKTSHKELGLVADGGFVYLNGIQDDSKLTLRWGDKSCFIQPPNSSNLTTGTVILPCISQN

SEQ ID NO: 11591 - protein, 866 aa, Escherichia coli; identical to SEQ ID NO: 8338

SEQ ID NO: 11592 - protein, 161 aa, Escherichia coli; identical to SEQ ID NO: 2582

SEQ ID NO: 11593 - protein, 826 aa, Escherichia coli; identical to SEQ ID NO: 3563

SEQ ID NO: 11594 - protein, 237 aa, Escherichia coli; identical to SEQ ID NO: 2816

SEQ ID NO: 11595 - protein, 863 aa, Escherichia coli; identical to SEQ ID NO: 3946

SEQ ID NO: 11596 - protein, 880 aa, Escherichia coli; identical to SEQ ID NO: 3110

SEQ ID NO: 11597 - protein, 161 aa, Escherichia coli; identical to SEQ ID NO: 2582

SEQ ID NO: 11598 - protein, 816 aa, Escherichia coli; identical to SEQ ID NO: 3562

SEQ ID NO: 11599 - protein, 826 aa, Escherichia coli; identical to SEQ ID NO: 7491

SEQ ID NO: 11600 - protein, 368 aa, Escherichia coli; identical to SEQ ID NO: 2370

SEQ ID NO: 11601 - protein, 266 aa, Escherichia coli; identical to SEQ ID NO: 1894

SEQ ID NO: 11602 - protein, 851 aa, Escherichia coli; identical to SEQ ID NO: 6877

SEQ ID NO: 11603 - protein, 266 aa, Escherichia coli; identical to SEQ ID NO: 1892

SEQ ID NO: 11604 - protein, 860 aa, Escherichia coli; identical to SEQ ID NO: 3544

SEQ ID NO: 11605 - protein, 368 aa, Escherichia coli; identical to SEQ ID NO: 3872

SEQ ID NO: 11606 - protein, 871 aa, Escherichia coli; identical to SEQ ID NO: 3519

SEQ ID NO: 11607 - protein, 863 aa, Escherichia coli; identical to SEQ ID NO: 3959

SEQ ID NO: 11608 - protein, 869 aa, Escherichia coli; identical to SEQ ID NO: 2903

SEQ ID NO: 11609 - protein, 551 aa, Escherichia coli; identical to SEQ ID NO: 2446

SEQ ID NO: 11610 - protein, 274 aa, Escherichia coli; identical to SEQ ID NO: 3471

SEQ ID NO: 11611 - protein, 760 aa, Escherichia coli
MENNRNFPARQFHSLTFFAGLCIGITPVAQALAAEGQTNADDTLVVEASTPSLYAPQQSADPKFSRPVADTTRTMTVISEQVIKDQGATNLTDALKNVPGVGAFFAGENGNSTTGDAIYMRGADTSNSIYIDGIRDIGSVSRDTFNTEQVEVIKGPSGTDYGRSAPTGSINMISKQPRNDSGIDASASIGSAWFRRGTLDVNQVIGDTTAVRLNVMGEKTHDAGRDKVKNERYGVAPSIAFGLGTANRLYLNYLHVTQHNTPDGGIPTIGLPGYSAPSAGTAALNHSGKVDTHNFYGTDSDYDDSTTDTATMRFEHDINDNTTIRNTTRWSRVKQDYLMTAIMGGASNITQPTSDVNSWTWSRTANTKDVSNKILTNQTNLTSTFYTGSIGHDVSTGVEFTRETQTNYGVNPMTLPAVNIYHPDSSIHPGGLTRNGANANGQTDTFAIYAFDTLQITRDFELNGGIRLDNYHTEYDSATACGGSGRGAITCPAGVAKGSPVTTVDTAKSGNLVNWKAGALYHLTENGNVYINYAVSQQPPGGNNFALAQSGSGNSANRTDFKPQKANTSEIGTKWQVLDKRLLLTAALFRTDIENEVEQNDDGTYSQYGKKRVEGYEISVAGNITPAWQVIGGYTQQKATIKNGKDVAQDGSSSLPYTPEHAFTLWSQYQATDDISVGAGARYIGSMHKGSDGAVGTPAFTEGYWVADAKLGYRVNRNLDFQLNVYNLFDTDYVASINKSGYRYHPGEPRTFLLTANMHF

SEQ ID NO: 11612 - protein, 224 aa, Escherichia coli; identical to SEQ ID NO: 3165

SEQ ID NO: 11613 - protein, 362 aa, Escherichia coli; identical to SEQ ID NO: 2434

SEQ ID NO: 11614 - protein, 203 aa, Escherichia coli; identical to SEQ ID NO: 2201

SEQ ID NO: 11615 - protein, 828 aa, Escherichia coli; identical to SEQ ID NO: 2388

SEQ ID NO: 11616 - protein, 162 aa, Escherichia coli; identical to SEQ ID NO: 1973

SEQ ID NO: 11617 - protein, 241 aa, Escherichia coli; identical to SEQ ID NO: 2922

SEQ ID NO: 11618 - protein, 331 aa, Escherichia coli; identical to SEQ ID NO: 2700

SEQ ID NO: 11619 - protein, 119 aa, Escherichia coli; identical to SEQ ID NO: 2841

SEQ ID NO: 11620 - protein, 565 aa, Escherichia coli; identical to SEQ ID NO: 2678

SEQ ID NO: 11621 - protein, 203 aa, Escherichia coli; identical to SEQ ID NO: 2009

SEQ ID NO: 11622 - protein, 517 aa, Escherichia coli; identical to SEQ ID NO: 2462

SEQ ID NO: 11623 - protein, 122 aa, Escherichia coli; identical to SEQ ID NO: 2915

SEQ ID NO: 11624 - protein, 228 aa, Escherichia coli; identical to SEQ ID NO: 11258

SEQ ID NO: 11625 - protein, 662 aa, Escherichia coli; identical to SEQ ID NO: 8124

SEQ ID NO: 11626 - protein, 224 aa, Escherichia coli; identical to SEQ ID NO: 3115

SEQ ID NO: 11627 - protein, 446 aa, Escherichia coli; identical to SEQ ID NO: 5547

SEQ ID NO: 11628 - protein, 243 aa, Escherichia coli; identical to SEQ ID NO: 3483

SEQ ID NO: 11629 - protein, 193 aa, Escherichia coli
MRYLATLLLSLAVLITAGCGWHLRDTTQVPSTMKVMILDSGDPNGPLSCAVRNQLRLNGVELLDKETTRKDVPSLRLGKVSIAKDTASVFRNGQTAEYQMIMTVNATVLIPGRDIYPISAKVFRSFFDNPQMALAKDNEQDMIVKEMYDRAAEQLIRKLPSIRAADIRSDEEQTSTTTDTPATPARVSTTLGN

SEQ ID NO: 11630 - protein, 746 aa, Escherichia coli; identical to SEQ ID NO: 8398

SEQ ID NO: 11631 - protein, 351 aa, Escherichia coli; identical to SEQ ID NO: 2872

SEQ ID NO: 11632 - protein, 236 aa, Escherichia coli; identical to SEQ ID NO: 3482

SEQ ID NO: 11633 - protein, 236 aa, Escherichia coli; identical to SEQ ID NO: 3970

SEQ ID NO: 11634 - protein, 351 aa, Escherichia coli; identical to SEQ ID NO: 2872

SEQ ID NO: 11635 - protein, 231 aa, Escherichia coli; identical to SEQ ID NO: 2868

SEQ ID NO: 11636 - protein, 229 aa, Escherichia coli; identical to SEQ ID NO: 3589

SEQ ID NO: 11637 - protein, 89 aa, Escherichia coli; identical to SEQ ID NO: 2810

SEQ ID NO: 11638 - protein, 203 aa, Escherichia coli; identical to SEQ ID NO: 2201

SEQ ID NO: 11639 - protein, 713 aa, Escherichia coli; identical to SEQ ID NO: 3523

SEQ ID NO: 11640 - protein, 227 aa, Escherichia coli; identical to SEQ ID NO: 3570

SEQ ID NO: 11641 - protein, 998 aa, Escherichia coli; identical to SEQ ID NO: 3056

SEQ ID NO: 11642 - protein, 747 aa, Escherichia coli; identical to SEQ ID NO: 2954

SEQ ID NO: 11643 - protein, 678 aa, Escherichia coli; identical to SEQ ID NO: 2902

SEQ ID NO: 11644 - protein, 729 aa, Escherichia coli; identical to SEQ ID NO: 2948

SEQ ID NO: 11645 - protein, 243 aa, Escherichia coli; identical to SEQ ID NO: 3561

SEQ ID NO: 11646 - protein, 224 aa, Escherichia coli; identical to SEQ ID NO: 3604

SEQ ID NO: 11647 - protein, 359 aa, Escherichia coli; identical to SEQ ID NO: 2332

SEQ ID NO: 11648 - protein, 229 aa, Escherichia coli; identical to SEQ ID NO: 4047

SEQ ID NO: 11649 - protein, 366 aa, Escherichia coli; identical to SEQ ID NO: 3520

SEQ ID NO: 11650 - protein, 700 aa, Escherichia coli; identical to SEQ ID NO: 2926

SEQ ID NO: 11651 - protein, 331 aa, Escherichia coli; identical to SEQ ID NO: 2705

SEQ ID NO: 11652 - protein, 746 aa, Escherichia coli; identical to SEQ ID NO: 2949

SEQ ID NO: 11653 - protein, 111 aa, Escherichia coli; identical to SEQ ID NO: 2911

SEQ ID NO: 11654 - protein, 567 aa, Escherichia coli; identical to SEQ ID NO: 3518

SEQ ID NO: 11655 - protein, 89 aa, Escherichia coli; identical to SEQ ID NO: 2812

SEQ ID NO: 11656 - protein, 518 aa, Escherichia coli; identical to SEQ ID NO: 2351

SEQ ID NO: 11657 - protein, 432 aa, Escherichia coli; identical to SEQ ID NO: 2026

SEQ ID NO: 11658 - protein, 362 aa, Escherichia coli; identical to SEQ ID NO: 2998

SEQ ID NO: 11659 - protein, 230 aa, Escherichia coli; identical to SEQ ID NO: 2995

SEQ ID NO: 11660 - protein, 512 aa, Escherichia coli; identical to SEQ ID NO: 2813

SEQ ID NO: 11661 - protein, 200 aa, Escherichia coli; identical to SEQ ID NO: 1789

SEQ ID NO: 11662 - protein, 249 aa, Escherichia coli; identical to SEQ ID NO: 3492

SEQ ID NO: 11663 - protein, 760 aa, Escherichia coli; identical to SEQ ID NO: 2078

SEQ ID NO: 11664 - protein, 367 aa, Escherichia coli; identical to SEQ ID NO: 2431

SEQ ID NO: 11665 - protein, 262 aa, Escherichia coli
MPAGKPYFREFNLSTDSKECLCFPWLKKTVSALFVSTLLASAPAFADIIISGTRIIYNADKKDVNVRLENKGNRPLLIQNWLDTGDDNADPSQIKVPFTATPPVSRVEPKRGQTVKVMYTGATALPKDRESVYWFNVLEVPPKPKDAEADKNLLQLAFRTRIKLFYRPSGLQGEPAEAPAKITWKLNNAQLQANNPTPYYVSFNEVKLESGGKTYNVNSSMVTPFSQASFGVTSLPGSVSSGKVVFKAINDFGGNIDGSATF

SEQ ID NO: 11666 - protein, 274 aa, Escherichia coli; identical to SEQ ID NO: 2304

SEQ ID NO: 11667 - protein, 231 aa, Escherichia coli; identical to SEQ ID NO: 3055

SEQ ID NO: 11668 - protein, 253 aa, Escherichia coli
MYKYIKIFIPALFLTSFLSHAQTANTSVAKSNAIIKTEDKIYGLRLGSTRVIYNEGMLASSFWIKNEKKYPIIVQSQVFSDDKKTKAPFIITPPVLRLESEIQTRLRIVPVSNVLKKDRESLFWICVKGIPPENISSYDTEDNNKSAYVNINVITNSCIKLLARPKSVDISVEEANKKLRWGIKEGELLVENPSPLYINIARITVNGKEVAIPDGYIEPYKSVSNIAKASKGDKVNSVVLDDIGAEINNEVTL

SEQ ID NO: 11669 - protein, 507 aa, Escherichia coli
MFAPSLEKALRETQSELKKYKDEEKKKYTPATVNRSVSTNDQGYAANPFPTSSAAKPDAVLVKNEEKNASETGSIYSSMTLKDFSKFVKDEIGFSYNGYYRSGWGTASHGSPKSWAIGSLGRFGNEYSGWFDLQLKQRVYNENGKRVDAVVMMDGNVGQQYSTGWFGDNAGGENFMQFSDMYVTTKGFLPFAPEADFWVGKHGAPKIEIQMLDWKTQRTDAAAGVGLENWKVGPGKIDIALVREDVDDYDRSLQNKQQINTNAIDLRYKDIPLWDKATLMVSGRYVTANESASEKDNQDNNGYYDWKDTWMFGTSLTQKFDKGGFNEFSFLVANNSIASNFGRYAGASPFTTFNGRYYGDHTGGTAVRLTSQGEAYIGDHFIVANAIVYSFGNDIYSYETGAHSDFESIRAVVRPAYIWDQYNQTGVELGYFTQQNKDANSNKFNESGYKTTLFHTFKVNTSMLTSRPEIRFYATYIKALENELDGFTFEDNKDDQFAVGAQAEIWW

SEQ ID NO: 11670 - protein, 700 aa, Escherichia coli; identical to SEQ ID NO: 8081

SEQ ID NO: 11671 - protein, 518 aa, Escherichia coli; identical to SEQ ID NO: 2349

SEQ ID NO: 11672 - protein, 412 aa, Escherichia coli; identical to SEQ ID NO: 2908

SEQ ID NO: 11673 - protein, 233 aa, Escherichia coli; identical to SEQ ID NO: 3548

SEQ ID NO: 11674 - protein, 747 aa, Escherichia coli; identical to SEQ ID NO: 2072

SEQ ID NO: 11675 - protein, 246 aa, Escherichia coli
MFFNTKHTTALCFVTCMAFSSSSIADIVISGTHVIYKSDQKSVNVRLENKGNNPLLVQSWLDTGDDNAEPGSITVPFTATPPVSRIDAKRGQTIKLMYTASTSLPKDRESVFWFNVLEVPPKPDAEKVANQSLLQLAFRTRIKLFYRPDGLKGNPSEAPLALKWFWSGSEGKASLRVTNPTPYYVSFSSGDLEASGKRYPIDVKMIAPFSDEVMKVTGLNGKASSAKVHFYAINDFGGAIEGNASL

SEQ ID NO: 11676 - protein, 191 aa, Escherichia coli; identical to SEQ ID NO: 2727

SEQ ID NO: 11677 - protein, 230 aa, Escherichia coli; identical to SEQ ID NO: 3019

SEQ ID NO: 11678 - protein, 686 aa, Escherichia coli; identical to SEQ ID NO: 3129

SEQ ID NO: 11679 - protein, 359 aa, Escherichia coli; identical to SEQ ID NO: 2328

SEQ ID NO: 11680 - protein, 729 aa, Escherichia coli; identical to SEQ ID NO: 2948

SEQ ID NO: 11681 - protein, 659 aa, Escherichia coli; identical to SEQ ID NO: 2942

SEQ ID NO: 11682 - protein, 162 aa, Escherichia coli; identical to SEQ ID NO: 1969

SEQ ID NO: 11683 - protein, 696 aa, Escherichia coli; identical to SEQ ID NO: 4038

SEQ ID NO: 11684 - protein, 208 aa, Escherichia coli; identical to SEQ ID NO: 1949

SEQ ID NO: 11685 - protein, 191 aa, Escherichia coli; identical to SEQ ID NO: 2727

SEQ ID NO: 11686 - protein, 240 aa, Escherichia coli
MINFSRMKHFSINRLATTFGLTLAVLMSSQSALASLSADQTRYVFKGNKGSLTITVTNNDKEKTFGGQAWVDNIVEKDTRPTFVVTPSFFKVKPNGQQTLRVIKASDHVPQDKESVYWLNLQDIPPAMDGNGIAVALRTKLKVFYRPTALLEGRKGAEEGITFKVRPDGRNVLVNTTPYIYAIGNLLDANGKKISVDSDAAKNLLMFMPGDEVPVNGKVVKVESLNDYGEIETWEVNKKR

SEQ ID NO: 11687 - protein, 232 aa, Escherichia coli; identical to SEQ ID NO: 2087

SEQ ID NO: 11688 - protein, 200 aa, Escherichia coli; identical to SEQ ID NO: 1784

SEQ ID NO: 11689 - protein, 111 aa, Escherichia coli; identical to SEQ ID NO: 7471

SEQ ID NO: 11690 - protein, 663 aa, Escherichia coli
MFRLNPFVRVGLCLSAISCAWHVLAVDDDGETMVVTASSVEQNLKDAPASISVITQEDLQRKPVQNLKDVLKEVPGVQLTNEGDNRKGVSIRGLDSSYTLILVDGKRVNSRNAVFRHNDFDLNWIPVDSIERIEVVRGPMSSLYGSDALGGVVNIITKKIGQKWSGTVTVDTTIQEHRDRGDTYNGQFFTSGPLIDGVLGMKAYGSLAKREKDDPQNSTTTDTGETPRIEGFSSRDGNVEFAWTPNQNHDFTAGYGFDRQDRDSDSLDKNRLERQNYSVSHNGRWDYGTSELKYYGEKVENKNPGNSSPITSESNTVDGKYTLPLTAINQFLTVGGEWRHDKLSDAVNLTGGTSSKTSASQYALFVEDEWRIFEPLALTTGVRMDDHETYGEHWSPRAYLVYNATDTVTVKGGWATAFKAPSLLQLSPDWTSNSCRGACKIVGSPDLKPETSESWELGLYYMGEEGWLEGVESSVTVFRNDVKDRISISRTSDVNAAPGYQNFVGFETGANGRRIPVFSYYNVNKARIQGVETELKIPFNDEWKLSINYTYNDGRDVSNGENKPLSDLPFHTANGTLDWKPLALEDWSFYVSGHYTGQKRADSATAKTPGGYTIWNTGAAWQVTKDVKLRAGVLNLGDKDLSRDDYSYNEDGRRYFMAVDYRF

SEQ ID NO: 11691 - protein, 512 aa, Escherichia coli; identical to SEQ ID NO: 2974

SEQ ID NO: 11692 - protein, 478 aa, Escherichia coli; identical to SEQ ID NO: 7448

SEQ ID NO: 11693 - protein, 614 aa, Escherichia coli; identical to SEQ ID NO: 1883

SEQ ID NO: 11694 - protein, 539 aa, Escherichia coli; identical to SEQ ID NO: 3050

SEQ ID NO: 11695 - protein, 213 aa, Escherichia coli; identical to SEQ ID NO: 2232

SEQ ID NO: 11696 - protein, 203 aa, Escherichia coli; identical to SEQ ID NO: 2009

SEQ ID NO: 11697 - protein, 859 aa, Escherichia coli; identical to SEQ ID NO: 4088

SEQ ID NO: 11698 - protein, 517 aa, Escherichia coli; identical to SEQ ID NO: 2462

SEQ ID NO: 11699 - protein, 412 aa, Escherichia coli; identical to SEQ ID NO: 4058

SEQ ID NO: 11700 - protein, 250 aa, Escherichia coli; identical to SEQ ID NO: 3048

SEQ ID NO: 11701 - protein, 226 aa, Escherichia coli; identical to SEQ ID NO: 3085

SEQ ID NO: 11702 - protein, 213 aa, Escherichia coli; identical to SEQ ID NO: 2232

SEQ ID NO: 11703 - protein, 432 aa, Escherichia coli; identical to SEQ ID NO: 2026

SEQ ID NO: 11704 - protein, 446 aa, Escherichia coli; identical to SEQ ID NO: 2180

SEQ ID NO: 11705 - protein, 715 aa, Escherichia coli; identical to SEQ ID NO: 3971

SEQ ID NO: 11706 - protein, 193 aa, Escherichia coli; identical to SEQ ID NO: 2250

SEQ ID NO: 11707 - protein, 122 aa, Escherichia coli; identical to SEQ ID NO: 2915

SEQ ID NO: 11708 - protein, 478 aa, Escherichia coli; identical to SEQ ID NO: 2409

SEQ ID NO: 11709 - protein, 208 aa, Escherichia coli; identical to SEQ ID NO: 1949

SEQ ID NO: 11710 - protein, 367 aa, Escherichia coli; identical to SEQ ID NO: 4285

SEQ ID NO: 11711 - protein, 365 aa, Escherichia coli; identical to SEQ ID NO: 3878

SEQ ID NO: 11712 - protein, 660 aa, Escherichia coli; identical to SEQ ID NO: 4092

SEQ ID NO: 11713 - protein, 241 aa, Escherichia coli; identical to SEQ ID NO: 2887

SEQ ID NO: 11714 - protein, 232 aa, Escherichia coli; identical to SEQ ID NO: 2087

SEQ ID NO: 11715 - protein, 252 aa, Escherichia coli; identical to SEQ ID NO: 3543

SEQ ID NO: 11716 - protein, 614 aa, Escherichia coli; identical to SEQ ID NO: 1884

SEQ ID NO: 11717 - protein, 655 aa, Escherichia coli; identical to SEQ ID NO: 7517

SEQ ID NO: 11718 - protein, 224 aa, Escherichia coli; identical to SEQ ID NO: 3578

SEQ ID NO: 11719 - protein, 386 aa, Escherichia coli; identical to SEQ ID NO: 5143

SEQ ID NO: 11720 - protein, 518 aa, Escherichia coli; identical to SEQ ID NO: 2350

SEQ ID NO: 11721 - protein, 539 aa, Escherichia coli; identical to SEQ ID NO: 5109

SEQ ID NO: 11722 - protein, 514 aa, Escherichia coli; identical to SEQ ID NO: 8916

SEQ ID NO: 11723 - protein, 368 aa, Escherichia coli; identical to SEQ ID NO: 5102

SEQ ID NO: 11724 - protein, 118 aa, Escherichia coli [sequence omitted]

SEQ ID NO: 11725 - protein, 678 aa, Escherichia coli; identical to SEQ ID NO: 6376

SEQ ID NO: 11726 - protein, 660 aa, Escherichia coli; identical to SEQ ID NO: 6291

SEQ ID NO: 11727 - protein, 213 aa, Escherichia coli; identical to SEQ ID NO: 2232

SEQ ID NO: 11728 - protein, 165 aa, Escherichia coli; identical to SEQ ID NO: 5130

SEQ ID NO: 11729 - protein, 241 aa, Escherichia coli; identical to SEQ ID NO: 2890

SEQ ID NO: 11730 - protein, 859 aa, Escherichia coli; identical to SEQ ID NO: 5113

SEQ ID NO: 11731 - protein, 203 aa, Escherichia coli; identical to SEQ ID NO: 2201

SEQ ID NO: 11732 - protein, 241 aa, Escherichia coli; identical to SEQ ID NO: 2887

SEQ ID NO: 11733 - protein, 224 aa, Escherichia coli; identical to SEQ ID NO: 3578

SEQ ID NO: 11734 - protein, 200 aa, Escherichia coli; identical to SEQ ID NO: 1789

SEQ ID NO: 11735 - protein, 432 aa, Escherichia coli; identical to SEQ ID NO: 2026

SEQ ID NO: 11736 - protein, 193 aa, Escherichia coli; identical to SEQ ID NO: 2250

SEQ ID NO: 11737 - protein, 203 aa, Escherichia coli; identical to SEQ ID NO: 2009

SEQ ID NO: 11738 - protein, 828 aa, Escherichia coli; identical to SEQ ID NO: 2381

SEQ ID NO: 11739 - protein, 367 aa, Escherichia coli; identical to SEQ ID NO: 2431

SEQ ID NO: 11740 - protein, 274 aa, Escherichia coli; identical to SEQ ID NO: 2304

SEQ ID NO: 11741 - protein, 252 aa, Escherichia coli; identical to SEQ ID NO: 3543

SEQ ID NO: 11742 - protein, 860 aa, Escherichia coli; identical to SEQ ID NO: 3544

SEQ ID NO: 11743 - protein, 207 aa, Escherichia coli; identical to SEQ ID NO: 2211

SEQ ID NO: 11744 - protein, 713 aa, Escherichia coli; identical to SEQ ID NO: 3523

SEQ ID NO: 11745 - protein, 111 aa, Escherichia coli; identical to SEQ ID NO: 2911

SEQ ID NO: 11746 - protein, 859 aa, Escherichia coli; identical to SEQ ID NO: 4088

SEQ ID NO: 11747 - protein, 518 aa, Escherichia coli; identical to SEQ ID NO: 2351

SEQ ID NO: 11748 - protein, 838 aa, Escherichia coli; identical to SEQ ID NO: 2916

SEQ ID NO: 11749 - protein, 678 aa, Escherichia coli; identical to SEQ ID NO: 2902

SEQ ID NO: 11750 - protein, 567 aa, Escherichia coli; identical to SEQ ID NO: 3518

SEQ ID NO: 11751 - protein, 446 aa, Escherichia coli; identical to SEQ ID NO: 2180

SEQ ID NO: 11752 - protein, 237 aa, Escherichia coli; identical to SEQ ID NO: 2816

SEQ ID NO: 11753 - protein, 696 aa, Escherichia coli; identical to SEQ ID NO: 4038

SEQ ID NO: 11754 - protein, 871 aa, Escherichia coli; identical to SEQ ID NO: 3519

SEQ ID NO: 11755 - protein, 236 aa, Escherichia coli; identical to SEQ ID NO: 3970

SEQ ID NO: 11756 - protein, 241 aa, Escherichia coli; identical to SEQ ID NO: 3582

SEQ ID NO: 11757 - protein, 162 aa, Escherichia coli; identical to SEQ ID NO: 1969

SEQ ID NO: 11758 - protein, 863 aa, Escherichia coli; identical to SEQ ID NO: 3946

SEQ ID NO: 11759 - protein, 430 aa, Escherichia coli; identical to SEQ ID NO: 2617

SEQ ID NO: 11760 - protein, 368 aa, Escherichia coli; identical to SEQ ID NO: 2370

SEQ ID NO: 11761 - protein, 249 aa, Escherichia coli; identical to SEQ ID NO: 5120

SEQ ID NO: 11762 - protein, 478 aa, Escherichia coli; identical to SEQ ID NO: 2409

SEQ ID NO: 11763 - protein, 660 aa, Escherichia coli; identical to SEQ ID NO: 4092

SEQ ID NO: 11764 - protein, 331 aa, Escherichia coli; identical to SEQ ID NO: 2705

SEQ ID NO: 11765 - protein, 351 aa, Escherichia coli; identical to SEQ ID NO: 2872

SEQ ID NO: 11766 - protein, 170 aa, Escherichia coli; identical to SEQ ID NO: 2564

SEQ ID NO: 11767 - protein, 790 aa, Escherichia coli; identical to SEQ ID NO: 5114

SEQ ID NO: 11768 - protein, 200 aa, Escherichia coli; identical to SEQ ID NO: 5121

SEQ ID NO: 11769 - protein, 221 aa, Escherichia coli
MQVQASVVLGGTRIIYPSNQNEVQITLKNKDAYARYLVQSWVSNIDGSKAPFLITPPVYKLEENRQTLLHIVFTGDKDKLPQDRESLFLANVKSVSAMPEELKDKNILQFAMKARLKLFWRPVSLDNNDALTAWEKLKFHKEAGKLIVKNPTPFYISFNDLTVSGKNIVPVDTKSEPGALLMMVGPFSEQRFSLPAGAGNVVEWSVITDYGSSSGKRKQKL

SEQ ID NO: 11770 - protein, 731 aa, Escherichia coli; identical to SEQ ID NO: 6297

SEQ ID NO: 11771 - protein, 161 aa, Escherichia coli; identical to SEQ ID NO: 2582

SEQ ID NO: 11772 - protein, 193 aa, Escherichia coli; identical to SEQ ID NO: 2246

SEQ ID NO: 11773 - protein, 111 aa, Escherichia coli; identical to SEQ ID NO: 5097

SEQ ID NO: 11774 - protein, 446 aa, Escherichia coli; identical to SEQ ID NO: 2177

SEQ ID NO: 11775 - protein, 331 aa, Escherichia coli; identical to SEQ ID NO: 5128

SEQ ID NO: 11776 - protein, 760 aa, Escherichia coli; identical to SEQ ID NO: 5104

SEQ ID NO: 11777 - protein, 274 aa, Escherichia coli; identical to SEQ ID NO: 2301

SEQ ID NO: 11778 - protein, 641 aa, Escherichia coli; identical to SEQ ID NO: 6206

SEQ ID NO: 11779 - protein, 746 aa, Escherichia coli; identical to SEQ ID NO: 5132

SEQ ID NO: 11780 - protein, 191 aa, Escherichia coli; identical to SEQ ID NO: 2727

SEQ ID NO: 11781 - protein, 700 aa, Escherichia coli; identical to SEQ ID NO: 2926

SEQ ID NO: 11782 - protein, 430 aa, Escherichia coli; identical to SEQ ID NO: 2617

SEQ ID NO: 11783 - protein, 203 aa, Escherichia coli; identical to SEQ ID NO: 2007

SEQ ID NO: 11784 - protein, 565 aa, Escherichia coli; identical to SEQ ID NO: 5118

SEQ ID NO: 11785 - protein, 236 aa, Escherichia coli; identical to SEQ ID NO: 3482

SEQ ID NO: 11786 - protein, 356 aa, Escherichia coli
MKLITVFFSFVLLSFFSPAYAVSESEARRVEMSMDNAPLPQVISMVWQRVFNRPYQLSPDIAGDTRLVSFYLSKNQEPRSFFISYLKRLNISVTSMKDGVDYISVIKQTEQKVPDVVFTYRPKYRSVSYLSAMLNSVVSSGAFSNHIQSVDYLSGGVSGITTTDSASTRMSIATDAEVLVYSGPAASVRQIEKILPRIDVPAEQVTVSGYVLEVQTTDRNATGLQIIADLFRNKLGMSVGARLDGGNSFTLNVGGLNAFYSLIKEDSRFNVVSNPRLTVLSGSKSQFTVGQEVPVLDSVSYQGSSGTPVQSVTYRNSGAIFTVTPVVLDGLITLDISQQLSDFCKRQRQALTPARH

SEQ ID NO: 11787 - protein, 700 aa, Escherichia coli; identical to SEQ ID NO: 5110

SEQ ID NO: 11788 - protein, 826 aa, Escherichia coli; identical to SEQ ID NO: 5098

SEQ ID NO: 11789 - protein, 371 aa, Escherichia coli; identical to SEQ ID NO: 5126

SEQ ID NO: 11790 - protein, 162 aa, Escherichia coli; identical to SEQ ID NO: 1965

SEQ ID NO: 11791 - protein, 207 aa, Escherichia coli; identical to SEQ ID NO: 2212

SEQ ID NO: 11792 - protein, 208 aa, Escherichia coli; identical to SEQ ID NO: 1948

SEQ ID NO: 11793 - protein, 200 aa, Escherichia coli; identical to SEQ ID NO: 1785

SEQ ID NO: 11794 - protein, 686 aa, Escherichia coli; identical to SEQ ID NO: 9611

SEQ ID NO: 11795 - protein, 224 aa, Escherichia coli; identical to SEQ ID NO: 6030

SEQ ID NO: 11796 - protein, 191 aa, Escherichia coli; identical to SEQ ID NO: 2727

SEQ ID NO: 11797 - protein, 232 aa, Escherichia coli; identical to SEQ ID NO: 2087

SEQ ID NO: 11798 - protein, 711 aa, Escherichia coli; identical to SEQ ID NO: 5144

SEQ ID NO: 11799 - protein, 229 aa, Escherichia coli; identical to SEQ ID NO: 4047

SEQ ID NO: 11800 - protein, 871 aa, Escherichia coli; identical to SEQ ID NO: 6388

SEQ ID NO: 11801 - protein, 237 aa, Escherichia coli; identical to SEQ ID NO: 3793

SEQ ID NO: 11802 - protein, 224 aa, Escherichia coli; identical to SEQ ID NO: 3604

SEQ ID NO: 11803 - protein, 355 aa, Escherichia coli; identical to SEQ ID NO: 5115

SEQ ID NO: 11804 - protein, 659 aa, Escherichia coli; identical to SEQ ID NO: 2942

SEQ ID NO: 11805 - protein, 266 aa, Escherichia coli; identical to SEQ ID NO: 1892

SEQ ID NO: 11806 - protein, 412 aa, Escherichia coli; identical to SEQ ID NO: 2908

SEQ ID NO: 11807 - protein, 270 aa, Escherichia coli
MAGISYDWRDSVEAKKHEKDGSITHYDDNNQSAFNWQVMGKYHFANEDTLALSYYDRTRFPTLKERYTTSKPAYNQIAIVNPQLKPERARGVDLTWNGAFTHDWGFEVSVYYNRVSDAILSHNIDADTIQNQNSGTVDYSGLDAGIKGKISNILDVGLSYALIHADAKRKDIGKINDLPTQTMTAWMTLKPWEPLSVTLSEEARSSSYSNSDGSQKAAGFAVTHIRADYTLGHGFSVNASVNNLFDTKYAYSEGFIEEGRNFWAGIEYTF

SEQ ID NO: 11808 - protein, 359 aa, Escherichia coli; identical to SEQ ID NO: 2332

SEQ ID NO: 11809 - protein, 122 aa, Escherichia coli; identical to SEQ ID NO: 2915

SEQ ID NO: 11810 - protein, 234 aa, Escherichia coli
MNIFAYLLVLVFSMSMSSSAFASVVMTGTRIIFPGDAKGKKTIQLRNTSDQPYIINIHVEDERGSDKNVPFMPTPQTFRMEAAAGQALRLLYTGNNLPQDRESVFWFSFSQLPYLNKNDKSQNQLILALTNRVKIFYRPSSIVGKSSDAPKNLTYQVKQNRIEVTNPTGYYVTIRAAELLNNGKKVPLANSVMIAPQSTTEWTLPSGISVAPGAQIHLVTVNDYGVNVTSEHAL

SEQ ID NO: 11811 - protein, 856 aa, Escherichia coli; identical to SEQ ID NO: 5125

SEQ ID NO: 11812 - protein, 432 aa, Escherichia coli; identical to SEQ ID NO: 2026

SEQ ID NO: 11813 - protein, 869 aa, Escherichia coli; identical to SEQ ID NO: 2903

SEQ ID NO: 11814 - protein, 266 aa, Escherichia coli; identical to SEQ ID NO: 5141

SEQ ID NO: 11815 - protein, 539 aa, Escherichia coli; identical to SEQ ID NO: 3050

SEQ ID NO: 11816 - protein, 229 aa, Escherichia coli
MMKKKFIALTLWVLISQSALASGVGLSSTRVIYDGNKKEASLTVQNKNKSEEFLIQSWVDDATGSKKTPFIITPPLFKLEPGKNNILRIVNVNPSLPQDRESVYWVNVKAIPSQNEENEGKNVLQIAVRTRIKLFYRPAGLKGDIKSSPGELRFTRNGKQIKVDNPTVFNITFSDVFINGHEIEKSGMVPAKGALNIYLPAGVNSASQIKYNTINDFGSSGEYLTREIN

SEQ ID NO: 11817 - protein, 826 aa, Escherichia coli; identical to SEQ ID NO: 3563

SEQ ID NO: 11818 - protein, 208 aa, Escherichia coli; identical to SEQ ID NO: 1949

SEQ ID NO: 11819 - protein, 729 aa, Escherichia coli; identical to SEQ ID NO: 2948

SEQ ID NO: 11820 - protein, 351 aa, Escherichia coli; identical to SEQ ID NO: 4688

SEQ ID NO: 11821 - protein, 729 aa, Escherichia coli
MLSTQFNRDNQHQTTSKPSLLAACIALALLPSAAFAAPATEETVIVEGSATTPVDDENDYSVTSTSAGTKMQMTQRDIPQSVTIVSQQRMEDQQLQTLGEVMENTLGISKSQADSDRALYYSRGFQIDNYMVDGIPTYFESRWNLGDALSDMALFERVEVVRGATGLMTGTGNPSAAINMVRKHATSREFKGDVSAEYGSWNKERYVADLQSPLTEDGKIRARIVGGYQNNDSWLDRYNSEKTFFSGIVDADLGDLTTLSAGYEYQRIDVNSPTWGGLPRWNTDGSGNSYDRARSTAPDWAYNDKEINKVFMTLKQRFADTWQATLNATHSEVEFDSKMMYVDAYVNKADGMLVGPYSNYGPGFDYVGGTGWNSGKRKVDALDLFADGSYELFGRQHNLMFGGSYSKQNNRYFSSWANIFPDEIGSFYNFNGNFPQTDWSPQSLAQDDTTHMKSLYAATRVTLADPLHLILGARYTNWRVDTLTYSMEKNHTTPYAGLVFDINDNWSTYASYTSIFQPQKDRDSSGKYLAPITGNNYELGLKSDWMNSRLTTTLAIFRIEQDNVAQYTGTPIPGSNGETAYKAVDGTVSKGVEFELNGAITDNWQLTFGATRYIAEDNEGNAVNPNLPRTTIKMFTSYRLPVMPELTVGGGVNWQNRVYTDTVTPYGTFRAEQGSYALVDLFTRYQVTKNFSLQGNVNNLFDKTYDTNVEGSIVYGAPRNFSITGTYQF

SEQ ID NO: 11822 - protein, 879 aa, Escherichia coli; identical to SEQ ID NO: 5138

SEQ ID NO: 11823 - protein, 359 aa, Escherichia coli; identical to SEQ ID NO: 2329

SEQ ID NO: 11824 - protein, 774 aa, Escherichia coli; identical to SEQ ID NO: 3426

SEQ ID NO: 11825 - protein, 89 aa, Escherichia coli; identical to SEQ ID NO: 2812

SEQ ID NO: 11826 - protein, 229 aa, Escherichia coli; identical to SEQ ID NO: 3589

SEQ ID NO: 11827 - protein, 227 aa, Escherichia coli; identical to SEQ ID NO: 3570

SEQ ID NO: 11828 - protein, 517 aa, Escherichia coli; identical to SEQ ID NO: 2462

SEQ ID NO: 11829 - protein, 232 aa, Escherichia coli; identical to SEQ ID NO: 2087

SEQ ID NO: 11830 - protein, 998 aa, Escherichia coli; identical to SEQ ID NO: 3056

SEQ ID NO: 11831 - protein, 89 aa, Escherichia coli; identical to SEQ ID NO: 2810

SEQ ID NO: 11832 - protein, 746 aa, Escherichia coli; identical to SEQ ID NO: 2949

SEQ ID NO: 11833 - protein, 655 aa, Escherichia coli; identical to SEQ ID NO: 7517

SEQ ID NO: 11834 - protein, 512 aa, Escherichia coli; identical to SEQ ID NO: 2813

SEQ ID NO: 11835 - protein, 715 aa, Escherichia coli; identical to SEQ ID NO: 3971

SEQ ID NO: 11836 - protein, 747 aa, Escherichia coli; identical to SEQ ID NO: 2954

SEQ ID NO: 11837 - protein, 230 aa, Escherichia coli; identical to SEQ ID NO: 2995

SEQ ID NO: 11838 - protein, 213 aa, Escherichia coli; identical to SEQ ID NO: 2232

SEQ ID NO: 11839 - protein, 614 aa, Escherichia coli; identical to SEQ ID NO: 1883

SEQ ID NO: 11840 - protein, 243 aa, Escherichia coli; identical to SEQ ID NO: 3561

SEQ ID NO: 11841 - protein, 366 aa, Escherichia coli; identical to SEQ ID NO: 3520

SEQ ID NO: 11842 - protein, 863 aa, Escherichia coli; identical to SEQ ID NO: 8025

SEQ ID NO: 11843 - protein, 866 aa, Escherichia coli; identical to SEQ ID NO: 8338

SEQ ID NO: 11844 - protein, 266 aa, Escherichia coli; identical to SEQ ID NO: 1894

SEQ ID NO: 11845 - protein, 207 aa, Escherichia coli; identical to SEQ ID NO: 2211

SEQ ID NO: 11846 - protein, 826 aa, Escherichia coli; identical to SEQ ID NO: 7491

SEQ ID NO: 11847 - protein, 900 aa, Escherichia coli
MKLNIFTKSMIGMGLVCSALPALAMEAWNNQQGGNKYQVIFDGKIYENAWWVSSTNCPGKAKANDATNPWRLKRTATAAEISQFGNTLSCEKSGSSSSSTSNTPASNTPANGGSATPAQGTVPSNSSVVAWNKQQGGQTWYVVFNGAIYKNAWWVASSNCPGDAKGNDASNPWRYVRAATATEISETSNPQSCTSAPQPAPDVKPAPDVKPAPDVQPAPADKSNDNYAVVAWKGQEGSSTWYVIYNGGIYKNAWWVGAANCPGDAKENDASNPWRYVRAATATEITQYGNPASCSVKPDNNGGAVTPVDPTPETPETPVTPTLDNNEPSTPADSSNDYSLQAWSGQEGSEIYHVIFNGNVYQNAWWVGSEDCPRGTSVENSNNPWRLVRTATAAEMSQYGNPTTCEIDNGGVIIADGFQASKAYSANSIVDYNDAHYKTSVDQDAWSFVPGGDNPWKKYEPAKAWSASTVYVKGDRVVVDGQAYEALFWTQSDNPALIANQNATGSNSRPWKPLGKTQSYSNEELNNAPQFNPETLYASDTLIRFNGENYISQSKVQKVSPSDSNPWRVFVDWTGTKERVGTPKKAWPKHVYAPYVDFTLNTIPDLAALAKNHNVNHFTLAFVVSKDANTCLPTWGTAYGMQNYAQYSKIKALREAGGDVMLSIGGANNAPLAASCKNVDDLMQHYYDIVDNLNLRVLDFDIEGTWVADQASIERRNLAVKKVQDKWKSEGKDIAIWYTLPILPTGLTPEGMNVLSDAKAKGVELAGVNVMTMDYGNAICQSANTEGQNIHGKCATSAIANLHAQLKGLFGNKSDAEIDAMMGTTPMVGVNDVQGEVFYLSDARLVMQDAQKRNLGMVGIWSIARDLPGGTNLSPEFHGLTKEQAPKYAFSEIFAPFTKQ

SEQ ID NO: 11848 - protein, 882 aa, Escherichia coli
MPNHSNFRLRGIACYIALAISGGSVNAWADDSIQFDPRFLELKGDTKIDLGKFSKKGYVDAGKYNLRVFINKHPLSDEYDINWYVSENDPTKNYACLTPELVAALGLKEGIAKSLQWTHNDECLKPGQLDGMEVENDLSQSALLLTVPQAYLEYTSSDWDPPSRWDDGIPGLIADYSLNAQTRHQEQGGEDSHDISGNGTVGANLGAWRFRADWQSDYQHTRSNDDDDDSSNSTTSKHWDWSRYYAWRALPSLKAKLSLGEDYLNSDIFDGFNYIGSSVSTDDQMLPPNLRGYAPDVSGVAHSSAKVTISQMGRVLYETQVPAGPFRIQDIGDSVSGTLHVRVEEQNGQVQEYDVTTASMPFLTRQGQVRYKVMMGRPEDWNHKTEGGFFSGGEASWGVADGWSLYGGALADKHYQSAAMGVGRDLAQFGALAFDVTHSHVNLDHDSAYGKGKLDGNSFRVSYAKDFDELNSRVTFAGYRFSEKNFMTMSEYLDANQSDMARTGNDKEMYTITYNQNFAAAGVSIYLNYSHRTYWDRPEQTNYNLMFSHYFNMGSIRNMSISVTGYRYEYDDNADKGMYLSMSIPWSDSSTVTYNGSYGSGSDSSQVGYFKRVDDATHYQVNVGTSEQHGSVDGYLSHDGSLAKVDLSANYHEGEYRSAGIALQGGATLTAHGGALHRTQNMGGTRLLIDADGIANVPVESNGAPVYTNMFGKAVVADINNYYRNQAYIDLNNLPEDAEATQSVVQATLTEGAIGYRKFKVISGQKAMAVLRLRDGSYPPFGAEVKNDEQQQVGIVDDEGNVYLAGVNAGEHMMVFWEGSAQCEIVLPKPLPADLFSGLLLPCEQKGTAAPDSSAPEIKPVIQDQTRQVTPTEAPTSISATQ

SEQ ID NO: 11849 - protein, 840 aa, Escherichia coli
MNNKNTFSRDKLSHAIKNALSGVVCSLLFVLPVHAVEFNVDMIDAEDRENIDISRFEKKGYIPPGRYLVRVQINKNMLPQTLILEWVKADNESGSLLCLTKENLTNFGLNTEFIESLQNIAGSECLDLSQRQELTTRLDKATMILSLSVPQAWLKYQATNWTPPEFWDTGITGFILDYNVYASQYAPHHGDSTQNVSSYGTLGFNLGAWRLRSDYQYNQNFADGRSVNRDSEFARTYLFRPIPSWSSKFTMGQYDLSSNLYDTFHFTGASLESDESMLPPDLQGYAPQITGIAQTNAKVTVAQNGRVLYQTTVAPGPFTISDLGQSFQGQLDVTVEEEDGRTSTFQVGSASIPYLTRKGQVRYKTSLGKPTSVGHNDINNPFFWTAEASWGWLNNVSLYGGGMFTADDYQAITTGIGFNLNQFGSLSFDVTGADASLQQQNSGNLRGYSYRFNYAKHFESTGSQITFAGYRFSDKDYVSMSEYLSSRNGDESIDNEKESYVISLNQYFETLELNSYLNVTRNTYWDSTSNTNYSVSVSKNFDIGDFKGISASLAVSRIRWDDDEENQYYFSFSLPLQQNRNISYSMQRTGSSNTSQMISWYDSSDRNNIWNISASATDDNIRDGEPTLRGSYQHYSPWGRLNINGSVQPNQYNSVTAGWYGSLTATRHGVALHDYSYGDNARMMVDTDGISGIEINSNRTVTNGLGIAVIPSLSNYTTSMLRVNNNDLPEGVDVENSVIRTTLTQGAIGYAKLNATTGYQIVGVIRQENGRFPPLGVNVTDKATGKDVGLVAEDGFVYLSGIQENSTLHLTWGDNTCEVTPPNQSNISESAIILPCKTVK

SEQ ID NO: 11850 - protein, 368 aa, Escherichia coli; identical to SEQ ID NO: 5102

SEQ ID NO: 11851 - protein, 856 aa, Escherichia coli; identical to SEQ ID NO: 5125

SEQ ID NO: 11852 - protein, 386 aa, Escherichia coli; identical to SEQ ID NO: 5143

SEQ ID NO: 11853 - protein, 660 aa, Escherichia coli; identical to SEQ ID NO: 6291

SEQ ID NO: 11854 - protein, 859 aa, Escherichia coli; identical to SEQ ID NO: 5113

SEQ ID NO: 11855 - protein, 208 aa, Escherichia coli; identical to SEQ ID NO: 1948

SEQ ID NO: 11856 - protein, 798 aa, Escherichia coli; identical to SEQ ID NO: 8775

SEQ ID NO: 11857 - protein, 731 aa, Escherichia coli; identical to SEQ ID NO: 6297

SEQ ID NO: 11858 - protein, 826 aa, Escherichia coli; identical to SEQ ID NO: 5098

SEQ ID NO: 11859 - protein, 862 aa, Escherichia coli
MTIKSTNHLTHIATFCALLYSNSALCAELVEYDHTFLMGKDASNIDLSRYTEGNPTLPGIYDVSVYVNDQPIMSQSIAFAVIEGKKNAQACITQKNLLQFHISSPDKNSEKAILLKRDDDLGDCLNLAEMIPQSSIRYDVNDQRLDIDVPQAWIMKNYQNYVDPSLWENGINAAMLSYNLNGYHSESPGRTNDSIYAAFNGGINLGAWRLRASGNYNWMTNVHSDYDFQNRYLQRDLASLRSQLVIGESYTTGETFDSVSIRGIRLYSDSRMLPPVLASFAPIIHGVANTNAKVTVMQNGYKIYETTVPPGAFAIDDLSPSGYGSDLIVTIEEADGTKRTFSQPFSSVVQMLRPGVGRWDISAGQVLKDSIQDEPNLFQASYYYGLNNYLTGYTGIQLTDNNYTAGLLGLGMNTPVGAFSVDVTHSNVSIPDDKTYQGQSYRISWNKLFENTSTSLNIAAYRYSTQHYLGLNDALTLIDEVEHPEQDLEPKSMRNYSRMKNQVTVSINQPLKFEKKDYGSFYLSGSWSDYWASGQNSTNYSIGYSNSASWGSYSISAQRSLNEDGQTDDSIYLSFTIPIENLLGTEHRSSGFQSIDTQLNSDFKGNNQLNISSSGYSDTNRISYSVNTGYMMNKSSDDLSYIGGYASYESPWGTLSGSASASSDNSRQFSLNTDGGFVLHSGGLTFSNDSFSDSDTLAVIQAPGAKGARINYGNSTVDRWGYGVTSALSPYHENRIALDINDLENDVELKSTSTVAVPRQGAVVFADFETVQGQSAIMNIVRSDGKNIPFAADIYDEQNNIIGNVGQGGQAFVRGIAQEGNIRITWIEEGKPVSCFAHYQQNTTSEKIAQSIILNGLRCQIQ

SEQ ID NO: 11860 - protein, 837 aa, Escherichia coli
MEQMYKKLKLTTISELIKNIYCSLSVLIIGCASAYAVEFNKDLIEAEDRENVNLSQFETDGQLPVGKYSLNALINNKRTPIHLDLQWVLIDNQTAVCLTPEQLTLLGFTDEIIEVAQQNLIDGCYPIEKEKQITTYLDKGKMQLSISAPQAWLKYKDANWTPPELWDHGIAGAFLDYNLYASHYAPHQGDNSQNISSYGQAGVNLGAWRLRTDYQYDQSFNNGKSQANNLDFPRIYLFRPIPAINAKLTIGQYDTESSIFDSFHFSGVSLKSDENMLPPDLRGYAPQITGVAQTNAKVTVSQNNRIIYQENVPPGPFAITNLFNTLQGQLDVKVEEEDGQVTQWQVASDSIPYLTRKGQIRYTTAMGKPTSVGGDSLQQPFFWTGEFSWGWLNNVSLYGGSVLTNRDYQSLAAGVGFNLNSLGSLSFDVTRSDAQLHNQDKETGYSYRANYSKRFESTGSQLTFAGYRFSDKNFVTMNEYINDTNHYTNYQNEKESYIVTFNQYLESLRLNTYVSLARNTYWDASSNVNYSLSLSRDFDIGPLKNVSTSLTFSRINWEEDNQDQLYLNISIPWGTSRTLSYGMQRNQDNKISHTASWYDSSDRNNSWSVSASGDNDEFKDMKASLRASYQHNTENGRLYLSGTSQRDSYYSLNASWNGSFTATRHGAAFHDYSGSADSRFMIDADGAEDIPLNNKRAVTNRYGIGVIPSVSSYITTSLSVDTRNLPENVDIENSVITTTLTEGAIGYAKLDTRKGYQIMGVIRLADGSHPPLGISVKDKTSHKELGLVADGGFVYLNGIQDDSKLTLRWGDKSCFIQPPNSSNLTTGTVILPCISQN

SEQ ID NO: 11861 - protein, 351 aa, Escherichia coli; identical to SEQ ID NO: 4688

SEQ ID NO: 11862 - protein, 237 aa, Escherichia coli; identical to SEQ ID NO: 3793

SEQ ID NO: 11863 - protein, 200 aa, Escherichia coli; identical to SEQ ID NO: 1785

SEQ ID NO: 11864 - protein, 678 aa, Escherichia coli; identical to SEQ ID NO: 6376

SEQ ID NO: 11865 - protein, 274 aa, Escherichia coli; identical to SEQ ID NO: 2301

SEQ ID NO: 11866 - protein, 879 aa, Escherichia coli; identical to SEQ ID NO: 5138

SEQ ID NO: 11867 - protein, 241 aa, Escherichia coli; identical to SEQ ID NO: 2890

SEQ ID NO: 11868 - protein, 430 aa, Escherichia coli; identical to SEQ ID NO: 2617

SEQ ID NO: 11869 - protein, 161 aa, Escherichia coli; identical to SEQ ID NO: 2582

SEQ ID NO: 11870 - protein, 318 aa, Escherichia coli
MAVKISGVLKDGTGKPVENCTIQLKARRTSSTVVVNTVASENPDEAGRYSMDVEYGQYSVILLVEGFPPSHAGTITVYEDSQPGTLNDFLGAMSEDDVRPEALRRFELMVEEVARHAEEAKKNAGEAETSARNAGISASQAEESAANADTSAGEASESARQAAESAASAKQSEDASSSSASAAAQKASESSQSAAEAELSRKTAESAAGNAARDATTATEKARESAESAQSAEQSRIAAEEAVNRIPTVVGPPGPKGEPGPAGPQGPKGDKGERGDTGPAGATGERGPAGDAGPAGPQGPKGDRGERGETGLTGNAGP

SEQ ID NO: 11871 - protein, 191 aa, Escherichia coli; identical to SEQ ID NO: 2727

SEQ ID NO: 11872 - protein, 232 aa, Escherichia coli; identical to SEQ ID NO: 2087

SEQ ID NO: 11873 - protein, 729 aa, Escherichia coli; identical to SEQ ID NO: 5131

SEQ ID NO: 11874 - protein, 359 aa, Escherichia coli; identical to SEQ ID NO: 2329

SEQ ID NO: 11875 - protein, 203 aa, Escherichia coli; identical to SEQ ID NO: 2007

SEQ ID NO: 11876 - protein, 656 aa, Escherichia coli; identical to SEQ ID NO: 5108

SEQ ID NO: 11877 - protein, 407 aa, Escherichia coli; identical to SEQ ID NO: 6407

SEQ ID NO: 11878 - protein, 368 aa, Escherichia coli; identical to SEQ ID NO: 7478

SEQ ID NO: 11879 - protein, 203 aa, Escherichia coli; identical to SEQ ID NO: 2201

SEQ ID NO: 11880 - protein, 249 aa, Escherichia coli; identical to SEQ ID NO: 5120

SEQ ID NO: 11881 - protein, 170 aa, Escherichia coli; identical to SEQ ID NO: 2564

SEQ ID NO: 11882 - protein, 774 aa, Escherichia coli; identical to SEQ ID NO: 3426

SEQ ID NO: 11883 - protein, 331 aa, Escherichia coli; identical to SEQ ID NO: 5128

SEQ ID NO: 11884 - protein, 165 aa, Escherichia coli; identical to SEQ ID NO: 5130

SEQ ID NO: 11885 - protein, 111 aa, Escherichia coli; identical to SEQ ID NO: 5097

SEQ ID NO: 11886 - protein, 207 aa, Escherichia coli; identical to SEQ ID NO: 2223

SEQ ID NO: 11887 - protein, 565 aa, Escherichia coli; identical to SEQ ID NO: 5118

SEQ ID NO: 11888 - protein, 355 aa, Escherichia coli; identical to SEQ ID NO: 5115

SEQ ID NO: 11889 - protein, 371 aa, Escherichia coli; identical to SEQ ID NO: 5126

SEQ ID NO: 11890 - protein, 518 aa, Escherichia coli; identical to SEQ ID NO: 2350

SEQ ID NO: 11891 - protein, 686 aa, Escherichia coli; identical to SEQ ID NO: 9611

SEQ ID NO: 11892 - protein, 631 aa, Escherichia coli
MVVTASSVEQNLKDAPASISVITQEDLQRKPVQNLKDVLKEVPGVQLTNEGDNRKGVSIRGLDSSYTLILVDGKRVNSRNAVFRHNDFDLNWIPVDSIERIEVVRGPMSSLYGSDALGGVVNIITKKIGQKWSGTVTVDTTVQEHRDRGDTYNGQFFTSGPLIDGVLGMKAYGSLAKREKDDPQNSTTTDTRETPRIEGFSSRDGNVEFAWTPNQNHDFTAGYGFDRQDRDSDSLDKNRLERQNYSVSHNGRWDYGTSELKYYGEKIENKNPGNSSPITSESNTVDGKYTLPLTAINQFLTVGGEWRHDKLSDAVNLTGGTSSKTSASQYALFVEDEWRIFEPLALTTGVRMDDHETYGEHWSPRAYLVYNATDTVTVKGGWATAFKAPSLLQLSPDWTSNSCRGACKIVGSPDLKPETSESWELGLYYMGEEGWLEGVESSVTVFRNDVKDRISISRTSDVNAAPGYQNFVGFETGANGRRIPVFSYYNVNKARIQGVETELKIPFNDEWKLSINYTYNDGRDVSNGENKPLSDLPFHTANGTLDWKPLALEDWSFYVSGHYTGQKRADSATAKTPGGYTIWNTGAAWQVTKDVKLRAGVLNLGDKDLSRDDYSYNEDGRRYFMAVDYRF

SEQ ID NO: 11893 - protein, 432 aa, Escherichia coli; identical to SEQ ID NO: 2026

SEQ ID NO: 11894 - protein, 711 aa, Escherichia coli; identical to SEQ ID NO: 5144

SEQ ID NO: 11895 - protein, 162 aa, Escherichia coli; identical to SEQ ID NO: 1965

SEQ ID NO: 11896 - protein, 229 aa, Escherichia coli; identical to SEQ ID NO: 11816

SEQ ID NO: 11897 - protein, 539 aa, Escherichia coli; identical to SEQ ID NO: 5109

SEQ ID NO: 11898 - protein, 266 aa, Escherichia coli; identical to SEQ ID NO: 5141

SEQ ID NO: 11899 - protein, 826 aa, Escherichia coli
MLRMTPLASAIVALLIGIEAYAAEETFDTHFMIGGMKDQQVSNIRLEDNQPLPGQYDIDIYVNKQWRGKYEIIVKDNPQETCLSREMIKRLGINTDSFASGKQCLTFKQLIQGGSYTWDIGVFRLDFSVPQAWVEELESGYVPPENWERGINAFYTSYYMSQYYSDYKASGNSKSTYVRFNSGLNLLGWQLHSDASFSKTNNNPGVWKSNTLYLERGFAQLLGTLRVGDMYTSSDIFDSVRFSGVRLFRDMQMLPNSKQNFTPRVQGIAQSNALVTIEQNGFVVYQKEVPPGPFAITDLQLAGGGADLDVSVKEADGSVTTYLVPYAAVPNMLQPGVSKYDFAAGRSHIEGASKQSDFVQVGHQYGFNNLLTLYGGSMVANNYYAFTLGTGWNTRIGAISVDATKSHSKQDNGDVFDGQSYQIAYNKFVSQTSTRFGLAAWRYSSRDYRTFNDHVWANNKDNYRRDENDIYDIADYYQNDFGRKNSFSANMSQSLPEGWGSVSLSTLWRDYWGRSGSSKDYQLSYSNNLRRISYTLAASHAYDENHHEEKRFNIFISIPFDWGDDVTTPRRQIYMSNSTTFDDQGVASNNTGLSGTVGSRDQFNYGVNLSYQYQGNETTAGANLTWNAPVATVNGSYSQSSAYRQAGASVSGGIVAWSGGVNLANRLSETFAVMNAPGIKDAYVNGQKYRTTNRNGVVVYDGMTPYRENYLMLDVSQSDSEAELRGNRKIAAPYRGAVVLVNFDTDQRKPWFIKALRADGQPLTFGYEVNDIHGHNIGVVGQGSQLFIRTNEVPPSVNVAIDKQQGLSCTITFGKEIDESRNYICQ

SEQ ID NO: 11900 - protein, 880 aa, Escherichia coli; identical to SEQ ID NO: 3110

SEQ ID NO: 11901 - protein, 118 aa, Escherichia coli [sequence omitted]

SEQ ID NO: 11902 - protein, 883 aa, Escherichia coli
MTAFRAAFKAYRMHQVLILPRFARLTFALGLATAVFPVDAEYYFNPRFLSNDLAESVDLSAFTKGREAPPGTYRVDIYLNDEFMASRDITFIADDNNADLIPCLSTDLLVSLGIKKSALLDNKEHSADKHVPDNSACTPLQDRLADASSEFDVGQQHLSLSVPQIYVGRMARGYVSPDLWEEGINAGLLNYSFNGNSINNRSNHNAGKSNYAYLNLQSGINIGSWRLRDNSTWSYNSGSSNSSDSNKWQHINTSAERDIIPLRSRLTVGDSYTDGDIFDSVNFRGLKINSTEAMLPDSQHGFAPVIHGIARGTAQVSVKQNGYDVYQTTVPPGPFTIDDINSAANGGDLQVTIKEADGSIQTLYVPYSSVPVLQRAGYTRYALAMGEYRSGNNLQSSPKFVQASLMHGLKGNWTPYGGMQIAEDYQAFNLGIGKDLGLFGAFSFDITQANTTLADDTRHSGQSVKSVYSKSFYQTGTNIQVAGYRYSTQGFYNLSDSAYSRMSGYTVKPPTGDTSEQTLFIDYFNLFYSKRGQEQISISQQLGNYGTTFFSASRQSYWNTSRSDQQISFGLNVPFGDITTSLNYSYSNNIWQNDRDHLLAFTLNVPFSHWMRTDSQSAFRNSNASYSMSNDLKGGMTNLSGVYGTLLPDNNLNYSVQVGNTQGGNTSSGTSGYSSLNYRGAYGNTNVGYSRSGDSSQIYYGMSGGIIAHADGITFGQPLGDTMVLVKAPGADNVKIENQTGIHTDWRGYAILPFATEYRENRVALNANSLADNVELDETVVTVIPTHGAIARATFNAKIGGKVLMTLKYGNKSVPFGAIVTHGENKNGSIVAENGQVYLTGLPQSGKLQVSWGNDKNSNCIVDYKLPVVSPGTLLNQQTAICR

SEQ ID NO: 11903 - protein, 161 aa, Escherichia coli; identical to SEQ ID NO: 2582

SEQ ID NO: 11904 - protein, 193 aa, Escherichia coli; identical to SEQ ID NO: 2246

SEQ ID NO: 11905 - protein, 184 aa, Escherichia coli
MQSWVSNIDGSKAPFLITPPVYKLEENRQTLLHIVFTGDKDKLPQDRESLFLANVKSVSAMPEELKDKNILQFAMKARLKLFWRPVSLDNNDALTAWEKLKFHKEAGKLIVKNPTPFYISFNDLTVSGKNIVPVDTKSEPGALLMMVGPFSEQRFSLPAGAGNVVEWSVITDYGSSSGKRKQKL

SEQ ID NO: 11906 - protein, 876 aa, Escherichia coli
MFFGDGGQLLSDKSLTGSAGGGNNRMKFNILPLAFFIGIIVSPARAELYFNPRFLSDDPDAVADLSAFTQGQELPPGVYRVDIYLNDTYISTRDVQFQMSQDGKQLAPCLSPEHMSAMGVNRYAVPGMERLPADTCTSLNSMIQGATFRFDVGQQRLYLTVPQLYMSNQARGYIAPEYWDNGITAALLNYDFSGNRVRDSYGGTSDYAYLNLKTGLNIGSWRLRDNTSWSYSAGKGYSQNNWQHINTWLERDIVSLRSRLTMGDSYTRGDIFDGVNFRGIQLASDDNMVPDSQRGYAPTIHGISRGTSRISIRQNGYEIYQSTLPPGPFEINDIYPAGSGGDLQVTLQEADGSVQRFNVPWSSVPVLQREGHLKYALSAGEFRSGGHQQDNPRFAEGTLKYGLPAGWTVYGGAWIAERYRAFNLGVGKNMGWLGAVSLDATRANARLPDESRHDGQSYRFLYNKSLTETGTNIQLIGYRYSTRGYFSFADTAWKKMSGYSVLTQDGVIQIQPKYTDYYNLAYNKRGRVQVSISQQTGESSTLYLSGSHQSYWGTDRTDRQLNAGFNSSVNDISWSLNYSLSRNAWQHETDRILSFDVSIPFSHWMRSDSTSAWRNASARYSQTLEAHGQAASTAGLYGTLLEDNNLGYSIQSGYTRGGYEGSSKTGYASLNYRGGYGNASAGYSHSGGYRQLYYGLSGGILAHANGLTLSQPLGDTLILVRAPGASDTRIENQTGVSTDWRGYAVLPYATDYRENRVALDTNTLADNVDIENTVVSVVPTHGAVVRADYKTRVGVKVLMTLMRNGKAVPFGSVVTARNGGSSIAGENGQVYLSGMPLSGQVSVKWGSQTTDQCTADYKLPKESAGQILSHVTVSCR

SEQ ID NO: 11907 - protein, 800 aa, Escherichia coli
MTSRDITFIADDNNADLIPCLSTDLLVSLGIKKSALLDNKEHSAEKHVPDNSACTPLQDRLADASTEFDVGQQHLSLSVPQIYVGRMARGYVSPELWEEGINAGLLNYSFNGNSINNRSNHNAGKSNYAYLNLQSGINIGSWRLRDNSTWSYNSGSSNSSNSNKWQHINTSAERDIIPLRSRLTVGDSYTDGDIFDSVNFRGLKINSTEAMLPDSQHGFAPVIHGIARGTAQVSVKQNGYDVYQTTVPPGPFTIDDINSAANGGDLQVTIKEADGSIQTLYVPYSSVPVLQRAGYTRYALAMGEYRSGNNLQSSPKFIQGSLMHGLEGNWTPYGGMQIAEDYQAFNLGIGKDLGLFGAFSFDITQANTTLADGTRHSGQSVKSVYSKSFYQTGTNIQVAGYRYSTQGFYNLSDSAYSRMSGYTVKPPTGDTNEQTQFIDYFNLFYSKRGQEQISISQQLGNYGTTFFSASRQSYWNTSRSDQQISFGLNVPFGDITTSLNYSYSNNIWQNDRDHLLAFTLNVPFSHWMRTDSQSAFRNSNASYSMSNDLKGGMTNLSGVYGTLLPDNNLNYSVQVGNTHGGNTSSGTSGYSSLNYRGAYGNTNVGYSRNGDSSQIYYGMSGGIIAHADGITFGQPLGDTMVLVKAPGADNVKIENQTGIHTDWRGYAILPFATEYRENRVALNANSLADNVELDETVVTVIPTLGAIARATFNAQIGGKVLMTLKYGNKSVPFGAIVTHGENKNGSIVAENGQVYLTGLPQSGKLQVSWGKDKNSNCIVEYKLPEVSPGTLLNQQTAICR

SEQ ID NO: 11908 - protein, 200 aa, Escherichia coli; identical to SEQ ID NO: 5121

SEQ ID NO: 11909 - protein, 368 aa, Escherichia coli; identical to SEQ ID NO: 2372

SEQ ID NO: 11910 - protein, 266 aa, Escherichia coli; identical to SEQ ID NO: 1894

SEQ ID NO: 11911 - protein, 700 aa, Escherichia coli; identical to SEQ ID NO: 5110

SEQ ID NO: 11912 - protein, 866 aa, Escherichia coli; identical to SEQ ID NO: 7592

SEQ ID NO: 11913 - protein, 660 aa, Escherichia coli; identical to SEQ ID NO: 8805

SEQ ID NO: 11914 - protein, 878 aa, Escherichia coli
MSYLNLRLYQRNTQCLHIRKHRLAGFFVRLFVACAFTAQAPLSSAELYFNPRFLADDPQAVADLSRFENGQELPPGTYRVDIYLNNGYMATRDVTFNTGDSEQGIVPCLTRAQLASMGLNTASVSGMNLLADDACVPLTSMIHDATAQLDVGQQRLNLTIPQAFMSNRARGYIPPELWDPGINAGLLNYNFSGNSVQNRIGGNSHYAYLNLQSGLNIGAWRLRDNTTWSYNSSDSSSGSKNKWQHINTWLERDIIPLRSRLTLGDGYTQGDIFDGINFRGAQLASDDNMLPDSQRGFAPVIHGIARGTAQVTIKQNGYDIYNSTVPPGPFTINDIYAAGNSGDLQVTIKEADGSTQIFTVPYSSVPLLQREGHTRYSITAGEYRSGNAQQEKPRFFQSTLLHGLPAGWTIYGGTQLADRYRAFNFGIGKNMGTLGALSVDMTQANSTLPDDSQHDGQSVRFLYNKSLNESGTNIQLVGYRYSTSGYFNFADTTYSRMNGYNIETQDGVIQVKPKFTDYYNLAYNKRGKLQLTVTQQLGRTSTLYLSGSHQTYWGTSNVDEQFQAGLNTAFEDINWTLSYSLTKNAWQKGRDQMLALNVNIPFSHWLRSDSKSQWRHASASYSMSHDLNGRMTNLAGVYGTLLEDNNLSYSVQTGYAGGGDGNSGSTGYATLNYRGGYGNANIGYSHSDDIKQLYYGVSGGVLAHANGVTLGQPLNDTVVLVKAPGAKDAKVENQTGVRTDWRGYAVLPYATEYRENRVALDTNTLADNVDLDNAVANVVPTRGAIVRAEFKARVGIKLLMTLTHNNKPLPFGAMVTSESSQSSGIVADNGQVYLSGMPLAGKVQVKWGEEENAHCVANYQLPPESQQQLLTQLSAECR

SEQ ID NO: 11915 - protein, 446 aa, Escherichia coli; identical to SEQ ID NO: 2177

SEQ ID NO: 11916 - protein, 207 aa, Escherichia coli; identical to SEQ ID NO: 2212

SEQ ID NO: 11917 - protein, 746 aa, Escherichia coli; identical to SEQ ID NO: 5132

SEQ ID NO: 11918 - protein, 213 aa, Escherichia coli; identical to SEQ ID NO: 2232

SEQ ID NO: 11919 - protein, 512 aa, Escherichia coli; identical to SEQ ID NO: 2973

SEQ ID NO: 11920 - protein, 213 aa, Escherichia coli; identical to SEQ ID NO: 2232

SEQ ID NO: 11921 - protein, 729 aa, Escherichia coli; identical to SEQ ID NO: 2948

SEQ ID NO: 11922 - protein, 231 aa, Escherichia coli; identical to SEQ ID NO: 3055

SEQ ID NO: 11923 - protein, 122 aa, Escherichia coli; identical to SEQ ID NO: 2915

SEQ ID NO: 11924 - protein, 365 aa, Escherichia coli; identical to SEQ ID NO: 3878

SEQ ID NO: 11925 - protein, 774 aa, Escherichia coli; identical to SEQ ID NO: 7443

SEQ ID NO: 11926 - protein, 446 aa, Escherichia coli; identical to SEQ ID NO: 5547

SEQ ID NO: 11927 - protein, 203 aa, Escherichia coli; identical to SEQ ID NO: 2009

SEQ ID NO: 11928 - protein, 249 aa, Escherichia coli; identical to SEQ ID NO: 3492

SEQ ID NO: 11929 - protein, 746 aa, Escherichia coli; identical to SEQ ID NO: 7482

SEQ ID NO: 11930 - protein, 362 aa, Escherichia coli; identical to SEQ ID NO: 2434

SEQ ID NO: 11931 - protein, 191 aa, Escherichia coli; identical to SEQ ID NO: 2727

SEQ ID NO: 11932 - protein, 828 aa, Escherichia coli
MKLSRRSFMKANAVAAAAAAAGLSVPGVARAVVGQQEAIKWDKAPCRFCGTGCGVLVGTQQGRVVACQGDPDAPVNRGLNCIKGYFLPKIMYGKDRLTQPLLRMKNGKYDKEGEFTPITWDQAFDVMEEKFKTALKEKGPESIGMFGSGQWTIWEGYAASKLFKAGFRSNNIDPNARHCMASAVVGFMRTFGMDEPMGCYDDIEQADAFVLWGANMAEMHPILWSRITNRRLSNQNVTVAVLSTYQHRSFELADNGIIFTPQSDLVILNYIANYIIQNNAINQDFFSKHVNLRKGATDIGYGLRPTHPLEKAAKNPGSDASEPMSFEDYKAFVAEYTLEKTAEMTGVPKDQLEQLAQLYADPNKKVISYWTMGFNQHTRGVWANNLVYNLHLLTGKISQPGCGPFSLTGQPSACGTAREVGTFAHRLPADMVVTNEKHRDICEKKWNIPSGTIPAKIGLHAVAQDRALKDGKLNVYWTMCTNNMQAGPNINEERMPGWRDPRNFIIVSDPYPTVSALAADLILPTAMWVEKEGAYGNAERRTQFWRQQVQAPGEAKSDLWQLVQFSRRFKTEEVWPEELLAKKPELRGKTLYEVLYATPEVSKFPVSELAEDQLNDESRELGFYLQKGLFEEYAWFGRGHGHDLAPFDDYHKARGLRWPVVNDKETQWRYSEGNDPYVKAGEGYKFYGKPDGKAVIFALPFEPAAEAPDEEYDLWLSTGRVLEHWHTGSMTRRVPELHRAFPEAVLFIHPLDAKARDLRRGDKVKVVSRRGEVISIVETRGRNRPPQGLVYMPFFDAAQLVNKLTLDATDPLSKETDFKKCAVKLEKV

SEQ ID NO: 11933 - protein, 367 aa, Escherichia coli; identical to SEQ ID NO: 4285

SEQ ID NO: 11934 - protein, 245 aa, Escherichia coli
MGSFDYGRNLGALYDVEAWTDMFPEFGGDSSAQTDNFMTKRASGLATYRNTDFFGVIDGLNLTLQYQGKNENRDVKKQNGDGFGTSLTYDFGGSDFAISGAYTNSDRTNEQNLQSRGTGKRAEAWATGLKYDANNIYLATFYSETRKMTPITGGFANKTQNFEAVAQYQFDFGLRPSLGYVLSKGKDIEGIGDEDLVNYIDVGATYYFNKNMSAFVDYKINQLDSDNKLNINNDDIVAVGMTYQF

SEQ ID NO: 11935 - protein, 230 aa, Escherichia coli; identical to SEQ ID NO: 3019

SEQ ID NO: 11936 - protein, 331 aa, Escherichia coli; identical to SEQ ID NO: 2700

SEQ ID NO: 11937 - protein, 118 aa, Escherichia coli [sequence omitted]

SEQ ID NO: 11938 - protein, 359 aa, Escherichia coli; identical to SEQ ID NO: 2329

SEQ ID NO: 11939 - protein, 673 aa, Escherichia coli; identical to SEQ ID NO: 2919

SEQ ID NO: 11940 - protein, 478 aa, Escherichia coli; identical to SEQ ID NO: 2405

SEQ ID NO: 11941 - protein, 678 aa, Escherichia coli; identical to SEQ ID NO: 9555

SEQ ID NO: 11942 - protein, 362 aa, Escherichia coli; identical to SEQ ID NO: 4554

SEQ ID NO: 11943 - protein, 360 aa, Escherichia coli; identical to SEQ ID NO: 4018

SEQ ID NO: 11944 - protein, 686 aa, Escherichia coli
MFWRDMTLSIWRKKTTGLKTKKRLLPLMLAAALCSSPVWAEEATFTANFKDTDLKSFIETVGANLNKTIIMGPGVQGKVSIRTMTPLNERQYYQLFLNLLEAQGYAVVPMENDVLKVVKSSAAKVEPLPLVGEGSDNYAGDEMVTKVVPVRNVSVRELAPILRQMIDSAGSGNVVNYDPSNVIMLTGRASVVERLTEVIQRVDHAGNRTEEVIPLDNASASEIARVLESLTKNSGENQPATLKSQIVADERTNSVIVSGDPATRDKMRRLIRRLDSEMERSGNSQVFYLKYSKAEDLVDVLKQVSGTLTAAKEEAEGSVGSGREVVSIAASKHSNALIVTAPQDIMQSLQSVIEQLDIRRAQVHVEALIVEVAEGSNINFGVQWGSKDAGLMQFANGTQIPIGTLGAAISAAKPQKGSTVISENGATTINPDTNGDLSTLAQLLSGFSGTAVGVVKGDWMALVQAVKNDSSSNVLSTPSITTLDNQEAFFMVGQDVPVLTGSTVGSNNSNPFNTVERKKVGIMLKVTPQINEGNAVQMVIEQEVSKVEGQTSLDVVFGERKLKTTVLANDGELIVLGGLMDDQAGESVAKVPLLGDIPLIGNLFKSTADKKEKRNLMVFIRPTILRDGMAADGVSQRKYNYMRAEQIYRDEQGLSLMPHTAQPILPAQNQALPPEVRAFLNAGRTR

SEQ ID NO: 11945 - protein, 351 aa, Escherichia coli
MKKSTLALVVMGIVASVSVQAAEIYNKDGNKLDVYGKVKAMHYMSDNDSKDGDQSYIRFGFKGETQINDQLTGYGRWEAEFAGNKAESDTAQQKTRLAFAGLKYKDLGSFDYGRNLGALYDVEAWTDMFPEFGGDSSAQTDNFMTKRASGLATYRNTDFFGVIDGLNLTLQYQGKNENRDVKKQNGDGFGTSLTYDFGGSDFAISGAYTNSDRTNEQNLQSRGTGKRAEAWATGLKYDANNIYLATFYSETRKMMPISGGFANKTQNFEAVAQYQFDFGLRPSLGYVLSKGKDIEGIDDEDLVNYVDVGATYYFNKNMSAFVDYKINQLDSDNKLNINNDDIVAVGMTYQF

SEQ ID NO: 11946 - protein, 784 aa, Escherichia coli; identical to SEQ ID NO: 2242

SEQ ID NO: 11947 - protein, 250 aa, Escherichia coli; identical to SEQ ID NO: 2808

SEQ ID NO: 11948 - protein, 274 aa, Escherichia coli; identical to SEQ ID NO: 2313

SEQ ID NO: 11949 - protein, 760 aa, Escherichia coli
MENNRNFPARQFHSLTFFAGLCIGITPVAQALAAEGQANADDTLVVEASTPSLYAPQQSADPKFSRPVADTTRTMTVISEQVIKDQGATNLTDALKNVPGVGAFFAGENGNSTTGDAIYMRGADTSNSIYIDGIRDIGSVSRDTFNTEQVEVIKGPSGTDYGRSAPTGSINMISKQPRNDSGIDASASIGSAWFRRGTLDVNQVIGDTTAVRLNVMGEKTHDAGRDKVKNERYGVAPSVAFGLGTANRLYLNYLHVTQHNTPDGGIPTIGLPGYSAPSAGTAALNHSGKVDTHNFYGTDSDYDDSITDTATMRFEHDINDNATIRNTTRWSRVKQDYLMTAIMGGASNITQPTSDVNSWTWSRTANTKDVSNKILTNQTNLTSTFYTGAIGHDLSTGVEFTRETQTNYGVNPVTLPAVNIYHPDSSIHPGGLTRNGANANGQTDTFAIYAFDTLQITRDFELNGGIRLDNYHTEYDSATACGGSGRGAITCPAGVAKGSPVTTVDTAKSGNLVNWKAGALYHLTENGNVYINYAVSQQPPGGNNFALAQSGSGNSANRTDFKPQKANTSEIGTKWQVLDKRLLLTAALFRTDIENEVEQNDDGTYSQYGKKRVEGYEISVAGNITPAWQMIGGYTQQKATIKNGKDVAQDGSSSLPYTPEHAFTLWSQYQATDDISVGAGARYIGSMHKGSDGAVGTPAFTEGYWVADAKLGYRVNRNLDFQLNVYNLFDTDYVASINKSGYRYHPGEPRTFLLTANMHF

SEQ ID NO: 11950 - protein, 729 aa, Escherichia coli
MLSTQFNRDNQHQAIIKPSLLAGCIALALLPSAAFAAPATEETVIVEGSATAPDDGENDYNVTSTSAGTKMQMTQRDIPQSVTIVSQQRMEDQQLQTLGEVMENTLGISKSQADSDRALYYSRGFQIDNYMVDGIPTYFESRWNLGDALSDMALFERVEVVRGATGLMTGTGNPSAAINMVRKHATSREFKGDVSAEYGSWNKERYVADLQSPLTEDGKIRARIVGGYQNNDSWLDRYNSEKTFFSGIVDADLGDLTMLSAGYEYQRIDVNSPTWGGLPRWNTDGSSNSYDRARSTAPDWAYNDKEINKVFMTLKQRFADTWQATLNATHSEVEFDSKMMYVDAYVNKADGMLVGPYSNYGPGFDYVGGTGWNSGKRKVDALDLFADGSYELFGRQHNLMFGGSYSKQNNRYFSSWANIFPDEIGSFYNFNGNFPQTDWSPQSLAQDDTTHMKSLYAATRVTLADPLHLILGARYTNWRVDTLTYSMEKNHTTPYAGLVFDINDNWSTYASYTSIFQPQNDRDSSGKYLTPITGNNYELGLKSDWMNSRLTTTLAIFRIEQDNVAQSTGTPIPGSNGETAYKAVDGTVSKGVEFELNGAITDNWQLTFGATRYIAEDNEGNAVNPNLPRTTVKMFTSYRLPVMPELTVGGGVNWQNRVYTDTVTPYGTFRAEQGSYALVDLFTRYQVTKNFSLQGNVNNLFDKTYDTNVEGSIVYGAPRNFSITGTYQF

SEQ ID NO: 11951 - protein, 191 aa, Escherichia coli; identical to SEQ ID NO: 2727

SEQ ID NO: 11952 - protein, 224 aa, Escherichia coli; identical to SEQ ID NO: 3792

SEQ ID NO: 11953 - protein, 752 aa, Escherichia coli; identical to SEQ ID NO: 9714

SEQ ID NO: 11954 - protein, 446 aa, Escherichia coli; identical to SEQ ID NO: 2177

SEQ ID NO: 11955 - protein, 111 aa, Escherichia coli; identical to SEQ ID NO: 3419

SEQ ID NO: 11956 - protein, 239 aa, Escherichia coli
MHQMQTTRTPYSVSFMATVLLLLLFACHSTIANAAVALGATRVIYLANQKQVLLPVTNNDPASVYLIQSWIENAGDQKDTQFVITPPLFSMQGKKENTLRIINATNHQLPGDRESLFWVNVKAIPAMEKDQKNENTLQLAIISRIKMFYRPTHLAMAPEEAPAMLRFRRSGSKLTLINPTPYFITVTNMKAGNSNLPNTMVPPKGEVSVDIPHAVTGDISFQTINDYGALTPRIKATMQ

SEQ ID NO: 11957 - protein, 749 aa, Escherichia coli
MNKKIHSLALLVNLGIYGVALPVLAEETSDNAVSHDDTIVVTAAEQNLQAPGVSTITADEIRKNPVARDVSEIIRTMPGVNLTGNSTSGQRGNNRQIDIRGMGPENTLILIDGKPVSSRNSVRQGWRGERDTRGDTSWVPPEMIERIEVLRGPAAARYGNGAAGGVVNIITKKGSGEWHGSWDAYFNAPEHKEEGATKRTNFSLTGPLGDEFSFRLYGNLDKTQADAWDINQGHQSARAGTYATTLPAGREGVINKDINGVVRWDFAPLQSLELEAGYSRQGNLYAGDTQNTNSDAYTRSKYGDETNRLYRQNYSLTWNGGWDNGVTTSNWVQYEHTRNSRIPEGLAGGTEGKFNEKAAQDFVDIDLDDVMLHSEVNLPIDFLVNQTLTLGTEWNQQRMKDLSSNTQALTGTNTGGAIDGVSATDRSPYSKAEIFSLFAENNMELTDSTIVTPGLRFDHHSIVGNNWSPALNISQSLGDDFTLKMGIARAYKAPSLYQTNPNYILYSKGQGCYASAGGCYLQGNDDLKAETSINKEIGLEFKRDGWLAGVTWFRNDYRNKIEAGYVAVGQNAVGTDLYQWDNVPKAVVEGLEGSLNVPVSETVMWTNNITYMLKSENKTTGDRLSIIPEYTLNSTLSWQAREDLSMQTTFTWYGKQQPKKYNYKGQPAVGPETKEISPYSIVGLSATWDVTKNVSLTGGVDNLFDKRLWRAGNAQTTGDLAGANYIAGAGAYTYNEPGRTWYMSINTHF

SEQ ID NO: 11958 - protein, 222 aa, Escherichia coli; identical to SEQ ID NO: 1956

SEQ ID NO: 11959 - protein, 713 aa, Escherichia coli
MAMFTPSFSGLKGRALFSLLFAAPMIHATDSVTTKDGETITVTADANTATEATDGYQPLSTSTATLTDMPMLDIPQVVNTVSDQVLENQNATTLDEALYNVSNVVQTNTLGGTQDAFVRRGFGANRDGSIMTNGLRTVLPRSFNAATERVEVLKGPASTLYGILDPGGLINVVTKRPEKTFHGSVSATSSSFGGGTGQLDITGPIEGTQLAYRLTGEVQDEDYWRNFGKERSTFIAPSLTWFGDNATVTMLYSHRDYKTPFDRGTIFDLTTKQPVNVDRKIRFDEPFNITDGQSDLAQLNAEYHLNSQWTARFDYSYSQDKYSDNQARVTAYDATTGTLTRRVDATQGSTQRMHATRADLQGNVDIAGFYNEILGGVSYEYYDLLRTDMIRCKKAKDFNIYNPVYGNTSKCTTVSASDSDQTIKQESYSAYAQDALYLTDNWIAVAGIRYQYYTQYAGKGRPFNVNTDSRDEQWTPKLGLVYKLTPSVSLFANYSQTFMPQSSIASYIGDLPPESSNAYEVGAKFELFDGITADIALFDIHKRNVLYTESIGDETIAKTAGRVRSRGVEVDLAGALTENINIIASYGYTDAKVLEDPDYAGKPLPNVPRHTGSLFLTYDIHNMPGNNTLTFGGGGHGVSRRSATNGADYYLPGYFVADAFAAYKMKLQYPVTLQLNVKNLFDKTYYTSSIATNNLGNQIGDPREVQFTVKMEF

SEQ ID NO: 11960 - protein, 376 aa, Escherichia coli; identical to SEQ ID NO: 10621

SEQ ID NO: 11961 - protein, 162 aa, Escherichia coli
MKTILPAVLFAAFVTTSAWAAESVQPLEKIAPYPQAEKGMKRQVIQLTPQEDESTLKVELLIGQTLEVDCNLHRLGGKLESKTLEGWGYDYYVFDKVSSPVSTMMACPDGKKEKKFVTAYLGDAGMLRYNSKLPIVVYTPDNVDVKYRVWKAEEKIDNAVVR

SEQ ID NO: 11962 - protein, 359 aa, Escherichia coli; identical to SEQ ID NO: 2328

SEQ ID NO: 11963 - protein, 331 aa, Escherichia coli; identical to SEQ ID NO: 10623

SEQ ID NO: 11964 - protein, 539 aa, Escherichia coli
MAAVCGTSGIASLFSQAAFAADSDIADGQTQRFDFSILQSMTHDLAQTAWRGAPRPLPDTLATMTPQAYNSIQYDAEKSLWHNVENRQLDAQFFHMGMGFRRRVRMFSVDPATHLAREIHFRPELFKYNDAGVDTKQLEGQSDLGFAGFRVFKAPELARRDVVSFLGASYFRAVDDTYQYGLSARGLAIDTYTDSKEEFPDFTAFWFDTVKPGATTFTVYALLDSASITGAYKFTIHCEKNQVIMDVENHLYARKDIKQLGIAPMTSMFSCGTNERRMCDTIHPQIHDSDRLSMWRGNGEWICRPLNNPQKLQFNAYTDNNPKGFGLLQLDRDFSHYQDIMGWYNKRPSLWVEPRNKWGKGTIGLMEIPTTGETLDNIVCFWQPEKAVKAGDEFAFQYRLYWSAQPPVHCPLARVMATRTGMGGFPEGWAPGEHYPEKWARRFAVDFVGGDLKAAAPKGIEPVITLSSGEAKQIEILYIEPIDGYRIQFDWYPTSDSTDPVDMRMYLRCQGDAISETWLYQYFPPAPDKRQYVDDRVMS

SEQ ID NO: 11965 - protein, 828 aa, Escherichia coli
MKLSRRSFMKANAVAAAAAAAGLSVPGVARAVVGQQEAIKWDKAPCRFCGTGCGVLVGTQQGRVVACQGDPDAPVNRGLNCIKGYFLPKIMYGKDRLTQPLLRMKNGKYDKEGEFTPITWDQAFDVMEEKFKTALKEKGPESIGMFGSGQWTIWEGYAASKLFKAGFRSNNIDPNARHCMASAVVGFMRTFGMDEPMGCYDDIEQADAFVLWGSNMAEMHPILWSRITNRRLSNQNVTVAVLSTYQHRSFELADNGIIFTPQSDLVILNYIANYIIQNNAINQDFFSKHVNLRKGATDIGYGLRPTHPLEKAAKNPGSDASEPMSFEDYKAFVAEYTLEKTAEMTGVPKDQLEQLAQLYADPNKKVISYWTMGFNQHTRGVWANNLVYNLHLLTGKISQPGCGPFSLTGQPSACGTAREVGTFAHRLPADMVVTNEKHRDICEKKWNIPSGTIPAKIGLHAVAQDRALKDGKLNVYWTMCTNNMQAGPNINEERMPGWRDPRNFIIVSDPYPTVSALAADLILPTAMWVEKEGAYGNAERRTQFWRQQVQAPGEAKSDLWQLVQFSRRFKTEEVWPEELLAKKPELRGKTLYEVLYATPEVSKFPLSELAEDQLNDESRELGFYLQKGLFEEYAWFGRGHGHDLAPFDDYHKARGLRWPVVNGKETQWRYSEGNDPYVKAGEGYKFYGKPDGKAVIFALPFEPAAEAPDEEYDLWLSTGRVLEHWHTGSMTRRVPELHRAFPEAVLFIHPLDAKARDLRRGDKVKVVSRRGEVISIVETRGRNRPPQGLVYMPFFDAAQLVNKLTLDATDPLSKETDFKKCAVKLEKV

SEQ ID NO: 11966 - protein, 246 aa, Escherichia coli; identical to SEQ ID NO: 3021

SEQ ID NO: 11967 - protein, 412 aa, Escherichia coli; identical to SEQ ID NO: 4058

SEQ ID NO: 11968 - protein, 246 aa, Escherichia coli; identical to SEQ ID NO: 3838

SEQ ID NO: 11969 - protein, 162 aa, Escherichia coli; identical to SEQ ID NO: 1973

SEQ ID NO: 11970 - protein, 226 aa, Escherichia coli; identical to SEQ ID NO: 3085

SEQ ID NO: 11971 - protein, 274 aa, Escherichia coli; identical to SEQ ID NO: 3471

SEQ ID NO: 11972 - protein, 203 aa, Escherichia coli; identical to SEQ ID NO: 2201

SEQ ID NO: 11973 - protein, 193 aa, Escherichia coli; identical to SEQ ID NO: 2246

SEQ ID NO: 11974 - protein, 200 aa, Escherichia coli; identical to SEQ ID NO: 1785

SEQ ID NO: 11975 - protein, 111 aa, Escherichia coli; identical to SEQ ID NO: 7471

SEQ ID NO: 11976 - protein, 518 aa, Escherichia coli; identical to SEQ ID NO: 2349

SEQ ID NO: 11977 - protein, 512 aa, Escherichia coli; identical to SEQ ID NO: 2974

SEQ ID NO: 11978 - protein, 119 aa, Escherichia coli
MNLSLSEGGRPASVKNRAWHYCQMAWRGVCTPKALSRLAAFSPLLLLGMGQMAHATDLLAGGKNDVKATFGADSFVIMCIYIAEIVIGVATYIRTKNLLILLGLVVVIVFTTVGLTFVN

SEQ ID NO: 11979 - protein, 243 aa, Escherichia coli; identical to SEQ ID NO: 3483

SEQ ID NO: 11980 - protein, 725 aa, Escherichia coli
MRINKILWSLTVLLVGLNSQISVAKYSDDDNDETLVVEATAEQVLKQQPGVSVITSEDIKKTPPVNDLSDIIRKMPGVNLTGNSASGTRGNNRQIDIRGMGPENTLILIDGVPVTSRNSVRYSWRGERDTRGDTNWVPPEQVERIEVIRGPAAARYGSGAAGGVVNIITKRPTNDWHGSLSLYTNQPESSEEGATRRANFSLSGPLAGDALTTRLYGNLNKTDADSWDINSPVGTKNAAGHEGVRNKDINGVISWKLNPQQILDFEAGYSRQGNIYAGDTQNSSSSAVTESLAKSGKETNRLYRQNYGITHNGIWDWGQSRFGVYYEKTNNTRMNEGLSGGGEGRILAGEKFTTNRLSSWRTSGELNIPLNVMVDQTLTVGAEWNRDKLDDPSSTSLTVNDRDISGISGSAADRSSKNHSQISALYIEDNIEPVPGTNIIPGLRFDYLSDSGGNFSPSLNLSQELGDYFKVKAGVARTFKAPNLYQSSEGYLLYSKGNGCPKDITSGGCYLIGNKDLDPEISVNKEIGLEFTWEDYHASVTYFRNDYQNKIVAGDNVIGQTASGAYILKWQNGGKALVDGIEASMSFPLVKDRLNWNTNATWMITSEQKDTGNPLSVIPKYTINNSLNWTITQAFSASVNWTLYGRQKPRTHAETRSEDTGGLSGKELGAYSLVGTNFNYDINKNLRLNVGVSNILNKQIFRSSEGANTYNEPGRAYYAGVTASF

SEQ ID NO: 11981 - protein, 170 aa, Escherichia coli; identical to SEQ ID NO: 2565

SEQ ID NO: 11982 - protein, 203 aa, Escherichia coli; identical to SEQ ID NO: 2201

SEQ ID NO: 11983 - protein, 237 aa, Escherichia coli; identical to SEQ ID NO: 3793

SEQ ID NO: 11984 - protein, 193 aa, Escherichia coli
MRYLATLLLSLAVLITAGCSWHLRDTTQVPSTMKVMILDSGDPNGPLSRAVRNQLRLNGVELLDKETTRKDVPSLRLGKVSIAKDTASVFRNGQTAEYQMIMTVNATVLIPGRDIYPISAKVFRSFFDNPQMALAKDNEQDMIVKEMYDRAAEQLIRKLPSIRAADIRSDEEQTSTTTDTPATPARVSTTLGN

SEQ ID NO: 11985 - protein, 241 aa, Escherichia coli; identical to SEQ ID NO: 2922

SEQ ID NO: 11986 - protein, 231 aa, Escherichia coli; identical to SEQ ID NO: 2864

SEQ ID NO: 11987 - protein, 432 aa, Escherichia coli; identical to SEQ ID NO: 2026

SEQ ID NO: 11988 - protein, 517 aa, Escherichia coli; identical to SEQ ID NO: 2462

SEQ ID NO: 11989 - protein, 663 aa, Escherichia coli
MFRLNPFVRVGLCLSAISCAWPVLAVDDDGETMVVTASSVEQNLKDAPASISVITQEDLQRKPVQNLKDVLKEVPGVQLTNEGDNRKGVSIRGLDSSYTLILVDGKRVNSRNAVFRHNDFDLNWIPVDSIERIEVVRGPMSSLYGSDALGGVVNIITKKIGQKWSGTVTVDTTIQEHRDRGDTYNGQFFTSGPLIDGVLGMKAYGSLAKREKDDPQNSTTTDTGETPRIEGFSSRDGNVEFAWTPNQNHDFTAGYGFDRQDRDSDSLDKNRLERQNYSVSHNGRWDYGTSELKYYGEKVENKNPGNSSPITSESNTVDGKYTLPLTAINQFLTVGGEWRHDKLSDAVNLTGGTSSKTSASQYALFVEDEWRIFEPLALTTGVRMDDHETYGEHWSPRAYLVYNATDTVTVKGGWATAFKAPSLLQLSPDWTSNSCRGACKIVGSPDLKPETSESWELGLYYMGEEGWLEGVESSVTVFRNDVKDRISISRTSDVNAAPGYQNFVGFETGANGRRIPVFSYYNVNKARIQGLETELKIPFNDEWKLSINYTYNDGRDVSNGENKPLSDLPFHTANGTLDWKPLALEDWSFYVSGHYTGQKRADSATAKTPGGYTIWNTGAAWQVTKDVKLRAGVLNLGDKDLSRDDYSYNEDGRRYFMAVDYRF

SEQ ID NO: 11990 - protein, 181 aa, Escherichia coli
MQTTRTPYSISFMATVLLLLLFACHSTVANAAVALGATRVIYPANQKQVLLPVTNNDPASVYLIQSWIENAGDQKDTQFVITPPLFSMQGKKENTLRIINATNHQLPGDRESLFWVNVKAIPAMEKDQKNENTLQLAIISRIKMFYRPTNLAMAPEASGVNTTTLCTAYHCPWLSNCGFSR

SEQ ID NO: 11991 - protein, 386 aa, Escherichia coli; identical to SEQ ID NO: 3810

SEQ ID NO: 11992 - protein, 478 aa, Escherichia coli; identical to SEQ ID NO: 7448

SEQ ID NO: 11993 - protein, 505 aa, Escherichia coli; identical to SEQ ID NO: 10600

SEQ ID NO: 11994 - protein, 565 aa, Escherichia coli; identical to SEQ ID NO: 2673

SEQ ID NO: 11995 - protein, 700 aa, Escherichia coli
MKIFSVRQTVLPALLVLSPVVFAADEQTMIVSAAPQVVSELDTPAAVSVVDGEEMRLATPRINLSESLTGVPGLQVQNRQNYAQDLQLSIRGFGSRSTYGIRGIRLYVDGIPATMPDGQGQTSNIDLSSVQNVEVLRGPFSALYGNASGGVMNVTTQTGQQPPTIEASSYYGSFGSWRYGLKATGATGDGTQPGDVDYTVSTTRFTTHGYRDHSGAQKNLANAKLGVRIDDASKLSLIFNSVDIKADDPGGLTKAEWKANPQQAPRAEQYDTRKTIKQTQAGLRYERSLSAQDDMSVMMYAGERETTQYQSIPMAPQLNPSHAGGVITLQRHYQGIDSRWTHRGELGVPLTFTTGLNYENMSENRKGYNNFRLNSGVPEYGQKGELRRDERNLMWNVDPYLQTQWQLSEKLSLDAGVRYSSVWFDSNDHYVTPGNGDDSGDASYHKWLPAGSLKYAMTDAWNIYLAAGRGFETPTINELSYRADGQSGMNFGLKPSTNDTIEIGSKTRIGDGLLSLALFQTDTDDEIVVDSSSGGRTTYKNAGKTRRQGAELAWDQRFAGDFRVKASWTWLDATYRSNVCNEQDCNGNRMPGIARNMGFASIGYIPEDGWYAGTEARYMGDIMADDENTAKAPSYTLVGLFTGYKYNYHNFTVDLFGRVDNLFDKEYVGSVIVNESNGRYYEPAPGRNYGVGINIAWRFE

SEQ ID NO: 11996 - protein, 249 aa, Escherichia coli
MNIMKSPLITTGMICLLGICNFAQATVSPDRTRIIFNASNKSATVRLTNQSKIDPYLAQSWIEDASGKKTRDYISTLPPMERIEPDEQIQIRLMALASLNDLPQDRETLFYYNVREIPPRAKEQNVMQIAMQSRLKLFWRPKAIELKEGEMIPLQKVTITRTAAGLTLNNPTPYHITVGYIGTNGKTLMPGADSIMVAPFTSATQHLSSLPSTFQLGFVADYGGLEMFKVECNSIQSLCQSSPAKKGKI

SEQ ID NO: 11997 - protein, 662 aa, Escherichia coli; identical to SEQ ID NO: 8124

SEQ ID NO: 11998 - protein, 747 aa, Escherichia coli; identical to SEQ ID NO: 2072

SEQ ID NO: 11999 - protein, 430 aa, Escherichia coli; identical to SEQ ID NO: 2617

SEQ ID NO: 12000 - protein, 654 aa, Escherichia coli
MDSAMKGLNKITCCLLAALLMPCAGHAENEQYGANFNNADIRQFVEIVGQHLGKTILIDPSVQGTISVRSNDTFSQQEYYHFFLSILDLYGYSVITLDNGFLKVVRSANVKTSPGMIADSSRPGVGDELVTRIVPLENVPARDLAPLLRQMMDAGSVGNVVHYEPSNVLILTGRASTINKLIEVIKRVDVIGTEKQQIIHLEYASAEDLAEILNQLISESHGKSQMPALLSAKIVADKRTNSLIISGPEKARQRITSLLKSLDVEESEEGNTRVYYLKYAKATNLVEVLTGVSEKLKDEKGNSRKPSSTSAMDNVAITADEQTNSLVITADQSVQEKLATVIARLDIRRAQVLVEAIIVEVQDGNGLNLGVQWANKNVGAQQFTNTGLPVFNAAQGVADYKKNGGITSANPAWDMFSAYNGMAAGFFNGDWGVLLTALASNNKNDILATPSIVTLDNKLASFNVGQDVPVLSGSQTTSGDNVFNTVERKTVGTKLKVTPQVNEGDAVLLEIEQEVSSVDSSSNSTLGPTFNTRTIQNAVLVKTGETVVLGGLLDDFSKEQVSKVPLLGDIPLVGQLFRYTSTERAKRNLMVFIRPTIIRDDDVYRSLSKEKYTRYRQEQQLRIDGKSKALVGSEDLPVLNENTFNSHAPAPSSR

SEQ ID NO: 12001 - protein, 208 aa, Escherichia coli; identical to SEQ ID NO: 1948

SEQ ID NO: 12002 - protein, 200 aa, Escherichia coli; identical to SEQ ID NO: 1784

SEQ ID NO: 12003 - protein, 250 aa, Escherichia coli; identical to SEQ ID NO: 3048

SEQ ID NO: 12004 - protein, 208 aa, Escherichia coli; identical to SEQ ID NO: 1949

SEQ ID NO: 12005 - protein, 614 aa, Escherichia coli; identical to SEQ ID NO: 1884

SEQ ID NO: 12006 - protein, 517 aa, Escherichia coli; identical to SEQ ID NO: 2462

SEQ ID NO: 12007 - protein, 232 aa, Escherichia coli
MQKNAAHTYAISSLLVLSLTGCAWIPSTPLVQGATSAQPVPGPTPVANGSIFQSAQPINYGYQPLFEDRRPRNIGDTLTIVLQENVSASKSSSANASRDGKTNFGFDTVPRYLQGLFGNARADVEASGGNTFNGKGGANASNTFSGTLTVTVDQVLVNGNLHVVGEKQIAINQGTEFIRFSGVVNPRTISGSNTVSSTQVADARIEYVGNGYINEAQNMGWLQRFFLNLSPM

SEQ ID NO: 12008 - protein, 565 aa, Escherichia coli; identical to SEQ ID NO: 2678

SEQ ID NO: 12009 - protein, 760 aa, Escherichia coli; identical to SEQ ID NO: 3923

SEQ ID NO: 12010 - protein, 656 aa, Escherichia coli; identical to SEQ ID NO: 9854

SEQ ID NO: 12011 - protein, 221 aa, Escherichia coli; identical to SEQ ID NO: 5595

SEQ ID NO: 12012 - protein, 660 aa, Escherichia coli; identical to SEQ ID NO: 5588

SEQ ID NO: 12013 - protein, 614 aa, Escherichia coli; identical to SEQ ID NO: 6666

SEQ ID NO: 12014 - protein, 360 aa, Escherichia coli; identical to SEQ ID NO: 3862

SEQ ID NO: 12015 - protein, 663 aa, Escherichia coli; identical to SEQ ID NO: 9256

SEQ ID NO: 12016 - protein, 259 aa, Escherichia coli
MLFHQQGCCMKCIIGNKKWVCGFRDELKVSQNIIRSGILFLLSILFINNASAGGFGLGVTRLIYPAESKQITLSVQNSGDNTSYLIQSWVDDSKTEKKSQDFVITPPLFMLPTRKEASLRIMFLGKTNLPTDRETLYWMNVKAIPPTDEKNTQKNTLQLALQNKIKLFYRPENLPVQPGKARNMLRFKYEGKQLKVINPSPYYLTLTGIKVQGSKLPNMFVPPKSDITVSSPVTLAGEITYQTINDFGATTERQKGIMQ

SEQ ID NO: 12017 - protein, 229 aa, Escherichia coli
MIGGTRFAYPENQSSISVELKNTSNRDMLVKVAVSPDDARQLTGTVESLPSYSETVFIATPPLFVLKPDKNTKIRINRVGGSLPTDRESLFILNVAALPTLENSHSVKTDNQLQIAVRNRMKIFYRPSNLSEDPNMSYQKLRWARKNEIVTVYNPGPRYVTLYNLHVDGKVIDGGMVAPFSHRQQSWCKSQGVCEIAWQTLDIYNNVLPILKVKLNPSQLDVTGFAFSQ

SEQ ID NO: 12018 - protein, 672 aa, Escherichia coli
MIVSAAPQVVSELDTPAAVSVVDGEEMRLATSRINLSESLTGVPGLQVQNRQNYAQDLQLSIRGFGSRSTYGIRGIRLYVDGIPATMPDGQGQTSNIDLSSVQNVEVLRGPFSALYGNASGGVMNVTTQTGQQPPTIEASSYYGSFGSWRYGLKATGATGDGTQPGDVDYTVSTTRFTTHGYRDHSGAQKNLANAKLGVRIDEASKLSLIFNSVDIKADDPGGLTKAEWKANPQQAPRAEQYDTRKTIKQTQAGLRYERSLSAQDDMSVMMYAGERETTQYQSIPMAPQLNPSHAGGVITLQRHYQGIDSRWTHRGELGVPVTFTTGLNYENMSENRKGYNNFRLNSGMPEYGQKGELRRDERNLMWNIDPYLQTQWQLSEKLSLDAGVRYSSVWFDSNDHYVTPGNGDDSGDASYHKWLPAGSLKYAMTDAWNIYLAAGRGFETPTINELSYRADGQSGMNFGLKPSTNDTIEIGSKTRIGDGLLSLALFQTDTDDEIVVDSSSGGRTTYKNAGKTRRQGAELAWDQRFAGDFRVNASWTWLDATYRSNVCNEQDCNGNRMPGIARNMGFASIGYVPEDGWYAGTEARYMGDIMADDENTAKAPSYTLVGLFTGYKYNYHNLTVDLFGRVDNLFDKEYVGSVIVNESNGRYYEPSPGRNYGVGMNIAWRFE

SEQ ID NO: 12019 - protein, 213 aa, Escherichia coli; identical to SEQ ID NO: 2232

SEQ ID NO: 12020 - protein, 203 aa, Escherichia coli; identical to SEQ ID NO: 2008

SEQ ID NO: 12021 - protein, 518 aa, Escherichia coli
MKKLKINYLFIGILALLLAVALWPSIPWFGKADNRIAAIQARGELRVSTIHTPLTYNEINGKPFGLDYELAKQFADYLGVKLKVTVRQNISQLFDDLDNGNADLLAAGLVYNSERVKNYQPGPTYYSVSQQLVYKVGQYRPRTLGNLTAEQLTIAPGHVVVNDLQTLKDTKFPELSWKVDDKKGSAELMEDVIEGKLDYTIADSVAISLFQRVHPELAVALDITDEQPVTWFSPLDGDNTLSAALLDFFNEMNEDGTLARIEEKYLGHGDDFDYVDTRTFLRAVDAVLPQLKPLFEKYAEEIDWRLLAAIAYQESHWDAQATSPTGVRGMMMLTKNTAQSLGITDRTDAEQSISGGVRYLQDMMSKVPESVPENERIWFALAAYNMGYAHMLDARALTAKTKGNPDSWADVKQRLPLLSQKPYYSKLTYGYARGHEAYAYVENIRKYQISLVGYLQEKEKQATEVAMQLAQDYPAVSPTELGKEKFPFLSFLSQSSSNYLTHTPSLLFSRKGSEEKQN

SEQ ID NO: 12022 - protein, 241 aa, Escherichia coli; identical to SEQ ID NO: 2890

SEQ ID NO: 12023 - protein, 837 aa, Escherichia coli
MSSAELYFNPRFLADDPQAVADLSRFENGQELPPGTYRVDIYLNNGYMATRDVTFNTGDSEQGIVPCLTRAQLASMGLNTASVSGMNLLADDACVPLTSIIHDATAHLDVGQQRLNLTIPQAFMSNRARGYIPPELWDPGINAGLLNYNFSGNSVQNRIGGNSHYAYLNLQSGLNIGAWRLRDNTSWSYNSSDRSSGSKNKWQHINTWLERDIIPLRSRLTLGDGYTQGDIFDGINFRGAQLASDDNMLPDSQRGFAPVILGIARGTAQVTIKQNGYDIYNSTVPPGPFTINDIYAAGNSGDLQVTIKEADGSTQIFTVPYSSVPLLQREGHTRYSITAGEYRSGNAQQEKPRFFQSTLLHGLPAGWTIYGGTQLADRYRAFNFGIGKNMGALGALSVDMTQANSTLPDDSQHDGQSVRFLYNKSLNESGTNIQLVGYRYSTSGYFNFADTTYSRMNGYNIETQDGVIQVKPKFTDYYNLAYNKRGKLQLTVTQQLGRTSTLYLSGSHQTYWGTSNVDEQFQAGLNTAFEDINWTLSYSLTKNAWQKGRDQMLALNVNIPFSHWLRSDSKSQWRHASASYSMSHDLNGRMTNLAGVYGTLLEDNNLSYSVQTGYAGGGDGNNGSTGYATLNYRGGYGNANIGYSHSDDIKQLYYGVSGGVLAHANGVTLGQPLNETVVLVKAPGAKDAKVENQTGVRTDWRGYAVLPYATEYRENRVALDTNTLADNVDLDNAVANVVPTRGAIVRAEFKARVGIKLLMTLTHNNKPLPFGAMVTSESSQSSGIVADNGQVYLSGMPLAGKVQVKWGEEENAHCVANYQLPPESQQQLLTQLSAECR

SEQ ID NO: 12024 - protein, 721 aa, Escherichia coli
MDEIPALAEKDDDSVINSLEQIIPGTAAEFDFNHQRLNLSIPQIALYRDAKGYVSPSRWDDGIPTLFTNYSFTGSDNRYRQGNRSQRQYLNMQNGANFGPWRLRNYSTWTRNAQASSWNTISSYLQRDIKALKSQLLLGESATSGSIFSSYTFTGVQLASDDNMLPNSQRGFAPTVRGIANSSAIVTIRQNGYVIYQSNVPAGAFEINDLYPSSNSGDLEVTIEESDGTQRRFIQPYSSLPMMQRPGHLKYSATAGRYRADANSDSKEPGFAEATAIYGLNNTFTLYGGLLGSEDYYALGIGIGGTLGALGALSMDINRADTQFDNRHSFHGYQWRTQYIKDIPETNTNIAVSYYRYTNDGYFSFDEANTRNWDYNSRQKSEIQFNISQTIFDGVSLYASGSQQDYWGNNDKNRNISVGVSGQQWGIGYSLNYQYSRYTDQNNDRALSLNLSIPLERWLPRSRVSYQMTSQKDRPTQHEMRLDGSLLDDGRLSYSLEQSLDDDNNHNSSLNASYRSPYGTFSAGYSYGNDSSQYNYGVTGGVVIHPHGVTLSQYLGNAFALIDANGASGVRIQNYPGIATDPFGYAVVPYLTTYQENRLSVDTTQLPDNVDLEQTTQFVVPNRGAMVAARFNANIGYRVLVTVSDRNGKPLPFGALASNDETGQQSIVDEGGILYLSGISSKSQSWTVRWGNQADQQCQFAFSTPDSEPTTSVLQGTAQCH

SEQ ID NO: 12025 - protein, 765 aa, Escherichia coli; identical to SEQ ID NO: 7498

SEQ ID NO: 12026 - protein, 266 aa, Escherichia coli; identical to SEQ ID NO: 1894

SEQ ID NO: 12027 - protein, 161 aa, Escherichia coli; identical to SEQ ID NO: 2582

SEQ ID NO: 12028 - protein, 816 aa, Escherichia coli; identical to SEQ ID NO: 2817

SEQ ID NO: 12029 - protein, 834 aa, Escherichia coli; identical to SEQ ID NO: 3095

SEQ ID NO: 12030 - protein, 368 aa, Escherichia coli; identical to SEQ ID NO: 3872

SEQ ID NO: 12031 - protein, 880 aa, Escherichia coli; identical to SEQ ID NO: 6424

SEQ ID NO: 12032 - protein, 826 aa, Escherichia coli
MLRMTPLASAIVALLLGIEAYAAEETFDTHFMIGGMKAQQVANIRLDDNQPLPGQYDIDIYVNKQWRGKYEIIVKDNPQETCLSIEVIKRLGINSDNFASGKQCLTFEQLVQGGSYTWDIGVFRLDFSVPQAWVEELESGYVPPENWERGINAFYTSYYVSQYYSDYKASGNSKSTYVRFNSGLNLLGWQLHSDASFSKTNNNPGVWKSNTLYLERGFAQLLGTLRVGDMYTSSDIFDSVRFSGVRLFRDMQMLPNSKQNFTPRVQGIAQSNALVTIEQNGFVVYQKEVPPGPFAITDLQLAGGGADLDVSVKEADGSVTTYLVPYAAVPNMLQPGVSKYDFAAGRSHIEGASKQSDFVQAGYQYGFNNLLTLYGGSMVANNYYAFTLGTGWNTRFGAISVDATKSHSKQDNGDVFDGQSYQIAYNKFVSQTSTRFGLAAWRYSSRDYRTFNDHVWANNKDNYRRDENDVYDIADYYQNDFGRKNSFSANMSQSLPEGWGSVSLSTLWRDYWGRSGSSKDYQLSHSNNWRRISYILAASQAYDENHHEEKRFNIFISIPFDWGDDVTTPRRQIYMSNSTTFDDQGFASNNTGLSGTVGSRDQFNYGVNLSYQNQGNETTAGANLTWNAPVATVNGSYSQSSTYRQAGASVSGGIVAWSGGVNLANRLSETFAVMNAPGIKDAYVNGQKYRTTNRNGVVVYDGMTPYRENHLMLDVSQSDSEAELRGNRKIAAPYRGAVVLVNFDTDQRKPWFIKALRADGQPLMFGYEVNDIHGHNIGVVGQGSQLFIRTNEVPPSVNVAIDKQQGLSCTITFGKEIDESRNYICQ

SEQ ID NO: 12033 - protein, 207 aa, Escherichia coli; identical to SEQ ID NO: 2211

SEQ ID NO: 12034 - protein, 820 aa, Escherichia coli; identical to SEQ ID NO: 3877

SEQ ID NO: 12035 - protein, 591 aa, Escherichia coli
MPSFIGGLVVFVSAAFNAQAETWFDPAFFKDDPSMVADLSRFEKGQKITPGVYRVDIVLNQTIVDTRNVNFVEITPEKGIAACLTTESLDAMGVNTDAFPAFKQLDKQACVPLAEIIPDASVTFNVNKLRLEISVPQIAIKSNARGYVPPERWDEGINALLLGYSFSGANSIHSSADSDSGDSYFLNLNSGVNLGPWRLRNNSTWSRSSGQTAEWKNLSSYLQRAVIPLKGELTVGDDYTAGDFFDSVSFRGVQLASDDNMLPDSLKGFAPVVRGIAKSNAQITIKQNGYTIYQTYVSPGAFEISDLYSTSSSGDLLVEIKEADGSVNSYSVPFSSVPLLQRQGRIKYAVTLAKYRTNSNEQQESKFAQATLQWGGPWGTTWYGGGQYAEYYRAAMFGLGFNLGDFGAISFDVTQAKSTLADQSEHKGQSYRFLYAKTLNQLGTNFQLMGYRYSTSGFYTLSDTMYKHMDGYEFNDGDDEDTPMWSRYYNLFYTKRGKLQVNISQQLGEYGSFYLSGSQQTYWHTDQQDRLLQFGYNTQIKDLSLGVSWNYSKSRGQPDADQVFALNFSLPLNLLLPRSNDSYTRKKITHG

SEQ ID NO: 12036 - protein, 250 aa, Escherichia coli
MSDLLCSAKLGATTLALLLSAASLSAQASVTPDRTRLIFNESDKSISVTLRNNDPKLPYLAQSWIEDEKGNKISSPLTVLPPVQRIDSMMNGQVKVQGMPDINKLPADRESLFYFNVREIPPKSNKANTLQIALQTRIKLFWRPKALENVSMKNPWQYKVTLTRNGQEFTVNNPTPYYVIFSNASTQKNGNPAAGFSPIVMSPKTSAPLNVKMGSVPVLTYVNDYGARMSLFFTCNGNSCQVDEEQSRKG

SEQ ID NO: 12037 - protein, 518 aa, Escherichia coli; identical to SEQ ID NO: 2350

SEQ ID NO: 12038 - protein, 89 aa, Escherichia coli; identical to SEQ ID NO: 2833

SEQ ID NO: 12039 - protein, 243 aa, Escherichia coli; identical to SEQ ID NO: 6081

SEQ ID NO: 12040 - protein, 111 aa, Escherichia coli; identical to SEQ ID NO: 3096

SEQ ID NO: 12041 - protein, 614 aa, Escherichia coli; identical to SEQ ID NO: 1884

SEQ ID NO: 12042 - protein, 446 aa, Escherichia coli; identical to SEQ ID NO: 5547

SEQ ID NO: 12043 - protein, 430 aa, Escherichia coli; identical to SEQ ID NO: 2617

SEQ ID NO: 12044 - protein, 331 aa, Escherichia coli; identical to SEQ ID NO: 2705

SEQ ID NO: 12045 - protein, 807 aa, Escherichia coli
MWNLLRRTRKNQKSGRDVREAGWTSLFQAVAEPFSGAWQQGVKADPEAVLSFHAVFACISLISQDIAKMRLRLMQTDAHGIRRETRRGDIARLCRRPNAQQNRIQFFELWLNAKLRHGNTVVLKIRNARGQIKELRILDWNRVEPLVADDGEVFYRITPDRNCGITEAVTVPAREVIHDRFNCFFHPLIGLPPVYAAGLAATQGHHIQENSTSFFRNGGRPSGVIEIPGSITEENAKKLKSNWDSGYTGENAGKTAILSNGAKYNPTTFSPVDAQTVEQLKMTAEIVCSVFRVPAYKIGVGQPPSSDNVEALEQQYYSQCLQTLIESIELLLDEALETGENESTEFDVTTLLRMDSERRMKTLGDAVKNTLLTPNEARKRENLPPLAGGDALYLQQQNYSLEALSRRDAREDPFALTGKTALAQPPDGASDGNKAISETEHDAVKAMFRGDTAKMTERELSIIRALGEEFSAVLADLQRTFEGKIAAQAQTFEEKLASLSVVLQKCVTGDDVRPMLEQMVKEAVSHIPVPRDGRDYDPEVLQKAVNDAVANIPQPADGKSLTPDDVRPMLEQMVKEAVSHIPVPRDGRDYDPEVLQKAVNDAVANIPQPADGKSITPDDVRPMLEQMVKEAVSHIPVPRDGRDYDPDVLQKAVLDAVSALPAPQDGRDATALEILPAIDDQKSFPRGTYATHQGGLWRAYEKTHGMRGWECLVDGVADIDVSMTGERLFSVVVRQSSGQRTEKTFSLPVMLYRGVFRAGETYHPGDTVTWGGSLWHCNSMTGDKPGEAHSSAWTLAAKRGRDAGGGK

SEQ ID NO: 12046 - protein, 203 aa, Escherichia coli; identical to SEQ ID NO: 2009

SEQ ID NO: 12047 - protein, 224 aa, Escherichia coli; identical to SEQ ID NO: 3165

SEQ ID NO: 12048 - protein, 614 aa, Escherichia coli
MIKKYWFLMVYSVTAFSVWAQDTPLDTLVVTANRFQEPLSTVLAPVTIVTREDIDRWQVSSVNDVLRRLPGVAISQHGGEGQLSTIFVRGTNSNHTLVLIDGVRLNLAGVSGAADLSQFPVALVQRIEYIRGPRSAIYGSDAIGGVINIITSRENTGTEISAGWGSNSYQHYDISTHQQLGENTRVTLLGDYTYTRGFDAVAYGSTGMQPQSDRDGFLSKTFYGKLEHNLSDTWSGFVRGYGYDNRTKYDAWYSPGSPLIDTRKLYSQSWDAGLRYAGETLQSQLVSSYSHSKDYNYDPHYGRYDTSANLDDMKQYNLQWTNSVTVGHGNVGAGIDWQKQSTTPGTGYLPKGYDQRNTGIYLTGLQKLGDFTLEGAVRNDDNSQFERHTTWQSSAGWEFIEGYRFIASYGTAFKAPNLGQLYGMYGNPNLAPEKSKQWEGAFEGLTGGVNWRISGYRNDISEMINYNPHTLRYYNDGKVHVKGIEATVNFDTGALTHTVSYDYTDARNALTDEPLERRPKLQVKYQLDWQVFDFDWGITYQYMGSRYDSDYSSWPYKSVKMGGVSLWDVAVAYPVTPHLIVRGKIANLFNKDYETGYGYQAAGREYILSGSYTF

SEQ ID NO: 12049 - protein, 249 aa, Escherichia coli; identical to SEQ ID NO: 3492

SEQ ID NO: 12050 - protein, 232 aa, Escherichia coli; identical to SEQ ID NO: 2087

SEQ ID NO: 12051 - protein, 213 aa, Escherichia coli; identical to SEQ ID NO: 2232

SEQ ID NO: 12052 - protein, 615 aa, Escherichia coli; identical to SEQ ID NO: 11238

SEQ ID NO: 12053 - protein, 237 aa, Escherichia coli; identical to SEQ ID NO: 4356

SEQ ID NO: 12054 - protein, 230 aa, Escherichia coli; identical to SEQ ID NO: 3019

SEQ ID NO: 12055 - protein, 746 aa, Escherichia coli; identical to SEQ ID NO: 3031

SEQ ID NO: 12056 - protein, 162 aa, Escherichia coli; identical to SEQ ID NO: 1965

SEQ ID NO: 12057 - protein, 393 aa, Escherichia coli
MTVKISGVLKDGAGKPVPGCTIELKARRTTETVIVTTVAYGQSGETGSYSMDVEPGLYRVTLNTEGYAPSYVGDILVKAESAPGTLNKFLMDLEDAQYYPKALAELEAVAAEILKRAEASAASAEEAKKRAENARGPKGDKGDTGPQGIPGPKGDTGERGPKGERGEAGPQGVQGARGETGPVGPQGVPGIQGPAGPAGPRGETGARGEKGEPGDPGGPPGPKGDTGPRGEPGPQGPAGPRGPAGERGPQGLQGVAGERGDTGPAGPQGATGPRGPQGEKGDKGDPGPAGPAGERGPKGDTGPTGPAGKDGADSQANRVRISEKTEVTSSTVVFPSFYGGAQGENAAPEGAVILNIRTAPVSLTNGNLGAACVTAVTYGFLQVHDGRQWVTVE

SEQ ID NO: 12058 - protein, 193 aa, Escherichia coli; identical to SEQ ID NO: 2246

SEQ ID NO: 12059 - protein, 170 aa, Escherichia coli [sequence omitted]

SEQ ID NO: 12060 - protein, 208 aa, Escherichia coli
MKKIWLALAGLVLAFSASAAQYEDGKQYTSLEKPVAGAPQVLEFFSFFCPHCYQFEEVLHISDNVKKKLPEGVKMTKYHVNFMGGDLGKDLTQAWAVAMALGVEDKVTVPLFEGVQKTQTIRSASDIRDVFINAGIKGEEYDAAWNSFVVKSLVAQQEKAAADVQLRGVPAMFVNGKYQLNPQGMDTSNMDVFVQQYADTVKYLSEKK

SEQ ID NO: 12061 - protein, 224 aa, Escherichia coli
MKGLLSLLIFSMVLPAHAGIVIYGTRIIYPAENKEVMVQLMNQGNRSSLLQAWIDDGDTSLPPEKIQVPFMLTPPVAKIGANSGQQVKIKIMPNKLPTNKESIFYLNVLDIPPNSPEQEGKNALKFAMQNRIKLFYRPAGIAPVNKATFKKLLVNRSGNGLVIKNDSANWVTISDVKANNVKVNYETIMIAPLESQSVNVKSNNANNWYLSIIDDHGNYISDKI

SEQ ID NO: 12062 - protein, 130 aa, Escherichia coli
MPVDRETLFELSIASVPSGKVENQSVKVAMRSVFKLFWRPEGLPGDPLEAYQQLRWTRNSQGVQLTNPTPYYINLIQVSVNGKALSNAGVVPPKSQRQTSWCQAIAPCHVAWRAINDYGGLSAKKEQNLP

SEQ ID NO: 12063 - protein, 641 aa, Escherichia coli; identical to SEQ ID NO: 3104

SEQ ID NO: 12064 - protein, 365 aa, Escherichia coli; identical to SEQ ID NO: 3084

SEQ ID NO: 12065 - protein, 236 aa, Escherichia coli; identical to SEQ ID NO: 3286

SEQ ID NO: 12066 - protein, 678 aa, Escherichia coli; identical to SEQ ID NO: 7634

SEQ ID NO: 12067 - protein, 118 aa, Escherichia coli [sequence omitted]

SEQ ID NO: 12068 - protein, 374 aa, Escherichia coli; identical to SEQ ID NO: 2982

SEQ ID NO: 12069 - protein, 241 aa, Escherichia coli; identical to SEQ ID NO: 2950

SEQ ID NO: 12070 - protein, 432 aa, Escherichia coli; identical to SEQ ID NO: 2026

SEQ ID NO: 12071 - protein, 359 aa, Escherichia coli; identical to SEQ ID NO: 2328

SEQ ID NO: 12072 - protein, 203 aa, Escherichia coli; identical to SEQ ID NO: 2201

SEQ ID NO: 12073 - protein, 231 aa, Escherichia coli; identical to SEQ ID NO: 3055

SEQ ID NO: 12074 - protein, 243 aa, Escherichia coli; identical to SEQ ID NO: 3483

SEQ ID NO: 12075 - protein, 89 aa, Escherichia coli; identical to SEQ ID NO: 2811

SEQ ID NO: 12076 - protein, 196 aa, Escherichia coli
MPLIIEVKKYFIILLALAAIAGLGTHAAWSSNGLPRIDNKTLARLAQQHPVVVLFRHAERCDRSTNQCLSDKTGITVKGTQDARELGNAFSADIPDFDLYSSNTVRTIQSATWFSAGKKLTVDKRLLQCGNEIYSAIKDLQSKAPDKNIVIFTHNHCLTYIAKNKRDATFKPDYLDGLVMHVEKGKVYLDGEFVNH

SEQ ID NO: 12077 - protein, 729 aa, Escherichia coli; identical to SEQ ID NO: 6108

SEQ ID NO: 12078 - protein, 246 aa, Escherichia coli; identical to SEQ ID NO: 3021

SEQ ID NO: 12079 - protein, 539 aa, Escherichia coli
MAAVCGTSGIASLFSQAAFAADSDIADGQTQRFDFSILQSMAHDLAQTTWRGAPRPLPDTLATMTPQAYNSIQYDAEKSLWHNVENRQLDAQFFHMGMGFRRRVRMFSVDPATHLAREIHFRPELFKYNDAGVDTKQLEGQSDLGFAGFRVFKAPELARRDVVSFLGASYFRAVDDTYQYGLSARGLAIDTYTDSKEEFPDFTAFWFDTVKPGATTFTVYALLDSASITGAYKFTIHCEKSQVIMDVENHLYARKDIKQLGIAPMTSMFSCGTNERRMCDTIHPQIHDSDRLSMWRGNGEWICRPLNNPQKLQFNAYTDNNPKGFGLLQLDRDFSHYQDIMGWYNKRPSLWVEPRNKWGKGTIGLMEIPTTGETLDNIVCFWQPEKAVKAGDEFAFQYRLYWSAQPPVHCPLARVMATRTGMGGFPEGWAPGEHYPEKWARRFAVDFVGGDLKAAAPKGIEPVITLSSGEAKQIEILYIEPIDGYRIQFDWYPTSDSTDPVDMRMYLRCQGDAISETWLYQYFPPAPDKRQYVDDRVMS

SEQ ID NO: 12080 - protein, 675 aa, Escherichia coli
MAAEDVMIVSASGYEKKLTNAAASVSVISQEELQSSQYHDLAEALRAVEGVDVESGTGKTGGLEISIRGMPASYTLILIDGVRQGGSGDVTPNGFSAMNTGFMPPLAAIERIEVIRGPMSTLYGSDAMGGVVNIITKKNADKWLSSVNAGLNLQESNKWGNSSQFNFWSSGPLVDDSVSLQIRGSTQQRQGSSVTSLSDTSATRIPYPTESQNYNLGARIDWKATEQDVLWFDMDTTRQRYDNQDGQLGSLTGGYDHTLRYERNKISAGYDHTFTFGTWKSYLNWNETENKGRELVRSVLKSDKWGLAGKPRELKESNLILNSLLLTPLGESHLLTVGGEYQSSSMKDGVVLASTGETFRQKSWSLFAEDEWHLTDVLALTAGSRYEHHDQFGGHFSPRAYLVWDVTDAWTLKGGVTTGYKAPTMGQLHKGISGVSGQGRTNLLGNPELKPEESVSYEAGVYYDNLSGLNANITGFITDFSNKIVSYSIDDNTNSYTNSGKARLHGVEFAGTLPLWSEDVTLSLNYTWTQSEQRDGDNKGAPLSYTPEHMVNAKLNWQITEEVASWLGARYRGKTPRFTRNYSSLSAVQKKVYDEKGEYLKAWTVVDAGLSWKVTDALTLNAAVNNLLNKDYSDVSLYSAGKSTLYAGDYFQTGSSTTGYVIPERNYWMSLNYQF

SEQ ID NO: 12081 - protein, 700 aa, Escherichia coli
MKIFSVRQTVLPALLVLSPVVFAADEQTMIVSAAPQVVSELDTPAAVSVVDGEEMRLATPRINLSESLTGVPGLQVQNRQNYAQDLQLSIRGFGSRSTYGIRGIRLYVDGIPATMPDGQGQTSNIDLSSVQNVEVLRGPFSALYGNASGGVMNVTTQTGQQPPTIEASSYYGSFGSWRYGLKATGATGDGTQPGDVDYTVSTTRFTTHGYRDHSGAQKNLANAKLGVRIDEASKLSLIFNSVDIKADDPGGLTKAEWKANPQQAPRAEQYDTRKTIKQTQAGLRYERSLSAQDDMSVMMYAGERETTQYQSIPMAPQLNPSHAGGVITLQRHYQGIDSRWTHRGELGVPVTFTTGLNYENMSENRKGYNNFRLNSGMPEYGQKGELRRDERNLMWNIDPYLQTQWQLSEKLSLDAGVRYSSVWFDSNDHYVTPGNGDDNGDASYHKWLPAGSLKYAMTDAWNIYLAAGRGFETPTINELSYRADGQSGMNFGLKPSTNDTIEIGSKTRIGDGLLSLALFQTDTDDEIVVDSSSGGRTTYKNAGKTRRQGAELAWDQRFAGDFRVNASWTWLDATYRSNVCNEQDCNGNRMPGIARNMGFASIGYVPEDGWYAGTEARYMGDIMADDENTAKAPSYTLVGLFTGYKYNYHNLTVDLFGRVDNLFDKEYVGSVIVNESNGRYYEPSPGRNYGVGMNIAWRFE

SEQ ID NO: 12082 - protein, 351 aa, Escherichia coli; identical to SEQ ID NO: 6097

SEQ ID NO: 12083 - protein, 828 aa, Escherichia coli; identical to SEQ ID NO: 5894

SEQ ID NO: 12084 - protein, 747 aa, Escherichia coli; identical to SEQ ID NO: 2072

SEQ ID NO: 12085 - protein, 760 aa, Escherichia coli; identical to SEQ ID NO: 5980

SEQ ID NO: 12086 - protein, 593 aa, Escherichia coli
MSVVVSGTLKSPDGEAISGANITLTALTVSPDALSGTSASAVTREGGYYGMTMDPGEYAVSVTVKGKTAVYGRVRIEGTESTVTLNMLLRRSLVEVSIPGELLTDFRQIQNNVADDLATIRRLNEDTTTKNTQATKSKESAEASAKSASDSAKTATSRAAEAGQKATDATEAATRAITAAGNAEESSTRAGESEKAAGADAEKARQHAEKARLAQESAGEILKRAEAATVSAEEARRMAENARGPQGPRGPQGETGPMGAQGPKGDTGAQGMQGLRGEAGPKGERGETGPAGPRGEKGVQGEPGPQGLQGLKGDTGARGAQGVPGPTGPMGPAGPRGETGPQGVQGPRGETGPVGPQGVPGIQGPAGPAGPRGETGARGEKGEPGDPGGPPGPKGDTGPRGEPGPQGPAGPRGPAGERGPQGLQGVAGERGDTGPAGPQGIPGPPGPTGSVGPKGEKGEPGDRGPQGATGPRGPQGEKGDKGDPGPAGPAGERGPKGDTGPTGPAGKDGADSQANRVRISEKTEVTSSTVVFPSFYGGAQGENAAPDGAVILNIRTAPVSLTNGNLGAACVTAVTYGFLQVHDGSQWVTVKHE

SEQ ID NO: 12087 - protein, 380 aa, Escherichia coli
MAQVLQALAEQEKLNLVVSPDVSGTVSLHLTDVPWKQALQTVVKSAGLITRQEGNILSVHSIAWQNDNIARQEAEQARAQANLPLENRSITLQYADAGELAKAGEKLLSAKGSMTVDKRTNRLLLRDNKTALSALEQWVAQMDLPVGQVELSAHIVTINEKSLRELGVKWTLADAQHAGGVGQVTTLGSDLSVATATTHVGFNIGRINGRLLDLELSALEQKQQLDIIASPRLLASHLQPASIKQGSEIPYQVSSGESGATSVEFKEAVLGMEVTPTVLQKGRIRLKLHISQNVPGQVLQQADGEVLAIDKQEIETQVEVKSGETLALGGIFTRKNKSGQDSVPLLGDIPWFGQLFRHDGKEDERRELVVFITPRLVSSE

SEQ ID NO: 12088 - protein, 517 aa, Escherichia coli
MKHKLQMMKMRWLSAAVMLTLYTSSSWAFSIDDVAKQAQSLAGKGYEAPKSNLPSVFRDMKYADYQQIQFNHDKAYWNNLKTPFKLEFYHQGMYFDTPVKINEVTATAVKRIKYSPDYFTFGDVQHDKDTVKDLGFAGFKVLYPINSKDKNDEIVSMLGASYFRVIGAGQVYGLSARGLAIDTALPSGEEFPRFKEFWIERPKPTDKRLTIYALLDSLRATGAYKFVVMPGRDTVVDVQSKIYLRDKVGKLGVAPLTSMFLFGPNQPSPANNYRPELHDSNGLSIHAGNGEWIWRPLNNPKHLAVSSFSMENPQGFGLLQRGRDFSRFEDLDDRYDLRPSAWVTPKGEWGKGSVELVEIPTNDETNDNIVAYWTPDQLPEPGKEMNFKYTITFSRDEDKLHAPDNAWVQQTRRSTGDVKQSNLIRQPDGTIAFVVDFTGAEMKKLPEDTPVTAQTSIGDNGEIVESTVRYNPVTKGWRLVMRVKVKDAKKTTEMRAALVNADQTLSETWSYQLPANE

SEQ ID NO: 12089 - protein, 361 aa, Escherichia coli; identical to SEQ ID NO: 3061

SEQ ID NO: 12090 - protein, 161 aa, Escherichia coli; identical to SEQ ID NO: 2582

SEQ ID NO: 12091 - protein, 203 aa, Escherichia coli; identical to SEQ ID NO: 2201

SEQ ID NO: 12092 - protein, 816 aa, Escherichia coli
MNIYRLSFVSCLVVAMPCALAVEFNLNVLDKSMRDRIDISLLKEKGVIAPGEYFVSVAVNNNQISNGQKINWHKNDDKTIPCINDLLVDKFGLKPEVRQSLPLINQCVDFSSRPEMLFNFDQANQQLNITIPQAWLAWHSENWTPPSTWKEGVAGVLMDYNLFASSYRPQDGSSSTNLNAYGTAGINTGAWRLRSDYQLNQTDSDDNHEQSGEISRTYLFRPLPQLGSKLTLGETDFSSNIFDGFSYTGAALASDDRMLPWELRGYAPQISGIAQTNATVTISQSGRVIYQKKVPPGPFIIDDLNQSVQGTLDVKVTEEDGRVNNFQVSAASTPFLTRQGQVRYKLAAGQPRPSMSHQTENETFFSNEVSWGMLSNTSLYGGLLLSGDDYHSAAMGIGQNMLWLGALSFDVTWASSHFDTQQDERGLSYRFNYSKQVDATNSTISLAAYRFSDRHFHSYANYLDHKYNDSDAQDEKQTISLSVGQPITPLNLNLYANLLHQTWWNADASTTANITAGFNVDIGDWRDISISTSFNTTHYEDKDRDNQIYLSISLPFGNGGRVGYDMQNSSHSTTHRMSWNDTLDERNSWGMSAGLQSDRPDNGAQVSGNYQHLSSAGEWDISGTYAANDYSSVSSSWSGSFTATQYGAAFHRRSSTNEPRLMVSTDGVADIPVQGNLDYTNHFGIAVVPLISSYQPSTVAVNMNDLPDGVTVAENVIKETWIEGAIGYKSLASRSGKDVNVIIRNASGQFPPLGADIRQDDSGISVGMVGEEGHAWLSGVAENQKFTVVWGDSQHCSLHLPEHMEDTANRLILPCH

SEQ ID NO: 12093 - protein, 539 aa, Escherichia coli
MAAVCGTSGIASLFSQAAFAADSDIADGQTQRFDFSILQSMAHDLAQTVWRGAPRPLPDTLATMTPQAYNSIQYDAEKSLWHNVENRQLDAQFFHMGMGFRRRVRMFSVDPATHLAREIHFRPELFKYNDAGVDTKQLEGQSDLGFAGFRVFKAPELARRDVVSFLGASYFRAVDDTYQYGLSARGLAIDTYTDSKEEFPDFTAFWFDTVKPGATTFTVYALLDSASITGAYKFTIHCEKSQVIMDVENHLYARKDIKQLGIAPMTSMFSCGTNERRMCDTIHPQIHDSDRLSMWRGNGEWICRPLNNPQKLQFNAYTDNNPKGFGLLQLDRDFSHYQDIMGWYNKRPSLWVEPRNKWGKGTIGLMEIPTTGETLDNIVCFWQPEKAVKAGDEFAFQYRLYWSAQPPVHCPLARVMATRTGMGGFSEGWAPGEHYPEKWARRFAVDFVGGDLKAAAPKGIEPVITLSSGEAKQIEILYIEPIDGYRIQFDWYPTSDSTDPVDMRMYLRCQGDAISETWLYQYFPPAPDKRQYVDDRVMS

SEQ ID NO: 12094 - protein, 696 aa, Escherichia coli
MQLSISAPQAWLKYKDANWTPPELWDHGIAGAFLDYNLYASHYAPHQGDNSQNISSYGQAGVNLGAWRLRTDYQYDQSFNNGKSQANNLDFPRIYLFRPIPAINAKLTIGQYDTESSIFDSFHFSGVSLKSDENMLPPDLRGYAPQITGVAQTNAKVTVSQNNRIIYQENVPPGPFAITNLFNTLQGQLDVKVEEEDGQVTQWQVASNSIPYLTRKGQIRYTTAMGKPTSVGGDSLQQPFFWTGEFSWGWLNNVSLYGGSVLTNRDYQSLAAGVGFNLNSLGSLSFDVTRSDAQLHNQDKETGYSYRANYSKRFESTGSQLTFAGYRFSDKNFVTMNEYINDTNHYTNYQNEKESYIVTFNQYLESLRLNTYVSLARNTYWDASSNVNYSLSLSRDFDIGPLKNVSTSLTFSRINWEEDNQDQLYLNISIPWGTSRTLSYGMQRNQDNKISHTASWYDSSDRNNSWSVSASGDNDEFKDMKASLRASYQHNTENGRLYLSGTSQRDSYYSLNASWNGSFTATRHGAAFHDYSGSADSRFMIDADGAEDIPLNNKRAVTNRYGIGVIPSVSSYITTSLSVDTRNLPENVDIENSVITTTLTEGAIGYAKLDTRKGYQIMGVIRLADGSHPPLGISVKDKTSHKELGLVADGGFVYLNGIQDDSKLTLRWGDKSCFIQPPNSSNLTTGTVILPCISQN

SEQ ID NO: 12095 - protein, 840 aa, Escherichia coli
MHLPLYHYRAHFSFSLLALTIASSLPAYGGKFNPKFLENVQGIDQHIDLSVYDSPVGQQIPGKYRVSVFVNEEKMASRTLDFSTASEAKRKASGESLMPCLSRVQLEEMGVRVDSFPALKMSPPEACVAFDEIIPQATSRFDFNTQTLHLSFPQAAMMMTARGTVDPSRWDEGIPALLLDYSFSGSNGRNEGTGSSSDSTSDSYYLNLRSGLNVGPWRLRNNSIWNRTDGKNQWDNVGTSLNRAIIPLKSQITLGDTATPGEIFDSVQMRGALLASDDEMLPDSQRGFAPVVRGIAKSNAEVSIEQNGYVIYRTFVQPGAFEINDLYATSGSGDLTVIIKEADGSEQRFIQPFSAVAIFQREGYLKYSLAAGEYRAGNYDSDKPHFGQFTAMYGLPWGMTAYGGALLSADYNALALGLGKNFGTIGAVSVDVTQAKSQLRNNEKEEGQSYRFLYSKSFEGGTDLRLLGYKYSTSGYYTFQEATDVRSDADSDYRRYHKRSQIQGNITQQLGDYGSVYFNMTQQDYWNVDGKENSLSAGYHGHIGRVNYSVAYTWTRSPEWEEDNRLWSFSVSIPLGGAWSSYRMTTDQNGKTSQQASVSGTLLEDRNLSYNVQQGYTSNGVGYSGSVNMGYMGGSGNIDVGYNYSKDNQQVNYGVRGGVIVHSEGITLSQPLGESLAIVSAPGARGGHVVNSSGVEVDWMGNAVVPYLTPYRETIVELRSDTLGQNVELQEAFQKVVPTRGAVVRSRFDTRVGYRVLMSLKQANGNAVPFGATAALIDESKPASSIVGEEGQLYISGMPEEGELQVSWGNEQAQRCRVPFRLPENKDNAAIVMVNAVCEK

SEQ ID NO: 12096 - protein, 831 aa, Escherichia coli
MQELPMLRMTPLASAIVALLIGIEAYAAEETFDTHFMIGGMKDQQVSNIRLEDNQPLPGPYDIDIYVNKQWRGKYEIIVKDNPQETCLSREMIKRLGINTDSFASGKQCLTFKQLIQGGSYTWDIGVFRLDFSVPQAWVEDLESGYVPPENWERGINAFYTSYYVSQYYSDYKASGNSKSTYVRFNSGLNLQGWQLHSDASFSKTNNNPGVWKSNTLYLERGFAQLLGTLRVGDMYTSSDIFDSVRFSGVRLFRDMQMLPNSKQNFTPRVQGIAQSNALVTIEQNGFVVYQKEVPPGPFAITDLQLAGGGADLDVSVKEADGSVTTYLVPYAAVPNMLQPGVSKYDFAAGRSHIEGASKQSDFVQAGYQYGFNNLLTLYGGSMVANNYYAFTLGTGWNTRIGAISVDATKSHSIQDNGDVFDGQSYQIAYNKFVSQTSTRFGLAAWRYSSRDYRTFNDHVWANNKDNYRRDENDIYDIADYYQNDFGRKNSFSANMSQSLPEGWGSVSLSTLWRDYWGRSGSSKDYQLSYSNNLRRISYTLAASHAYDENHHEEKRFNIFISIPFDWGDDVTTPRRQIYMSNSTTFDDQGVASNNTGLSGTVGSRDQFNYGVNLSYQYQGNETTAGANLTWNAPVATVNGSYSQSSAYRQAGASVSGGIVAWSGGVNLANRLSETFAVMNAPGIKDAYVNGQKYRTTNRNGVVVYDGMTPYRENYLMLDVSQSDSEAELRGNRKIAAPYRGAVVLVNFDTDQRKPWFIKALRADGQPLTFGYEVNDIHGHNIGVVGQGSQLFIRTNEVPPSVNVAIDKQQGLSCTITFGKEIDESRNYICQ

SEQ ID NO: 12097 - protein, 882 aa, Escherichia coli; identical to SEQ ID NO: 9664

SEQ ID NO: 12098 - protein, 836 aa, Escherichia coli
MKDRIPFAVNNITCVILLSLFCNAASAVEFNTDVLDAADKKNIDFTRFSEAGYVLPGQYLLDVIVNGQSISPASLQISFVEPALSGDKAEKKLPQACLTSDMVRLMGLTAESLDKVVYWHDGQCADFHGLPGVDIRPDTGAGVLRINMPQAWLEYSDATWLPPSRWDDGIPGLMLDYNLNGTVSRNYQGGDAHQFSYNGTVGGNLGPWRLRADYQGSQEQSRYNGEKTTNRNFTWSRFYLFRAIPRWRANLTLGENNINSDIFRSWSYTGASLESDDRMLPPRLRGYAPQITGIAETNARVVVSQQGRVLYDSMVPAGPFSIQDLDSSVRGRLDVEVIEQNGRKKTFQVDTASVPYLTRPGQVRYKLVSGRSRGYGHETEGPVFATGEASWGLSNQWSLYGGAVLAGDYNALAAGAGWDLGVPGTLSADITQSVARIEGERTFQGKSWRLSYSKRFDNADADITFAGYRFSERNYMTMEQYLNARYRNDYSSREKEMYTVTLNKNVADWNTSFNLQYSRQTYWDIRKTDYYTVSVNRYFNVFGLQGVAVGLSASRSKYLGRDNDSAYLRISVPLGTGTASYSGSMSNDRYVNMAGYTDTFNDGLDSYSLNAGLNSGGGLTSQRQINAYYSHRSPLANLSANIASLQKGYTSFGVSASGGATITGKGAALHAGGMSGGTRLLVDTDGVGGVPVDGGQVMTNRWGTGVVTDISSYYRNTTSVDLKRLPDDVEATRSVVESALTEGAIGYRKFSVLKGKRLFAILRLADGSQPPFGASVTSEKGRELGMVADEGLAWLSGVTPGETLSVNWDGKIQCQVNVPETAISDQQLLLPCTPQK

SEQ ID NO: 12099 - protein, 863 aa, Escherichia coli; identical to SEQ ID NO: 11340

SEQ ID NO: 12100 - protein, 774 aa, Escherichia coli; identical to SEQ ID NO: 7857

SEQ ID NO: 12101 - protein, 591 aa, Escherichia coli; identical to SEQ ID NO: 8247

SEQ ID NO: 12102 - protein, 232 aa, Escherichia coli; identical to SEQ ID NO: 2087

SEQ ID NO: 12103 - protein, 517 aa, Escherichia coli; identical to SEQ ID NO: 3116

SEQ ID NO: 12104 - protein, 191 aa, Escherichia coli; identical to SEQ ID NO: 2727

SEQ ID NO: 12105 - protein, 199 aa, Escherichia coli; identical to SEQ ID NO: 3190

SEQ ID NO: 12106 - protein, 650 aa, Escherichia coli; identical to SEQ ID NO: 2146

SEQ ID NO: 12107 - protein, 565 aa, Escherichia coli; identical to SEQ ID NO: 2669

SEQ ID NO: 12108 - protein, 207 aa, Escherichia coli; identical to SEQ ID NO: 2211

SEQ ID NO: 12109 - protein, 236 aa, Escherichia coli; identical to SEQ ID NO: 3286

SEQ ID NO: 12110 - protein, 387 aa, Escherichia coli
MKRKVLAMLVPALLVAGAANAAEIYNKDGNKLDLYGKVDARHTFSDNPGDDGDETIIELGFKGETQITDQLTGYGQALTKTKASDTEGSDNTYVKLAFAGLKFGEMGSFDYGRNYGVIYDVEAWTDMLPVFGGDSYTWTDNFMAGRANGVATYRNSDFFGLVEGLNFALQYQGNNEGSNAGEDQEGTKNGHEDVRFQNGDGFGLSTSYDFDFGLSLGAAYSNSDRTNSQVALGGYHYNEYSKFAGGDTAEAWTFGAKYDANNVYLAMMYAETRNMTPYGNVGIANKTQNFEAVAQYQFDFGLRPSLAYVYSKGKDLGGNDYNNNGHQEYVDQDLVNYVEIGATYYFNKNFSTYVDYKINLLDKDDDFYDNNGIATDDVVGVGLVYQF

SEQ ID NO: 12111 - protein, 45 aa, Escherichia coli; identical to SEQ ID NO: 6471

SEQ ID NO: 12112 - protein, 111 aa, Escherichia coli; identical to SEQ ID NO: 4073

SEQ ID NO: 12113 - protein, 208 aa, Escherichia coli; identical to SEQ ID NO: 1949

SEQ ID NO: 12114 - protein, 840 aa, Escherichia coli; identical to SEQ ID NO: 9665

SEQ ID NO: 12115 - protein, 170 aa, Escherichia coli [sequence omitted]

SEQ ID NO: 12116 - protein, 246 aa, Escherichia coli
MFFNTKHTTALCFVTCMTFSSSSIADIVISGTRVIYKSDQKSVNVRLENKGNNPLLVQSWLDTGDDNAEPGSITVPFTATPPVSRIDAKRGQTIKLMYTASTSLPKDRESVFWFNVLEVPPKPDAEKVANQSLLQLAFRTRIKLFYRPDGLKGNPSEAPLALKWFWSGSEGKASLRVTNPTPYYVSFSSGDLEASGKRYPIDVKMIAPFSDEVMKVNGLNGKASSAKVHFYAINDFGGAIEGNARL

SEQ ID NO: 12117 - protein, 368 aa, Escherichia coli
MNKTITALAIMMASFAANASVLPETPVPFKSGTGAIDNDTVYIGLGSAGTAWYKLDTQAKDKKWKALAAFPGGPRDQATSAFIDGNLYVFGGIGKNSEGLTQVFNDVHKYNPKTNSWVKLMSHAPVGMAGHVTFVHNGKAYVTGGVNQNIFNGYFEDLNEAGKDQTAVDKINAHYFDKKAEDYFFNKFLLSFDPSTQQWSYAGESPWYGTAGAAVVNKGDKTWLINGEAKPGLRTDAVFELDFTGNNLKWNKLAPVSSPDGVAGGFAGVSNDSLIFAGGAGFKGSRENYQNGKNYAHEGLKKSYSADIHLWHNGKWDKSGELSQGRAYGVSLPWNNSLLIIGGETAGGKAVTDSVLITVKDNKVTVQN

SEQ ID NO: 12118 - protein, 241 aa, Escherichia coli; identical to SEQ ID NO: 2922

SEQ ID NO: 12119 - protein, 863 aa, Escherichia coli
MHIRKHRLAGFFVRLVVACAFAAQAPLSSADLYFNPRFLADDPQAVADLSRFENGQELPPGTYRVDIYLNNGYMATRDVTFNTGDSEQGIVPCLTRAQLASMGLNTASVAGMNLLADDACVPLTTMVQDATAHLDVGQQRLNLTIPQAFMSNRARGYIPPELWDPGINAGLLNYNFSGNSVQNRIGGNSHYAYLNLQSGLNIGAWRLRDNTTWSYNSSDSSSGSKNKWQHINTWLERDIIPLRSRLTLGDGYTQGDIFDGINFRGAQLASDDNMLPDSQRGFAPVIHGIARGTAQVTIKQNGYDIYNSTVPPGPFTINDIYAAGNSGDLQVTIKEADGSTQIFTVPYSSVPFLQREGHTRYSITAGEYRSGNAQQEKTRFFQSTLLHGLPAGWTIYGGTQLADRYRAFNFGIGKNMGALGALSVDMTQANSTLPDDSQHDGQSVRFLYNKSLNESGTNIQLVGYRYSTSGYFNFADTTYSRMNGYNIETQDGVIQVKPKFTDYYNLAYNKRGKLQLTVTQQLGRTSTLYLSGSHQTYWGTSNVDEQFQAGLNTAFEDINWTLSYSLTKNAWQKGRDQMLALNVNIPFSHWLRSDSKSQWRHASASYSMSHDLNGRMTNLAGVYGTLLEDNNLSYSVQTGYAGGDDGNSGSTGYATLNYRGGYGNANIGYSHSDDIKQLYYGVSGGVLAHANGVTLGQPLNDTVVLVKAPGAKDAKVENQTGVRTDWRGYAVLPYATEYRENRVALDTNTLADNVDLDNAVANVVPTRGAIVRAEFKARVGIKLLMTLTHNNKPLPFGAMVTSESSQSSGIVADNGQVYLSGMPLAGKVQVKWGEEENAHCVANYQLPPESQQQLLTQLSAECR

SEQ ID NO: 12120 - protein, 266 aa, Escherichia coli; identical to SEQ ID NO: 1894

SEQ ID NO: 12121 - protein, 351 aa, Escherichia coli
MKKSTLALVVMGIVASASVQAAEIYNKDGNKLDVYGKVKAMHYMSDNDSKDGDQSYIRFGFKGETQINDQLTGYGRWEAEFAGNKAESDTAQQKTRLAFAGLKYKDLGSFDYGRNLGALYDVEAWTDMFPEFGGDSSAQTDNFMTKRASGLATYRNTDFFGVIDGLNLTLQYQGKNESRDVKKQNGDGFGTSLTYDFGGSDFAISGAYTNSDRTNEQNLQSRGTGKRAEAWATGLKYDANNIYLATFYSETRKMTPITGGFANKTQNFEAVAQYQFDFGLRPSLGYVLSKGKDIEGIGDEDLVNYIDVGATYYFNKNMSAFVDYKINQLDSDNKLNINNDDIVAVGMTYQF

SEQ ID NO: 12122 - protein, 250 aa, Escherichia coli
MSDLLCSAKLGATTLALLLSAASLSAQASVTPDRTRLIFNESDKSISVTLRNNDPKLPYLAQSWIEDEKGNKISSPLTVLPPVQRIDSMMNGQVKVQGMPDINKLPADRESLFYFNVREIPPKSNKANTLQIALQTRIKLFWRPKALEKVSMKSPWQHKVTLTRSGQDFTVNNPTPYYVIISNASAQKKGNPAAGFSPLVIEPKTTVPLNVKMDSVPVLTYVNDFGARMPLFFKCNGNSCQVDEEQSRKG

SEQ ID NO: 12123 - protein, 881 aa, Escherichia coli
MPDHSLFRLRILPWCIALAISGSYSSVWAEDDIQFDSRFLELKGDTKIDLKRFSSQGYVEPGKYNLQVQLNKQPLAEEYDIYWYAGEDDVSKSYACLTPELVAQFGLKEDVAKNLQWSHDGKCLKPGQLEGMEIKADLSQSALVISLPQAYLEYTWPDWDPPSRWDDGISGIIADYSITAQTRHEENGGDDSNEISGNGTVGVNLGPWRMRADWQTNYQHTRSNDDDEEFSGDDTQKKWEWSRYYAWRALPSLKAKLALGEDYLNSDIFDGFNYVGGSVSTDDQMLPPNLRGYAPDISGVAHTTAKVTVSQMGRVIYETQVPAGPFRIQDLGDSVSGTLHIRIEEQNGQVQEYDISTASMPYLTRPGQVRYKIMMGRPQEWGHHVEGEFFSGAEASWGIANGWSLYGGALGDENYQSAALGVGRDLSTFGAVAFDVTHSHTKLDKDTAYGKGSLDGNSFRVSYSKDFDQLNSRVTFAGYRFSEENFMTMSEYLDASDSEMVRTGNDKEMYTATYNQNFRDAGVSVYLNYTRHTYWDREEQTNYNIMLSHYFNMGSIRNVSISMTGYRYEYDNQADKGMYISLSMPWGDNSTVSYNGNYGSGTDSSQVGYFSRVDDATHYQLNVGTSDKHTSVDGYYSHDGSLAQVDLSANYHEGQYTSAGLSLQGGATLTAHGGALHRTQNMGGTRLLIDADGVADVPVEGNGAAVYTNMFGKAVVSDVNNYYRNQAYIDLNKLPENAEATQSVVQATLTEGAIGYRKFAVISGQKAMAVLRLQDGSHPPFGAEVKNDNEQTVGLVDDDGNVYLAGVKPGEHMSVFWSGVAHCDINLPDPLPADLFNGLLLPCQHKGNVAPVVPDDIKPVIQEQTQQVTPTNPPVSVSANQ

SEQ ID NO: 12124 - protein, 207 aa, Escherichia coli; identical to SEQ ID NO: 2211

SEQ ID NO: 12125 - protein, 867 aa, Escherichia coli
MKIPTTTDIPQRYTWCLAGICYSSLAILPSFLSYAESYFNPAFLLENGTSVADLSRFERGNHQPAGVYWVDLWRNDEFIGSQDIVFESTTENTGDKSGGLMPCFNQVLLERIGLNSSAFPELAQQQNNKCINLLKAVPDATINFDFAAMRLNITIPQIALLSSAHGYIPPEEWDEGIPALLLNYNFTGNRGNGNDSYFFSELSGINIGPWRLRNNGSWNYFRGNGYHSEQWNNIGTWVQRAIIPLKSELVMGDGNTGSDIFDGVGFRGVRLYSSDNMYPDSQQGFAPTVRGIARTAAQLTIRQNGFIIYQSYVSPGAFEITDLHPTSSNGDLDVTIDERDGNQQNYTIPYSTVPILQREGRFKFDLTAGDFRSGNSQQSSPFFFQGTALGGLPQEFTAYGGTQLSANYTAFLLGLGRNLGNWGAVSLDVTHARSQLADASRHEGDSIRFLYAKSMNTFGTNFQLMGYRYSTQGFYTLDDVAYRRMEGYEYDYDGEHRDEPIIVNYHNLRFSRKDRLQLNVSQSLNDFGSLYISGTHQKYWNTSDSDTWYQVGYTSSWVGISYSLSFSWNESVGIPDNERIVGLNVSVPFNVLTKRRYTRENALDRAYASFNANRNSNGQNSWLAGVGGTLLEGHNLSYHVSQGDTSNNGYTGSATANWQAAYGTLGGGYNYDRDQHDVNWQLSGGVVGHENGITLSQPLGDTNVLIKAPGAGGVRIENQTGILTDWRGYAVMLYATVYRYNRIALDTNTMGNSIDVEKNISSVVPTQGALVRANFDTRIGVRALITVTQGGKPVPFGSLVRENSTGITSMVGDDGQVYLSGAPLSGELLVQWGDGANSRCIAHYVLPKQSLQQAVTVISAVCTHPGS

SEQ ID NO: 12126 - protein, 518 aa, Escherichia coli
MKKLKINYLFIGILALLLAVALWPSIPWFGKVDNRIAAIQARGELRVSTIHTPLTYNEINGKPFGLDYELAKQFADYLGVKLKVTVRQNISQLFDDLDNGNADLLAAGLVYNSERVKNYQPGPTYYSVSQQLVYKVGQYRPRTLGNLTAEQLTVAPGHVVVNDLQTLKETKFPELSWKVDDKKGSAELMEDVIEGKLDYTIADSVAISLFQRVHPELAVALDITDEQPVTWFSPLDGDNTLSAALLDFFNEMNEDGTLARIEEKYLGHGDDFDYVDTRTFLRAVDAVLPQLKPLFEKYAEEIDWRLLAAIAYQESHWDAQATSPTGVRGMMMLTKNTAQSLGITDRTDAEQSISGGVRYLQDMMSKVPESVPENERIWFALAAYNMGYAHMLDARALTAKTKGNPDSWADVKQRLPLLSQKPYYSKLTYGYARGHEAYAYVENIRKYQISLVGYLQEKEKQATEAAMQLAQDYPAVSPTELGKEKFPFLSFLSQSSSNYLTHSPSLLFSRKGSEEKQN

SEQ ID NO: 12127 - protein, 119 aa, Escherichia coli; identical to SEQ ID NO: 2526

SEQ ID NO: 12128 - protein, 376 aa, Escherichia coli
MKVKVLSLLVPALLVAGAANAAEVYNKDGNKLDLYGKVDGLHYFSDNKSEDGDQTYVRLGFKGETQVTDQLTGYGQWEYQIQGNTSEDNKENSWTRVAFAGLKFQDVGSFDYGRNYGVVYDVTSWTDILPEFGGDTYGSDNFMQQRGNGFATYRNTDFFGLVDGLNFAVQYQGKNGSVSGEGMTNNGRGALRQNGDGVGGSITYDYEGFGIGAAVSSSKRTDDQNGSYTSNGVVRNYIGTGDRAETYTGGLKYDANNIYLAAQYTQTYNATRVGSLGWANKAQNFEAVAQYQFDFGLRPSLAYLQSKGKNLGVINGRNYDDEDILKYVDVGATYYFNKNMSTYVDYKINLLDDNQFTRDAGINTDNIVALGLVYQF

SEQ ID NO: 12129 - protein, 815 aa, Escherichia coli; identical to SEQ ID NO: 2698

SEQ ID NO: 12130 - protein, 331 aa, Escherichia coli; identical to SEQ ID NO: 2705

SEQ ID NO: 12131 - protein, 258 aa, Escherichia coli; identical to SEQ ID NO: 2060

SEQ ID NO: 12132 - protein, 200 aa, Escherichia coli; identical to SEQ ID NO: 1793

SEQ ID NO: 12133 - protein, 224 aa, Escherichia coli; identical to SEQ ID NO: 4515

SEQ ID NO: 12134 - protein, 838 aa, Escherichia coli; identical to SEQ ID NO: 2795

SEQ ID NO: 12135 - protein, 243 aa, Escherichia coli; identical to SEQ ID NO: 2910

SEQ ID NO: 12136 - protein, 880 aa, Escherichia coli; identical to SEQ ID NO: 3110

SEQ ID NO: 12137 - protein, 897 aa, Escherichia coli; identical to SEQ ID NO: 1908

SEQ ID NO: 12138 - protein, 746 aa, Escherichia coli; identical to SEQ ID NO: 5629

SEQ ID NO: 12139 - protein, 266 aa, Escherichia coli; identical to SEQ ID NO: 1893

SEQ ID NO: 12140 - protein, 161 aa, Escherichia coli; identical to SEQ ID NO: 2582

SEQ ID NO: 12141 - protein, 883 aa, Escherichia coli
MTAFRAAFKAYRMHQVLILPRFARLTFALGLATAVFPVDAEYYFNPRFLSNDLAESVDLSAFTKGREAPPGTYRVDIYLNDEFMASRGITFIADDNNADLIPCLSTDLLVSLGIKKSALLDNKEHSADKHVPDNSACTPLQDRLADASSEFDVGQQHLSLSVPQIYVGRMARGYVSPDLWEEGINAGLLNYSFNGNSINNRSNHNAGKSNYAYLNLQSGINIGSWRLRDNSTWSYNSGSSNSSDSNKWQHINTSAERDIIPLRSRLTVGDSYTDGDIFDSVNFRGLKINSTEAMLPDSQHGFAPVIHGIARGTAQVSVKQNGYDVYQTTVPPGPFTIDDINSAANGGDLQVTIKEADGSIQTLYVPYSSVPVLQRAGYTRYALAMGEYRSGNNLQSTPKFVQASLMHGLKGNWTPYGGMQIAEDYQAFNLGIGKDLGLFGAFSFDITQANTTLADDTRHSGQSVKSVYSKSFYQTGTNIQVAGYRYSTQGFYNLSDSAYSRMSGYTVKPPTGDTSEQTLFIDYFNLFYSKRGQEQISISQQLGNYGTTFFSASRQSYWNTSRSDQQISFGLNVPFGDITTSLNYSYSNNIWQNDRDHLLAFTLNVPFSHWMRTDSQSAFHNSNASYSMSNDLKGGMTNLSGVYGTLLPDNNLNYSVQVGNTHGGNTSSGTSGYSSLNYRGAYGNTNVGYSRSGDSSQIYYGMSGGIIAHADGITFGQPLGDTMVLVKAPGADNVKIENQTGIHTDWRGYAILPFATEYRENRVALNANSLADNVELDETVVTVIPTHGAIARATFNVQIGGKVLMTLKYGNKSVPFGAIVTHGENKNGSIVAENGQVYLTGLPQSGKLQVSWGKDKNSNCIVEYKLPEVSPGTLLNQQTAICR

SEQ ID NO: 12142 - protein, 826 aa, Escherichia coli
MLRMTPLASAIVALLLGIEAYAAEETFDTHFMIGGMKDQQVANIRLNDNQPLPGQYDIDIYVNKQWRGKYEIIVKDNPQETCLSREVIKRLGINSDNFASGKQCLTFEQLVQGGSYTWDIGVFRLDFSVPQAWVEELESGYVPPENWERGINAFYTFYYLSQYYSDYKASGNNKSTYVRFNSGLNLLGWQLHSDASFSKTNNNPGVWKSNTLYLERGFAQLLGTLRVGDMYTSSDIFDSVRFRGVRLFRDMQMLPNSKQNFTPRVQGIAQSNALVTIEQNGFVVYQKEVPPGPFAITDLQLAGGGADLDVSVKEADGSVTTYLVPYAAVPNMLQPGVSKYDLAAGRSHIEGASKQSDFVQAGYQYGFNNLLTLYGGSMVANNYYAFTLGAGWNTRIGAISVDATKSHSKQDNGDVFDGQSYQIAYNKFVSQTSTRFGLAAWRYSSRDYRTFNDHVWANNKDNYRRDENDVYDIADYYQNDFGRKNSFSANMSQSLPEGWGSVSLSTLWRDYWGRSGSSKDYQLSYSNNLRRISYTLAASQAYDENHHEEKRFNIFISIPFDWGDDVSTPRRQIYMSNSTTFDDQGFASNNTGLSGTVGSRDQFNYGVNLSHQHQGNETTAGANLTWNAPVATVNGSYSQSSTYRQAGASVSGGIVAWSGGVNLANRLSETFAVMNAPGIKDAYVNGQKYRTTNRNGVVIYDGMTPYRENHLMLDVSQSDSEAELRGNRKIAAPYRGAVVLVNFDTDQRKPWFIKALRADGQSLTFGYEVNDIHGHNIGVVGQGSQLFIRTNEVPSSVNVAIDKQQGLSCTITFGKEIDESRNYICQ

SEQ ID NO: 12143 - protein, 826 aa, Escherichia coli; identical to SEQ ID NO: 7491

SEQ ID NO: 12144 - protein, 361 aa, Escherichia coli; identical to SEQ ID NO: 3061

SEQ ID NO: 12145 - protein, 878 aa, Escherichia coli
MSYLNLRLYQRNTQCLHIRKHRLAGFFVRLFVACAFAAQAPLSSAELYFNPRFLADDPQAVADLSRFENGQELPPGTYRVDIYLNNGYMATRDVTFNTGDSEQGIVPCLTRAQLASMGLNTASVSGMNLLADDACVPLTSMIHDATAHLDVGQQRLNLTIPQAFMSNRARGYIPPELWDPGINAGLLNYNFSGNSVQNRIGGNSHYAYLNLQSGLNIGAWRLRDNTTWSYNSSDSSSGSKNKWQHINTWLERDIIPLRSRLTLGDGYTQGDIFDGINFRGAQLASDDNMLPDSQRGFAPVIHGIARGTAQVTIKQNGYDIYNSTVPPGPFTINDIYAAGNSGDLQVTIKEADGSTQIFTVPYSSVPLLQREGHTRYSITAGEYRSGNAQQEKPRFFQSTLLHGLPAGWTIYGGTQLADRYRAFNFGIGKNMGALGALSVDMTQANSTLPDDSQHDGQSVRFLYNKSLNESGTNIQLVGYRYSTSGYFNFADTTYSRMNGYNIETQDGVIQVKPKFTDYYNLAYNKRGKLQLTVTQQLGRTSTLYLSGSHQTYWGTSNVDEQFQAGLNTAFEDINWTLSYSLTKNAWQKGRDQMLALNVNIPFSHWLRSDSKSQWRHASASYSMSHDLNGRMTNLAGVYGTLLEDNNLSYSVQTGYAGGGDGNSGSTGYATLNYRGGYGNANIGYSHSDDIKQLYYGVSGGVLAHANGVTLGQPLNDTVVLVKAPGAKDAKVENQTGVRTDWRGYAVLPYATEYRENRVALDTNTLADNVDLDNAVANVVPTRGAIVRAEFKARVGIKLLMTLTHNNKPLPFGAMVTSESSQSSGIVADNGQVYLSGMPLAGKVQVKWGEEENAHCVANYQLPPESQQQLLTQLSAECR

SEQ ID NO: 12146 - protein, 728 aa, Escherichia coli
MTPQDSNELCLTEAWLTKAGVYVSADYFREGYDATRQCYVLTKAPSVKVDFDVSTQSLALSIPQKGLVKMPENVDWDYGTSAFRVNYNANANTGRNNTSAFGSADLKANIGHWVVSSSATASGGDSGDNSTTINMFTATRAIRALSADLAVGKTSTGDSLLGSTGTYGVSLSRNNSMKPGNLGYTPVFSGIANGPSRVTLTQNGRLLHSEMVPAGPFSITDVPLYTSGDVTMKITGEDGREQVQNFPLSVMAGQLSPGQHEFSVAAGLPDDDSDLKGGVFAASYGYGLDGLTLRAGGVFNQDWQGASAGVVAGLGYLGAVSADGAYATAKYRDGSHSGNKVQLSWSKQLETTNTGLRVSWSRQSEEYEGMSSFDPTELWSQSNHGRRTKDEWNAGISQPVGGLFSLSVSGWQRSYYPASMTGSYRYSDDNGKETGITGSLSTQIKGVSLNLGWSGSRNSRGENNWSASASVSVPFTLFDRRYSSSASVSTSKGGGTGFSTGVSGSLNDRFSYGLGGGRDGDGGTSSYLNASYSGDRAYLNGVLNHSQSGGTSGSVSVSGSVLAVPAAKDIMFSRTTGDTVAVVNVKDTPGVKVTSGDGQTDSDGNLVVPLNSYDWNTVTIDAGTLPLSTELTNTSQKVVPTDKAVVWMPFDALKVKRYLLQVKQRDGEFVPGGTWARDSKNTPLGFVANNGVLMINTVDAPGDITLGQCRIPAARLQDTEKLQEITCE

SEQ ID NO: 12147 - protein, 224 aa, Escherichia coli; identical to SEQ ID NO: 4053

SEQ ID NO: 12148 - protein, 193 aa, Escherichia coli; identical to SEQ ID NO: 2246

SEQ ID NO: 12149 - protein, 760 aa, Escherichia coli; identical to SEQ ID NO: 2080

SEQ ID NO: 12150 - protein, 203 aa, Escherichia coli; identical to SEQ ID NO: 2015

SEQ ID NO: 12151 - protein, 161 aa, Escherichia coli; identical to SEQ ID NO: 2582

SEQ ID NO: 12152 - protein, 118 aa, Escherichia coli [sequence omitted]

SEQ ID NO: 12153 - protein, 386 aa, Escherichia coli
MVDDVPVAQVLQALAEQEKLNLVVSPDVSGTVSLHLTDVPWKQALQTVVKSAGLITRQEGNILSVHSIAWQNNNIARQEAEQARAQANLPLENRSITLQYADAGELAKAGEKLLSAKGSMTVDKRTNRLLLRDNKTALSALEQWVAQMDLPVGQVELSAHIVTINEKSLRELGVKWTLADAQHAGGVGQVTTLGSDLSVATATTHVGFNIGRINGRLLDLELSALEQKQQLDIIASPRLLASHLQPASIKQGSEIPYQVSSGESGATSVEFKEAVLGMEVTPTVLQKGRIRLKLHISQNVPGQVLQQADGEVLAIDKQEIETQVEVKSGETLALGGIFTRKNKSGQDSVPLLGVIPWFGQLFRHDGKEDERRELVVFITPRLVSNE

SEQ ID NO: 12154 - protein, 751 aa, Escherichia coli
MQFHINSPDINNEKAVLLARDETLGNCLNLTEIIPQASVRYDVNEQRLDIDVPQAWVMKNYQNYVDPSLWENGINAAMLSYNLNGYHSETPGRRNDSIYAAFNGGMNLGAWRLRASGNYNWMTDSGSNYDFKNRYIQRDIASLRSQLILGESYTTGETFDSVSIRGIRLYSDSRMLPPTLASFAPIIHGVANTNAKVTITQGGYKIYETTVPPGAFVIDDLSPSGYGSDLIVTVEESDGSKRTFSQPFSSVVQMLRPGVGRWDISGGQVLKDDIQDEPNLFQASYYYGLNNYLTGYTGIQITDNNYTAGLLGLGLNTSVGAFSFDVTHSNVRIPDDKTYQGQSYRVSWNKLFEETSTSLNIAAYRYSTQNYLGLNDALTLIDEVKHPEQDLEPKSMRNYSRMKNQVTVSINQPLKFEKKDYGSFYLSGSWSDYWASGQNRSNYSIGYSNSASWGSYSVSAQRSWNEDGDTDDSVYLSFTIPIEKLLGTEQRTSGFQSIDTQMSSDFKGNNQLNVSSSGYSDNARVSYSVNTGYTMNKASKDLSYVGGYASYESPWGSLAGSVSANSDNSRQVSLSTDGGFVLHSGGLTFSNDSFSDSDTLAVVQAPGAQGARINYGNSTIDRWGYGVTSALSPYHENRIALDINDLENDVELKSTSAVAVPRQGSVVFADFETVQGQSAIMNITRSDGKNIPFAADIYDEQGNVIGNVGQGGQAFVRGIEQQGNISIKWLEESKPVSCLAHYQQSSEAEKK

SEQ ID NO: 12155 - protein, 838 aa, Escherichia coli
MPQRHHQGHKRTPKQLALIIKRCLPMVLTGSGMLCTTANAEEYYFDPIMLETTKSGMQTTDLSRFSKKYAQLPGTYQVDIWLNKKKVSQKKITFTANAEQLLQPQFTVEQLRELGIKVDEIPALAEKDDDSVINSLEQIIPGTAAEFDFNHQRLNLSIPQIALYRDARGYVSPSRWDDGIPTLFTNYSFTGSDNRYRQGNRSQRQYLNMQNGANFGPWRLRNYSTWTRNDQASSWNTISSYLQRDIKALKSQLLLGESATSGSIFSSYTFTGVQLASDDNMLPNSQRGFAPTVRGIANSCAIVTIRQNGYVIYQSNVPAGAFEINDLYPSSNSGDLEVTIEESDGTQRRFIQPYSSLPMMQRPGHLKYSATAGRYRADANSDSKEPEFAEATAIYGLNNTFTLYGGLLGSEDYYALGIGIGGTLGALGALSMDINRADTQFDNQHSFHGYQWRTQYIKDIPETNTNIAVSYYRYTNDGYFSFNEANTRNWNYNSRQKSEIQFNISQTIFDGVSLYASGSQQDYWGNNEKNRNISVGVSGQQWGIGYSLNYQYSRYTDQNNDRALSLNLSIPLERWLPRSRVSYQMTSQKDRPTQHEMRLDGSLLDDGRLSYSLEQSLDDDNNHNSSLNASYRSPYGTFSAGYSYGNDSSQYNYGVTGGVVIHPHGVTLSQYLGNAFALIDANGASGVRIQNYPGIATDPFGYAVVPYLTTYQENRLSVDTTQLPDNVDLEQTTQFVVPNRGAMVAARFNANIGYRVLVTVSDRNGKPLPFGALASNDETGQQSIVDEGGILYLSGISSKSQSWTVRWGNQADQQCQFAFSTPDSEPTTSVLQGTAQCH

SEQ ID NO: 12156 - protein, 825 aa, Escherichia coli; identical to SEQ ID NO: 9695

SEQ ID NO: 12157 - protein, 865 aa, Escherichia coli
MTIEYTKNYHHLTRIATFCALLYCNSTFSAELVEYDHTFLMGQNASNIDLSRYSEGNPAIPGVYDVSVYVNDQPIINQSITFVAVEGKKNAQACITLKNLLQFHINSPDINNEKAVLLARDETLGNCLNLTEIIPQASVRYDVNDQRLDIDVPQAWVMKNYQNYVDPSLWENGINAAMLSYNLNGYHSETPGRRNDSIYAAFNGGMNLGAWRLRASGNYNWMTDSGSNYDFKNRYVQRDIASLRSQLILGESYTTGETFDSVSIRGIRLYSDSRMLPPTLASFAPIIHGVANTNAKVTITQGGYKIYETTVPPGAFVIDDLSPSGYGSDLIVTVEESDGSKRTFSQPFSSVVQMLRPGVGRWDISGGQVLKDDIQDEPNLFQASYYYGLNNYLTGYTGIQITDNNYTAGLLGLGLNTSVGAFSFDVTHSNVRIPDDKTYQGQSYRVSWNKLFEETSTSLNIAAYRYSTQNYLGLNDALTLIDEVKHPEQDLEPKSMRNYSRMKNQVTVSINQPLKFEKKDYGSFYLSGSWSDYWASGQNRSNYSIGYSNSASWGSYSVSAQRSWNEDGDTDDSVYLSFTIPIEKLLGTEQRTSGFQSIDTQMSSDFKGNNQLNVSSSGYSDNARVSYSVNTGYTMNKASKDLSYVGGYASYESPWGTLAGSVSANSDNSRQVSLSTDGGFVLHSGGLTFSNDSFSDSDTLAVVQAPGAQGARINYGNSTIDRWGYGVTSALSPYHENRIALDINDLENDVELKSTSAVAVPRQGSVVFADFETVQGQSAIMNITRSDGKNIPFAADIYDEQGNVIGNVGQGGQAFVRGIEQQGNISIKWLEESKPVSCLAHYQQSSEAEKIAQSIILNGIRCQIQ

SEQ ID NO: 12158 - protein, 793 aa, Escherichia coli; identical to SEQ ID NO: 5435

SEQ ID NO: 12159 - protein, 631 aa, Escherichia coli
MVVTASSVEQNLKDAPASISVITQEDLQRKPVQNLKDVLKEVPGVQLTNEGDNRKGVSIRGLDSSYTLILVDGKRVNSRNAVFRHNDFDLNWIPVDSIERIEVVRGPMSSLYGSDALGGVVNIITKKIGQKWSGTVTVDTTIQEHRDRGDTYNGQFFTSGPLIDGVLGMKAYGSLAKREKDDPQNSTTTDTGETPRIEGFSSRDGNVEFAWTPNQNHDFTAGYGFDRQDRDSDSLDKNRLERQNYSVSHNGRWDYGTSELKYYGEKVENKNPGNSSPITSESNTVDGKYTLPLTAINQFLTVGGEWRHDKLSDAVNLTGGTSSKTSASQYALFVEDEWRIFEPLALTTGVRMDDHETYGEHWSPRAYLVYNATDTVTVKGGWATAFKAPSLLQLSPDWTSNSCRGACKIVGSPDLKPETSESWELGLYYMGEEGWLEGVESSVTVFRNDVKDRISISRTFDVNAAPGYQNFVGFETGANGRRIPVFSYYNVNKARIQGVETELKIPFNDEWKLSINYTYNDGRDVSNGENKPLSDLPFHTANGTLDWKPLALEDWSFYVSGHYTGQKRADSATAKTPGGYTIWNTGAAWQVTKDVKLRAGVLNLGDKDLSRDDYSYNEDGRRYFMAVDYRF

SEQ ID NO: 12160 - protein, 274 aa, Escherichia coli; identical to SEQ ID NO: 2309

SEQ ID NO: 12161 - protein, 430 aa, Escherichia coli; identical to SEQ ID NO: 2617

SEQ ID NO: 12162 - protein, 747 aa, Escherichia coli
MARSKTAQPKHSLRKIAVVVATAVSGMSVYAQAAVEPKEDTITVTAAPAPQESAWGPAATIAARQSATGTKTDTPIQKVPQSISVVTAEEMALHQPKSVKEALSYTPGVSVGTRGASNTYDHLIIRGFAAEGQSQNNYLNGLKLQGNFYNDAVIDPYMLERAEIMRGPVSVLYGKSSPGGLLNMVSKRPTTEPLKEVQFKAGTDSLFQTGFDFSDSLDDDGVYSYRLTGLARSANAQQKGSEEQRYAIAPAFTWRPDDKTNFTFLSYFQNEPETGYYGWLPKEGTVEPLPNGKRLPTDFNEGAKNNTYSRNEKMVGYSFDHEFNDTFTVRQNLRFAENKTSQNSVYGYGVCSDPANAYSKQCAALAPADKGHYLARKYVVDDEKLQNFSVDTQLQSKFATGDIDHTLLTGVDFMRMRNDINAWFGYDDSVPLLNLYNPVNTDFDFNAKDPANSGPYRILNKQKQTGVYVQDQAQWDKVLVTLGGRYDWADQESLNRVAGTTDKRDDKQFTWRGGVNYLFDNGVTPYFSYSESFEPSSQVGKDGNIFAPSKGKQYEVGVKYVPEDRPIVVTGAVYNLTKTNNLMADPEGSFFSVEGGEIRARGVEIEAKAALSASVNVVGSYTYTDAEYTTDTTYKGNTPAQVPKHMASLWADYTFFDGLLSGLTLGTGGRYTGSSYGDPANSFKVGSYTVVDALVRYDLARVGMAGSNVALHVNNLFDREYVASCFNTYGCFWGAERQVVATATFRF

SEQ ID NO: 12163 - protein, 700 aa, Escherichia coli
MKIFSVRQTVLPALLVLSPVVFAADEQTMIVSAAPQVVSELDTPAAVSVVDGEEMRLATPRINLSESLTGVPGLQVQNRQNYAQDLQLSIRGFGSRSTYGIRGIRLYVDGIPATMPDGQGQTSNIDLSSVQNVEVLRGPFSALYGNASGGVMNVTTQTGQQPPTIEASSYYGSFGSWRYGLKATGATGDGTQPGDVDYTVSTTRFTTHGYRDHSGAQKNLANAKLGVRIDEASKLSLIFNSVDIKADDPGGLTKAEWKANPQQAPRAEQYDTRKTIKQTQAGLRYERSLSAQDDMSVMMYAGERETTQYQSIPMAPQLNPSHAGGVITLQRHYQGIDSRWTHRGELGVPVTFTTGLNYENMSENRKGYNNFRLNSGMPEYGQKGELRRDERNLMWNIDPYLQTQWQLSEKLSLDAGVRYSSVWFDSNDHYVTPGNGDDSGDASYHKWLPAGSLKYAMTDAWNIYLAAGRGFETPTINELSYRADGQSGMNLGLKPSTNDTIEIGSKTRIGDGLLSLALFQTDTDDEIVVDSSSGGRTTYKNAGKTRRQGAELAWDQRFAGDFRVNASWTWLDATYRSNVCNEQDCNGNRMPGIARNMGFASIGYVPEDGWYAGTEARYMGDIMADDENTAKAPSYTLVGLFTGYKYNYHNLTVDLFGRVDNLFDKEYVGSVIVNESNGRYYEPSPGRNYGVGMNIAWRFE

SEQ ID NO: 12164 - protein, 368 aa, Escherichia coli; identical to SEQ ID NO: 3872

SEQ ID NO: 12165 - protein, 678 aa, Escherichia coli; identical to SEQ ID NO: 2231

SEQ ID NO: 12166 - protein, 213 aa, Escherichia coli; identical to SEQ ID NO: 2232

SEQ ID NO: 12167 - protein, 230 aa, Escherichia coli
MMTQIKLLMLIIFYLIISASAHAAGGIALGATRIIYPADAKQTAVWIRNSHTNERFLVNSWIENSSGVKEKSFIITPPLFVSEPKSENTLRIIYTGPPLAADRESLFWMNVKTIPSVDKNALNGRNVLQLAILSRMKLFLRPIQLQELPAEAPDTLKFSRSGNYINVHNPSPFYVTLVNLQVGSQKLGNAMAAPRVNSQIPLPSGVQGKLKFQTVNDYGSVTPVREVNLN

SEQ ID NO: 12168 - protein, 822 aa, Escherichia coli
MIKNIYCSLSVIIIGCASAYAVEFNKDLIEAEDRENVNLSQFETDGQLPVGKYSLSTLINNKRTPIHLDLQWVLIDNQTAVCVTPEQLTLLGFTDEFIEKTQQNLIDGCYPIEKEKQITTYLDKGKMQLSISAPQAWLKYKDANWTPPELWNHGIAGAFLDYNLYASHYAPHQGDNSQNISSYGQAGVNLGAWRLRTDYQYDQSFNNGKSQATNLDFPRIYLFRPIPAMNAKLTIGQYDTESSIFDSFHFSGISLKSDENMLPPDLRGYAPQITGVAQTNAKVTVSQNNRIIYQENVPPGPFAITNLFNTLQGQLDVKVEEEDGRVTQWQVASNSIPYLTRKGQIRYTTAMGKPTSVGGDSLQQPFFWTGEFSWGWLNNVSLYGGSVLTNRDYQSLAAGVGFNLNSLGSLSFDVTRSDAQLHNQDKETGYSYRANYSKRFESTGSQLTFAGYRFSDKNFVTMNEYINDTNHYTNYQNEKESYIVTFNQYLESLRLNTYVSLARNTYWDASSNVNYSLSLSRDFDIGPLKNVSTSLTFSRINWEEDNQDQLYLNISIPWGTSRTLSYGMQRNQDNEISHTASWYDSSDRNNSWSVSASGDNDEFKDMKASLRASYQHNTENGRLYLSGTSQRDSYYSLNASWNGSFTATRHGAAFHDYSGSADSRFMIDADGTEDIPLNNKRAVTNRYGIGVIPSVSSYITTSLSVDTRNLPENVDIENSVITTTLTEGAIGYAKLDTRKGYQIIGVIRLADGSHPPLGISVKDETSHKELGLVADGGFVYLNGIQDDNKLALRWGDKSCFIQPPNSSNLTTGTAILPCISQN

SEQ ID NO: 12169 - protein, 229 aa, Escherichia coli; identical to SEQ ID NO: 9651

SEQ ID NO: 12170 - protein, 130 aa, Escherichia coli; identical to SEQ ID NO: 3064

SEQ ID NO: 12171 - protein, 871 aa, Escherichia coli
MHQVLIMPRFARLTIALGLATAVFPVDAEYYFNPRFLSNDLAESVDLSAFTKGREAPPGTYRVDIYLNDEFMTSRDITFIADDNNAELIPCLSTDLLVSLGIKKSALLDNKEHSAEKHVPDNSACTPLQDRLADASTEFDVGQQHLSLSVPQIYVGRMARGYVSPDLWEEGINAGLLNYSFNGNSINNRSNHNAGKSNYAYLNLQSGINIGSWRLRDNSTWSYNSGSSNSSDSNKWQHINTSAERDIIPLRSRLTVGDSYTDGDIFDSVNFRGLKINSTEAMLPDSQHGFAPVIHGIARGTAQVSVKQNGYDVYQTTVPPGPFTIDDINSAANGGDLQVTIKEADGSIQTLYVPYSSVPVLQRAGYTRYALAMGEYRSGNNLQSSPKFIQGSLMHGLEGNWTPYGGMQIAEDYQAFNLGIGKDLGLFGAFSFDITQANTTLADGTRHSGQSVKSVYSKSFYQTGTNIQVAGYRYSTQGFYNLSDSAYSRMSGYTVKPPTGDTNEQTQFIDYFNLFYSKRGQEQISISQQLGNYGTTFFSASRQSYWNTSRSDQQISFGLNVPFGDITTSLNYSYSNNIWQNDRDHLLAFTLNVPFSHWMRTDSQSAFRNSNASYSMSNDLKGGMTNLSGVYGTLLPDNNLNYSVQVGNTHGGNTSSGTSGYSSLNYRGAYGNTNVGYSRSGDSSQIYYGMSGGIIAHADGITFGQPLGDTMVLVKAPGADNVKIENQTGIHTDWRGYAILPFATEYRENRVALNANSLADNVELDETVITVIPTHGAIARATFNAQIGGKVLMTLKYGNKSVPFGAIVTHGENKNGSIVAENGQVYLTGLPQSGKLQVSWGKDKNSNCIVEYKLPEVSPGTLLNQQTAICR

SEQ ID NO: 12172 - protein, 446 aa, Escherichia coli; identical to SEQ ID NO: 5547

SEQ ID NO: 12173 - protein, 266 aa, Escherichia coli; identical to SEQ ID NO: 1894

SEQ ID NO: 12174 - protein, 606 aa, Escherichia coli
MYRTHRQHSLLSSGGVPSFIGGLVVFVSAAFNAQAETWFDPAFFKDDPSMVADLSRFEKGQKITPGVYRVDIVLNQTIVDTRNVNFVEITPEKGIAACLTTESLDAMGVNTDAFPAFKQLDKQACVPLAEIIPDASVTFNVNKLRLEISVPQIAIKSNARGYVPPERWDEGINALLLGYSFSGANSIHSSADSDSGDSYFLNLNSGVNLGPWRLRNNSTWSRSSGQTAEWKNLSSYLQRAVIPLKGELTVGDDYTAGDFFDSVSFRGVQLASDDNMLPDSLKGFAPVVRGIAKSNAQITIKQNGYTIYQTYVSPGAFEISDLYSTSSSGDLLVEIKEADGSVNSYSVPFSSVPLLQRQGRIKYAVTLAKYRTNSNEQQESKFAQATLQWGGPWGTTWYGGGQYAEYYRAAMFGLGFNLGDFGAISFDVTQAKSTLADQSEHKGQSYRFLYAKTLNQLGTNFQLMGYRYSTSGFYTLSDTMYKHMDGYEFNDGDDEDTPMWSRYYNLFYTKRGKLQVNISQQLGEYGSFYLSGSQQTYWHTDQQDRLLQFGYNTQIKDLSLGVSWNYSKSRGQPDADQVFALNFSLPLNLLLPRSNDSYTRKKITPG

SEQ ID NO: 12175 - protein, 784 aa, Escherichia coli; identical to SEQ ID NO: 2244

SEQ ID NO: 12176 - protein, 242 aa, Escherichia coli; identical to SEQ ID NO: 2697

SEQ ID NO: 12177 - protein, 368 aa, Escherichia coli; identical to SEQ ID NO: 2368

SEQ ID NO: 12178 - protein, 475 aa, Escherichia coli
MNRSVSTNDQGYAANPFPTSSAAKPDAVLVKNEEKNASETGSIYSSMTLKDFSKFVKDEIGFSYNGYYRSGWGTASHGSPKSWAIGSLGRFGNEYSGWFDLQLKQRVYNENGKRVDAVVMMDGNVGQQYSTGWFGDNAGGENFMQFSDMYVTTKGFLPFAPEADFWVGKHGAPKIEIQMLDWKTQRTDAAAGVGLENWKVGPGKIDIALVREDVDDYDRSLQNKQQINTNTIDLRYKDIPLWDKATLMVSGRYVTANESASEKDNQDNNGYYDWKDTWMFGTSLTQKFDKGGFNEFSFLVANNSIASNFGRYAGASPFTTFNGRYYGDHTGGTAVRLTSQGEAYIGDHFIVANAIVYSFGNDIYSYETGAHSDFESIRAVVRPAYIWDQYNQTGVELGYFTQQNKDANSNKFNESGYKTTLFHTFKVNTSMLTSRPEIRFYATYIKALENELDGFTFEDNKDDQFAVGAQAEIWW

SEQ ID NO: 12179 - protein, 359 aa, Escherichia coli; identical to SEQ ID NO: 2329

SEQ ID NO: 12180 - protein, 900 aa, Escherichia coli
MKLNIFTKSMIGMGLVCSALPALAMEAWNNQQGGNKYQVIFDGKIYENAWWVSSTNCPGKAKANDATNPWRLKRTATAAEISQFGNTLSCEKSGSSSSSNSNTPASNTPANGGSATPAQGTVPSNSSVVAWNKQQGGQTWYVVFNGAVYKNAWWVASSNCPGDAKGNDASNPWRYVRAATATEISETSNPQSCTSAPQPAPDVKPAPDVKPAPDVQPAPADKSNDNYAVVAWKGQEGSSTWYVIYNGGIYKNAWWVGAANCPGDAKENDASNPWRYVRAATATEITQYGNPGSCSVKPDNNGGAVTPVDPTPETPETPVTPTPDNNEPSTPADSSNDYSLQAWSGQEGSEIYHVIFNGNVYQNAWWVGSEDCPRGTSVENSDNPWRLVRTATAAEMSQYGNPTTCEIDNGGVIIANGFQASKAYSANSIVDYNDAHYKTSVDQDAWGFVPGGDNPWKKYEPAKAWSASTVYVKGDRVVVDGQAYEALFWTQSDNPALVANQNATGSNSRPWKPLGKTQSYSNEELNNAPQFNPETLYASDTLIRFNGENYISQSKVQKVSPSDSNPWRVFVDWTGTKERVGTPKKAWPKHVYAPYVDFTLNTIPDLAALAKNHNVNHFTLAFVVSKDANTCLPTWGTAYGMQNYAQYSKIKALREAGGDVMLSIGGANNAPLAASCKNVDDLMQHYYDIVDNLNLRVLDFDIEGTWVADQASIERRNLAVKKVQDKWKSEGKDIAIWYTLPILPTGLTPEGMNVLSDAKAKGVELAGVNVMTMDYGNAICQSANTEGQNIHGKCATSAIANLHSQLKGLHPNKSDAEIDAMMGTTPMVGVNDVQGEVFYLSDARLVMQDAQKRNLGMVGIWSIARDLPGGTNLSPEFHGLTKEQAPKYAFSEIFAPFTKQ

SEQ ID NO: 12181 - protein, 861 aa, Escherichia coli; identical to SEQ ID NO: 10561

SEQ ID NO: 12182 - protein, 729 aa, Escherichia coli; identical to SEQ ID NO: 2074

SEQ ID NO: 12183 - protein, 249 aa, Escherichia coli; identical to SEQ ID NO: 2793

SEQ ID NO: 12184 - protein, 162 aa, Escherichia coli; identical to SEQ ID NO: 1973

SEQ ID NO: 12185 - protein, 432 aa, Escherichia coli; identical to SEQ ID NO: 2026

SEQ ID NO: 12186 - protein, 170 aa, Escherichia coli [sequence omitted]

SEQ ID NO: 12187 - protein, 130 aa, Escherichia coli; identical to SEQ ID NO: 3184

SEQ ID NO: 12188 - protein, 351 aa, Escherichia coli; identical to SEQ ID NO: 2872

SEQ ID NO: 12189 - protein, 208 aa, Escherichia coli; identical to SEQ ID NO: 1949

SEQ ID NO: 12190 - protein, 274 aa, Escherichia coli; identical to SEQ ID NO: 3471

SEQ ID NO: 12191 - protein, 203 aa, Escherichia coli; identical to SEQ ID NO: 2201

SEQ ID NO: 12192 - protein, 224 aa, Escherichia coli; identical to SEQ ID NO: 3115

SEQ ID NO: 12193 - protein, 128 aa, Escherichia coli; identical to SEQ ID NO: 7495

SEQ ID NO: 12194 - protein, 213 aa, Escherichia coli; identical to SEQ ID NO: 2232

SEQ ID NO: 12195 - protein, 241 aa, Escherichia coli
MLRFVLFFFTLSVSAVVQGSVVIMGTRVVYPATQKSISIRLNNDNESPALVQSWLDDGDAAAPPESVHVPFIITPPIFRMDSKSGQTVRIVYTGESLPKDRESLFYLNVLDIPAKPRAKKDSDNSEQRNNNYLQLAIRSRIKFFFRPAHLKLTPNDAYLKVTWHQEEGRIKAVNPTPYYITYNKIAVDQNKHLTPVEHGGMIPPFSSTVFALKGRTAPASKVSWVIVNDYGGYQQGESVLE

SEQ ID NO: 12196 - protein, 784 aa, Escherichia coli; identical to SEQ ID NO: 2241

SEQ ID NO: 12197 - protein, 629 aa, Escherichia coli; identical to SEQ ID NO: 10744

SEQ ID NO: 12198 - protein, 721 aa, Escherichia coli; identical to SEQ ID NO: 9824

SEQ ID NO: 12199 - protein, 753 aa, Escherichia coli; identical to SEQ ID NO: 6655

SEQ ID NO: 12200 - protein, 478 aa, Escherichia coli; identical to SEQ ID NO: 2405

SEQ ID NO: 12201 - protein, 386 aa, Escherichia coli
MVDDVPVAQVLQALAEQEKLNLVVSPDVSGTVSLHLTDVPWKQALQTVVKSAGLITRQEGNILSVHSVAWQNDNIARQEAEQARAQANLPLENRNITLQYADAGELAKAGEKLLSAKGSMTVDKRTNRLLLRDNKTALSTLEQWVSQMDLPVGQVELSAHIVTINEKSLRELGVKWTLADAQQAGGVGQVTTLGSDLSVATATTHIGFNIGRINGRLLDLELSALEQKQQLDIIASPRLLASHLQPASIKQGSEIPYQVSSGESGATSVEFKEAVLGMEVTPTVLQKGRIRLKLHISQNVPGQVLQQADGEVLAIDKQEIETQVEVKSGETLALGGIFTRKNKSGQDSVPLLGDIPWFGQLFRHDGKEDERRELVVFITPRLVSSE

SEQ ID NO: 12202 - protein, 1024 aa, Escherichia coli; identical to SEQ ID NO: 10694

SEQ ID NO: 12203 - protein, 565 aa, Escherichia coli; identical to SEQ ID NO: 2678

SEQ ID NO: 12204 - protein, 121 aa, Escherichia coli; identical to SEQ ID NO: 10784

SEQ ID NO: 12205 - protein, 249 aa, Escherichia coli; identical to SEQ ID NO: 3492

SEQ ID NO: 12206 - protein, 726 aa, Escherichia coli; identical to SEQ ID NO: 10726

SEQ ID NO: 12207 - protein, 208 aa, Escherichia coli; identical to SEQ ID NO: 1948

SEQ ID NO: 12208 - protein, 614 aa, Escherichia coli; identical to SEQ ID NO: 6666

SEQ ID NO: 12209 - protein, 673 aa, Escherichia coli; identical to SEQ ID NO: 2919

SEQ ID NO: 12210 - protein, 690 aa, Escherichia coli
MLPYARGRKEDVSDTHFIFVVTSWRYGMFRLNPFVRVGLCLSAISCAWPVLAVDDDGETMVVTASSVEQNLKDAPASISVITQEDLQRKPVQNLKDVLKEVPGVQLTNEGDNRKGVSIRGLDSSYTLILVDGKRVNSRNAVFRHNDFDLNWIPVDSIERIEVVRGPMSSLYGSDALGGVVNIITKKIGQKWSGTVTVDTTVQEHRDRGDTYNGQFFTSGPLIDGVLGMKAYGSLAKREKDDPQNSTTTDTGETPRIEGFSSRDGNVEFAWTPNQNHDFTAGYGFDRQDRDSDSLDKNRLERQNYSVSHNGRWDYGTSELKYYGEKVENKNPGNSSPITSESNTVDGKYTLPLTAINQFLTVGGEWRHDKLSDAVNLTGGTSSKTSASQYALFVEDEWRIFEPLALTTGVRMDDHETYGEHWSPRAYLVYNATDTVTVKGGWATAFKAPSLLQLSPDWTSNSCRGACKIVGSPDLKPETSESWELGLYYMGEEGWLEGVESSVTVFRNDVKDRISISRTSDVNAAPGYQNFVGFETGANGRRIPVFSYYNVNKARIQGVETELKIPFNDEWKLSINYTYNDGRDVSNGENKPLSDLPFHTANGTLDWKPLALEDWSFYVSGHYTGQKRADSATAKTPGGYTIWNTGAAWQVTKDVKLRAGVLNLGDKDLSRDDYSYNEDGRRYFMAVDYRF

SEQ ID NO: 12211 - protein, 431 aa, Escherichia coli; identical to SEQ ID NO: 3408

SEQ ID NO: 12212 - protein, 746 aa, Escherichia coli; identical to SEQ ID NO: 4597

SEQ ID NO: 12213 - protein, 119 aa, Escherichia coli; identical to SEQ ID NO: 5512

SEQ ID NO: 12214 - protein, 696 aa, Escherichia coli; identical to SEQ ID NO: 5576

SEQ ID NO: 12215 - protein, 242 aa, Escherichia coli
MLVSTALMALLTTASLTAHASVTPDRTRLVFNESDKSISVTLRNNNEKLPYLAQSWLEDEKGNKITSPLAVLPPVQRIDAMMNGQVKIQALPDIHTLPSDRESLFYYNVREIPPKSGKANTLQIALQTRIKLFWRPKALEKIDMRRPWQFKVTLTRSGQDYTVNNPTPYHVIISDASTQKKGLTAAGFKPLVMPPKTSQPLKAKMASAPVLTYINDYGARMPLIFRCEGNTCKVDEDQSSKG

SEQ ID NO: 12216 - protein, 375 aa, Escherichia coli; identical to SEQ ID NO: 2432

SEQ ID NO: 12217 - protein, 169 aa, Escherichia coli; identical to SEQ ID NO: 3373

SEQ ID NO: 12218 - protein, 760 aa, Escherichia coli
MENNRNFPARQFHSLTFFAGLCIGITPVAQALAAEGQTNADDTLVVEASTPSLYAPQQSADPKFSRPVADTTRTMTVISEQVIKDQGATNLTDALKNVPGVGAFFAGENGNSTTGDAIYMRGADTSNSIYIDGIRDIGSVSRDTFNTEQVEVIKGPSGTDYGRSAPTGSINMISKQSRNDSGIDASASIGSTWFRRGTLDVNQVIGDTTAVRLNVMGEKTHDAGRDKVKNERYGVAPSIAFGLGTANRLYLNYLHVTQHNTPDGGIPTIGLPGYSAPSAGTAALNHSGKVDTHNFYGTDSDYDDSTTDTATMRFEHDINDNTTIRNTTRWSRVKQDYLMTAIMGGASNITQPTSDVNSWTWSRTANTKDVSNKILTNQTNLTSTFYTGSIGHDVSTGVEFTRETQTNYGVNPVTLPAVNIYHPDSSIHPGGLTRNGANANGQTDTFAIYAFDTLQITRDFELNGGIRLDNYHTEYDSATACGGSGRGAITCPAGVAKGSPVTTVDTAKSGNLVNWKAGALYHLTENGNVYINYAVSQQPPGGNNFALAQSGSGNSANRTDFKPQKANTSEIGTKWQVLDKRLLLTAALFRTDIENEVEQNDDGTYSQYGKKRVEGYEISVAGNITPAWQVIGGYTQQKATIKNGKDVAQDGSSSLPYTPEHAFTLWSQYQATDDISVGAGARYIGSMHKGSDGAVGTPAFTEGYWVADAKLGYRVNRNLDFQLNVYNLFDTDYVASINKSGYRYHPGEPRTFLLTANMHF

SEQ ID NO: 12219 - protein, 249 aa, Escherichia coli; identical to SEQ ID NO: 10618

SEQ ID NO: 12220 - protein, 191 aa, Escherichia coli; identical to SEQ ID NO: 2728

SEQ ID NO: 12221 - protein, 719 aa, Escherichia coli; identical to SEQ ID NO: 4573

SEQ ID NO: 12222 - protein, 518 aa, Escherichia coli; identical to SEQ ID NO: 2356

SEQ ID NO: 12223 - protein, 200 aa, Escherichia coli; identical to SEQ ID NO: 1784

SEQ ID NO: 12224 - protein, 122 aa, Escherichia coli; identical to SEQ ID NO: 2915

SEQ ID NO: 12225 - protein, 700 aa, Escherichia coli
MKIFSVRQTVLPALLVLSPVVFAADEQTMIVSAAPQVVSELDTPAAVSVVNGEEMRLATPRINLSESLTGVPGLQVQNRQNYAQDLQLSIRGFGSRSTYGIRGIRLYVDGIPATMPDGQGQTSNIDLSSVQNVEVLRGPFSALYGNASGGVMNVTTQTGQQPPTIEASSYYGSFGSWRYGLKATGATGDGTQPGDVDYTVSTTRFTTHGYRDHSGAQKNLANAKLGVRIDDASKLSLIFNSVDIKADDPGGLTKAEWKANPQQAPRAEQYDTRKTIKQTQAGLRYERSLSAQDDMSVMMYAGERETTQYQSIPMAPQLNPSHAGGVITLQRHYQGIDSRWTHRGELGVPLTFTTGLNYENMSENRKGYNNFRLNSGVPEYGQKGELRRDERNLMWNVDPYLQTQWQLSEKLSLDAGVRYSSVWFDSNDHYVTPGNGDDSGDASYHKWLPAGSLKYAMTDAWNIYLAAGRGFETPTINELSYRADGQSGMNFGLKPSTNDTIEIGSKTRIGDGLLSLALFQTDTDDEIVVDSSSGGRTTYKNAGKTRRQGAELAWDQRFAGDFRVKASWTWLDATYRSNVCNEQDCNGNRMPGIARNMGFASIGYIPEDGWYAGTEARYMGDIMADDENTAKAPSYTLVGLFTGYKYNYHNFTVDLFGRVDNLFDKEYVGSVIVNESNGRYYEPAPGRNYGVGINIAWRFE

SEQ ID NO: 12226 - protein, 362 aa, Escherichia coli; identical to SEQ ID NO: 4554

SEQ ID NO: 12227 - protein, 274 aa, Escherichia coli; identical to SEQ ID NO: 2301

SEQ ID NO: 12228 - protein, 132 aa, Escherichia coli
MDAVLSVQGASAPVRNKSFFPKFTRLKKYFSFRPSRLNMLRLARAVIPAAVLMMFFPQLAMAAGSSGQDLMASGNTTVKATFGKDSSVVKWVVLAEVLVGAVMYMMTKNVKFLAGFAIISVFIAVGMAVVGL

SEQ ID NO: 12229 - protein, 230 aa, Escherichia coli; identical to SEQ ID NO: 4598

SEQ ID NO: 12230 - protein, 193 aa, Escherichia coli; identical to SEQ ID NO: 2246

SEQ ID NO: 12231 - protein, 232 aa, Escherichia coli; identical to SEQ ID NO: 2087

SEQ ID NO: 12232 - protein, 162 aa, Escherichia coli; identical to SEQ ID NO: 1973

SEQ ID NO: 12233 - protein, 204 aa, Escherichia coli; identical to SEQ ID NO: 2957

SEQ ID NO: 12234 - protein, 517 aa, Escherichia coli; identical to SEQ ID NO: 2462

SEQ ID NO: 12235 - protein, 656 aa, Escherichia coli
MRLKKRYLCTVLSLAFTQQSVAAQESDTLTVWSSPVSSTTTTVLDQPTMKALDKQNVAQALSVVPGVVLQKSGSRNEEQVKVRGFDSRQVPVYFDGVPIYVPYDGNLDLARILTNNLGAVEVSKGYSSLLQGPNQMGGAINITTQKPTKPLEASLGYRQGWSRSQDNAYDMHASFAASSDLGYLQVSGSQLKQDFLGLPHGVNNDIAGKHGKMINSSADDKRGIVKLGFTPRENDEYTLTYIKQDGEKDTPPYSGNSGQKSRYWQWPEYDKESFYYQGTTQLNDRFTLKSRLYHDTFENTLMMYNSLADLKNKKGSYSHYSDYSDGAGLQLAADVRENDLLSFAVNWKDDVHREKGAPHAAYDRYEDRTWSLASEYQWAAADNVDVVAGISYDWRDSVEAKKHEKDGSITHYDDNNQSAFNWQVMGKYHFANEDTLALSYYDRTRFPTLKERYTTSKPAYNQIAIVNPQLKPERARGVDLTWNGAFTHDWGFEVSVYYNRVSDAILSHNIDADTIQNQNSGTVDYSGLDAGIKGKISNILDVGLSYALIHADAKRKDIGKITDLPTQTMTAWMTLKPWEPLSVTLSEEARSSSYSNSDGSQKAAGFAVTHIRADYTLGHGFSVNASVNNLFDTKYAYSEGFIEEGRNFWAGIEYTF

SEQ ID NO: 12236 - protein, 250 aa, Escherichia coli; identical to SEQ ID NO: 3048

SEQ ID NO: 12237 - protein, 367 aa, Escherichia coli; identical to SEQ ID NO: 4285

SEQ ID NO: 12238 - protein, 241 aa, Escherichia coli; identical to SEQ ID NO: 2075

SEQ ID NO: 12239 - protein, 656 aa, Escherichia coli; identical to SEQ ID NO: 6715

SEQ ID NO: 12240 - protein, 243 aa, Escherichia coli; identical to SEQ ID NO: 3483

SEQ ID NO: 12241 - protein, 224 aa, Escherichia coli; identical to SEQ ID NO: 3792

SEQ ID NO: 12242 - protein, 250 aa, Escherichia coli; identical to SEQ ID NO: 3811

SEQ ID NO: 12243 - protein, 351 aa, Escherichia coli
MIAPLLISCSTTKKGDTYNEAWVKDTNGFDILMGQFAHNIENIWGFKEVVIAGPKDYVKYTDQYQTRSHINFDDGTITIETIAGTEPAAHLRRAIIKTLLMGDDPSSVDLYSDVDDITISKEPFLYGQVVDNTGQPIRWEGRASNFADYLLKNRLQSRSNGLRIIYSVTINMVPNHLDKRAHKYLGMVRQASRKYGVDESLILAIMQTESSFNPYAVSRSDALGLMQVVQHTAGKDVFRSQGKSGTPSRSFLFDPASNIDTGTAYLAMLNNVYLGGIDNPTSRRYAVITAYNGGAGSVLRVFSNDKIQAANIINTMTPGDVYQTLTTRHPSAESRRYLYKVNTAQKSYRRR

SEQ ID NO: 12244 - protein, 747 aa, Escherichia coli
MARSKTAQPKHSLRKIAVVVATAVSGMSVYAQAAVEPKEDTITVTAAPAPQESAWGPAATIAARQSATGTKTDTPIQKVPQSISVVTAEEMALHQPKSVKEALSYTPGVSVGTRGASNTYDHLIIRGFAAEGQSQNNYLNGLKLQGNFYNDAVIDPYMLERAEIMRGPVSVLYGKSSPGGLLNMVSKRPTTEPLKEVQFKAGTDSLFQTGFDFSDSLDDDGVYSYRLTGLARSANAQQKGSEEQRYAIAPAFTWRPDDKTNFTFLSYFQNEPETGYYGWLPKEGTVEPLPNGKRLPTDFNEGAKNNTYSRNEKMVGYSFDHEFNDTFTVRQNLRFAENKTSQNSVYGYGVCSDPANAYSKQCAALAPADKGHYLARKYVVDDEKLQNFSVDTQLQSKFATGDIDHTLLTGVDFMRMRNDINAWFGYDDSVPLLNLYNPVNTDFDFNAKDPANSGPYRILNKQKQTGVYVQDQAQWDKVLVTLGGRYDWADQESLNRVAGTTDKRDDKQFTWRGGVNYLFDNGVTPYFSYSESFEPSSQVGKDGNIFAPSKGKQYEVGVKYVPEDRPIVVTGAVYNLTKTNNLMADPEGSFFSVEGGEIRARGVEIEAKAALSASVNVVGSYTYTDAEYTTDTTYKGNTPAQVPKHMASLWADYTFFDGPLSGLTLGTGGRYTGSSYGDPANSFKVGSYTVVDALVRYDLARVGMAGSNVALHVNNLFDREYVATCFNTYGCFWGAERQVVATATFRF

SEQ ID NO: 12245 - protein, 192 aa, Escherichia coli; identical to SEQ ID NO: 4587

SEQ ID NO: 12246 - protein, 729 aa, Escherichia coli; identical to SEQ ID NO: 4557

SEQ ID NO: 12247 - protein, 224 aa, Escherichia coli; identical to SEQ ID NO: 3165

SEQ ID NO: 12248 - protein, 650 aa, Escherichia coli; identical to SEQ ID NO: 8603

SEQ ID NO: 12249 - protein, 224 aa, Escherichia coli; identical to SEQ ID NO: 4578

SEQ ID NO: 12250 - protein, 446 aa, Escherichia coli; identical to SEQ ID NO: 2177

SEQ ID NO: 12251 - protein, 203 aa, Escherichia coli; identical to SEQ ID NO: 2009

SEQ ID NO: 12252 - protein, 361 aa, Escherichia coli; identical to SEQ ID NO: 3061

SEQ ID NO: 12253 - protein, 430 aa, Escherichia coli; identical to SEQ ID NO: 2617

SEQ ID NO: 12254 - protein, 360 aa, Escherichia coli; identical to SEQ ID NO: 3862

SEQ ID NO: 12255 - protein, 111 aa, Escherichia coli; identical to SEQ ID NO: 7471

SEQ ID NO: 12256 - protein, 518 aa, Escherichia coli; identical to SEQ ID NO: 2349

SEQ ID NO: 12257 - protein, 244 aa, Escherichia coli; identical to SEQ ID NO: 10740

SEQ ID NO: 12258 - protein, 213 aa, Escherichia coli
MTKMSRYALITALAMFLAGCVGQREPAPVEEVKPAPEQPAEPQQPVPTVPSVPTIPQQPGPIEHEDQTAPLAPHIRHYDWNGAMQPMVSKMLGADGVTAGSVLLVDSVNNRTNGSLNAAEATETLRNALANNGKFTLVSAQQLSMAKQQLGLSPQDSLGTRSKAIGIARNVGAHYVLYSSASGNVNAPTLQMQLMLVQTGEIIWSGKGAVSQQ

SEQ ID NO: 12259 - protein, 249 aa, Escherichia coli; identical to SEQ ID NO: 9840

SEQ ID NO: 12260 - protein, 446 aa, Escherichia coli; identical to SEQ ID NO: 5547

SEQ ID NO: 12261 - protein, 530 aa, Escherichia coli
MGDGNTGSDIFDGVGFRGVRLYSSDNMYPDSQQGFAPTVRGIARTAAQLTIRQNGFIIYQSYVSPGAFEITDLHPTSPNGDLDVTIDERDGNQQNYTIPYSTVPILQREGRFKFDLTAGDFRSGNSQQSSPFFFQGTALGGLPQEFTAYGGTQLSANYTAFLLGLGRNLGNWGAVSLDVTHARSQLADDSRHEGDSIRFLYAKSMNTFGTNFQLMGYRYSTQGFYTLDDVAYRRMEGYEYDYDYDGEHRDEPIIVNYHNLRFSRKDRLQLNISQSLNDFGSLYISGTHQKYWNTSDSDTWYQVGYTSSWVGISYSLSFSWNESVGIPDNERIVGLNVSVPFNVLTKRRYTRENALDRAYASFNANRNSNGQNSWLAGVGGTLLEGHNLSYHVSQGDTSNNGYTGSATANWQAAYATLGVGYNYDRDQHDVNWQLSGGVVGHENGITLSQPLGDTNVLIKAPGAGGVRIENQTGILTDWRGYAVMPYATVYRYNRIALDTNTMGNSIDVEKILAALCRRKARWFVPILIPA

SEQ ID NO: 12262 - protein, 613 aa, Escherichia coli; identical to SEQ ID NO: 6571

SEQ ID NO: 12263 - protein, 713 aa, Escherichia coli; identical to SEQ ID NO: 4590

SEQ ID NO: 12264 - protein, 192 aa, Escherichia coli; identical to SEQ ID NO: 6643

SEQ ID NO: 12265 - protein, 681 aa, Escherichia coli
MTLSVWRKKTTGLKTKKRLLALVLAAALCSSPVWAEEATFTANFKDTDLKSFIETVGANLNKTIIMGPGVQGKVSIRTMTPLNERQYYQLFLNLLEAQGYAVVPMENDVLKVVKSSAAKVEPLPLVGEGSDNYAGDEMVTKVVPVRNVSVRELAPILRQMIDSAGSGNVVNYDPSNVIMLTGRASVVERLTEVIQRVDHAGNRTEEVIPLDNASASEIARVLESLTKNSGENQPATLKSQIVADERTNSVIVSGDPATRDKMRRLIRRLDSEMERSGNSQVFYLKYSKAEDLVDVLKQVSGTLTAAKEEAEGTVGSGREVVSIAASKHSNALIVTAPQDIMQSLQSVIEQLDIRRAQVHVEALIVEVAEGSNINFGVQWASKDAGLMQFANGTQIPIGTLGAAISQAKPQKGSTVISENGATTINPDTNGDLSTLAQLLSGFSGTAVGVVKGDWMALVQAVKNDSSSNVLSTPSITTLDNQEAFFMVGQDVPVLTGSTVGSNNSNPFNTVERKKVGIMLKVTPQINEGNAVQMVIEQEVSKVEGQTSLDVVFGERKLKTTVLANDGELIVLGGLMDDQAGESVAKVPLLGDIPLIGNLFKSTADKKEKRNLMVFIRPTILRDGMAADGVSQRKYNYMRAEQIYRDEQGLSLMPHTAQPVLPAQNQALPPEVRAFLNAGRTR

SEQ ID NO: 12266 - protein, 539 aa, Escherichia coli; identical to SEQ ID NO: 3050

SEQ ID NO: 12267 - protein, 514 aa, Escherichia coli; identical to SEQ ID NO: 8138

SEQ ID NO: 12268 - protein, 331 aa, Escherichia coli; identical to SEQ ID NO: 2713

SEQ ID NO: 12269 - protein, 541 aa, Escherichia coli; identical to SEQ ID NO: 4576

SEQ ID NO: 12270 - protein, 305 aa, Escherichia coli
MMKKYLALALIAPLLISCSTTKKGDTYNEAWVKDTNGFDILMGQFAHNIENIWGFKEVVIAGPKDYVKYTDQYQTRSHINFDDGTITIETIAGTEPAAHLRRAIIKTLLMGDDPSSVDLYSDVDDITISKEPFLYGQVVDNTGQPIRWEGRASNFADYLLKNRLKSRSNGLRIIYSVTINMVPNHLDKRAHKYLGMVRQASRKYGVDESLILAIMQTESSFNPYAVSRSDALGLMQVVQHTAGKDVFRSQGKSGTPSRSFLFDPASNIDTGTAYLAMLNNVYLGGIDNPTSRRYAVITAYNGGGG

SEQ ID NO: 12271 - protein, 614 aa, Escherichia coli; identical to SEQ ID NO: 1884

SEQ ID NO: 12272 - protein, 674 aa, Escherichia coli
MDYSLTGNRNDSDSYSSRSLYASARLGLNVGPWRLRTSGNYSQYQSESRWWRSRTENTSFYSTWLERDISALRASLRIGEVSTGGMILDSVSFRGVRLYSNDDMLSSRLRNYSPTVKGFARTQAVVIITQNGRQVYQTNVPAGPFELNDFYISGYSGDLVVTVRESDGSEHSFIQPFSTLPEMKREGVSGFELSAGRYDNHGSEDYYNDPLFVYGAWSRGFGGGVTVFGETLQAGKYQSAGIGSTLSLGRVGAVSADISVSRAEKYDDIHTGQSYGLKYSKSQVETGTTVTLATYRYSTKDFYSFGDFVSRTEQARYVWENRLKNRMTLSLNQSLGSLGSVSLSASQQDYWTSGEVNRSFSLSHSFSWRDIYFSTTFSMDQMSGNRYGYDNNRQIDFYMSVPLSRLLGREEPTSSSVSWSATRTERQLRQTATLSGSVPDTRMRYRVGGNWGNGGAAEGQSASLTWNGDFTTASLGYTRSGGYRTTDFSLSGAAVAWSGGVAFGSNSVTDNGAIVVNTSGVSGIGTSAGGRTTWPGTALISSPQLYTENRIDLRTDGLPDDIVLAETSARTVPSRGAVVVLDYTVYRGGQVVFTLKRPDGSALPFGSVVSLDGMPSGKENTGIVGDEGRVYLAGVPEKGRLTVNSGGKQCHADFVLPQDRKKSGPVAEAVAVCR

SEQ ID NO: 12273 - protein, 353 aa, Escherichia coli; identical to SEQ ID NO: 6704

SEQ ID NO: 12274 - protein, 760 aa, Escherichia coli
MENNRNFPARQFHSLTFFAGLCIGITPVAQALAAEGQANADDTLVVEASTPSLYAPQQSADPKFSRPVADTTRTMTVISEQVIKDQGATNLTDALKNVPGVGAFFAGENGNSTTGDAIYMRGADTSNSIYIDGIRDIGSVSRDTFNTEQVEVIKGPSGTDYGRSAPTGSINMISKQPRNDSGIDASASIGSAWFRRGTLDVNQVIGDTTAVRLNVMGEKTHDAGRDKVKNERYGVAPSVAFGLGTANRLYLNYLHVTQHNTPDGGIPTIGLPGYSAPSAGTAALNHSGKVDTHNFYGTDSDYDDSTTDTATMRFEHDINDNTTIRNTTRWSRVKQDYLMTAIMGGASNITQPTSDVNSWTWSRTANTKDVSNKILTNQTNLTSTFYTGAIGHDLSTGVEFTRETQTNYGVNPVTLPAVNIYHPDSSIHPGGLTRNGANANGQTDTFAIYAFDTLQITRDFELNGGIRLDNYHTEYDIATACGGSGRGAITCPAGVAKGSPVTTVDTAKSGNLVNWKAGALYHLTENGNVYINYAVSQQPPGGNNFALAQSGSGNSANRTDFKPQKANTSEIGTKWQVLDKRLLLTAALFRTDIENEVEQNDDGTYSQYGKKRVEGYEISVAGNITPAWQMIGGYTQQKATIKNGKDVAQDGSSSLPYTPEHAFTLWSQYQATDDISVGAGARYIGSMHKGSDGAVGTPAFTEGYWVADAKLGYRVNRNLDFQLNVYNLFDTDYVASINKSGYRYHPGEPRTFLLTANMHF

SEQ ID NO: 12275 - protein, 733 aa, Escherichia coli; identical to SEQ ID NO: 9713

SEQ ID NO: 12276 - protein, 386 aa, Escherichia coli; identical to SEQ ID NO: 3094

SEQ ID NO: 12277 - protein, 222 aa, Escherichia coli; identical to SEQ ID NO: 1956

SEQ ID NO: 12278 - protein, 191 aa, Escherichia coli; identical to SEQ ID NO: 2727

SEQ ID NO: 12279 - protein, 230 aa, Escherichia coli; identical to SEQ ID NO: 3348

SEQ ID NO: 12280 - protein, 475 aa, Escherichia coli; identical to SEQ ID NO: 10891

SEQ ID NO: 12281 - protein, 111 aa, Escherichia coli; identical to SEQ ID NO: 3419

SEQ ID NO: 12282 - protein, 222 aa, Escherichia coli
DGRDYDPEVLLRAVNDAVGKLPVPADGKSITPDDVRPMLEQMVTDAVSHIPVPRDGRDYDPEVLQKAVLDAVSALPAPQDGRDATALEIFPAIDEQKSFPRGTYATHQGGLWRAYEKTHGMRGWECLVDGVADIDVSMTGERSFTVVVRQSSGQCTEKTFSLPVMLYRGVFRTGETYHPGDTVTWGGSLWHCNSMTGDKPGEAHSSGWTLAAKRGRDAGGGK

SEQ ID NO: 12283 - protein, 700 aa, Escherichia coli; identical to SEQ ID NO: 3128

SEQ ID NO: 12284 - protein, 432 aa, Escherichia coli; identical to SEQ ID NO: 2026

SEQ ID NO: 12285 - protein, 241 aa, Escherichia coli
MSNKNVNVRKSQEITFCLLAGILMFMAMMVAGRAEAGVALGATRVIYPAGQKQVQLAVTNNDENSTYLIQSWVENADGVKDGRFIVTLPLFAMKGKKENTLRILDATNNQLPQDRESLFWMNVKAIPSMDKSKLTENTLQLAIISRIKLYYRPAKLALPPDQAAEKLRFRRSANSLTLINPTPYYLTVTELNAGTRVLENALVPPMGESTVKLPSDAGSNITYRTINDYGALTPKMTGVME

SEQ ID NO: 12286 - protein, 199 aa, Escherichia coli; identical to SEQ ID NO: 3906

SEQ ID NO: 12287 - protein, 230 aa, Escherichia coli; identical to SEQ ID NO: 3019

SEQ ID NO: 12288 - protein, 729 aa, Escherichia coli
MLSTQFNRDNQYQAITKPSLLAGCIALALLPSAAFAAPATEETVIVEGSATAPDDGENDYSVTSTSAGTKMQMTQRDIPQSVTIVSQQRMEDQQLQTLGEVMENTLGISKSQADSDRALYYSRGFQIDNYMVDGIPTYFESRWNLGDALSDMALFERVEVVRGATGLMTGTGNPSAAINMVRKHATSREFKGDVSAEYGSWNKERYVADLQSPLTEDGKIRARIVGGYQNNDSWLDRYNSEKTFFSGIVDADLGDLTTLSAGYEYQRIDVNSPTWGGLPRWNTDGSSNSYDRARSTAPDWAYNDKEINKVFMTLKQRFADTWQATLNATHSEVEFDSKMMYVDAYVNKADGMLVGPYSNYGPGFDYVGGTGWNSGKRKVDALDLFADGSYELFGRQHNLMFGGSYSKQNNRYFSSWANIFPDEIGSFYNFNGNFPQTDWSPQSLAQDDTTHMKSLYAATRVTLADPLHLILGARYTNWRVDTLTYSMEKNHTTPYAGLVFDINDNWSTYASYTSIFQPQNDRDSSGKYLAPITGNNYELGLKSDWMNSRLTTTLAIFRIEQDNVAQSTGTPIPGSNGETAYKAVDGAVSKGVEFELNGAITDNWQLTFGATRYIAEDNEGNAVNPNLPRTTVKMFTSYRLPVMPELTVGGGVNWQNRVYTDTVTPYGTFRAEQGSYALVDLFTRYQVTKNFSLQGNVNNLFDKTYDTNVEGSIVYGAPRNFSITGTYQF

SEQ ID NO: 12289 - protein, 654 aa, Escherichia coli; identical to SEQ ID NO: 3854

SEQ ID NO: 12290 - protein, 828 aa, Escherichia coli; identical to SEQ ID NO: 2388

SEQ ID NO: 12291 - protein, 746 aa, Escherichia coli; identical to SEQ ID NO: 11087

SEQ ID NO: 12292 - protein, 365 aa, Escherichia coli; identical to SEQ ID NO: 3878

SEQ ID NO: 12293 - protein, 662 aa, Escherichia coli; identical to SEQ ID NO: 8124

SEQ ID NO: 12294 - protein, 432 aa, Escherichia coli; identical to SEQ ID NO: 2026

SEQ ID NO: 12295 - protein, 252 aa, Escherichia coli; identical to SEQ ID NO: 3543

SEQ ID NO: 12296 - protein, 161 aa, Escherichia coli; identical to SEQ ID NO: 2582

SEQ ID NO: 12297 - protein, 878 aa, Escherichia coli
MSYLNLRLYQRNTQCLHIRKHRLAGFFVRLFVACAFAVQAPLSSAELYFNPRFLADDPQAVADLSRFENGQELPPGTYRVDIYLNNGYMATRDVTFNTGDSEQGIVPCLTRAQLASMGLNTASVAGMNLLADDACVPLTTMVQDATAHLDVGQQRLNLTIPQAFMSNRARGYIPPELWDPGINAGLLNYNFSGNSVQNRIGGNSHYAYLNLQSGLNIGAWRLRDNTTWSYNSSDRSSGSKNKWQHINTWLERDIIPLRSRLTLGDGYTQGDIFDGINFRGAQLASDDNMLPDSQRGFAPVIHGIARGTAQVTIKQNGYDIYNSTVPPGPFTINDIYAAGNSGDLQVTIKEADGSTQIFTVPYSSVPLLQREGHTRYSITAGEYRSGNAQQEKPRFFQSTLLHGLPAGWTIYGGTQLADRYRAFNFGIGKNMGALGALSVDMTQANSTLPDDSQHDGQSVRFLYNKSLNESGTNIQLVGYRYSTSGYFNFADTTYSRMNGYNIETQDGVIQVKPKFTDYYNLAYNKRGKLQLTVTQQLGRSSTLYLSGSHQTYWGTSNVDEQFQAGLNTAFEDINWTLSYSLTKNAWQKGRDQMLALNVNIPFSHWLRSDSKSQWRHASASYSMSHDLNGRMTNLAGVYGTLLEDNNLSYSVQTGYAGGGDGNSGSTGYATLNYRGGYGNANIGYSHSDDIKQLYYGVSGGVLAHANGVTLGQPLNDTVVLVKAPGAKDAKVENQTGVRTDWRGYAVLPYATEYRENRVALDTNTLADNVDLDNAVANVVPTRGAIVRAEFKARVGIKLLMTLTHNNKPLPFGAMVTSESSQSSGIVADNGQVYLSGMPLAGKVQVKWGEEENAHCVANYQLPSESQQQLLTQLSAECR

SEQ ID NO: 12298 - protein, 230 aa, Escherichia coli; identical to SEQ ID NO: 2995

SEQ ID NO: 12299 - protein, 689 aa, Escherichia coli
MIHATDTATTKDGETITVTADANTATEATDGYQPLSTSTATLTDMPMLDIPQVVNTVSDQVLENQNATTLDEALYNVSNVVQTNTLGGTQDAFVRRGFGANRDGSIMTNGLRTVLPRSFNAATERVEVLKGPASTLYGILDPGGLINVVTKRPEKTFHGSVSATSSSFGGGTGQLDITGPIEGTQLAYRLTGEVQDEDYWRNFGKERSTFIAPSLTWFGDNATVTMLYSHRDYKTPFDRGTIFDLTTKQPVNVDRKIRFDEPFNITDGQSDLAQLNAEYHLNSQWTARFDYSYSQDKYSDNQARVTAYDATTGTLTRRVDATQGSTQRMHSTRADLQGNVDIAGFYNEILGGVSYEYYDLLRTDMIRCKNAKDFNIYNPVYGNTSKCTTVSASDSDQTIKQESYSAYAQDALYLTDNWIAVAGIRYQYYTQYAGKGRPFNVNTDSRDEQWTPKLGLVYKLTPSVSLFANYSQTFMPQSSIASYIGDLPPESSNAYEVGAKFELFDGITADIALFDIHKRNVLYTESIGDETIAKTAGRVRSRGVEVDLAGALTENINIIASYGYTDAKVLEDPDYAGKPLPNVPHHTGSLFLTYDIHNMPGNNTLTFGGGGHGVSRRSATNGADYYLPGYFVADAFAAYKMKLQYPVTLQLNVKNLFDKTYYTSSIATNNLGNQIGDPREVQFTVKMEF

SEQ ID NO: 12300 - protein, 191 aa, Escherichia coli; identical to SEQ ID NO: 2996

SEQ ID NO: 12301 - protein, 266 aa, Escherichia coli; identical to SEQ ID NO: 1894

SEQ ID NO: 12302 - protein, 840 aa, Escherichia coli; identical to SEQ ID NO: 3591

SEQ ID NO: 12303 - protein, 834 aa, Escherichia coli; identical to SEQ ID NO: 10931

SEQ ID NO: 12304 - protein, 721 aa, Escherichia coli; identical to SEQ ID NO: 7755

SEQ ID NO: 12305 - protein, 266 aa, Escherichia coli; identical to SEQ ID NO: 1892

SEQ ID NO: 12306 - protein, 784 aa, Escherichia coli; identical to SEQ ID NO: 2244

SEQ ID NO: 12307 - protein, 368 aa, Escherichia coli; identical to SEQ ID NO: 2370

SEQ ID NO: 12308 - protein, 826 aa, Escherichia coli; identical to SEQ ID NO: 3563

SEQ ID NO: 12309 - protein, 170 aa, Escherichia coli; identical to SEQ ID NO: 2565

SEQ ID NO: 12310 - protein, 200 aa, Escherichia coli; identical to SEQ ID NO: 1788

SEQ ID NO: 12311 - protein, 838 aa, Escherichia coli; identical to SEQ ID NO: 3764

SEQ ID NO: 12312 - protein, 445 aa, Escherichia coli; identical to SEQ ID NO: 4474

SEQ ID NO: 12313 - protein, 170 aa, Escherichia coli; identical to SEQ ID NO: 2565

SEQ ID NO: 12314 - protein, 386 aa, Escherichia coli; identical to SEQ ID NO: 3600

SEQ ID NO: 12315 - protein, 229 aa, Escherichia coli; identical to SEQ ID NO: 3589

SEQ ID NO: 12316 - protein, 637 aa, Escherichia coli; identical to SEQ ID NO: 6148

SEQ ID NO: 12317 - protein, 163 aa, Escherichia coli
MPTPQTFRMEAAAGQALRLLYTGNNLPQDRESVFWFSFSQLPYLNKNDKSQNQLILALTNRVKIFYRPSSIVGKSSDAPKNLTYQVKQNRIEVTNPTGYYVTIRAAELLNNGKKVPLANSVMIAPQSTTEWTLPSGISVAPGAQIHLVTVNDYGVNVTSEHAL

SEQ ID NO: 12318 - protein, 359 aa, Escherichia coli; identical to SEQ ID NO: 2332

SEQ ID NO: 12319 - protein, 678 aa, Escherichia coli; identical to SEQ ID NO: 2902

SEQ ID NO: 12320 - protein, 856 aa, Escherichia coli
MAGFFVRLFVACAFAVQAPLSSAELYFNPRFLADDPQAVADLSRFENGQELPPGTYRVDIYLNNGYMATRDVTFNTGDSEQGVVPCLTRAQLASMGLNTASVAGMNLLADDACVPLTTMVQDATAHLDVGQQRLNLTIPQAFMSNRARGYIPPELWDPGINAGLLNYNFSGNSVQNRIGGNSHYAYLNLQSGLNIGAWRLRDNTTWSYNSSDRSSGSKNKWQHINTWLERDIIPLRSRLTLGDGYTQGDIFDGINFRGAQLASDDNMLPDSQRGFAPVIHGIARGTAQVTIKQNGYDIYNSTVPPGPFTINDIYAAGNSGDLQVTIKEADGSTQIFTVPYSSVPLLQREGHTRYSITAGEYRSGNAQQEKPRFFQSTLLHGLPAGWTIYGGTQLADRYRAFNFGIGKNMGALGALSVDMTQANSTLPDDSQHDGQSVRFLYNKSLNESGTNIQLVGYRYSTSGYFNFADTTYSRMNGYNIETQDGVIQVKPKFTDYYNLAYNKRGKLQLTVTQQLGRSSTLYLSGSHQTYWGTSNVDEQFQAGLNTAFEDINWTLSYSLTKNAWQKGRDQMLARNVNIPFSHWLRSDSKSQWRHASASYSMSHDLNGRMTNLAGVYGTLLEDNNLSYSVQTGYAGGGDGNSGSTGYATLNYRGGYGNANIGYSHSDDIKQLYYGVSGGVLAHANGVTLGQPLNDTVVLVKAPGAKDAKVENQTGVRTDWRGYAVLPYATEYRENRVALDTNTLADNVDLNNAVANVVPTRGAIVRAEFKARVGIKLLMTLTHNNKPLPFGAMVTSESSQSSGIVADNGQVYLSGMPLAGKVQVKWGEEENAHCVANYQLPPESQQQLLTQLSAECR

SEQ ID NO: 12321 - protein, 567 aa, Escherichia coli; identical to SEQ ID NO: 8894

SEQ ID NO: 12322 - protein, 193 aa, Escherichia coli; identical to SEQ ID NO: 2250

SEQ ID NO: 12323 - protein, 784 aa, Escherichia coli; identical to SEQ ID NO: 2240

SEQ ID NO: 12324 - protein, 233 aa, Escherichia coli; identical to SEQ ID NO: 2005

SEQ ID NO: 12325 - protein, 213 aa, Escherichia coli; identical to SEQ ID NO: 2232

SEQ ID NO: 12326 - protein, 828 aa, Escherichia coli; identical to SEQ ID NO: 2381

SEQ ID NO: 12327 - protein, 229 aa, Escherichia coli; identical to SEQ ID NO: 5497

SEQ ID NO: 12328 - protein, 208 aa, Escherichia coli; identical to SEQ ID NO: 1949

SEQ ID NO: 12329 - protein, 266 aa, Escherichia coli; identical to SEQ ID NO: 1894

SEQ ID NO: 12330 - protein, 161 aa, Escherichia coli; identical to SEQ ID NO: 2582

SEQ ID NO: 12331 - protein, 118 aa, Escherichia coli [sequence omitted]

SEQ ID NO: 12332 - protein, 412 aa, Escherichia coli; identical to SEQ ID NO: 2908

SEQ ID NO: 12333 - protein, 430 aa, Escherichia coli; identical to SEQ ID NO: 2617

SEQ ID NO: 12334 - protein, 838 aa, Escherichia coli; identical to SEQ ID NO: 3041

SEQ ID NO: 12335 - protein, 869 aa, Escherichia coli; identical to SEQ ID NO: 8900

SEQ ID NO: 12336 - protein, 823 aa, Escherichia coli; identical to SEQ ID NO: 11030

SEQ ID NO: 12337 - protein, 130 aa, Escherichia coli; identical to SEQ ID NO: 3184

SEQ ID NO: 12338 - protein, 432 aa, Escherichia coli; identical to SEQ ID NO: 2026

SEQ ID NO: 12339 - protein, 700 aa, Escherichia coli; identical to SEQ ID NO: 8802

SEQ ID NO: 12340 - protein, 359 aa, Escherichia coli; identical to SEQ ID NO: 2332

SEQ ID NO: 12341 - protein, 686 aa, Escherichia coli; identical to SEQ ID NO: 3015

SEQ ID NO: 12342 - protein, 446 aa, Escherichia coli; identical to SEQ ID NO: 2180

SEQ ID NO: 12343 - protein, 229 aa, Escherichia coli; identical to SEQ ID NO: 5424

SEQ ID NO: 12344 - protein, 539 aa, Escherichia coli; identical to SEQ ID NO: 3050

SEQ ID NO: 12345 - protein, 231 aa, Escherichia coli; identical to SEQ ID NO: 2868

SEQ ID NO: 12346 - protein, 331 aa, Escherichia coli; identical to SEQ ID NO: 2705

SEQ ID NO: 12347 - protein, 111 aa, Escherichia coli; identical to SEQ ID NO: 2911

SEQ ID NO: 12348 - protein, 291 aa, Escherichia coli
MLEQMVKEAVSHIPVPRDGRDYDPEVLQKAVNDAVANIPQPADGKSLTPDDVRPMLEQMVKEAVSHIPVPRDGRDYDPEVLQKAVNDAVANIPQPADGKSLTPDDVRPMLEQMVKEAVSHIPVPRDGRDYDPDVLQKAVLDAVSALPAPQDGRDATALEILPAIDDQKSFPRGTYATHQGGLWRAYEKTHGMRGWECLVDGVADIDVSMTGERLFSVVVRQSSGQRTEKTFSLPVMLYRGVFRAGETYHPGDTVTWGGSLWHCNSMTEDKPGEAHSSAWTLAAKRGRDAGG

SEQ ID NO: 12349 - protein, 514 aa, Escherichia coli; identical to SEQ ID NO: 3590

SEQ ID NO: 12350 - protein, 650 aa, Escherichia coli; identical to SEQ ID NO: 3057

SEQ ID NO: 12351 - protein, 241 aa, Escherichia coli; identical to SEQ ID NO: 3582

SEQ ID NO: 12352 - protein, 162 aa, Escherichia coli; identical to SEQ ID NO: 1969

SEQ ID NO: 12353 - protein, 366 aa, Escherichia coli; identical to SEQ ID NO: 3520

SEQ ID NO: 12354 - protein, 239 aa, Escherichia coli; identical to SEQ ID NO: 4453

SEQ ID NO: 12355 - protein, 518 aa, Escherichia coli; identical to SEQ ID NO: 2349

SEQ ID NO: 12356 - protein, 478 aa, Escherichia coli; identical to SEQ ID NO: 8763

SEQ ID NO: 12357 - protein, 200 aa, Escherichia coli; identical to SEQ ID NO: 1788

SEQ ID NO: 12358 - protein, 241 aa, Escherichia coli; identical to SEQ ID NO: 2887

SEQ ID NO: 12359 - protein, 108 aa, Escherichia coli; identical to SEQ ID NO: 3602

SEQ ID NO: 12360 - protein, 274 aa, Escherichia coli; identical to SEQ ID NO: 2891

SEQ ID NO: 12361 - protein, 252 aa, Escherichia coli; identical to SEQ ID NO: 5502

SEQ ID NO: 12362 - protein, 368 aa, Escherichia coli; identical to SEQ ID NO: 2371

SEQ ID NO: 12363 - protein, 367 aa, Escherichia coli; identical to SEQ ID NO: 8915

SEQ ID NO: 12364 - protein, 857 aa, Escherichia coli; identical to SEQ ID NO: 8889

SEQ ID NO: 12365 - protein, 869 aa, Escherichia coli; identical to SEQ ID NO: 3738

SEQ ID NO: 12366 - protein, 162 aa, Escherichia coli; identical to SEQ ID NO: 1965

SEQ ID NO: 12367 - protein, 517 aa, Escherichia coli; identical to SEQ ID NO: 2462

SEQ ID NO: 12368 - protein, 102 aa, Escherichia coli; identical to SEQ ID NO: 1824

SEQ ID NO: 12369 - protein, 203 aa, Escherichia coli; identical to SEQ ID NO: 2201

SEQ ID NO: 12370 - protein, 733 aa, Escherichia coli
MAQALAAEGQTNADDTLVVEASTPSLYAPQQSADPKFSRPVADTTRTMTVISEQVIKDQGATNLTDALKNVPGVGAFFAGENGNSTTGDAIYMRGADTSNSIYIDGIRDIGSVSRDTFNTEQVEVIKGPSGTDYGRSAPTGSINMISKQPRNDSGIDASASIGSAWFRRGTLDVNQVIGDTTAVRLNVMGEKTHDAGRDKVKNERYGVAPSIAFGLGTANRLYLNYLHVTQHNTPDGGIPTIGLPGYSAPSAGTAALNHSGKVDTHNFYGTDSDYDDSTTDTATMRFEHDINDNTTIRNTTRWSRVKQDYLMTAIMGGASNITQPTSDVNSWTWSRTANTKDVSNKILTNQTNLTSTFYTGSIGHDVSTGVEFTRETQTNYGVNPVTLPAVNIYHPDSSIHPGGLTRNGVNANGQTDTFAIYAFDTLQITRDFELNGGIRLDNYHTEYDSATACGGSGRGAITCPTGVAKGSPVTTVDTAKSGNLVNWKAGALYHLTENGNVYINYAVSQQPPGGNNFALAQSGSGNSVNRTDFKPQKANTSEIGTKWQVLDKRLLLTAALFRTDIENEVEQNDDGTYSQYGKKRVEGYEISVAGNITPAWQVIGGYTQQKATIKNGKDVAQDGSSSLPYTPEHAFTLWSQYQATDDISVGAGARYIGSMHKGSDGAVGTPAFTEGYWVADAKLGYRVNRNLDFQLNVYNLFDTDYVASINKSGYRYHPGEPRTFLLTANMHF

SEQ ID NO: 12371 - protein, 361 aa, Escherichia coli; identical to SEQ ID NO: 3061

SEQ ID NO: 12372 - protein, 243 aa, Escherichia coli; identical to SEQ ID NO: 4409

SEQ ID NO: 12373 - protein, 816 aa, Escherichia coli; identical to SEQ ID NO: 8757

SEQ ID NO: 12374 - protein, 430 aa, Escherichia coli; identical to SEQ ID NO: 2617

SEQ ID NO: 12375 - protein, 816 aa, Escherichia coli; identical to SEQ ID NO: 2817

SEQ ID NO: 12376 - protein, 243 aa, Escherichia coli; identical to SEQ ID NO: 3483

SEQ ID NO: 12377 - protein, 351 aa, Escherichia coli; identical to SEQ ID NO: 2519

SEQ ID NO: 12378 - protein, 405 aa, Escherichia coli
MTERELSIIRALGEEFSTVLADLQRTFEGKMASQAQAFEEKLASLSAVLQKHVTVDEVHPVLQAMVDDAVGTIPVPRDGRDYDPDVLQQAVNDAVANIPQPADGKSLTPDDVRPMLEQMVKEAVSHIPAPRDGRDYDPEVLKQAVNDAVANIPQPADGKSLTPDDVRPMLEQMVKEAVSHIPAPRDGRDYDPEVLKQAVNDAVANIPVPADGKSITPDDVRPMLEQMVKEAVSHIPVPRDGRDYDPDVLQKAVLDAVRALPAPQDGRDATALEILPAIDDQKSFPRGTYATHQGGLWRAYEKTHGMRGWECLVDGVADIDVSMTGERLFSVVVRQSSGQRTEKTFSLPVMLYRGVFRAGETYHPGDTVTWGGSLWHCNSMTEDKPGEAHSSAWTLAAKRGRDAGG

SEQ ID NO: 12379 - protein, 236 aa, Escherichia coli; identical to SEQ ID NO: 3286

SEQ ID NO: 12380 - protein, 866 aa, Escherichia coli
MTIKPTKNYHNHLTRIATFCALLYCNSAFCAELVEYDHTFLMGQNASNIDLSRYSEGNPAIPGMYDVSVYVNDQPIINQSITFIEIEGKKNAQACITLKNLLQFHINSPDINNEKAVLLARDETLGNCLNLTEIIPQASVRYDVNEQRLDIDVPQAWVMKNYQNYVDPSLWENGINAAMLSYNLNGYHSETPGRRNDSIYAAFNGGMNLGAWRLRASGNYNWMTDSGSNYDFKNRYIQRDIASLRSQLILGESYTTGETFDSVSIRGIRLYSDSRMLPPTLASFAPIIHGVANTNAKVTITQGGYKIYETTVPPGAFVIDDLSPSGYGSDLIVTVEESDGSKRTFSQPFSSVVQMLRPGVGRWDISGGQVLKDDIQDEPNLFQASYYYGLNNYLTGYTGIQITDNNYTAGLLGLGLNTSVGAFSFDVTHSNVRIPDDKTYQGQSYRVSWNKLFEETSTSLNIAAYRYSTQNYLGLNDALTLIDEVKHPEQDLEPKSMRNYSRMKNQVTVSINQPLKFEKKDYGSFYLSGSWSDYWASGQNRSNYSIGYSNSASWGSYSVSAQRSWNEDGDTDDSVYLSFTIPIEKLLGTEQRTSGFQSIDTQMSSDFKGNNQLNVSSSGYSDNARVSYSVNTGYTMNKASKDLSYVGGYASYESPWGTLAGSVSANSDNSRQVSLSTDGGFVLHSGGLTFSNDSFSDSDTLAVVQAPGAQGARINYGNSTIDRWGYGVTSALSPYHENRIALDINDLENDVELKSTSAVAVPRQGSVVFADFETVQGQSAIMNITRSDGKNIPFAADIYDEQGNVIGNVGQGGQAFVRGIEQQGNISIKWLEESNPVSCLAHYQQSSEAEKIAQSIILNGIRCQIQ

SEQ ID NO: 12381 - protein, 266 aa, Escherichia coli; identical to SEQ ID NO: 1894

SEQ ID NO: 12382 - protein, 118 aa, Escherichia coli [sequence omitted]

SEQ ID NO: 12383 - protein, 207 aa, Escherichia coli; identical to SEQ ID NO: 2211

SEQ ID NO: 12384 - protein, 125 aa, Escherichia coli; identical to SEQ ID NO: 3090

SEQ ID NO: 12385 - protein, 241 aa, Escherichia coli; identical to SEQ ID NO: 8860

SEQ ID NO: 12386 - protein, 838 aa, Escherichia coli; identical to SEQ ID NO: 8926

SEQ ID NO: 12387 - protein, 760 aa, Escherichia coli; identical to SEQ ID NO: 2078

SEQ ID NO: 12388 - protein, 203 aa, Escherichia coli; identical to SEQ ID NO: 2201

SEQ ID NO: 12389 - protein, 362 aa, Escherichia coli
MMKRNILAVIVPALLVAGTANAAEIYNKDGNKVDLYGKAVGLHYFSKGNGENSYGGNGDMTYARLGFKGETQINSDLTGYGQWEYNFQGNNSEGADAQTGNKTRLAFAGLKYADVGSFDYGRNYGVVYDALGYTDMLPEFGGDTAYSDDFFVGRVGGVATYRNSNFFGLVDGLNFAVQYLGKNERDTARRSNGDGVGGSISYEYEGFGIVGAYGAADRTNLQEAQLLGNGKKAEQWATGLKYDANNIYLAANYGETRNATPITNKFTNISGFANKTQDVLLVAQYQFDFGLRPSIAYTKSKAKDVEGIGDVDLVNYFEVGATYYFNKNMSTYVDYIINQIDSDNKLGVASDDTVAVGIVYQF

SEQ ID NO: 12390 - protein, 233 aa, Escherichia coli; identical to SEQ ID NO: 2005

SEQ ID NO: 12391 - protein, 233 aa, Escherichia coli; identical to SEQ ID NO: 3548

SEQ ID NO: 12392 - protein, 243 aa, Escherichia coli; identical to SEQ ID NO: 2910

SEQ ID NO: 12393 - protein, 89 aa, Escherichia coli; identical to SEQ ID NO: 2810

SEQ ID NO: 12394 - protein, 250 aa, Escherichia coli; identical to SEQ ID NO: 3427

SEQ ID NO: 12395 - protein, 274 aa, Escherichia coli; identical to SEQ ID NO: 3721

SEQ ID NO: 12396 - protein, 729 aa, Escherichia coli; identical to SEQ ID NO: 3778

SEQ ID NO: 12397 - protein, 191 aa, Escherichia coli; identical to SEQ ID NO: 2727

SEQ ID NO: 12398 - protein, 998 aa, Escherichia coli; identical to SEQ ID NO: 6557

SEQ ID NO: 12399 - protein, 208 aa, Escherichia coli; identical to SEQ ID NO: 1949

SEQ ID NO: 12400 - protein, 394 aa, Escherichia coli; identical to SEQ ID NO: 8865

SEQ ID NO: 12401 - protein, 660 aa, Escherichia coli; identical to SEQ ID NO: 4092

SEQ ID NO: 12402 - protein, 207 aa, Escherichia coli; identical to SEQ ID NO: 2211

SEQ ID NO: 12403 - protein, 407 aa, Escherichia coli
MTERELSIIRALGEEFATVLADLQRTFEEKMAAQAQAFEEKLASLSAVLQKCVTVDEVHPVLQAMVDDAVGTIPVPRDGRDYDPDVLQQAVNDAVANIPVPADGKSITPDDVRPMLEQMVKEAVSHIPAPRDGRDYDPEVLKQVVNDAVGSIPVPADGKSLTPDDVRPMLEQMVKEAVSHIPVPRDGRDYDPEVLKQAVNDAVAKIPVPADGKSITPDDVRPMLEQMVKEAVSHIPAPRDGRDYDPDVLRKAVLEAVNALPAPQDGRDATALEVLPAIDDQKSFPRGTYATHLGGFWRAYEKTHGMRGWECLVDGVADIDVSMTGERLFSVVIRHSSGQRTEKTFSLPVMLYRGVFRAGETYHPGDTVTWGGSLWHCNSMTGDKPGEAHASGWTLAAKRGRDAGGGK

SEQ ID NO: 12404 - protein, 224 aa, Escherichia coli; identical to SEQ ID NO: 3115

SEQ ID NO: 12405 - protein, 228 aa, Escherichia coli; identical to SEQ ID NO: 8911

SEQ ID NO: 12406 - protein, 209 aa, Escherichia coli; identical to SEQ ID NO: 4977

SEQ ID NO: 12407 - protein, 826 aa, Escherichia coli; identical to SEQ ID NO: 3256

SEQ ID NO: 12408 - protein, 673 aa, Escherichia coli; identical to SEQ ID NO: 3295

SEQ ID NO: 12409 - protein, 729 aa, Escherichia coli; identical to SEQ ID NO: 3052

SEQ ID NO: 12410 - protein, 432 aa, Escherichia coli; identical to SEQ ID NO: 2026

SEQ ID NO: 12411 - protein, 203 aa, Escherichia coli; identical to SEQ ID NO: 2009

SEQ ID NO: 12412 - protein, 233 aa, Escherichia coli; identical to SEQ ID NO: 3276

SEQ ID NO: 12413 - protein, 162 aa, Escherichia coli; identical to SEQ ID NO: 1965

SEQ ID NO: 12414 - protein, 794 aa, Escherichia coli; identical to SEQ ID NO: 4850

SEQ ID NO: 12415 - protein, 866 aa, Escherichia coli; identical to SEQ ID NO: 4866

SEQ ID NO: 12416 - protein, 119 aa, Escherichia coli; identical to SEQ ID NO: 2527

SEQ ID NO: 12417 - protein, 746 aa, Escherichia coli; identical to SEQ ID NO: 3031

SEQ ID NO: 12418 - protein, 715 aa, Escherichia coli; identical to SEQ ID NO: 3971

SEQ ID NO: 12419 - protein, 883 aa, Escherichia coli; identical to SEQ ID NO: 5500

SEQ ID NO: 12420 - protein, 866 aa, Escherichia coli; identical to SEQ ID NO: 3025

SEQ ID NO: 12421 - protein, 760 aa, Escherichia coli; identical to SEQ ID NO: 3026

SEQ ID NO: 12422 - protein, 663 aa, Escherichia coli; identical to SEQ ID NO: 1910

SEQ ID NO: 12423 - protein, 715 aa, Escherichia coli
MLYNIPCRIYILSTLSLCISGIVSTATATSSETKISNEETLVVTTNRSASNLWESPATIQVIDQQTLQNSTNASIADNLQDIPGVEITDNSLAGRKQIRIRGEASSRVLILIDGQEVTYQRAGDNYGVGLLIDESALERVEVVKGPYSVLYGSQAIGGIVNFITKKGGDKLASGVVKAVYNSATAGWEESIAVQGSIGGFDYRINGSYSDQGNRDTPDGRLPNTNYRNNSQGVWLGYNSGNHRFGLSLDRYRLATQTYYEDPDGSYEAFSVKIPKLEREKVGVFYDTDVDDDYLKKIHFDAYEQTIQRQFANEVKTTQPVPSPMIQALTVHNKTDTHDKQYTQAVTLQSHFSLPANNELVTGAQYKQDRVSQRSGGMTSSKSLTGFINKETRTRSYYESEQSTVSLFAQNDWQFADHWTWTMGVRQYWLSSKLTRGDGVSYTAGIISDTSLARESASDHEMVTSTSLRYSGFDNLELRAAFAQGYVFPTLSQLFMQTSAGGSVTYGNPDLKAEHSNNFELGARYNGNQWLIDSAVYYSEAKDYIASLICDGSIVCNGNTNSSRSSYYYYDNIDRAKTWGLEISAEYNGWVFSPYISGNLIRRQYETSTLKTTNTGEPAINGRIGLKHTLVMGQANIISDVFIRAASSAKDDSNGTETNVPGWATLNFAVNTEFGNEDQYRINLALNNLTDKRYRTAHETIPAAGFNAAIGFVWNF

SEQ ID NO: 12424 - protein, 191 aa, Escherichia coli; identical to SEQ ID NO: 2727

SEQ ID NO: 12425 - protein, 243 aa, Escherichia coli; identical to SEQ ID NO: 3561

SEQ ID NO: 12426 - protein, 567 aa, Escherichia coli; identical to SEQ ID NO: 3518

SEQ ID NO: 12427 - protein, 203 aa, Escherichia coli; identical to SEQ ID NO: 2009

SEQ ID NO: 12428 - protein, 207 aa, Escherichia coli; identical to SEQ ID NO: 2211

SEQ ID NO: 12429 - protein, 236 aa, Escherichia coli; identical to SEQ ID NO: 3970

SEQ ID NO: 12430 - protein, 231 aa, Escherichia coli; identical to SEQ ID NO: 2868

SEQ ID NO: 12431 - protein, 616 aa, Escherichia coli
MLVSALTGTISGILEASKQAMFEHVAEKFAARINEWEKEHGKNYFENGYDARHAAFLEDSLSLLADFSRQHAVERAVAITQQHWDEKIGELAGITRNADRSQSGKAYINYLENGGLLEAQPKEFTQQVFDPQKGTIDLSTGNVSSVLTFITPTFTPGEEVRERKQSGKYEYMTSLIVNGKDTWSVKGIKNHKGVYDYSKLIQFVEKNNKHYQARIISELGDKDDVVYSGAGSSEVFAGEGYDTVSYNKTDVGKLTIDATGASKPGEYIVSKNMYGDVKVLQEVVKEQEVSVGKRTEKIQYRDFEFRTGGIPYDVIDNLHSVEELIGGKHDDEFKGGKFNDIFHGADGNDYIEGNYGNDRLYGDDGDDYISGGQGDDQLFGGSGNDKLSGGDGNNYLTGGSGNDELQAHGAYNILSGGTGDDKLYGGGGIDLLDGGEGNDYLNGGFGNDIYVYGQNYGHHTIADEGGKGDRLHLSDISFDDIAFKRVGNDLIMNKAINGVLSFNESNDVNGITFKNWFAKDASGADNHLVEVITDKDGREIKVDKIPHNNNERSGYIKASNIASEKNMVNITSVANDINKIISSVSGFDSGDERLASLYNLSLHQNNTHSTTLTTTV

SEQ ID NO: 12432 - protein, 612 aa, Escherichia coli
MVSVIDTSAPENQTATSATDLLRHVPGITLDGTGRTNGQDVNMRGYDHRGVLVLVDGVRQGTDTGHLNGTFLDPALIKRVEIVRGPSALLYGSGALGGVISYDTVDAKDLLQEGQSSGFRVFGTGGTGDHSLGLGASAFGRTENLDGIVAWSSRDRGDLRQSNGETAPNDESINNMLAKGTWQIDSAQSLSGLVRYYNNDAREPKNPQTVEASESSNPMVDRSTIQRDAQLSYKLAPQGNDWLNADAKIYWSEVRINAQNTGSSGEYREQITKGARLENRSTLFADSFASHLLTYGGEYYRQEQHPGGATTGFPQAKIDFSSGWLQDEITLRDLPITLLGGTRYDSYRGSSDGYKDVDADKWSSRAGMTINPTNWLMLFGSYAQAFRAPTMGEMYNDSKHFSIGRFYTNYWVPNPNLRPETNETQEYGFGLRFDDLMLSNDALEFKASYFDTKAKDYISTTVDFAAATTMSYNVPNAKIWGWDVMTKYTTDLFSLDVAYNRTRGKDTDTGEYISSINPDTVTSTLNIPIAHSGFSVGWVGTFADRSTHISSSYSKQPGYGVNDFYVSYQGQQALKGMTTTLVLGNAFDKEYWSPQGIPQDGRNGKIFVSYQW

SEQ ID NO: 12433 - protein, 351 aa, Escherichia coli; identical to SEQ ID NO: 2872

SEQ ID NO: 12434 - protein, 102 aa, Escherichia coli; identical to SEQ ID NO: 1825

SEQ ID NO: 12435 - protein, 230 aa, Escherichia coli; identical to SEQ ID NO: 2995

SEQ ID NO: 12436 - protein, 869 aa, Escherichia coli; identical to SEQ ID NO: 2903

SEQ ID NO: 12437 - protein, 539 aa, Escherichia coli; identical to SEQ ID NO: 3050

SEQ ID NO: 12438 - protein, 614 aa, Escherichia coli; identical to SEQ ID NO: 4469

SEQ ID NO: 12439 - protein, 231 aa, Escherichia coli; identical to SEQ ID NO: 3055

SEQ ID NO: 12440 - protein, 678 aa, Escherichia coli; identical to SEQ ID NO: 3014

SEQ ID NO: 12441 - protein, 746 aa, Escherichia coli; identical to SEQ ID NO: 2949

SEQ ID NO: 12442 - protein, 224 aa, Escherichia coli; identical to SEQ ID NO: 7845

SEQ ID NO: 12443 - protein, 843 aa, Escherichia coli; identical to SEQ ID NO: 3042

SEQ ID NO: 12444 - protein, 361 aa, Escherichia coli; identical to SEQ ID NO: 3601

SEQ ID NO: 12445 - protein, 367 aa, Escherichia coli; identical to SEQ ID NO: 2431

SEQ ID NO: 12446 - protein, 370 aa, Escherichia coli; identical to SEQ ID NO: 3599

SEQ ID NO: 12447 - protein, 170 aa, Escherichia coli; identical to SEQ ID NO: 3540

SEQ ID NO: 12448 - protein, 729 aa, Escherichia coli; identical to SEQ ID NO: 2948

SEQ ID NO: 12449 - protein, 213 aa, Escherichia coli; identical to SEQ ID NO: 2232

SEQ ID NO: 12450 - protein, 274 aa, Escherichia coli; identical to SEQ ID NO: 2304

SEQ ID NO: 12451 - protein, 860 aa, Escherichia coli; identical to SEQ ID NO: 7923

SEQ ID NO: 12452 - protein, 227 aa, Escherichia coli; identical to SEQ ID NO: 3570

SEQ ID NO: 12453 - protein, 518 aa, Escherichia coli; identical to SEQ ID NO: 2351

SEQ ID NO: 12454 - protein, 729 aa, Escherichia coli; identical to SEQ ID NO: 2948

SEQ ID NO: 12455 - protein, 732 aa, Escherichia coli; identical to SEQ ID NO: 3068

SEQ ID NO: 12456 - protein, 883 aa, Escherichia coli; identical to SEQ ID NO: 4713

SEQ ID NO: 12457 - protein, 191 aa, Escherichia coli; identical to SEQ ID NO: 2727

SEQ ID NO: 12458 - protein, 208 aa, Escherichia coli; identical to SEQ ID NO: 1949

SEQ ID NO: 12459 - protein, 241 aa, Escherichia coli; identical to SEQ ID NO: 2887

SEQ ID NO: 12460 - protein, 670 aa, Escherichia coli
MMIVSASGYEKKLTNAAASVSVISQEELQSSQYHDLAEALRSVEGVDVESGTGKTGGLEISIRGMPASYTLILIDGVRQGGSSDVTPNGFSAMNTGFMPPLAAIERIEVIRGPMSTLYGSDAMGGVVNIITRKNADKWLSSVNAGLNLQESNKWGNSSQFNFWSSGPLVDDSVSLQVRGSTQQRQGSSVTSLSDTAATRIPYPTESQNYNLGARLDWKASEQDVLWFDMDTTRQRYDNRDGQLGSLTGGYDRTLRYERNKISAGYDHTFTFGTWKSYLNWNETENKGRELVRSVLKRDKWGLAGQPRELKESNLILNSLLLTPLGESHLVTVGGEFQSSSMKDGVVLASTGETFRQKSWSVFAEDEWHLTDALALTAGSRYEHHEQFGGHFSPRAYLVWDVADAWTLKGGVTTGYKAPRMGQLHKGISGVSGQGKTNLLGNPDLKPEESVSYEAGVYYDNPAGLNANVTGFMTDFSNKIVSYSINDNTNSYVNSGKARLHGVEFAGTLPLWSEDVTLSLNYTWTRSEQRDGDNKGAPLSYTPEHMVNAKLNWQITEEVASWLGARYRGKTPRFTQNYSSLSAVQKKVYDEKGEYLKAWTVVDAGLSWKMTDALTLNAAVNNLLNKDYSDVSLYSAGKSTLYAGDYFQTGSSTTGYVIPERNYWMSLNYQF

SEQ ID NO: 12461 - protein, 517 aa, Escherichia coli; identical to SEQ ID NO: 2462

SEQ ID NO: 12462 - protein, 232 aa, Escherichia coli; identical to SEQ ID NO: 2087

SEQ ID NO: 12463 - protein, 274 aa, Escherichia coli; identical to SEQ ID NO: 2303

SEQ ID NO: 12464 - protein, 880 aa, Escherichia coli; identical to SEQ ID NO: 3008

SEQ ID NO: 12465 - protein, 237 aa, Escherichia coli; identical to SEQ ID NO: 3022

SEQ ID NO: 12466 - protein, 246 aa, Escherichia coli; identical to SEQ ID NO: 3021

SEQ ID NO: 12467 - protein, 747 aa, Escherichia coli; identical to SEQ ID NO: 2072

SEQ ID NO: 12468 - protein, 478 aa, Escherichia coli; identical to SEQ ID NO: 2404

SEQ ID NO: 12469 - protein, 774 aa, Escherichia coli; identical to SEQ ID NO: 3018

SEQ ID NO: 12470 - protein, 816 aa, Escherichia coli; identical to SEQ ID NO: 3562

SEQ ID NO: 12471 - protein, 376 aa, Escherichia coli
MAVKISGVLKDGTGKPVENCTIQLKARRTSSTVVVNTVASENPDEAGRYSMDVEYGQYSVILLVEGFPPSHAGTITVYEDSRPGTLNDFLGAMTEGDVRPEALRRFELMVEEVARHAEEAKKNAGEAETSARNAGISASQAEESAANADTSAGEASESARQAAESAAAAKQSEDASSSSASAAAQKASESSQSAAEAELSKKTAESAAGNAARDATTATEKARESAESAQSAEQSRIAAEEAVNRIPTVVGPPGPKGEQGPAGPQGPKGDKGERGDTGPVGATGERGPAGNAGPAGPQGPKGDRGERGERGETGLTGNAGPQGPKGDTGGSRPGRPTGTERRNRCGWPGGGNRTSGAEGRPGGDANTVPSGAGKHY

SEQ ID NO: 12472 - protein, 366 aa, Escherichia coli; identical to SEQ ID NO: 3520

SEQ ID NO: 12473 - protein, 224 aa, Escherichia coli; identical to SEQ ID NO: 3035

SEQ ID NO: 12474 - protein, 862 aa, Escherichia coli; identical to SEQ ID NO: 11115

SEQ ID NO: 12475 - protein, 232 aa, Escherichia coli; identical to SEQ ID NO: 2087

SEQ ID NO: 12476 - protein, 128 aa, Escherichia coli; identical to SEQ ID NO: 7495

SEQ ID NO: 12477 - protein, 331 aa, Escherichia coli; identical to SEQ ID NO: 2705

SEQ ID NO: 12478 - protein, 840 aa, Escherichia coli; identical to SEQ ID NO: 3591

SEQ ID NO: 12479 - protein, 237 aa, Escherichia coli; identical to SEQ ID NO: 2816

SEQ ID NO: 12480 - protein, 656 aa, Escherichia coli; identical to SEQ ID NO: 6440

SEQ ID NO: 12481 - protein, 224 aa, Escherichia coli; identical to SEQ ID NO: 3165

SEQ ID NO: 12482 - protein, 232 aa, Escherichia coli; identical to SEQ ID NO: 2087

SEQ ID NO: 12483 - protein, 213 aa, Escherichia coli; identical to SEQ ID NO: 2232

SEQ ID NO: 12484 - protein, 224 aa, Escherichia coli; identical to SEQ ID NO: 3115

SEQ ID NO: 12485 - protein, 746 aa, Escherichia coli; identical to SEQ ID NO: 2949

SEQ ID NO: 12486 - protein, 879 aa, Escherichia coli; identical to SEQ ID NO: 4479

SEQ ID NO: 12487 - protein, 193 aa, Escherichia coli; identical to SEQ ID NO: 2250

SEQ ID NO: 12488 - protein, 209 aa, Escherichia coli; identical to SEQ ID NO: 3547

SEQ ID NO: 12489 - protein, 170 aa, Escherichia coli [sequence omitted]

SEQ ID NO: 12490 - protein, 678 aa, Escherichia coli; identical to SEQ ID NO: 2902

SEQ ID NO: 12491 - protein, 237 aa, Escherichia coli
MRKITQAISAVCLLFALNSSAVALASFPSPLNPGTNVARLAEQAPIHWVSVAQIENSLAGRPPMAVGFDIDDTVLFSSPGFWRGKKNFSPESEDYLKNPVFWEKMNNGWDEFSIPKEVARQLIDMHVRRGDAIFFVTGRSPTKTETVSKTLADNFHIPATSMNPVIFAGDKPGQNTKSQWLQDKNIRIFYGDSDNDITAARDVGARGIRILRASNSTYKPLPQAGAFGEEVIVNSEY

SEQ ID NO: 12492 - protein, 430 aa, Escherichia coli; identical to SEQ ID NO: 2617

SEQ ID NO: 12493 - protein, 367 aa, Escherichia coli; identical to SEQ ID NO: 3016

SEQ ID NO: 12494 - protein, 837 aa, Escherichia coli; identical to SEQ ID NO: 4687

SEQ ID NO: 12495 - protein, 700 aa, Escherichia coli; identical to SEQ ID NO: 2926

SEQ ID NO: 12496 - protein, 191 aa, Escherichia coli; identical to SEQ ID NO: 2727

SEQ ID NO: 12497 - protein, 816 aa, Escherichia coli; identical to SEQ ID NO: 4456

SEQ ID NO: 12498 - protein, 387 aa, Escherichia coli; identical to SEQ ID NO: 3908

SEQ ID NO: 12499 - protein, 746 aa, Escherichia coli; identical to SEQ ID NO: 3031

SEQ ID NO: 12500 - protein, 363 aa, Escherichia coli; identical to SEQ ID NO: 3347

SEQ ID NO: 12501 - protein, 207 aa, Escherichia coli; identical to SEQ ID NO: 2211

SEQ ID NO: 12502 - protein, 518 aa, Escherichia coli; identical to SEQ ID NO: 2349

SEQ ID NO: 12503 - protein, 686 aa, Escherichia coli; identical to SEQ ID NO: 3015

SEQ ID NO: 12504 - protein, 203 aa, Escherichia coli; identical to SEQ ID NO: 2201

SEQ ID NO: 12505 - protein, 162 aa, Escherichia coli; identical to SEQ ID NO: 1969

SEQ ID NO: 12506 - protein, 208 aa, Escherichia coli; identical to SEQ ID NO: 7992

SEQ ID NO: 12507 - protein, 468 aa, Escherichia coli; identical to SEQ ID NO: 7740

SEQ ID NO: 12508 - protein, 760 aa, Escherichia coli; identical to SEQ ID NO: 2078

SEQ ID NO: 12509 - protein, 478 aa, Escherichia coli; identical to SEQ ID NO: 2404

SEQ ID NO: 12510 - protein, 221 aa, Escherichia coli; identical to SEQ ID NO: 3743

SEQ ID NO: 12511 - protein, 161 aa, Escherichia coli; identical to SEQ ID NO: 2582

SEQ ID NO: 12512 - protein, 591 aa, Escherichia coli; identical to SEQ ID NO: 3668

SEQ ID NO: 12513 - protein, 229 aa, Escherichia coli; identical to SEQ ID NO: 3277

SEQ ID NO: 12514 - protein, 161 aa, Escherichia coli; identical to SEQ ID NO: 2582

SEQ ID NO: 12515 - protein, 110 aa, Escherichia coli; identical to SEQ ID NO: 7578

SEQ ID NO: 12516 - protein, 696 aa, Escherichia coli; identical to SEQ ID NO: 3314

SEQ ID NO: 12517 - protein, 869 aa, Escherichia coli; identical to SEQ ID NO: 3012

SEQ ID NO: 12518 - protein, 565 aa, Escherichia coli; identical to SEQ ID NO: 2669

SEQ ID NO: 12519 - protein, 89 aa, Escherichia coli; identical to SEQ ID NO: 2810

SEQ ID NO: 12520 - protein, 713 aa, Escherichia coli; identical to SEQ ID NO: 3523

SEQ ID NO: 12521 - protein, 203 aa, Escherichia coli; identical to SEQ ID NO: 2009

SEQ ID NO: 12522 - protein, 359 aa, Escherichia coli; identical to SEQ ID NO: 2328

SEQ ID NO: 12523 - protein, 512 aa, Escherichia coli; identical to SEQ ID NO: 2813

SEQ ID NO: 12524 - protein, 203 aa, Escherichia coli; identical to SEQ ID NO: 2201

SEQ ID NO: 12525 - protein, 402 aa, Escherichia coli; identical to SEQ ID NO: 4768

SEQ ID NO: 12526 - protein, 244 aa, Escherichia coli
DDMRPMLEQMVKEAVSHIPVPRDGRDYDPEVLQKAVNDAVANIPQPADGKSLTPDDVRPMLEQMVKEAVSHIPVPRDGRDYDPDVLQKAVLDAVSALPAPQDGRDATALEILPAIDDQKSFPRGTYATHQGGLWRAYEKTHGMRGWECLVDGVADIDVSMTGERLFSVVVRHSSGQRTEKTFSLPVMLYRGVFRAGETYHPGDTVTWGGSLWHCNSMTADKPGDAHASGWTLAAKRGRDAGGGK

SEQ ID NO: 12527 - protein, 700 aa, Escherichia coli; identical to SEQ ID NO: 3047

SEQ ID NO: 12528 - protein, 249 aa, Escherichia coli; identical to SEQ ID NO: 3028

SEQ ID NO: 12529 - protein, 362 aa, Escherichia coli; identical to SEQ ID NO: 2434

SEQ ID NO: 12530 - protein, 747 aa, Escherichia coli; identical to SEQ ID NO: 8827

SEQ ID NO: 12531 - protein, 659 aa, Escherichia coli; identical to SEQ ID NO: 2942

SEQ ID NO: 12532 - protein, 273 aa, Escherichia coli
MTVNKIKNIFNNATLTTKSAFNTASSSVRSAGKKLILLIPDNYEAQGVGINELVKAADELGIEIHRTERDDTAIANQFFGAAEKVVGLTERGVAIFAPQLDKLLQKYQKVGSKIGGTAENVGNNLGKAGTVLSALQNFTGIALSGMALDELLRKQREGEDISQNDIAKSSIELINQLVDTVSSINSTVDSFSEQLNQLGSFLSSKPRLSSVGGKLQNLPDLGPLGDGLDVVSGILSAVSASFILGNSDAHTGTKAAAGIELTTQVLGNVGKAV

SEQ ID NO: 12533 - protein, 324 aa, Escherichia coli; identical to SEQ ID NO: 3579

SEQ ID NO: 12534 - protein, 871 aa, Escherichia coli; identical to SEQ ID NO: 3519

SEQ ID NO: 12535 - protein, 351 aa, Escherichia coli; identical to SEQ ID NO: 2872

SEQ ID NO: 12536 - protein, 227 aa, Escherichia coli
MRIITALLMSFFILPVHAGVVIYGTRIIYPEKNREVLVQLMNQSKNASLIQAWIDDGNTTIAPEKIQVTFILTPPVSRVAGGSGQLLKIRKMPNNLPHNKESLFYLNVLDIPPNNPQNAGKNKIKLALQNRIKLLWRPSGIAPVDKKSLSQLNIKKKNNAISINNETANWITVTTIKAQNVKVNNESILLPPFSHNDITLKNNHASEYELTVVDDYGNNIHSKIAAR

SEQ ID NO: 12537 - protein, 446 aa, Escherichia coli; identical to SEQ ID NO: 2176

SEQ ID NO: 12538 - protein, 432 aa, Escherichia coli; identical to SEQ ID NO: 2026

SEQ ID NO: 12539 - protein, 230 aa, Escherichia coli; identical to SEQ ID NO: 3019

SEQ ID NO: 12540 - protein, 232 aa, Escherichia coli; identical to SEQ ID NO: 2087

SEQ ID NO: 12541 - protein, 518 aa, Escherichia coli; identical to SEQ ID NO: 2349

SEQ ID NO: 12542 - protein, 565 aa, Escherichia coli; identical to SEQ ID NO: 2678

SEQ ID NO: 12543 - protein, 747 aa, Escherichia coli; identical to SEQ ID NO: 2954

SEQ ID NO: 12544 - protein, 828 aa, Escherichia coli; identical to SEQ ID NO: 5894

SEQ ID NO: 12545 - protein, 228 aa, Escherichia coli; identical to SEQ ID NO: 3034

SEQ ID NO: 12546 - protein, 446 aa, Escherichia coli; identical to SEQ ID NO: 2179

SEQ ID NO: 12547 - protein, 213 aa, Escherichia coli; identical to SEQ ID NO: 2232

SEQ ID NO: 12548 - protein, 216 aa, Escherichia coli
MAMMVAGRAEAGVALGATRVIYPAGQKQVQLAVTNNDENSTYLIQSWVENADDVKDGRFIVTPPLFAMKGKKENTLRILDATNNQLPQDRESLFWMNVKAIPSMDKSKLTENTLQLAIISRIKLYYRPAKLALPPDQAAEKLRFRRSANSLTLINPTPYYLTVTELNAGARVLENALVPPMGESTVKLPSDAGSNITYRTINDYGALTPKMTGVME

SEQ ID NO: 12549 - protein, 551 aa, Escherichia coli; identical to SEQ ID NO: 2446

SEQ ID NO: 12550 - protein, 696 aa, Escherichia coli; identical to SEQ ID NO: 4038

SEQ ID NO: 12551 - protein, 784 aa, Escherichia coli; identical to SEQ ID NO: 2244

SEQ ID NO: 12552 - protein, 360 aa, Escherichia coli; identical to SEQ ID NO: 3032

SEQ ID NO: 12553 - protein, 331 aa, Escherichia coli; identical to SEQ ID NO: 2700

SEQ ID NO: 12554 - protein, 539 aa, Escherichia coli; identical to SEQ ID NO: 3050

SEQ ID NO: 12555 - protein, 200 aa, Escherichia coli; identical to SEQ ID NO: 1784

SEQ ID NO: 12556 - protein, 614 aa, Escherichia coli; identical to SEQ ID NO: 3301

SEQ ID NO: 12557 - protein, 686 aa, Escherichia coli; identical to SEQ ID NO: 3129

SEQ ID NO: 12558 - protein, 351 aa, Escherichia coli; identical to SEQ ID NO: 3010

SEQ ID NO: 12559 - protein, 731 aa, Escherichia coli; identical to SEQ ID NO: 3290

SEQ ID NO: 12560 - protein, 828 aa, Escherichia coli; identical to SEQ ID NO: 2380

SEQ ID NO: 12561 - protein, 700 aa, Escherichia coli
MKIFSVRQTVLPALLVLSPVVFAADEQTMIVSTAPQVVSELDTPAAVSVVDGEEMRLATPRINLSESLTGVPGLQVQNRQNYAQDLQLSIRGFGSRSTYGIRGIRLYVDGIPATMPDGQGQTSNIDLSSVQNVEVLRGPFSALYGNASGGVMNVTTQTGQQPPTIEASSYYGSFGSWRYGLKATGATGDGTQPGDVDYTVSTTRFTTHGYRDHSGAQKNLANAKLGVRIDEASKLSLIFNSVDIKADDPGGLTKAEWKANPQQAPRAEQYDTRKTIKQTQAGLRYERSLSAQDDMSVMMYAGERETTQYQSIPMAPQLNPSHAGGVITLQRHYQGIDSRWTHRGELGVPVTFTTGLNYENMSENRKGYNNFRLNSGMPEYGQKGELRRDERNLMWNIDPYLQTQWQLSEKLSLDAGVRYSSVWFDSNDHYVTPGNGDDSGDASYHKWLPAGSLKYAMTDAWNIYLAAGRGFETPTINELSYRADGQSGMNFGLKPSTNDTIEIGSKTRIGDGLLSLALFQTDTDDEIVVDSSSGGRTTYKNAGKTRRQGAELAWDQRFAGDFRVNASWTWLDATYRSNVCNEQDCNGNRMPGIARNMGFASIGYVPEDGWYAGTEARYMGDIMADDENTAKAPSYTLVGLFTGYKYNYHNLTVDLFGRVDNLFDKEYVGSVIVNESNGRYYEPSPGRNYGVGMNIAWRFE

SEQ ID NO: 12562 - protein, 246 aa, Escherichia coli; identical to SEQ ID NO: 3021

SEQ ID NO: 12563 - protein, 360 aa, Escherichia coli; identical to SEQ ID NO: 3354

SEQ ID NO: 12564 - protein, 430 aa, Escherichia coli; identical to SEQ ID NO: 2617

SEQ ID NO: 12565 - protein, 230 aa, Escherichia coli; identical to SEQ ID NO: 3723

SEQ ID NO: 12566 - protein, 784 aa, Escherichia coli; identical to SEQ ID NO: 3822

SEQ ID NO: 12567 - protein, 432 aa, Escherichia coli; identical to SEQ ID NO: 2026

SEQ ID NO: 12568 - protein, 747 aa, Escherichia coli; identical to SEQ ID NO: 2072

SEQ ID NO: 12569 - protein, 193 aa, Escherichia coli; identical to SEQ ID NO: 2246

SEQ ID NO: 12570 - protein, 331 aa, Escherichia coli; identical to SEQ ID NO: 2700

SEQ ID NO: 12571 - protein, 102 aa, Escherichia coli; identical to SEQ ID NO: 1824

SEQ ID NO: 12572 - protein, 231 aa, Escherichia coli; identical to SEQ ID NO: 3055

SEQ ID NO: 12573 - protein, 236 aa, Escherichia coli; identical to SEQ ID NO: 3286

SEQ ID NO: 12574 - protein, 61 aa, Escherichia coli; identical to SEQ ID NO: 9050

SEQ ID NO: 12575 - protein, 684 aa, Escherichia coli
MMMTARGTVDPSRWDEGIPALLLDYSFSGSNGRNEGTGSSSDSTSDSYYLNLRSGLNVGPWRLRNNSIWNRTDGKNQWDNVGTSLNRAIIPLKSQITLGDTATPGEIFDSVQMRGALLASDDEMLPDSQRGFAPVVRGIAKSNAEVSIEQNGYVIYRTFVQPGAFEINDLYATSGSGDLTVIIKEADGSEQRFIQPFSAVAIFQREGYLKYSLAAGEYRAGNYDSDKPHFGQFTAMYGLPWGMTAYGGALLSADYNALALGLGKNFGTIGAVSVDVTQAKSQLRNNEKEEGQSYRFLYSKSFEGGTDLRLLGYKYSTSGYYTFQEATDVRSDADSDYRRYHKRSQIQGNITQQLGDYGSVYFNMTQQDYWNVDGKENSLSAGYHGHIGRVNYSVAYTWTRSPEWEEDDRLWSFSVSIPLGGAWSSYRMTTDQNGKTSQQASVSGTLLEDRNLSYNVQQGYTSNGVGYSGSVNMGYMGGSGNIDVGYNYSKDNQQVNYGVRGGVIVHSEGITLSQPLGESLAIVSAPGARGGHVVNSSGVEVDWMGNAVVPYLTPYRETIVELRSDTLGQNVELQEAFQKVVPTRGAVVRSRFDTRVGYRVLMSLKQANGNAVPFGATAALIDESKPASSIVGEEGQLYISGMPEEGELQVSWGNEQAQRCRVPFRLPENKDNAAIVMVNAVCEK

SEQ ID NO: 12576 - protein, 678 aa, Escherichia coli; identical to SEQ ID NO: 3014

SEQ ID NO: 12577 - protein, 192 aa, Escherichia coli; identical to SEQ ID NO: 3894

SEQ ID NO: 12578 - protein, 193 aa, Escherichia coli; identical to SEQ ID NO: 6614

SEQ ID NO: 12579 - protein, 614 aa, Escherichia coli; identical to SEQ ID NO: 3736

SEQ ID NO: 12580 - protein, 377 aa, Escherichia coli
MLQALAEQEKLNLVVSPDVSGTVSLHLTDVPWKQALQTVVKSAGLITRQEDNILSVHSIAWQNNNIARQEAEQARAQANLPLENRSITLQYADAGELAKAGEKLLSAKGSMTVDKRTNRLLLRDNKTALSALEQWVAQMDLPVGQVELSAHIVTINEKSLRELGVKWTLADAQHAGGVGQVTTLGSDLSVATATTHVGFNIGRINGRLLDLELSALEQKQQLDIIASPRLLASHLQPASIKQGSEIPYQVSSGESGATSVEFKEAVLGMEVTPTVLQKGRIRLKLHISQNVPGQVLQQADGEVLAIDKQEIETQVEVKSGETLALGGIFTRKNKSGQDSVPLLGDIPWFGQLFRHDGKEDERRELVVFITPRLVSSE

SEQ ID NO: 12581 - protein, 250 aa, Escherichia coli; identical to SEQ ID NO: 3048

SEQ ID NO: 12582 - protein, 641 aa, Escherichia coli; identical to SEQ ID NO: 3774

SEQ ID NO: 12583 - protein, 243 aa, Escherichia coli; identical to SEQ ID NO: 2910

SEQ ID NO: 12584 - protein, 118 aa, Escherichia coli [sequence omitted]

SEQ ID NO: 12585 - protein, 512 aa, Escherichia coli; identical to SEQ ID NO: 11139

SEQ ID NO: 12586 - protein, 243 aa, Escherichia coli
MTFMKGLPLLLLVASLCSHAALQPDRTRIVFNANDKATSLRVDNRSDKLPYLAYSWLENEKGEKSDDLLVALPPIQRLEPKATTQVRIVKQASTTKLPGDRETLFFYNMREIPPAPEKNSDHAVLQVAIQSRIKVFWRPAALRKKAGEKVELQLQVSQQGNQLTLKNPTAYYLTIAYLGRNEKGVLPGFKTVMVAPFSTVNTNIGNYSGSQFYLGYMDDYGALRMTTLNYSGQCHLQAVEAKK

SEQ ID NO: 12587 - protein, 368 aa, Escherichia coli; identical to SEQ ID NO: 3171

SEQ ID NO: 12588 - protein, 881 aa, Escherichia coli; identical to SEQ ID NO: 3713

SEQ ID NO: 12589 - protein, 721 aa, Escherichia coli; identical to SEQ ID NO: 3717

SEQ ID NO: 12590 - protein, 162 aa, Escherichia coli; identical to SEQ ID NO: 1965

SEQ ID NO: 12591 - protein, 231 aa, Escherichia coli; identical to SEQ ID NO: 3055

SEQ ID NO: 12592 - protein, 703 aa, Escherichia coli
MALLPSAAFAAPATEETVIVEGSATAPDDGENDYSVTSTSAGTKMQMTQRDIPQSVTIVSQQRMEDQQLQTLGEVMENTLGISKSQADSDRALYYSRGFQIDNYMVDGIPTYFESRWNLGDALSDMALFERVEVVRGATGLMTGTGNPSAAINMVRKHATSREFKGDVSAEYGSWNKERYVADLQSPLTEDGKIRARIVGGYQNNDSWLDRYNSEKTFFSGIVDADLGDLTTLSAGYEYQHIDVNSPTWGGLPRWNTDGSSNSYDRARSTAPDWAYNDKEINKVFMTLKQRFADTWQATLNATHSEVEFDSKMMYVDAYVNKADGMLIGPYSNYGPGFDYVGGTGWNSGKRKVDALDLFADGSYELFGRQHNLMFGGSYSKQNNRYFSSWANIFPDEIGSFYNFNGNFPQTDWSPQSLAQDDTTHIKSLYAATRVTLADPLHLILGARYTNWRVDTLTYSMEKNHTTPYAGLVFDINDNWSTYASYTSIFQPQNDRDSSGKYLAPITGNNYELGLKSDWMNSRLTTTLAIFRIEQDNVAQSTGTPIPGSNGETAYKAVDGTVSKGVEFELNGAITDNWQLTFGATRYIAEDNEGNAVNPNLPRTTVKMFTSYRLPVMPELTVGGGVNWQNRVYTDTVTPYGTFRAEQGSYALVDLFTRYQVTKNFSLQGNVNNLFDKTYDTNVEGSIVYGAPRNFSITGTYQF

SEQ ID NO: 12593 - protein, 998 aa, Escherichia coli; identical to SEQ ID NO: 2953

SEQ ID NO: 12594 - protein, 386 aa, Escherichia coli; identical to SEQ ID NO: 3094

SEQ ID NO: 12595 - protein, 208 aa, Escherichia coli; identical to SEQ ID NO: 1949

SEQ ID NO: 12596 - protein, 672 aa, Escherichia coli; identical to SEQ ID NO: 7919

SEQ ID NO: 12597 - protein, 816 aa, Escherichia coli
MNIYRLSFVSCLVVAMPCALAVEFNLNVLDKSMRDRIDISLLKEKGVIAPGEYFVSVAVNNNQISNGQKINWHKNDDKTIPCINDLLVDKFGLKPEVRQSLPLINQCVDFSSRPEMLFNFDQANQQLNITIPQAWLAWHSENWTPPSTWKEGVAGVLMDYNLFASSYRPQDGSSSTNLNAYGTAGINTGAWRLRSDYQLNQTDSDDNHEQSGEISRTYLFRPLPQLGSKLTLGETDFSSNIFDGFSYTGAALASDDRMLPWELRGYAPQISGIAQTNATVTISQSGRVIYQKKVPPGPFIIDDLNQSVQGTLDVKVTEEDGRVNNFQVSAASTPFLTRQGQVRYKLAAGQPRPSMSHQTENETFFSNDVSWGMLSNTSLYGGLLLSGDDYHSAAIGIGQNMLWLGALSFDVTWASSHFDTQQDERGLSYRFNYSKQVDATNSTISLAAYRFSDRHFHSYANYLDHKYNDSDAQDEKQTISLSVGQPITPLNLNLYANLLHQTWWNADASTTANITAGFNVDIGDWRDISISTSFNTTHYEDKDRDNQIYLSISLPFGNGGRVGYDMQNSSHSTTHRMSWNDTLDERNSWGMSAGLQSDRPDNGAQVSGNYQHLSSAGEWDISGTYAANDYSSVSSSWSGSFTATQYGAAFHRRSSTNEPRLMVSTDGVADIPVQGNLDYTNHFGIAVVPLISSYQPSTVAVNMNDLPDGVTVAENVIKETWIEGAIGYKSLASRSGKDVNVIIRNASGQFPPLGADIRQDDSGISVGMVGEEGHAWLSGVAENQKFTVVWGDSQHCSLHLPEHMEDTANRLILPCH

SEQ ID NO: 12598 - protein, 606 aa, Escherichia coli
MYRTHRQHSLLSSGGVPSFIGGLVVFVSAAFNAQAETWFDPAFFKDDPSMVADLSRFEKGQKITPGVYRVDIVLNQTIVDTRNVNFVEITPEKGIAACLTTESLDAMGVNTDAFPAFKQLDKQACVPLAEIIPDASVTFNVNKLRLEISVPQIAIKSNARGYVPPERWDEGSNALLLGYSFSGANSIHSSADSDSGDSYFLNLNSGVNLGPWRLRNNSTWSRSSGQTAEWKNLSSYLQRAVIPLKGELTVGDDYTAGDFFDSVSFRGVQLASDDNMLPDSLKGFAPVVRGIAKSNAQITIKQNGYTIYQTYVSPGAFEISDLYSTSSSGDLLVEIKEADGSVNSYSVPFSSVPLLQRQGRIKYAVTLAKYRTNSNEQQESKFAQATLQWGGPWGTTWYGGGQYAEYYRAAMFGLGFNLGDFGAISFDATQAKSTLADQSEHKGQSYRFLYAKTLNQLGTNFQLMGYRYSTSGFYTLSDTMYKHMDGYEFNDGDDEDTPMWSRYYNLFYTKRGKLQVNISQQLGEYGSFYLSGSQQTYWHTDQQDRLLQFGYNTQIKDLSLGVSWNYSKSRGQPDADQVFALNFSLPLNLLLPRSNDSYTRKKITPG

SEQ ID NO: 12599 - protein, 478 aa, Escherichia coli; identical to SEQ ID NO: 2404

SEQ ID NO: 12600 - protein, 883 aa, Escherichia coli
MTAFRAAFKAYRMHQVLIMPRFARLTIALGLATAVFPVDAEYYFNPRFLSNDLAESVDLSAFTKGREAPPGTYRVDIYLNDEFMTSRDITFIADDNNAELIPCLSTDLLVSLGIKKIALLDNKEHSAEKHVPDNSACTPLQDRLADASTEFDVGQQHLSLSVPQIYVGRMARGYVSPDLWEEGINAGLLNYSFNGNSINNRSNHNAGKSNYAYLNLQSGINIGSWRLRDNSTWSYNSGSSNSSDSNKWQHINTSAERDIIPLRSRLTVGDSYTDGDIFDSVNFRGLKINSTEAMLPDSQHGFAPVIHGIARGTAQVSVKQNGYDVYQTTVPPGPFTIDDINSAANGGDLQVTIKEADGSIQTLYVPYSSVPVLQRAGYTRYALAMGEYRSGNNLQSSPKFIQGSLMHGLEGNWTPYGGMQIAEDYQAFNLGIGKDLGLFGAFSFDITQANTTLADGTRHSGQSVKSVYSKSFYQTGTNIQVAGYRYSTQGFYNLSDSAYSRMSGYTVKPPTGDTNEQTQFIDYFNLFYSKRGQEQISISQQLGNYGTTFFSASRQSYWNTSRSDQQISFGLNVPFGDITTSLNYSYSNNIWQNDRDHLLAFTLNVPFSHWMRTDSQSAFRNSNASYSMSNDLKGGMTNLSGVYGTLLPDNNLNYSVQVGNTHGGNTSSGTSGYSSLNYRGAYGNTNVGYSRSGDSSQIYYGMSGGIIAHADGITFGQPLGDTMVLVKAPGADNVKIENQTGIHTDWRGYAILPFATEYRENRVALNANSLADNVELDETVITVIPTHGAIARATFNAQIGGKVLMTLKYGNKSVPFGAIVTHGENKNGSIVAENGQVYLTGLPQSGKLQVSWGKDKNSNCIVEYKLPEVSPGTLLNQQTAICR

SEQ ID NO: 12601 - protein, 89 aa, Escherichia coli; identical to SEQ ID NO: 2833

SEQ ID NO: 12602 - protein, 207 aa, Escherichia coli; identical to SEQ ID NO: 2211

SEQ ID NO: 12603 - protein, 361 aa, Escherichia coli; identical to SEQ ID NO: 3061

SEQ ID NO: 12604 - protein, 111 aa, Escherichia coli; identical to SEQ ID NO: 3096

SEQ ID NO: 12605 - protein, 191 aa, Escherichia coli; identical to SEQ ID NO: 2727

SEQ ID NO: 12606 - protein, 565 aa, Escherichia coli; identical to SEQ ID NO: 2678

SEQ ID NO: 12607 - protein, 834 aa, Escherichia coli; identical to SEQ ID NO: 3692

SEQ ID NO: 12608 - protein, 346 aa, Escherichia coli
MAVKISGVLKDGTGKPVENCTIQLKARRTSSTVVVNTVASENPDEAGRYSMDVEYGQYSVILLVEGFPPSHAGTITVYEDSQPGTLNDFLGAMSEDDVRPEALRRFELMVEEVARHAEEAKKNAGEAETSARNAGISASQAEESAANADTSAGEASESARQAAESAASAKQSEDASSSSASAAAQKASESSQSAAEAELSRKTAESAAGNAARDATTATEKARESAESAQSAEQSRIAAEEAVNRIPTVVGPPGPKGEQGPAGPQGPKGDKGERGETGLTGNAGPQGPKGDTGAAGPAGPQGPKGETGAAGPVGATGPQGPKGDPGETQIRFRLGPASIIETNSNG

SEQ ID NO: 12609 - protein, 120 aa, Escherichia coli; identical to SEQ ID NO: 2525

SEQ ID NO: 12610 - protein, 780 aa, Escherichia coli; identical to SEQ ID NO: 3726

SEQ ID NO: 12611 - protein, 224 aa, Escherichia coli; identical to SEQ ID NO: 3115

SEQ ID NO: 12612 - protein, 233 aa, Escherichia coli; identical to SEQ ID NO: 3276

SEQ ID NO: 12613 - protein, 226 aa, Escherichia coli; identical to SEQ ID NO: 3085

SEQ ID NO: 12614 - protein, 826 aa, Escherichia coli
MLRMTPLASAIVALLLGIEAYAAEETFDTHFMIGGMKDQQVANIRLDDNQPLPGQYDIDIYVNKQWRGKYEIIVKDNPQETCLSREVIKRLGINSDNFASGKQCLTFEQLVQGGSYTWDIGVFRLDFSVPQAWVEELESGYVPPENWERGINAFYTSYYVSQYYSDYKASGNSKSTYVRFNSGLNLLGWQLHSDASFSKTNNNPGVWKSNTLYLERGFAQLLGTLRVGDMYTSSDIFDSVRFRGVRLFRDMQMLPNSKQNFTPRVQGIAQSNALVTIEQNGFVVYQKEVPPGPFAITDLQLAGGGADLDVSVKEADGSVTTYLVPYAAVPNMLQPGVSKYDFAAGRSHIEGASKHSDFVQAGYQYGFNNLLTLYGGSMVANNYYAFTLGTGWNTRIGAISVDATKSHSKQDNGDVFDGQSYQIAYNKFVSQTSTRFGLAAWRYSSRDYRTFNDHVWANNKDNYRRDENDVYDIADYYHNDFGRKNSFSANMSQSLPEGWGSVSLSTLWRDYWGRSGSSKDYQLSYSNNLRRISYTLAASQAYDENHHEEKRFNIFISIPFDWGDDVSTPRRQIYMSNSTTFDDQGFASNNTGLSGTVGSRDQFNYGVNLSHQHQGNETTAGANLTWNAPVATVNGSYSQSSTYRQAGASVSGGIVAWSGGVNLANRLSETFAVMNAPGIKDAYVNGQKYRTTNRNGVVVYDGMTPYRENHLMLDVSQSDSEAELRGNRKIAAPYRGAVVLVNFDTDQRKPWFIKALRADGQPLTFGYEVNDIHGHNIGVVGQGSQLFIRTNEVPPSVNVAIDKQQGLSCTITFGKEIDESRNYICQ

SEQ ID NO: 12615 - protein, 331 aa, Escherichia coli; identical to SEQ ID NO: 2700

SEQ ID NO: 12616 - protein, 760 aa, Escherichia coli; identical to SEQ ID NO: 3026

SEQ ID NO: 12617 - protein, 203 aa, Escherichia coli; identical to SEQ ID NO: 2201

SEQ ID NO: 12618 - protein, 641 aa, Escherichia coli
MLAVDDDGETMVVTASSVEQNLKDAPASISVITQEDLQRKPVQNLKDVLKEVPGVQLTNEGDNRKGVSIRGLDSSYTLILVDGKRVNSRNAVFRHNDFDLNWIPVDSIERIEVVRGPMSSLYGSDALGGVVNIITKKIGQKWSGTVTVDTTIQEHRDRGDTYNGQFFTSGPLIDGVLGMKAYGSLAKREKDDPQNSTTTDTGETPRIEGFSSRDGNVEFAWTPNQNHDFTAGYGFDRQDRDSDSLDKNRLERQNYSVSHNGRWDYGTSELKYYGEKVENKNPGNSSPITSESNTVDGKYTLPLTAINQFLTVGGEWRHDKLSDAVNLTGGTSSKTSASQYALFVEDEWRIFEPLALTTGVRMDDHETYGEHWSPRAYLVYNATDTVTVKGGWATAFKAPSLLQLSPDWTSNSCRGACKIVGSPDLKPETSESWELGLYYMGEEGWLEGVESSVTVFRNDVKDRISISRTSDVNAAPSYQNFVGFETGANGRRIPVFSYYNVNKARIQGVETELKIPFNDEWKLSINYTYNDGRDVSNGENKPLSDLPFHTANGTLDWKPLALEDWSFYVSGHYTGQKRADSATAKTPGGYTIWNTGAAWQVTKDVKLRAGVLNLGDKDLSRDDYSYNEDGRRYFMAVDYRF

SEQ ID NO: 12619 - protein, 363 aa, Escherichia coli; identical to SEQ ID NO: 3347

SEQ ID NO: 12620 - protein, 446 aa, Escherichia coli; identical to SEQ ID NO: 2176

SEQ ID NO: 12621 - protein, 250 aa, Escherichia coli; identical to SEQ ID NO: 3707

SEQ ID NO: 12622 - protein, 774 aa, Escherichia coli; identical to SEQ ID NO: 3122

SEQ ID NO: 12623 - protein, 696 aa, Escherichia coli; identical to SEQ ID NO: 4038

SEQ ID NO: 12624 - protein, 232 aa, Escherichia coli; identical to SEQ ID NO: 2087

SEQ ID NO: 12625 - protein, 210 aa, Escherichia coli; identical to SEQ ID NO: 3228

SEQ ID NO: 12626 - protein, 765 aa, Escherichia coli; identical to SEQ ID NO: 4323

SEQ ID NO: 12627 - protein, 230 aa, Escherichia coli; identical to SEQ ID NO: 3348

SEQ ID NO: 12628 - protein, 747 aa, Escherichia coli; identical to SEQ ID NO: 3670

SEQ ID NO: 12629 - protein, 514 aa, Escherichia coli
MCNEKISFLFFTALFCCSAQAAPSSLEKRLGKNEYFIITKSSPVRAILNDFAANYSIPVFISNSVNDDFSGEIKNEKPMKVLEKLSRLYHLTWYYDENILYIYKTNEISRSIITPTYLDIDSLLKYLRDTISVNKNSCNVRKITTFNSIEVRGVPECIKYITSLSESLDKEAQSKAKNKDVVRVFKLNYASATDITYKYRDQNVVVPGVVSILKTMASNGSLPSTGKGAVERNGNLFDNSVKISADPRLNAVVVKDREITMDIYRQLISELDIEQRQIEISVSIIDVDANDLQQLGVNWSGTLNAGQGSIAFNSSTAQANLSSSVISNANNFMIRVNALQQNSKAKILSQPSIITLNNMQAILDKNVTFYTKVSGEKVASLESITSGTLLRVTPRILDDNSNSLTGKRRERVRLLLDIQDGNQSTNQSNAQDASSILPEVQNSEMTTEATLSAGESLLLGGFIQDKESSSKDGIPLLSDIPVIGNLFSSTTKQKHSVVRLFLIKATPIKSASSE

SEQ ID NO: 12630 - protein, 266 aa, Escherichia coli; identical to SEQ ID NO: 1894

SEQ ID NO: 12631 - protein, 161 aa, Escherichia coli; identical to SEQ ID NO: 2582

SEQ ID NO: 12632 - protein, 241 aa, Escherichia coli
MSNKNVNVRKSQEITFCLLAGILMFMAMMVAGRAEAGVALGATRVIYPAGQKQVQLAVTNNDENSTYLIQSWVENADGVKDGRFIVTPPLFAMKGKKENTLRILDATNNQLPQDRESLFWMNVKAIPSMDKSKLTENTLQLAIISRIKLYYRLAKLALPPDQAAEKLRFRRSANSLTLINPTPYYLTVTELNAGTRVLENALVPPMGESTVKLPSDAGSNITYRTINDYGALTPKMTGVME

SEQ ID NO: 12633 - protein, 878 aa, Escherichia coli
MSYLNLRLYQRNTQCLHIRKHRLAGFFVRLFVACAFAAQAPLSSAELYFNPRFLADDPQAVADLSRFENGQELPPGTYRVDIYLNNGYMATRDVTFNTGDSEQGIVPCLTRAQLASMGLNTASVAGMNLLADDACVPLTTMVQDATAHLDVGQQRLNLTIPQAFMSNRARGYIPPELWDPGINAGLLNYNFSGNSVQNRIGGNSHYAYLNLQSGLNIGAWRLRDNTTWSYNSSDRSSGSKNKWQHINTWLERDIIPLRSRLTLGDGYTQGDIFDGINFRGAQLASDDNMLPDSQRGFAPVIHGIARGTAQVTIKQNGYDIYNSTVPPGPFTINDIYAAGNSGDLQVTIKEADGSTQIFTVPYSSVPLLQREGHTRYSITAGEYRSGNAQQEKPRFFQSTLLHGLPAGWTIYGGTQLADRYRAFNFGIGKNMGALGALSVDMTQANSTLPDDSQHDGQSVRFLYNKSLNESGTNIQLVGYRYSTSGYFNFADTTYSRMNGYNIETQDGVIQVKPKFTDYYNLAYNKRGKLQLTVTQQLGRTSTLYLSGSHQTYWGTSNVDEQFQAGLNTAFEDINWTLSYSLTKNAWQKGRDQMLALNVNIPFSHWLRSDSKSQWRHASASYSMSHDLNGRMTNLAGVYGTLLEDNNLSYSVQTGYAGGGDGNSGSTGYATLNYRGGYGNANIGYSHSDDIKQLYYGVSGGVLAHANGVTLGQPLNDTVVLVKAPGAKDAKVENQTGVRTDWRGYAVLPYATEYRENRVALDTNTLADNVDLDNAVANVVPTRGAIVRAEFKARVGIKLLMTLTHNNKPLPFGAMVTSESSQSSGIVADNGQVYLSGMPLAGKVQVKWGEEENAHCVANYQLPPESQQQLLTQLSAECR

SEQ ID NO: 12634 - protein, 539 aa, Escherichia coli; identical to SEQ ID NO: 3050

SEQ ID NO: 12635 - protein, 236 aa, Escherichia coli; identical to SEQ ID NO: 3286

SEQ ID NO: 12636 - protein, 678 aa, Escherichia coli; identical to SEQ ID NO: 3014

SEQ ID NO: 12637 - protein, 614 aa, Escherichia coli; identical to SEQ ID NO: 3301

SEQ ID NO: 12638 - protein, 784 aa, Escherichia coli; identical to SEQ ID NO: 2244

SEQ ID NO: 12639 - protein, 170 aa, Escherichia coli [sequence omitted]

SEQ ID NO: 12640 - protein, 359 aa, Escherichia coli; identical to SEQ ID NO: 2329

SEQ ID NO: 12641 - protein, 696 aa, Escherichia coli
MRITTLASVVIPCLGFSASSIAAAEDVMIVSASGYEKKLTNAAASVSVISQEELQSSQYHDLAEALRSVEGVDVESGTGKTGGLEISIRGMPASYTLILIDGVRQGGSSDVTPNGFSAMNTGFMPPLAAIERIEVIRGPMSTLYGSDAMGGVVNIITRKNADKWLSSVNAGLNLQESNKWGNSSQFNFWSSGPLVDDSVSLQVRGSTQQRQGSSVTSLSDTAATRIPYPTESQNYNLGARLDWKASEQDVLWFDMDTTRQRYDNRDGQLGSLTGGYDRTLRYERNKISAGYDHTFTFGTWKSYLNWNETENKGRELVRNVLKRDKWGLAGQLRELKESNLILNSLLLTPLGESHLVTVGGEYQSSSMKDGVVLASTGETFRQKSWSVFAEDEWHLTDALALTAGSRYEHHEQFGGHFSPRAYLVWDVADAWTLKGGVTTGYKAPRMGQLHKGISGVSGQGKTNLLGNPDLKPEESVSYEAGVYYDNPAGLNANITGFMTDFSNKIVSYSINDNTNSYINSGKARLHGVEFAGTLPLWSEDVTLSLNYTWTRSEQRDGDNKGAPLSYTPEHMVNAKLNWQITEEVASWLGARYRGKTPRFTQNYSSLSAVQKKVYDEKGEYLKAWTVVDAGLSWKVTDALTLNAAVNNLLNKDYSDVSLYSAGKSTLYAGDYFQTGSSTTGYVIPERNYWMSLNYQF

SEQ ID NO: 12642 - protein, 394 aa, Escherichia coli
MAVKISGVLKDGTGKPVENCTIQLKARRTSSTVVVNTVASENPDEAGRYSMDVEYGQYSVILLVEGFPPSHAGTITVYEDSQPGTLNDFLGAMSEDDVRPEALRRFELMLEEAARHAEEAKKNAGEAETSARNAGISASQAEESAANADTSAGEASESARQAAESAAAAKQSEEASSSSASAAAQKASESSQSAAEAELSRKTAESAAGNAARDATTATEKARESAESAQSAEQSRIAAEEAVNRIPTVVGPPGPKGEQGPAGPQGPKGDKGERGDTGPVGATGERGPAGDAGPAGPQGPKGDRGERGETGLTGNAGPRVQREIPVRQARQARQAHRDRKEKQVRLARWGQPDLRDRRATRGRHKSVFVWGRRALLRQTAMAGSRIQMVHSSPD

SEQ ID NO: 12643 - protein, 230 aa, Escherichia coli; identical to SEQ ID NO: 3723

SEQ ID NO: 12644 - protein, 840 aa, Escherichia coli; identical to SEQ ID NO: 6560

SEQ ID NO: 12645 - protein, 228 aa, Escherichia coli; identical to SEQ ID NO: 3034

SEQ ID NO: 12646 - protein, 243 aa, Escherichia coli; identical to SEQ ID NO: 2910

SEQ ID NO: 12647 - protein, 193 aa, Escherichia coli; identical to SEQ ID NO: 2246

SEQ ID NO: 12648 - protein, 430 aa, Escherichia coli; identical to SEQ ID NO: 2617

SEQ ID NO: 12649 - protein, 371 aa, Escherichia coli
MKKITVALSAVAASVLMAMSAQAAEIYNKDGNKLDLYGKVNAEHYFSSSASDDGDKTYARMGFKGETQINDQLTGFGQWEYEFKGNRTETEGSDKDKTRLAFAGLRFGDYGSLDYGRNYGVAYDVGAWTDVLPEFGGDTWTQTDVFMTQRATGVATYRNNDFFGLVDGLNFALQYQGKNDSAAKVNNWKGRDVVESNGDGFGLSATYDYEGFGIGATYAKSDRTDGQVSYAKAPLNLNASGKTAEVWATGLKYDANNIYLATTYSETQNMTVFGDDHIANKAKNFEAVAQYQFDFGLRPSIAYLHSRGENIGAFGNQDLVEYIDVGATYYFNKNMSAFVDYKINLIDESEFTKTSEVATDNIVAVGMTYQF

SEQ ID NO: 12650 - protein, 432 aa, Escherichia coli; identical to SEQ ID NO: 2026

SEQ ID NO: 12651 - protein, 325 aa, Escherichia coli
MRGSLSAKHYFSSNDADDGDTTYARLGFKGETQINDQLTGFGQWEYEFKGNRAESQGSSKDKTRLAFAGLKFGDYGSIDYGRNYGVAYDIGAWTDVLPEFGGDTWTQTDVFMTGRTTGVATYRNNDFFGLVDGLNFAAQYQGKNDRTDVTQANGDGFGFSTTYEYEGFGVGATYAKSDRTNNQVIYGNNSLNASGQNAEVWAAGLKYDANNIYLATTYSETQNMTVFGKNHIANKAQNFEVVAQYQFDFGLRPSVAYLQSKGKDLGAWGDQDLVEYIDVGATYYFNKNMSTFVDYKINLIDKSDFTKASGVATDDIVAVGMVYQF

SEQ ID NO: 12652 - protein, 200 aa, Escherichia coli; identical to SEQ ID NO: 1784

SEQ ID NO: 12653 - protein, 518 aa, Escherichia coli; identical to SEQ ID NO: 2349

SEQ ID NO: 12654 - protein, 203 aa, Escherichia coli; identical to SEQ ID NO: 2009

SEQ ID NO: 12655 - protein, 351 aa, Escherichia coli; identical to SEQ ID NO: 3691

SEQ ID NO: 12656 - protein, 118 aa, Escherichia coli [sequence omitted]

SEQ ID NO: 12657 - protein, 249 aa, Escherichia coli; identical to SEQ ID NO: 3492

SEQ ID NO: 12658 - protein, 274 aa, Escherichia coli; identical to SEQ ID NO: 3721

SEQ ID NO: 12659 - protein, 699 aa, Escherichia coli; identical to SEQ ID NO: 11112

SEQ ID NO: 12660 - protein, 673 aa, Escherichia coli
MPGVNLTGNSTSGQRGNNRQIDIRGMGPENTLILIDGKPVSSRNSVRQGWRGERDTRGDTSWVPPEMIERIEVLRGPAAARYGNGAAGGVVNIITKKGSGEWHGSWDAYFNAPEHKEEGATKRTNFSLTGPLGDEFSFRLYGNLDKTQADAWDINQGHQSARAGTYATTLPAGREGVINKDINGVVRWDFAPLQSLELEAGYSRQGNLYAGDTQNTNSDAYTRSKYGDETNRLYRQNYALTWNGGWDNGVTTSNWVQYEHTRNSRIPEGLAGGTEGKFNEKATQDFVDIDLDDVMLHSEVNLPIDILVNQTLTLGTEWNQQRMKDLSSNTQALTGANTGGAIDGMSATDRSPYSKAEIFSLFAENNMELTDSTIVTPGLRFDHHSIVGNNWSPALNISQGLGDDFTLKMGIARAYKAPSLYQTNPNYILYSKGQGCYASAGGCYLQGNDDLKAETSINKEIGLEFKRDGWLAGVTWFRNDYRNKIEAGYVAVGQNAVGTDLYQWDNVPKAVVEGLEGSLNVPVSETVMWTNNITYMLKSENKTTGDRLSIIPEYTLNSTLSWQAREDLSMQTTFTWYGKQQPKKYNYKGQPAVGPETKEISPYSIVGLSATWDVTKNVSLTGGVDNLFDKRLWRAGNAQTTGDLAGANYIAGAGAYTYNEPGRTWYMSVNTHF

SEQ ID NO: 12661 - protein, 673 aa, Escherichia coli
MKMTRLYPLALGGLLLPAIANAQTSQQDESTLVVTASKQSSRSASANNVSSTVVSAPELSDAGVTASDKLPRVLPGLNIENSGNMLFSTISLRGVSSAQDFYNPAVTLYVDGVPQLSTNTIQALTDVQSVELLRGPQGTLYGKSAQGGLINIVTQQPDSTPRGYIEGGVSSRDSYRSKFNLSGPIEDGLLYGSVTLLRQVDDGDMINPATGSDDLGGTRASIGNVKLRLAPDDQPWEMGFAASRECTRATQDAYVGWNDIKGRKLSISDGSPDPYMRRCTDSQTLSGKYTTDDWVFNLISAWQQQHYSRTFPSGSLIVNMPQRWNQDVQELRAATLGDARTVDMVFGLYRQNTREKLNSAYDMPTMPYLSSTGYTTAETLAAYSDLTWHLTDRFDIGGGVRFSHDKSSTQYHGSMLGNPFGDQGKSNDDQVLGQLSAGYMLTDDWRVYTRVAQGYKPSGYNIVPTAGLDAKPFVAEKSINYELGTRYETADVTLQAATFYTHTKDMQLYSGPDGMQTLSNAGKADATGVELEAKWRFAPGWSWDINGNVIRSEFTNDSELYHGNRVPFVPRYGAGSSVNGVIDTRYGALMPRLAVNLVGPHYFDGDNQLRQGTYATLDSSLGWQATERMNISVYVDNLFDRRYRTYGYMNGSSAVAQVNMGRTVGINTRIDFF

SEQ ID NO: 12662 - protein, 221 aa, Escherichia coli; identical to SEQ ID NO: 3672

SEQ ID NO: 12663 - protein, 274 aa, Escherichia coli; identical to SEQ ID NO: 3721

SEQ ID NO: 12664 - protein, 826 aa, Escherichia coli; identical to SEQ ID NO: 3700

SEQ ID NO: 12665 - protein, 784 aa, Escherichia coli; identical to SEQ ID NO: 2244

SEQ ID NO: 12666 - protein, 565 aa, Escherichia coli; identical to SEQ ID NO: 2678

SEQ ID NO: 12667 - protein, 213 aa, Escherichia coli; identical to SEQ ID NO: 2232

SEQ ID NO: 12668 - protein, 203 aa, Escherichia coli; identical to SEQ ID NO: 2201

SEQ ID NO: 12669 - protein, 614 aa, Escherichia coli; identical to SEQ ID NO: 3301

SEQ ID NO: 12670 - protein, 203 aa, Escherichia coli; identical to SEQ ID NO: 2007

SEQ ID NO: 12671 - protein, 199 aa, Escherichia coli; identical to SEQ ID NO: 5136

SEQ ID NO: 12672 - protein, 243 aa, Escherichia coli; identical to SEQ ID NO: 7668

SEQ ID NO: 12673 - protein, 359 aa, Escherichia coli; identical to SEQ ID NO: 2329

SEQ ID NO: 12674 - protein, 224 aa, Escherichia coli; identical to SEQ ID NO: 3115

SEQ ID NO: 12675 - protein, 363 aa, Escherichia coli; identical to SEQ ID NO: 3347

SEQ ID NO: 12676 - protein, 594 aa, Escherichia coli
MARSKTAQPKHSLRKIAVVVATAVSGMSVYAQAAVEPKEDTITVTAAPAPQESAWGPAATIAAKHSATATKTDTPIEKTPQSISVVTREEMDIKQPATVKEALDYTPSVFSTRGSSTTYDVVSIRGFTTASTVNTNQYLDGLKLQGDNYSEASIDPYFLERVELLRGPVSVLYGKSHPGGVVSMVSKRPSTDPIKEIQFKMGTDNLWQTGFDFSDAIDDDGVWSYRLTGLGRSQDAQQKYAKTTRYAVAPSFSWRPDDKTDFTFLSNFQSDPDAGYYGWLPRQGTVVPYQDANGSWHKLPTDFNEGEKDNKMSRRQQLIGYSFAHEFNDTFTVRQNLRYTRIHTLYDAVYGNGYIAPAQISRAYVRSDEDLNSFTVDTQLQSNFAIGAVAHTLLTGVDYLRMRNDIDANYGTANPISMTDPQYGNANININFPYAVINRQEQTGLYIQDQSEWNKWVLTLGGRYDFAKTSTYTRSTSSLDEINDQQFTWRGGINYLFDNGISPYFSYSESFEPVSGATKEGKPFDPSRGKQYEAGVKYVPKDTPVTVTASVFQLTKDKNLTADPSNTLFSVQGGRFVLVALRLRPKQLSTLISM

SEQ ID NO: 12677 - protein, 700 aa, Escherichia coli; identical to SEQ ID NO: 5110

SEQ ID NO: 12678 - protein, 203 aa, Escherichia coli; identical to SEQ ID NO: 2009

SEQ ID NO: 12679 - protein, 231 aa, Escherichia coli; identical to SEQ ID NO: 3055

SEQ ID NO: 12680 - protein, 446 aa, Escherichia coli; identical to SEQ ID NO: 2176

SEQ ID NO: 12681 - protein, 776 aa, Escherichia coli; identical to SEQ ID NO: 7663

SEQ ID NO: 12682 - protein, 478 aa, Escherichia coli; identical to SEQ ID NO: 2405

SEQ ID NO: 12683 - protein, 386 aa, Escherichia coli; identical to SEQ ID NO: 3094

SEQ ID NO: 12684 - protein, 407 aa, Escherichia coli; identical to SEQ ID NO: 6407

SEQ ID NO: 12685 - protein, 238 aa, Escherichia coli; identical to SEQ ID NO: 8905

SEQ ID NO: 12686 - protein, 162 aa, Escherichia coli; identical to SEQ ID NO: 1965

SEQ ID NO: 12687 - protein, 798 aa, Escherichia coli; identical to SEQ ID NO: 8775

SEQ ID NO: 12688 - protein, 232 aa, Escherichia coli; identical to SEQ ID NO: 2087

SEQ ID NO: 12689 - protein, 774 aa, Escherichia coli; identical to SEQ ID NO: 3426

SEQ ID NO: 12690 - protein, 170 aa, Escherichia coli; identical to SEQ ID NO: 2564

SEQ ID NO: 12691 - protein, 243 aa, Escherichia coli; identical to SEQ ID NO: 8454

SEQ ID NO: 12692 - protein, 249 aa, Escherichia coli; identical to SEQ ID NO: 5120

SEQ ID NO: 12693 - protein, 512 aa, Escherichia coli; identical to SEQ ID NO: 2973

SEQ ID NO: 12694 - protein, 446 aa, Escherichia coli; identical to SEQ ID NO: 2177

SEQ ID NO: 12695 - protein, 432 aa, Escherichia coli; identical to SEQ ID NO: 2026

SEQ ID NO: 12696 - protein, 200 aa, Escherichia coli; identical to SEQ ID NO: 1785

SEQ ID NO: 12697 - protein, 165 aa, Escherichia coli; identical to SEQ ID NO: 5130

SEQ ID NO: 12698 - protein, 118 aa, Escherichia coli [sequence omitted]

SEQ ID NO: 12699 - protein, 162 aa, Escherichia coli; identical to SEQ ID NO: 1965

SEQ ID NO: 12700 - protein, 518 aa, Escherichia coli; identical to SEQ ID NO: 2350

SEQ ID NO: 12701 - protein, 551 aa, Escherichia coli; identical to SEQ ID NO: 2447

SEQ ID NO: 12702 - protein, 191 aa, Escherichia coli; identical to SEQ ID NO: 2727

SEQ ID NO: 12703 - protein, 386 aa, Escherichia coli; identical to SEQ ID NO: 5143

SEQ ID NO: 12704 - protein, 388 aa, Escherichia coli
MTVKISGVLKDGTGKPVQNCTIVLKARRTSSTVVVNTVASENPDEAGRYSMDVEHGQYSVTLLVEGFPPSHAGTITVYEGSRPGTLNDFLGAMTEDDVRPEALRRFELMVEEAARHAEEAKKNAGEAETSARNAGISASQAEESAANADTSAGDASESARQAAESAAAAKQSEEASSSSASAAAQKASESSQSAADAELSKKTAESAAGNAARDATTATEKARESAESAQSAEQSRIAAEEAVNRIPTVVGPPGPKGEPGPAGPQGPKGDKGERGDTGPAGATGERGPAGDAGPAGPQGPKGDRGERGETGLTGNAGPQGPKGDTGAAGPAGPQEKQVRLARWGQPDLRDRRATRGRHKSVFVWGRRALLRQTAMAGSRIQMAHSSPD

SEQ ID NO: 12705 - protein, 230 aa, Escherichia coli; identical to SEQ ID NO: 3348

SEQ ID NO: 12706 - protein, 351 aa, Escherichia coli; identical to SEQ ID NO: 3691

SEQ ID NO: 12707 - protein, 512 aa, Escherichia coli; identical to SEQ ID NO: 2974

SEQ ID NO: 12708 - protein, 432 aa, Escherichia coli; identical to SEQ ID NO: 2026

SEQ ID NO: 12709 - protein, 729 aa, Escherichia coli; identical to SEQ ID NO: 5131

SEQ ID NO: 12710 - protein, 236 aa, Escherichia coli; identical to SEQ ID NO: 3482

SEQ ID NO: 12711 - protein, 208 aa, Escherichia coli; identical to SEQ ID NO: 1949

SEQ ID NO: 12712 - protein, 266 aa, Escherichia coli; identical to SEQ ID NO: 5141

SEQ ID NO: 12713 - protein, 368 aa, Escherichia coli; identical to SEQ ID NO: 5102

SEQ ID NO: 12714 - protein, 200 aa, Escherichia coli; identical to SEQ ID NO: 1784

SEQ ID NO: 12715 - protein, 843 aa, Escherichia coli; identical to SEQ ID NO: 3163

SEQ ID NO: 12716 - protein, 746 aa, Escherichia coli; identical to SEQ ID NO: 5132

SEQ ID NO: 12717 - protein, 856 aa, Escherichia coli; identical to SEQ ID NO: 5125

SEQ ID NO: 12718 - protein, 879 aa, Escherichia coli; identical to SEQ ID NO: 5138

SEQ ID NO: 12719 - protein, 593 aa, Escherichia coli; identical to SEQ ID NO: 7714

SEQ ID NO: 12720 - protein, 656 aa, Escherichia coli; identical to SEQ ID NO: 5108

SEQ ID NO: 12721 - protein, 207 aa, Escherichia coli; identical to SEQ ID NO: 2212

SEQ ID NO: 12722 - protein, 361 aa, Escherichia coli; identical to SEQ ID NO: 3061

SEQ ID NO: 12723 - protein, 392 aa, Escherichia coli
MAVKISGVLKDGTGKPVENCTIQLKARRTSSTVVVNTVASENPDEAGRYSMDVEYGQYSVILLVEGFPPSHAGTITVYEDSQPGTLNDFLGAMSEDDVRPEALRRFELMVEEAARHAEEAKKNAGEAETSARNAGISASQAEESAAHADTSAGDASESARQAAESAAAAKQSEEASSSSASAAAQKASESSQSAAEAELSKKTAESAAGNAARDATTATEKARESAESAQSAEQSRIAAEEAVNRIPTVVGPPGPKGEQGPAGPQGPKGDKGERGDTGPVGATGERGPAGDAGPAGPQGPKGDRGERGETGLTGNAGPQGPKGDTGAAGPAGPQGPKGETGAAGPVGATGPQGPKGDPGGDTNTVPSGAGETLLRQTAMAGSRIQMAHSSPD

SEQ ID NO: 12724 - protein, 359 aa, Escherichia coli; identical to SEQ ID NO: 2329

SEQ ID NO: 12725 - protein, 711 aa, Escherichia coli; identical to SEQ ID NO: 5144

SEQ ID NO: 12726 - protein, 208 aa, Escherichia coli; identical to SEQ ID NO: 1948

SEQ ID NO: 12727 - protein, 230 aa, Escherichia coli; identical to SEQ ID NO: 3723

SEQ ID NO: 12728 - protein, 161 aa, Escherichia coli; identical to SEQ ID NO: 2582

SEQ ID NO: 12729 - protein, 191 aa, Escherichia coli; identical to SEQ ID NO: 2727

SEQ ID NO: 12730 - protein, 373 aa, Escherichia coli; identical to SEQ ID NO: 8448

SEQ ID NO: 12731 - protein, 518 aa, Escherichia coli; identical to SEQ ID NO: 2349

SEQ ID NO: 12732 - protein, 478 aa, Escherichia coli; identical to SEQ ID NO: 2404

SEQ ID NO: 12733 - protein, 760 aa, Escherichia coli; identical to SEQ ID NO: 3026

SEQ ID NO: 12734 - protein, 111 aa, Escherichia coli; identical to SEQ ID NO: 3096

SEQ ID NO: 12735 - protein, 241 aa, Escherichia coli; identical to SEQ ID NO: 2890

SEQ ID NO: 12736 - protein, 351 aa, Escherichia coli; identical to SEQ ID NO: 4688

SEQ ID NO: 12737 - protein, 221 aa, Escherichia coli; identical to SEQ ID NO: 3743

SEQ ID NO: 12738 - protein, 746 aa, Escherichia coli; identical to SEQ ID NO: 3031

SEQ ID NO: 12739 - protein, 729 aa, Escherichia coli; identical to SEQ ID NO: 3778

SEQ ID NO: 12740 - protein, 539 aa, Escherichia coli; identical to SEQ ID NO: 7779

SEQ ID NO: 12741 - protein, 834 aa, Escherichia coli; identical to SEQ ID NO: 3692

SEQ ID NO: 12742 - protein, 249 aa, Escherichia coli; identical to SEQ ID NO: 3492

SEQ ID NO: 12743 - protein, 686 aa, Escherichia coli; identical to SEQ ID NO: 3129

SEQ ID NO: 12744 - protein, 774 aa, Escherichia coli; identical to SEQ ID NO: 8553

SEQ ID NO: 12745 - protein, 838 aa, Escherichia coli; identical to SEQ ID NO: 7717

SEQ ID NO: 12746 - protein, 678 aa, Escherichia coli; identical to SEQ ID NO: 8612

SEQ ID NO: 12747 - protein, 118 aa, Escherichia coli [sequence omitted]

SEQ ID NO: 12748 - protein, 170 aa, Escherichia coli [sequence omitted]

SEQ ID NO: 12749 - protein, 673 aa, Escherichia coli; identical to SEQ ID NO: 7780

SEQ ID NO: 12750 - protein, 765 aa, Escherichia coli; identical to SEQ ID NO: 8598

SEQ ID NO: 12751 - protein, 747 aa, Escherichia coli; identical to SEQ ID NO: 3670

SEQ ID NO: 12752 - protein, 266 aa, Escherichia coli; identical to SEQ ID NO: 1894

SEQ ID NO: 12753 - protein, 250 aa, Escherichia coli; identical to SEQ ID NO: 3427

SEQ ID NO: 12754 - protein, 193 aa, Escherichia coli; identical to SEQ ID NO: 2246

SEQ ID NO: 12755 - protein, 816 aa, Escherichia coli; identical to SEQ ID NO: 7726

SEQ ID NO: 12756 - protein, 430 aa, Escherichia coli; identical to SEQ ID NO: 2617

SEQ ID NO: 12757 - protein, 331 aa, Escherichia coli; identical to SEQ ID NO: 2700

SEQ ID NO: 12758 - protein, 203 aa, Escherichia coli; identical to SEQ ID NO: 2201

SEQ ID NO: 12759 - protein, 224 aa, Escherichia coli; identical to SEQ ID NO: 3165

SEQ ID NO: 12760 - protein, 232 aa, Escherichia coli; identical to SEQ ID NO: 2087

SEQ ID NO: 12761 - protein, 229 aa, Escherichia coli; identical to SEQ ID NO: 3277

SEQ ID NO: 12762 - protein, 213 aa, Escherichia coli; identical to SEQ ID NO: 2232

SEQ ID NO: 12763 - protein, 826 aa, Escherichia coli; identical to SEQ ID NO: 5098

SEQ ID NO: 12764 - protein, 641 aa, Escherichia coli; identical to SEQ ID NO: 6206

SEQ ID NO: 12765 - protein, 371 aa, Escherichia coli; identical to SEQ ID NO: 5126

SEQ ID NO: 12766 - protein, 430 aa, Escherichia coli; identical to SEQ ID NO: 2617

SEQ ID NO: 12767 - protein, 331 aa, Escherichia coli; identical to SEQ ID NO: 5128

SEQ ID NO: 12768 - protein, 760 aa, Escherichia coli; identical to SEQ ID NO: 5104

SEQ ID NO: 12769 - protein, 355 aa, Escherichia coli
MKRNILAVVVSALLVAGTANAAEIYNKDGNKLDLYGKAVGLHYFSKGNGENSYGGNGDKTYARLGFKGETQINSDLTGYGQWEYNFQGNNSEGDDAQNGNKTRLAFAGLKFADAGSFDYGRNYGVVYDALGYTDMLPEFGGDTAYSDDFFVGRVGGVATYRNSNFFGLVDGLNFAVQYLGKNERDTARRSNGDGVGGSVSYEFEGFGIVGAYGAADRTNLQEDSTLGKGKKAEQWATGLKYDANNIYLAANYGETRNATPITGGFANKTQDILLVAQYQFDFGLRPSIAYTKSKAKDVEGIGDVDLVNYIEVGATYYFNKNMSTYVDYAINQIDSDNKLGVGSDDTVAVGIVYQF

SEQ ID NO: 12770 - protein, 565 aa, Escherichia coli; identical to SEQ ID NO: 5118

SEQ ID NO: 12771 - protein, 686 aa, Escherichia coli; identical to SEQ ID NO: 9611

SEQ ID NO: 12772 - protein, 678 aa, Escherichia coli; identical to SEQ ID NO: 6376

SEQ ID NO: 12773 - protein, 111 aa, Escherichia coli; identical to SEQ ID NO: 5097

SEQ ID NO: 12774 - protein, 660 aa, Escherichia coli
MSRPQFTSLRLSLLALAVSATLPTFAFATETMTVTATGNARSSFEAPMMVSVIDTSAPENQTATSATDLLRHVPGITLDGTGRTNGQDVNMRGYDHRGVLVLVDGVRQGTDTGHLNGTFLDPALIKRVEIVRGPSALLYGSGALGGVISYDTVDAKDLLQEGQSSGFSVFGTGGTGDHSLGLGASAFGRTENLDGIVAWPSRDRGDLRQSNGETAPNDESINNMLAKGTWQIDSAQSLSGLVRYYNNDAREPKNPQTVEASDSSNPMVDRSTIQRDAQLSYKLAPQGNDWLNADAKIYWSEVRINAQNTGSSGEYREQITKGARLENRSTLFADSFASHLLTYGGEYYRQEQHPGGATTGFPQAKIDFSSGWLQDEITLRDLPITLLGGTRYDSYRGSSDGYKDVDADKWSSRAGMTINPTNWLMLFGSYAQAFRAPTMGEMYNDSKHFSIGRFYTNYWVPNPNLRPETNETQEYGFGLRFDDLMLSNDALEFKASYFDTKAKDYISTTVDFAAATTMSYNVPNAKIWGWDVMTKYTTDLFSLDVAYNRTRGKDTDTGEYISSINPDTVTSTLNIPIAHSGFSVGWVGTFADRSTHISSSYSKQPGYGVNDFYVSYQGQQALKGMTTTLVLGNAFDKEYWSPQGIPQDGRNGKIFVSYQW

SEQ ID NO: 12775 - protein, 859 aa, Escherichia coli; identical to SEQ ID NO: 5113

SEQ ID NO: 12776 - protein, 54 aa, Escherichia coli
MIKYDIARFGMPGSSVGVNVNNLFDREYVSSCYRDYACYWGAERQVVATATFRF

SEQ ID NO: 12777 - protein, 161 aa, Escherichia coli; identical to SEQ ID NO: 2582

SEQ ID NO: 12778 - protein, 207 aa, Escherichia coli; identical to SEQ ID NO: 2211

SEQ ID NO: 12779 - protein, 631 aa, Escherichia coli; identical to SEQ ID NO: 3058

SEQ ID NO: 12780 - protein, 241 aa, Escherichia coli; identical to SEQ ID NO: 8468

SEQ ID NO: 12781 - protein, 851 aa, Escherichia coli
MPSFIGGLVVFVSAAFNAQAETWFDPAFFKDDPSMVADLSRFEKGQKITPGVYRVDIVLNQTIVDTRNVNFVEITPEKGIAACLTTESLDAMGVNTDAFPAFKQLDKQACVPLAEIIPDASVTFNVNKLRLEISVPQIAIKSNARGYVPPERWDEGINALLLGYSFSGANSIHSSADSDSGDSYFLNLNSGVNLGPWRLRNNSTWSRSSGQTAEWKNLSSYLQRAVIPLKGELTVGDDYTAGDFFDSVSFRGVQLASDDNMLPDSLKGFAPVVRGIAKSNAQITIKQNGYTIYQTYVSPGAFEISDLYSTSSSGDLLVEIKEADGSVNSYSVPFSSVPLLQRQGRIKYAVTLAKYRTNSNEQQESKFAQATLQWGGPWGTTWYGGGQYAEYYRAAMFGLGFNLGDFGAISFDATQAKSTLADQSEHKGQSYRFLYAKTLNQLGTNFQLMGYRYSTSGFYTLSDTMYKHMDGYEFNDGDDEDTPMWSRYYNLFYTKRGKLQVNISQQLGEYGSFYLSGSQQTYWHTDQQDRLLQFGYNTQIKDLSLGGSWNYSKSRGQPDADQVFALNFSLPLNLLLPRSNDSYTRKKNYAWMTSNTSIDNEGHITQNLGLTETLLDDGNLSYSVQQGYNSEGKTANGSASMDYKGAFADARVGYNYSDNGSQQQLNYALSGSLVAHSQGITLGQSLGETNVLIAAPGAENTRVANSTGLKTDWRGYTVVPYATSYRENRIALDAASLKRNVDLENAVVNVVPTKGALVLAEFNAHAGARVLMKTSKQGIPLRFGAIATLDGIQTNSGIIDDDGSLYMSGLPAQGAITVRWGEAPDQICHISYQLTEQQINSAITRMDAICR

SEQ ID NO: 12782 - protein, 193 aa, Escherichia coli; identical to SEQ ID NO: 2246

SEQ ID NO: 12783 - protein, 200 aa, Escherichia coli; identical to SEQ ID NO: 5121

SEQ ID NO: 12784 - protein, 237 aa, Escherichia coli; identical to SEQ ID NO: 3793

SEQ ID NO: 12785 - protein, 700 aa, Escherichia coli; identical to SEQ ID NO: 3128

SEQ ID NO: 12786 - protein, 274 aa, Escherichia coli; identical to SEQ ID NO: 2301

SEQ ID NO: 12787 - protein, 603 aa, Escherichia coli; identical to SEQ ID NO: 5910

SEQ ID NO: 12788 - protein, 882 aa, Escherichia coli; identical to SEQ ID NO: 9664

SEQ ID NO: 12789 - protein, 851 aa, Escherichia coli; identical to SEQ ID NO: 5907

SEQ ID NO: 12790 - protein, 397 aa, Escherichia coli
MFTTAEIIYRKTVIALVCHLNCSRQETVTMNKTITALAIMMASFAANASVLPETPVPFKSGTGAIDNDTVYIGLGSAGTAWYKLDTQAKDKKWTALAAFPGGPRDQATSAFIDGNLYVFGGIGKNSKGLTQVFNDVHKYNPKTNSWVKLMSHAPMGMAGHVTFVHNGKAYVTGGVNQNIFNGYFEDLNEAGKDSATIDKINAHYFDKKAEDYFFNKFLLSFDPSTQQWSYAGESPWYGTAGAALVNKGDKTWLINGEAKPGLRTDAVFELDFTGNNLKWNKLAPVSSPDGVAGGFAGISNDSLIFAGGAGFKGSRENYQNGKNYAHEGLKKSYSTDIHLWHNGKWDKSGELSQGRAYGVSLPWNNSLLIIGGETAGGKAVTDSVLISVKDNKVTVQN

SEQ ID NO: 12791 - protein, 878 aa, Escherichia coli
MSYLNLRLYQRNTQCLHIRKHRLAGFFVRLFVACAFAAQTPLSSAELYFNPRFLADDPQAVADLSRFENGQELPPGTYRVDIYLNNGYMATRDVTFNTGDSEQGIVPCLTRAQLASMGLNTASVSGMNLLADDACVPLTSMIHDATAHLDVGQQRLNLTIPQAFMSNRARGYIPPELWDPGINAGLLNYNFSGNSVQNRIGGNNHYAYLNLQSGLNIGAWRLRDNTSWSYNSSDRSSGSKNKWQHINTWLERDIIPLRSRLTLGDGYTQGDIFDGINFRGAQLASDDNMLPDSQRGFAPVIHGIARGTAQVTIKQNGYDIYNSTVPPGPFTINDIYAAGNSGDLQVTIKEADGSTQIFTVPYSSVPLLQREGHTRYSITAGEYRSGNAQQEKPRFFQSTLLHGLPAGWTIYGGTQLADRYRAFNFGIGKNMGALGALSVDMTQANSTLPDDSQHDGQSVRFLYNKSLNESGTNIQLVGYRYSTSGYFNFADTTYSRMNGYNIETQDGVIQVKPKFTDYYNLAYNKRGKLQLTVTQQLGRTSTLYLSGSHQTYWGTSNVDEQFQAGLNTAFEDINWTLSYSLTKNAWQKGRDQMLALNVNIPFSHWLRSDSKSQWRHASASYSMSHDLNGRMTNLAGVYGTLLEDNNLSYSVQTGYAGGGDGNSGSTGYATLNYRGGYGNANIGYSHSDDIKQLYYGVSGGVLAHANGVTLGQPLNDTVVLVKAPGAKDAKVENQTGVRTDWRGYAVLPYATEYRENRVALDTNTLADNVDLDNAVANVVPTRGAIVRAEFKARVGIKLLMTLTHNNKPLPFGAMVTSESSQSSGIVADNGQVYLSGMPLAGKVQVKWGEEENAHCVANYQLPPERQQQLLTQLSAECR

SEQ ID NO: 12792 - protein, 856 aa, Escherichia coli; identical to SEQ ID NO: 5908

SEQ ID NO: 12793 - protein, 161 aa, Escherichia coli; identical to SEQ ID NO: 2582

SEQ ID NO: 12794 - protein, 869 aa, Escherichia coli; identical to SEQ ID NO: 7594

SEQ ID NO: 12795 - protein, 819 aa, Escherichia coli; identical to SEQ ID NO: 3875

SEQ ID NO: 12796 - protein, 266 aa, Escherichia coli; identical to SEQ ID NO: 1894

SEQ ID NO: 12797 - protein, 161 aa, Escherichia coli; identical to SEQ ID NO: 2582

SEQ ID NO: 12798 - protein, 229 aa, Escherichia coli
MANGNASIKGYNCNVSQGLVIIMPLPDFRFIRLLPLATLVLTACSITTPKGPGKSPDSPQWRQHQQDVRNLNQYQTRGAFAYISDQQKVYARFFWQQTGQDRYRLLLTNPLGSTELELNAQPGNVQLVDNKGQRYTSDDAEEMIGKLTGMPIPLNSLRQWILGLPGDATDYKLDDQYRLSEITYSQNGKNWKVVYGGYDTKTQPAMPANMELTDGGQRIKLKMDNWIVK

SEQ ID NO: 12799 - protein, 866 aa, Escherichia coli; identical to SEQ ID NO: 7592

SEQ ID NO: 12800 - protein, 207 aa, Escherichia coli; identical to SEQ ID NO: 2211

SEQ ID NO: 12801 - protein, 836 aa, Escherichia coli; identical to SEQ ID NO: 10569

SEQ ID NO: 12802 - protein, 771 aa, Escherichia coli; identical to SEQ ID NO: 5903

SEQ ID NO: 12803 - protein, 883 aa, Escherichia coli; identical to SEQ ID NO: 5904

SEQ ID NO: 12804 - protein, 825 aa, Escherichia coli; identical to SEQ ID NO: 10588

SEQ ID NO: 12805 - protein, 831 aa, Escherichia coli; identical to SEQ ID NO: 12096

SEQ ID NO: 12806 - protein, 883 aa, Escherichia coli; identical to SEQ ID NO: 9639

SEQ ID NO: 12807 - protein, 880 aa, Escherichia coli; identical to SEQ ID NO: 7595

SEQ ID NO: 12808 - protein, 878 aa, Escherichia coli; identical to SEQ ID NO: 12145

SEQ ID NO: 12809 - protein, 232 aa, Escherichia coli; identical to SEQ ID NO: 2087

SEQ ID NO: 12810 - protein, 606 aa, Escherichia coli
MYRTHRQHSLLSSGGVPSFIGGLVVFVSAAFNAQAETWFDPAFFKDDPSMVADLSRFEKGQKITPGVYRVDIVLNQTIVDTRNVNFVEITPEKGIAACLTTESLDAMGVNTDAFPAFKQLDKQACVPLAEIIPDASVTFNVNKLRLEISVPQIAIKSNARGYVPPERWDEGINALLLGYSFSGANSIHSSADSDSGDSYFLNLNSGVNLGPWRLRNNSTWSRSSGQTAEWKNLSSYLQRAVIPLKGELTVGDDYTAGDFFDSVSFRGVQLASDDNMLPDSLKGFAPVVRGIAKSNAQITIKQNGYTIYQTYVSPGAFEISDLYSTSSSGDLLVEIKEADGSVNSYSVPFSSVPLLQRQGRIKYAVTLAKYRTNSNEQQESKFAQATLQWGGPWGTTWYGGGQYAEYYRAAMFGLGFNLGDFGAISFDATQAKSTLADQSEHKGQSYRFLYAKTLNQLGTNFQLMGYRYSTSGFYTLSDTMYKHMDGYEFNDGDDEDTPMWSRYYNLFYTKRGKLQVNISQQLGEYGSFYLSGSQQTYWHTDQQDRLLQFGYNTQIKDLSLGVSWNYSKSRGQPDADQVFALNFSLPLNLLLPRSNDSYTRKKITPG

SEQ ID NO: 12811 - protein, 89 aa, Escherichia coli; identical to SEQ ID NO: 2810

SEQ ID NO: 12812 - protein, 669 aa, Escherichia coli; identical to SEQ ID NO: 3677

SEQ ID NO: 12813 - protein, 998 aa, Escherichia coli; identical to SEQ ID NO: 6557

SEQ ID NO: 12814 - protein, 191 aa, Escherichia coli; identical to SEQ ID NO: 2727

SEQ ID NO: 12815 - protein, 729 aa, Escherichia coli; identical to SEQ ID NO: 3778

SEQ ID NO: 12816 - protein, 213 aa, Escherichia coli; identical to SEQ ID NO: 2232

SEQ ID NO: 12817 - protein, 407 aa, Escherichia coli
MTERELSIIRALGEEFSTVLADLQRTFEEKMAAQAQAFEEKLASLSAVLQKHVTVDEVHPVLQAMVDDAVRPYPVPRDGRDYDPDVLQQAVNDAVANIPLPADGKSITPDDVRPMLEQMVKEAVSHIPAPRDGRDYDPEVLKQAVNDAVANIPVPADGKSLTPDDVRPMLEQMVKEAVSHIPVPRDGRDYDPEVLQKAVNDAVANIPQPADGKSLTPDDVRPMLEQMVKEAVSHIPVPRDGRDYDPDVLQKAVLDAVSALPAPQDGRDATALEIIPAIDDQKSFPRGTYATHLGGLWRAYEKTHGMRGWECLVDGVADIDVSMTGERSFTVVVRQSSGQRTEKTFSLPVMLYRGVFRAGETYHPGDTVTWGGSLWHCNSMTGDKPGEAHSSGWTLAAKRGRGAGGGK

SEQ ID NO: 12818 - protein, 207 aa, Escherichia coli; identical to SEQ ID NO: 2211

SEQ ID NO: 12819 - protein, 432 aa, Escherichia coli; identical to SEQ ID NO: 2026

SEQ ID NO: 12820 - protein, 700 aa, Escherichia coli; identical to SEQ ID NO: 12561

SEQ ID NO: 12821 - protein, 236 aa, Escherichia coli; identical to SEQ ID NO: 3286

SEQ ID NO: 12822 - protein, 231 aa, Escherichia coli; identical to SEQ ID NO: 3055

SEQ ID NO: 12823 - protein, 258 aa, Escherichia coli
MRKITTFNSIEVRGVPECIKYITSLSESLDKEAQSKAKNKDVVKVFKLNYASATDITYKYRDQNVVVPGVVSILKTMASNGSLPSTGKGAVERSGNLFDNSVTISADPRLNAVVVKDREITMDIYQQLISELDIEQRQIEISVSIIDVDANDLQQLGVNWSGTLNAGQGTIAFNSSTAQANISSSVISNASNFMIRVNALQQNSKAKILSQPSIITLNNMQAILDKNVTFYTKVSGEKGGVSGKYYKRNIAESDTTYT

SEQ ID NO: 12824 - protein, 125 aa, Escherichia coli; identical to SEQ ID NO: 3090

SEQ ID NO: 12825 - protein, 784 aa, Escherichia coli; identical to SEQ ID NO: 3822

SEQ ID NO: 12826 - protein, 170 aa, Escherichia coli [sequence omitted]

SEQ ID NO: 12827 - protein, 843 aa, Escherichia coli; identical to SEQ ID NO: 3163

SEQ ID NO: 12828 - protein, 866 aa, Escherichia coli; identical to SEQ ID NO: 12380

SEQ ID NO: 12829 - protein, 230 aa, Escherichia coli; identical to SEQ ID NO: 3348

SEQ ID NO: 12830 - protein, 221 aa, Escherichia coli; identical to SEQ ID NO: 3743

SEQ ID NO: 12831 - protein, 118 aa, Escherichia coli [sequence omitted]

SEQ ID NO: 12832 - protein, 208 aa, Escherichia coli; identical to SEQ ID NO: 1949

SEQ ID NO: 12833 - protein, 614 aa, Escherichia coli; identical to SEQ ID NO: 3736

SEQ ID NO: 12834 - protein, 230 aa, Escherichia coli; identical to SEQ ID NO: 3723

SEQ ID NO: 12835 - protein, 746 aa, Escherichia coli; identical to SEQ ID NO: 3031

SEQ ID NO: 12836 - protein, 446 aa, Escherichia coli; identical to SEQ ID NO: 2176

SEQ ID NO: 12837 - protein, 243 aa, Escherichia coli; identical to SEQ ID NO: 3483

SEQ ID NO: 12838 - protein, 816 aa, Escherichia coli; identical to SEQ ID NO: 2817

SEQ ID NO: 12839 - protein, 224 aa, Escherichia coli; identical to SEQ ID NO: 3115

SEQ ID NO: 12840 - protein, 650 aa, Escherichia coli; identical to SEQ ID NO: 8603

SEQ ID NO: 12841 - protein, 200 aa, Escherichia coli; identical to SEQ ID NO: 1784

SEQ ID NO: 12842 - protein, 216 aa, Escherichia coli; identical to SEQ ID NO: 7788

SEQ ID NO: 12843 - protein, 826 aa, Escherichia coli
MLRMTPLASAIVALLLGIEAYAAEETFDTHFMIGGMKDQQVANIRLDDNQPLPGQYDIDIYVNKQWRGKYEIIVKDNPQETCLSIEVIKRLGINSDNFASGKQCLTFEQLVQGGSYTWDIGVFRLDFSVPQAWVEELESGYVPPENWERGINAFYTSYYVSQYYSDYKASGNSKSTYVRFNSGLNLLGWQLHSDASFSKTNNNPGVWKSNTLYLERGFAQLLGTLRVGDMYTSSDIFDSVRFSGVRLFRDMQMLPNSKQNFTPRVQGIAQSNALVTIEQNGFVVYQKEVPPGPFAITDLQLAGGGADLDVSVKEADGSVTTYLVPYAAVPNMLQPGVSKYDFAAGRSHIEGASKQSDFVQAGYQYGFNNLLTLYGGSMVANNYYAFTLGTGWNTRFGAISVDATKSHSKQDNGDVFDGQSYQIAYNKFVSQTSTRFGLAAWRYSSRDYRTFNDHVWANNKDNYRRDENDVYDIADYYQNDFGRKNSFSANMSQSLPEGWGSVSLSTLWRDYWGRSGSSKDYQLSYSNNWRRISYILAASQAYDENHHEEKRFNIFISIPFDWGDDVTTPRRQIYMSNSTTFDDQGFASNNTGLSGTVGSRDQFNYGVNLSYQNQGNETTAGANLTWNAPVATVNGSYSQSSTYRQAGASVSGGIVAWSGGVNLANRLSETFAVMNAPGIKDAYVNGQKYRTTNRNGVVVYDGMTPYRENHLMLDVSQSDSEAELRGNRKIAAPYRGAVVLVNFDTDQRKPWFIKALRADGQPLMFGYEVNDIHGHNIGVVGQGSQLFIRTNEVPPSVNVAIDKQQGLSCTITFGKEIDESRNYICQ

SEQ ID NO: 12844 - protein, 825 aa, Escherichia coli; identical to SEQ ID NO: 9695

SEQ ID NO: 12845 - protein, 344 aa, Escherichia coli
MAVKISGVLKDGTGKPVENCTIQLKARRTSSTVVVNTVASENPDEAGRYSMDVEYGQYSVILLVEGFPPSHAGTITVYEDSRPGTLNDFLGAMSEDDVRPEALRRFELMVEEAARHAGEAKKNAGEAETSARNAGISASQAEENAANADTSAGDASESARQAAESAAAAKQSEEASSSSASAAAQKASESSQSAAEAELSRKTAESAAGNAARDATTATEKARESAESAQSAEQSRIAAEEAVNRIPTVVGPPGPKGEPGPAGPQGPKGDKGERGDTGPVGATGERGPAGDAGPAVPQGPKGDRGERGETGLTGNAGPQGPKGDTGAAGPAGPQGPKGETGAAG

SEQ ID NO: 12846 - protein, 162 aa, Escherichia coli; identical to SEQ ID NO: 1965

SEQ ID NO: 12847 - protein, 826 aa, Escherichia coli; identical to SEQ ID NO: 3772

SEQ ID NO: 12848 - protein, 861 aa, Escherichia coli; identical to SEQ ID NO: 9671

SEQ ID NO: 12849 - protein, 219 aa, Escherichia coli; identical to SEQ ID NO: 3328

SEQ ID NO: 12850 - protein, 361 aa, Escherichia coli; identical to SEQ ID NO: 3061

SEQ ID NO: 12851 - protein, 386 aa, Escherichia coli; identical to SEQ ID NO: 3094

SEQ ID NO: 12852 - protein, 266 aa, Escherichia coli; identical to SEQ ID NO: 1894

SEQ ID NO: 12853 - protein, 203 aa, Escherichia coli; identical to SEQ ID NO: 2009

SEQ ID NO: 12854 - protein, 831 aa, Escherichia coli; identical to SEQ ID NO: 5915

SEQ ID NO: 12855 - protein, 207 aa, Escherichia coli; identical to SEQ ID NO: 5917

SEQ ID NO: 12856 - protein, 819 aa, Escherichia coli; identical to SEQ ID NO: 5920

SEQ ID NO: 12857 - protein, 879 aa, Escherichia coli
GADMFFGDGGQLLSDKSLTGSAGGGNNRMKFNILPLAFFIGIIVSPARAELYFNPRFLSDDPDAVADLSAFTQGQELPPGVYRVDIYLNDTYISTRDVQFQMSQDGKQLAPCLSPEHMSAMGVNRYAVPGMERLPADTCTSLNSMIQGATFRFDVGQQRLYLTVPQLYMSNQARGYIAPEYWDNGITAALLNYDFSGNRVRDSYGGTSDYAYLNLKTGLNIGSWRLRDNTSWSYSAGKGYSQNNWQHINTWLERDIVSLRSRLTMGDSYTRGDIFDGVNFRGIQLASDDNMVPDSQRGYAPTIHGISRGTSRISIRQNGYEIYQSTLPPGPFEINDIYPAGSGGDLQVTLQEADGSVQRFNVPWSSVPVLQREGHLKYALSAGEFRSGGHQQDNPRFAEGTLKYGLPAGWTVYGGAWIAERYRAFNLGVGKNMGWLGAVSLDATRANARLPDESRHDGQSYRFLYNKSLTETGTNIQLIGYRYSTRGYFSFADTAWKKMSGYSVLTQDGVIQIQPKYTDYYNLAYNKRGRVQVSISQQTGESSTLYLSGSHQSYWGTDRTDRQLNAGFNSSVNDISWSLNYSLSRNAWQHETDRILSFDVSIPFSHWMRSDSTSAWRNASARYSQTLEAHGQAASTAGLYGTLLGDNNLGYSIQSGYTRGGYEGSSKTGYASLNYRGGYGNASAGYSHSGGYRQLYYGLSGGILAHANGLTLSQPLGDTLILVRAPGASDTRIENQTGVSTDWRGYAVLPYATDYRENRVALDTNTLADNVDIENTVVSVVPTHGAVVRADYKTRVGVKVLMTLMRNGKAVPFGSVVTARNGGSSIAGENGQVYLSGMPLSGQVSVKWGSQTTDQCTADYKLPKESAGQILSHVTASCR

SEQ ID NO: 12858 - protein, 678 aa, Escherichia coli; identical to SEQ ID NO: 3014

SEQ ID NO: 12859 - protein, 478 aa, Escherichia coli; identical to SEQ ID NO: 2404

SEQ ID NO: 12860 - protein, 266 aa, Escherichia coli; identical to SEQ ID NO: 1894

SEQ ID NO: 12861 - protein, 518 aa, Escherichia coli; identical to SEQ ID NO: 2349

SEQ ID NO: 12862 - protein, 696 aa, Escherichia coli; identical to SEQ ID NO: 6611

SEQ ID NO: 12863 - protein, 865 aa, Escherichia coli
MPRFARLTIALGLATAVFPVDAEYYFNPRFLSNDLAESVDLSAFTKGREAPPGTYRVDIYLNDEFMTSRDITFIADDNNAELIPCLSTDLLVSLGIKKSALLDNKEHSAEKHVPDNSACTPLQDRLADASTEFDVGQQHLSLSVPQIYVGRMARGYVSPDLWEEGINAGLLNYSFNGNSINNRSNHNAGKSNYAYLNLQSGINIGSWRLRDNSTWSYYSGSSNSSDSNKWQHINTSAERDIIPLRSRLTVGDSYTDGDIFDSVNFRGLKINSTEAMLPDSQHGFAPVIHGIARGTAQVSVKQNGYDVYQTTVPPGPFTIDDINSAANGGDLQVTIKEADGSIQTLYVPYSSVPVLQRAGYTRYALAMGEYRSGNNLQSSPKFIQGSLMHGLEGNWTPYGGMQIAEDYQAFNLGIGKDLGLFGAFSFDITQANTTLADGTRHSGQSVKSVYSKSFYQTGTNIQVAGYRYSTQGFYNLSDSAYSRMSGYTVKPPTGDTNEQTQFIDYFNLFYSKRGQEQISISQQLGNYGTTFFSASRQSYWNTSRSDQQISFGLNVPFGDITTSLNYSYSNNIWQNDRDHLLAFTLNVPFSHWMRTDSQSAFRNSNASYSMSNDLKGGMTNLSGVYGTLLPDNNLNYSVQVGNTHGGNTSSGTSGYSSLNYRGAYGNTNVGYSRNGDSSQIYYGMSGGIIAHADGITFGQPLGDTMVLVKAPGADNVKIENQTGIHTDWRGYAILPFATEYRENRVALNANSLADNVELDETVVTVIPTHGAIARATFNAQIGGKVLMTLKYGNKSVPFGAIVTHGENKNGSIVAENGQVYLTGLPQSGKLQVSWGNDKNSNCIVDYKLPEVSPGTLLNQQTAICR

SEQ ID NO: 12864 - protein, 193 aa, Escherichia coli
MRYLATLLLSLAVLITAGCGWHLRDTTQVPSTMKVMILDSGDPNGPLSRAVRNQLRLNGVELLDKETTREDVPSLRLGKVSIAKDTASVFRNGQTAEYQMIMTVNATVLIPGRDIYPISAKVFRSFFDNPQMALAKDNEQDMIVKEMYDRAAEQLIRKLPSIRAADIRSDKEQTSTTTDTPATPARVSTTLGN

SEQ ID NO: 12865 - protein, 806 aa, Escherichia coli
MLCTTANAEEYYFDPIMLETTKSGMQTTDLSRFSKKYAQLPGTYQVDIWLNKKKVSQKKITFTANAEQLLQPQFTVEQLRELGIKVDEIPALAEKDDDSVINSLEQIIPGTAAEFDFNHQRLNLSIPQIALYRDARGYVSPSRWDDGIPTLFTNYSFTGSDNRYRQGNRSQRQYLNMQNGANFGPWRLRNYSTWTRNDQASSWNTISSYLQRDIKALKSQLLLGESATSGSIFSSYTFTGVQLASDDNMLPNSQRGFAPTVRGIANSSAIVTIRQNGYVIYQSNVPAGAFEINDLDPSSNSGDLEVTIEESDGTQRRFIQPYSSLPMMQRPGHLKYSATAGRYRADANSDSKEPEFAEATAIYGLNNTFTLYGGLLGSEDYYALGIGIGGTLGALGALSMDINRADTQFDNRHSFHGYQWRTQYIKDIPETNTNIAVSYYRYTNDGYFSFDEANTRNWDYNSRQKSEIQFNISQTIFDGVSLYASGSQQDYWGNNDKNRNISVGVSGQQWGIGYSLNYQYSRYTDQNNDRALSLNLSIPLERWLPRSRVSYQMTSQKDRPTQHEMRLDGSLLDDGRLSYSLEQSLDDDNNHNSSLNASYRSPYGTFSAGYSYGNDSSQYNYGVTGGVVIHPHGVTLSQYLGNAFALIDANGASGVRIQNYPGIATDPFGYAVVPYLTTYQENRLSVDTTQLPDNVDLEQTTQFVVPNRGAMVAARFNANIGYRVLVTVSDRNGKPLPFGALASNDETGQQSIVDEGGILYLSGISSKSQSWTVRWGNQADQQCQFAFSTPDSEPTTSVLQGTAQCH

SEQ ID NO: 12866 - protein, 430 aa, Escherichia coli; identical to SEQ ID NO: 2617

SEQ ID NO: 12867 - protein, 862 aa, Escherichia coli; identical to SEQ ID NO: 5913

SEQ ID NO: 12868 - protein, 838 aa, Escherichia coli; identical to SEQ ID NO: 6105

SEQ ID NO: 12869 - protein, 111 aa, Escherichia coli; identical to SEQ ID NO: 3096

SEQ ID NO: 12870 - protein, 837 aa, Escherichia coli
MEQMYKKLKLTTISELIKNIYCSLSVLIIGCASAYAVEFNKDLIEAEDRENVNLSQFETDGQLPVGKYSLNALINNKRTPIHLDLQWVLIDNQTAVCLTPEQLTLLGFTDEIIEVAQQNLIDGCYPIEKEKQITTYLDKGKMQLSISAPQAWLKYKDANWTPPELWDHGIAGAFLDYNLYASHYAPHQGDNSQNISSYGQAGVNLGAWRLRTDYQYDQSFNNGKSQANNLDFPRIYLFRPIPAINAKLTIGQYDTESSIFDSFHFSGVSLKSDENMLPPDLRGYAPQITGVAQTNAKVTVSQNNRIIYQENVPPGPFAITNLFNTLQGQLDVKVEEEDGQVTQWQVASNSIPYLTRKGQIRYTTAMGKPTSVGGDSLQQPFFWTGEFSWGWLNNVSLYGGSVLTNRDYQSLAAGVGFNLNSLGSLSFDVTRSDAQLHNQDKETGYSYRANYSKRFESTGSQLTFAGYRFSDKNFVTMNEYINDTNHYTNYQNEKESYIVTFNQYLESLRLNTYVSLARNTYWDASSNVNYSLSLSRDFDIGPLKNVSTSLTFSRINWEEDNQDQLYLNISIPWGTSRTLSYGMQRNQDNKISHTASWYDSSDRNNSWSVSASGDNDEFKDMKASLRASYQHNTENGRLYLSGTSQRDSYYSLNASWNGSFTATRHGAAFHDYSGSADSRFMIDADGAEDIPLNNKRAVTNRYGIGVIPSVSSYITTSLSVDTRNLPENVDIENSVITTTLTEGAIGYAKLDTRKGYQIMGVIRLADGSHPPLGISVKDKTSHKELGLVADGGFVYLNGIQDDSKLTLRWGDKSCFIQPPNSSNLTTGTVILPCISQN

SEQ ID NO: 12871 - protein, 363 aa, Escherichia coli; identical to SEQ ID NO: 3347

SEQ ID NO: 12872 - protein, 351 aa, Escherichia coli; identical to SEQ ID NO: 2519

SEQ ID NO: 12873 - protein, 900 aa, Escherichia coli; identical to SEQ ID NO: 9699

SEQ ID NO: 12874 - protein, 881 aa, Escherichia coli
MPDHSLFRLRILPWCIALAMSGSYSSVWAEDDIQFDSRFLELKGDTKIDLKRFSSQGYVEPGKYNLQVQLNKQPLAEEYDIYWYAGEDDASKSYACLTPELVAQFGLKEDVAKNLQWSHDAKCLKSGQLEGMEIKADLSQSALVISLPQAYLEYTYPDWDPPSRWDDGISGIVADYSINAQNRHEENGGDDSNEISGNGTVGVNLGPWRMRADWQTNYQHTRSNDDDDEFSGDETQKKWEWSRYYAWRALPSLKAKLALGEDYLRSDIFDGFNYVGGSVSTDDQMLPPNLRGYAPDISGVAHTTAKVTVSQMGRVIYETQVPAGPFRIQDLGDSVSGTLHIRIEEQNGQVQEYDISTASMPYLTRPGQVRYKIMMGRPQEWGHHVEGEFFSGAEASWGIANGWSLYGGALGDENYQSAALGVGRDLSTFGAVAFDVTHSHTKLDKDTAYGKGSLDGNSFRVSYSKDFDQLNSRVTFAGYRFSEENFMTMSEYLDASDSGMVRTGNDKEMYTATYNQNFRDAGVSVYLNYTRHTYWDREEQTNYNIMLSHYFNMGSIRNVSISMTGYRYEYDNQADKGMYISLSMPWGDNSTVSYNGNYGSGTDSSQVGYFSRVDDATHYQLNVGTSDKHTSVDGYYSHDGSLAQVDLSANYHEGQYTSAGLSLQGGATLTAHGGALHRTQNMGGTRLLIDADGVADVPVEGNGAAVYTNMFGKAVVSDVNNYYRNQAYIDLNRLPENAEATQSVVQATLTEGAIGYRKFAVISGQKAMAVLRLSDGSHPPFGAEVKNDNEQTVGLVDDDGNVYLAGVKPGEHMSVFWSGVAHCDINLPDPLPADLFNGLLLPCQHKGNVAPITSPAVKPAIQEQTQRVTPTEPPTSISVNQ

SEQ ID NO: 12875 - protein, 228 aa, Escherichia coli; identical to SEQ ID NO: 3034

SEQ ID NO: 12876 - protein, 219 aa, Escherichia coli; identical to SEQ ID NO: 3328

SEQ ID NO: 12877 - protein, 237 aa, Escherichia coli; identical to SEQ ID NO: 4356

SEQ ID NO: 12878 - protein, 539 aa, Escherichia coli; identical to SEQ ID NO: 3050

SEQ ID NO: 12879 - protein, 61 aa, Escherichia coli; identical to SEQ ID NO: 9050

SEQ ID NO: 12880 - protein, 747 aa, Escherichia coli; identical to SEQ ID NO: 2072

SEQ ID NO: 12881 - protein, 840 aa, Escherichia coli; identical to SEQ ID NO: 9665

SEQ ID NO: 12882 - protein, 751 aa, Escherichia coli
MDLWRNDEFIGSQDIVFESTTENTGDKSGGLMPCFNQVLLERIGLNSSAFPELAQQQNNKCINLLKAVPDATINFDFAAMRLNITIPQIALLSSAHGYIPPEEWDEGIPALLLNYNFTGNRGNGNDSYFFSEFSGINIGPWRLRNNGSWNYFRGNGYHSEQWNNIGTWVQRAIIPLKSELVMGDGNTGSDIFDGVGFRGVRLYSSDNMYPDSQQGFAPTVRGIARTAAQLTIRQNGFIIYQSYVSPGAFEITDLHPTSSNGDLDVTIDERDGNQQNYTIPYSTVPILQREGRFKFDLTAGDFRSGNSQQSSPFFFQGTALGGLPQEFTAYGGTQLSANYTAFLLGLGRNLGNWGAVSLDVTHARSQLADDSRHEGDSIRFLYAKSMNTFGTNFQLMGYRYSTQGFYTLDDVAYRRMEGYEYDYDYDGEHRDEPIIVNYHNLRFSRKDRLQLNISQSLNDFGSLYISGTHQKYWNTSDSDTWYQVGYTSSWVGISYSLSFSWNESVGIPDNERIVGLNVSVPFNVLTKRRYTRENALDRAYASFNANRNSNGQNSWLAGVGGTLLEGHNLSYHVSQGDTSNNGYTGSATANWQAAYATLGVGYNYDRDQHDVNWQLSGGVVGHENGITLSQPFGDTNVLIKAPGAGGVRIENQTGILTDWRGYAVMPYATVYRYNRIALDTNTMGNSIDVEKNISSVVPTQGALVRANFDTRIGVRALITVTQGGKPVPFGSLVRENSIGITSMWVMTGKFI

SEQ ID NO: 12883 - protein, 266 aa, Escherichia coli; identical to SEQ ID NO: 1893

SEQ ID NO: 12884 - protein, 368 aa, Escherichia coli; identical to SEQ ID NO: 5919

SEQ ID NO: 12885 - protein, 359 aa, Escherichia coli; identical to SEQ ID NO: 2329

SEQ ID NO: 12886 - protein, 626 aa, Escherichia coli
MFWRDITLSVWRKKTTGLKTKKRLLPLVLAAALCSSPVWAEEATFTANFKDTDLKSFIETVGANLNKTIIMGPGVQGKVSIRTMTPLNERQYYQLFLNLLEAQGYAVVPMENDVLKVVKSSAAKVEPLPLVGEGSDNYAGDEMVTKVVPVRNVSVRELAPILRQMIDSAGSGNVVNYDPSNVIMLTGRASVVERLTEVIQRVDHAGNRTEEVIPLDNASASEIARVLESLTKNSGENQPATLKSQIVADERTNSVIVSGDPATRDKMRRLIRRLDSEMERSGNSQVFYLKYSKAEDLVDVLKQVSGTLTAAKEEAEGTVGSGREIVSIAASKHSNALIVTAPQDIMQSLQSVIEQLDIRRAQVHVEALIVEVAEGSNINFGVQWASKDAGLMQFANGTQIPIGTLGAAISQAKPQKGSTVISENGATTINPDTNGDLSTLAQLLSGFSGTAVGVVKGDWMALVQAVKNDSSSNVLSTPSITTLDNQEAFFMVGQDVPVLTGSTVGSNNSNPFNTVERKKVGIMLKVTPQINEGNAVQMVIEQEVSKVEGQTSLDVVFGERKLKTTVLANDGELIVLGGLMDDQAGESVAKVPLLGDIPLIGNLFKSTADKKEKRNLMVFIRPTHSA

SEQ ID NO: 12887 - protein, 368 aa, Escherichia coli; identical to SEQ ID NO: 2368

SEQ ID NO: 12888 - protein, 128 aa, Escherichia coli; identical to SEQ ID NO: 7495

SEQ ID NO: 12889 - protein, 243 aa, Escherichia coli; identical to SEQ ID NO: 2910

SEQ ID NO: 12890 - protein, 869 aa, Escherichia coli; identical to SEQ ID NO: 3738

SEQ ID NO: 12891 - protein, 387 aa, Escherichia coli; identical to SEQ ID NO: 3908

SEQ ID NO: 12892 - protein, 794 aa, Escherichia coli; identical to SEQ ID NO: 5918

SEQ ID NO: 12893 - protein, 866 aa, Escherichia coli
MTIKPTKNYHNHLTRIATFCALLYCNSAFCAELVEYDHTFLMGQNASNIDLSRYSEGNPAIPGMYDVSVYVNDQPIINQSITFIEIEGKKNAQACITLKNLLQFHINSPDINNEKAVLLARDETLGNCLNLTEIIPQASVRYDVNEQRLDIDVPQAWVMKNYQNYVDPSLWENGINAAMLSYNLNGYHSETPGRRNDSIYAAFNGGMNLGAWRLRASGNYNWMTDSGSNYDFKNRYIQRDIASLRSQLILGESYTTGETFDSVSIRGIRLYSDSRMLPPTLASFAPIIHGVANTNAKVTITQGGYKIYETTVPPGAFVIDDLSPSGYGSDLIVTVEESDGSKRTFSQPFSSVVQMLRPGVGRWDISGGQVLKDDIQDEPNLFQASYYYGLNNYLTGYTGIQITDNNYTAGLLGLGLNTSVGAFSFDVTHSNVRIPDDKTYQGQSYRVSWNKLFEETSTSLNIAAYRYSTQNYLGLNDALTLIDEVKHPEQDLEPKSMRNYSRMKNQVTVSINQPLKFEKKDYGSFYLSGSWSDYWASGQNRSNYSIGYSNSASWGSYSVSAQRSWNEDGDTDDSVYLSFTIPIEKLLGTEQRTSGFQSIDTQMSSDFKGNNQLNVSSSGYSDNARLSYSVNTGYTMNKASKDLSYVGGYASYESPWGTLAGSVSANSDNSRQVSLSTDGGFVLHSGGLTFSNDSFSDSDTLAVVQAPGAQGARINYGNSTIDRWGYGVTSALSPYHENRIALDINDLENDVELKSTSAVAVPRQGSVVFADFETVQGQSAIMNITRSDGKNIPFAADIYDEQGNVIGNVGQGGQAFVRGIEQQGNISIKWLEESKPVSCLAHYQQSSEAEKIAQSIILNGIRCQIQ

SEQ ID NO: 12894 - protein, 161 aa, Escherichia coli; identical to SEQ ID NO: 2582

SEQ ID NO: 12895 - protein, 331 aa, Escherichia coli; identical to SEQ ID NO: 2700

SEQ ID NO: 12896 - protein, 836 aa, Escherichia coli; identical to SEQ ID NO: 10570

SEQ ID NO: 12897 - protein, 368 aa, Escherichia coli; identical to SEQ ID NO: 2371

SEQ ID NO: 12898 - protein, 836 aa, Escherichia coli; identical to SEQ ID NO: 7852

SEQ ID NO: 12899 - protein, 203 aa, Escherichia coli; identical to SEQ ID NO: 2201

SEQ ID NO: 12900 - protein, 250 aa, Escherichia coli; identical to SEQ ID NO: 3427

SEQ ID NO: 12901 - protein, 274 aa, Escherichia coli; identical to SEQ ID NO: 3721

SEQ ID NO: 12902 - protein, 760 aa, Escherichia coli; identical to SEQ ID NO: 3831

SEQ ID NO: 12903 - protein, 224 aa, Escherichia coli; identical to SEQ ID NO: 3165

SEQ ID NO: 12904 - protein, 878 aa, Escherichia coli
MSYLNLRLYQRNTQCLHIRKHRLAGFFVRLFVACAFAAQTPLSSAELYFNPRFLADDPQAVADLSRFENGQELPPGTYRVDIYLNNGYMATRDVTFNTGDSEQGIVPCLTRAQLASMGLNTASVSGMNLLADDACVPLTSMIHDATAHLDVGQQRLNLTIPQAFMSNRARGYIPPELWDPGINAGLLNYNFSGNSVQNRIGGNSHYAYLNLQSGLNIGAWRLRDNTTWSYNRSDRSSGSKNKWQHINTWLERDIIPLRSRLTLGDGYTQGDIFDGINFRGAQLASDDNMLPDSQRGFAPVIHGIARGTAQVTIKQNGYDIYNSTVPPGPFTINDIYAAGNSGDLQVTIKEADGSTQIFTVPYSSVPLLQREGHTRYSITAGEYRSGNAQQEKPRFFQSTLLHGLPAGWTIYGGTQLADRYRAFNFGIGKNMGALGALSVDMTQANSTLPDDSQHDGQSVRFLYNKSLNESGTNIQLVGYRYSTSGYFNFADTTYSRMNGYNIETQDGVIQVKPKFTDYYNLAYNKRGKLQLTVTQQLGRTSTLYLSGSHQTYWGTSNVDEQFQAGLNTAFEDINWTLSYSLTKNAWQKGRDQMLALNVNIPFSHWLRSDSKSQWRHASASYSMSHDLNGRMTNLAGVYGTLLEDNNLSYSVQTGYAGGGDGNSGSTGYATLNYRGGYGNANIGYSHSDDIKQLYYGVSGGVLAHANGVTLGQPLNETVVLVKAPGAKDAKVENQTGVRTDWRGYAVLPYATEYRENRVALDTNTLADNVDLDNAVANVVPTRGAIVRAEFKARVGIKLLMTLTHNNKPLPFGAMVTSESSQSSGIVADNGQVYLSGMPLAGKVQVKWGEEENAHCVANYQLPPESQQQLLTQLSAECR

SEQ ID NO: 12905 - protein, 161 aa, Escherichia coli; identical to SEQ ID NO: 2582

SEQ ID NO: 12906 - protein, 267 aa, Escherichia coli; identical to SEQ ID NO: 5971

SEQ ID NO: 12907 - protein, 111 aa, Escherichia coli; identical to SEQ ID NO: 3370

SEQ ID NO: 12908 - protein, 628 aa, Escherichia coli
MKPAASFFYCGCFTMIKKASLLTACSVTAFSAWAQDTSPDTLVVTANRFEQPRSTVLAPTTVVTRQDIDRWQSTSVNDVLRRLPGVDITQNGGSGQLSSIFIRGTNASHVLVLIDGVRLNLAGVSGSADLSQFPIALVQRVEYIRGPRSAVYGSDAIGGVVNIITTRDEPGTEISAGWGSNSYQNYDVSTQQQLGDKTRVTLLGDYAHTHGYDVVAYGNTGTQAQTDNDGFLSKTLYGALEHNFTDAWSGFVRGYGYDNRTNYDAYYSPGSPLLDTRKLYSQSWDAGLRYNGELIKSQLITSYSHSKDYNYDPHFGRYDSSATLDEMKQYTVQWANNVIVGHGSIGAGVDWQKQTTTPGTGYVENGYDQRNTGIYLTGLQQVGDFTFEGAARSDDNSQFGRHGTWQTSAGWEFIEGYRFIASYGTSYKAPNLGQLYGFYGNPNLDPEKSKQWEGAFEGLTAGVNWRISGYRNDVSDLIDYDDHTLKYYNEGKARIKGVEATANFDTGPLTHTVSYDYVDARNAITDTPLLRRAKQQVKYQLDWQLYDFDWGITYQYLGTRYDKDYSSYPYQTVKMGGVSLWDLAVAYPVTSHLTVRGKIANLFDKDYETVYGYQTAGREYTLSGSYTF

SEQ ID NO: 12909 - protein, 446 aa, Escherichia coli; identical to SEQ ID NO: 2176

SEQ ID NO: 12910 - protein, 478 aa, Escherichia coli; identical to SEQ ID NO: 2404

SEQ ID NO: 12911 - protein, 245 aa, Escherichia coli; identical to SEQ ID NO: 3410

SEQ ID NO: 12912 - protein, 681 aa, Escherichia coli; identical to SEQ ID NO: 12265

SEQ ID NO: 12913 - protein, 242 aa, Escherichia coli; identical to SEQ ID NO: 12215

SEQ ID NO: 12914 - protein, 360 aa, Escherichia coli; identical to SEQ ID NO: 3354

SEQ ID NO: 12915 - protein, 204 aa, Escherichia coli; identical to SEQ ID NO: 2957

SEQ ID NO: 12916 - protein, 746 aa, Escherichia coli; identical to SEQ ID NO: 4597

SEQ ID NO: 12917 - protein, 122 aa, Escherichia coli; identical to SEQ ID NO: 2915

SEQ ID NO: 12918 - protein, 405 aa, Escherichia coli
MKIIITREYIMKRKVLAMLVPALLVAGAANAAEVYNKDGNKLDLYGKVVGLHYFSDDSGSDGDMSYARIGFKGETQIADQFTGYGQWEFNIGANGPESDKGNTATRLAFAGLGFGQNGTFDYGRNYGVVYDVEAWTDMLPEFGGDTYAGADNFMNGRANGVATYRNNGFFGQVDGLNFALQYQGNNEDDGLFGQEGSGNGNGRKLAKENGDGFGMSTSYDFDFGLSLGAAYSNSDRTDNQVHKGLHNTRYGDRFDATAGGETAEAWTVGAKYDANNVYLAAMYAETRNMTGYGDADAIANKTQNFEVVAQYQFDFGLRPSIAYLQSKGKDLGGVNSDNFDSQGNHHYTNKDLVKYVDIGMTYYFNKNMSTYVDYKINLLDNDDDFYKENGIATDDIVAVGLVYQF

SEQ ID NO: 12919 - protein, 353 aa, Escherichia coli; identical to SEQ ID NO: 4626

SEQ ID NO: 12920 - protein, 725 aa, Escherichia coli; identical to SEQ ID NO: 2870

SEQ ID NO: 12921 - protein, 690 aa, Escherichia coli
MLPYARGRKEDVSDTHFIFVVTSWRYGMFRLNPFVRVGLCLSAISCAWPVLAVDDDGETMVVTASSVKKTLKDPPASISVITQEDLQRKPVQNLKDVLKEVPGVQLTNEGDNRKGVSIRGLDSSYTLILVDGKRVNSRNAVFRHNDFDLNWIPVDSIERIEVVRGPMSSLYGSDALGGVVNIITKKIGQKWSGTVTVDTTVQEHRDRGDTYNGQFFTSGPLIDGVLGMKAYGSLAKREKDDPQNSTTTDTGETPRIEGFSSRDGNVEFAWTPNQNHDFTAGYGFDRQDRDSDSLDKNRLERQNYSVSHNGRWDYGTSELKYYGEKVENKNPGNSSPITSESNTVDGKYTLPLTAINQFLTVGGEWRHDKLSDAVNLTGGTSSKTSASQYALFVEDEWRIFEPLALTTGVRMDDHETYGEHWSPRAYLVYNATDTVTVKGGWATAFKAPSLLQLSPDWTSNSCRGACKIVGSPDLKPETSESWELGLYYMGEEGWLEGVESSVTVFRNDVKDRISISRTSDVNAAPGYQNFVGFETGANGRRIPVFSYYNVNKARIQGVETELKIPFNDEWKLSINYTYNDGRDVSNGENKPLSDLPFHTANGTLDWKPLALEDWSFYVSGHYTGQKRADSATAKTPGGYTIWNTGAAWQVTKDVKLRAGVLNLGDKDLSRDDYSYNEDGRRYFMAVDYRF

SEQ ID NO: 12922 - protein, 230 aa, Escherichia coli; identical to SEQ ID NO: 4598

SEQ ID NO: 12923 - protein, 700 aa, Escherichia coli; identical to SEQ ID NO: 5975

SEQ ID NO: 12924 - protein, 518 aa, Escherichia coli; identical to SEQ ID NO: 2349

SEQ ID NO: 12925 - protein, 828 aa, Escherichia coli; identical to SEQ ID NO: 5894

SEQ ID NO: 12926 - protein, 193 aa, Escherichia coli; identical to SEQ ID NO: 2246

SEQ ID NO: 12927 - protein, 747 aa, Escherichia coli; identical to SEQ ID NO: 2072

SEQ ID NO: 12928 - protein, 432 aa, Escherichia coli; identical to SEQ ID NO: 2026

SEQ ID NO: 12929 - protein, 733 aa, Escherichia coli; identical to SEQ ID NO: 9713

SEQ ID NO: 12930 - protein, 656 aa, Escherichia coli; identical to SEQ ID NO: 9854

SEQ ID NO: 12931 - protein, 518 aa, Escherichia coli; identical to SEQ ID NO: 2356

SEQ ID NO: 12932 - protein, 252 aa, Escherichia coli; identical to SEQ ID NO: 3400

SEQ ID NO: 12933 - protein, 362 aa, Escherichia coli; identical to SEQ ID NO: 2434

SEQ ID NO: 12934 - protein, 235 aa, Escherichia coli; identical to SEQ ID NO: 4365

SEQ ID NO: 12935 - protein, 729 aa, Escherichia coli
MLSTQFNRDNQYQAITKPSLLAGCIALALLPSAAFAAPATEETVIVEGSATAPDDGENDYSVTSTSAGTKMQMTQRDIPQSVTIVSQQRMEDQQLQTLGEVMENTQGISKSQADSDRALYYSRGFQIDNYMVDGIPTYFESRWNLGDALSDMALFERVEVVRGATGLMTGTGNPSAAINMVRKHATSREFKGDVSAEYGSWNKERYVADLQSPLTEDGKIRARIVGGYQNNDSWLDRYNSEKTFFSGIVDADLGDLTTLSAGYEYQRIDVNSPTWGGLPRWNTDGSSNSYDRARSTAPDWAYNDKEINKVFMTLKQRFADTWQATLNATHSEVEFDSKMMYVDAYVNKADGMLVGPYSNYGPGFDYVGGTGWNSGKRKVDALDLFAHGSYELFGRQHNLMFGGSYSKQNNRYFSSWANIFPDEIGSFYNFNGNFPQTDWSPQSLAQDDTTHMKSLYAATRVTLADPLHLILGARYTNWRVDTLTYSMEKNHTTPYAGLVFDINDNWSTYASYTSIFQPQNDRDSSGKYLAPITGNNYELGLKSDWMNSRLTTTLAIFRIEQDNVAQSTGTPIPGSNGETAYKAVDGTVSKGVEFELNGAITDNWQLTFGATRYIAEDNEGNAVNPNLPRTTVKMFTSYRLPVMPELTVGGGVNWQNRVYTDTVTPYGTFRAEQGSYALVDLFTRYQVTKNFSLQGNVNNLFDKTYDTNVEGSIVYGAPRNFSITGTYQF

SEQ ID NO: 12936 - protein, 213 aa, Escherichia coli; identical to SEQ ID NO: 2232

SEQ ID NO: 12937 - protein, 565 aa, Escherichia coli; identical to SEQ ID NO: 2678

SEQ ID NO: 12938 - protein, 169 aa, Escherichia coli; identical to SEQ ID NO: 3373

SEQ ID NO: 12939 - protein, 231 aa, Escherichia coli; identical to SEQ ID NO: 5923

SEQ ID NO: 12940 - protein, 551 aa, Escherichia coli; identical to SEQ ID NO: 2446

SEQ ID NO: 12941 - protein, 412 aa, Escherichia coli; identical to SEQ ID NO: 3323

SEQ ID NO: 12942 - protein, 231 aa, Escherichia coli; identical to SEQ ID NO: 2864

SEQ ID NO: 12943 - protein, 1024 aa, Escherichia coli
MPTITTAQIKSTLQSAKQSAANKLHSAGQSTKDALKKAAEQTRNAGNRLILLIPKDYKGQGSSLNDLVRTADELGIEVQYDEKNGTAITKQVFGTAEKLIGLTERGVTIFAPQLDKLLQKYQKAGNKLGGSAENIGDNLGKAGSVLSTFQNFLGTALSSMKIDELIKKQKSGSNVSSSELAKASIELINQLVDTAASINNNVNSFSQQLNKLGSVLSNTKHLNGVGNKLQNLPNLDNIGAGLDTVSGILSAISASFILSNADADTGTKAAAGVELTTKVLGNVGKGISQYIIAQRAAQGLSTSAAAAGLIASVVTLAISPLSFLSIADKFKRANKIEEYSQRFKKLGYDGDSLLAAFHKETGAIDASLTTISTVLASVSSGISAAATTSLVGAPVSALVGAVTGIISGILEASKQAMFEHVASKMADVIAEWEKKHGKNYFENGYDARHAAFLEDNFKILSQYNKEYSVERSVLITQQHWDTLIGELAGVTRNGDKTLSGKSYIDYYEEGKRLEKKPDEFQKQVFDPLKGNIDLSDSKSSTLLKFVTPLLTPGEEIRERRQSGKYEYITELLVKGVDKWTVKGVQDKGSVYDYSNLIQHASVGNNQYREIRIESHLGDGDDKVFLSAGSANIYAGKGHDVVYYDKTDTGYLTIDGTKATEAGNYTVTRVLGGDVKVLQEVVKEQEVSVGKRTEKTQYRSYEFTHINGKNLTETDNLYSVEELIGTTRADKFFGSKFTDIFHGADGDDHIEGNDGNDRLYGDKGNDTLRGGNGDDQLYGGDGNDKLIGGAGNNYLNGGDGDDELQVQGNSLAKNVLSGGKGNDKLYGSEGADLLDGGEGNDLLKGGYGNDIYRYLSGYGHHIIDDDGGKDDKLSLADIDFRDVAFRREGNDLIMYKAEGNVLSIGHKNGITFRNWFEKESGDISNHQIEQIFDKDGRVITPDSLKKALEYQQSNNKASYVYGNDALAYGSQDNLNPLINEISKIISAAGNFDVKEERAAASLLQLSGNASDFSYGRNSITLTASA

SEQ ID NO: 12944 - protein, 774 aa, Escherichia coli
MTPLRVFRKTTPLVNAIRLSLLPLAGLSFSAFAAQVNIAPGSLDKALNQYAAHSGFTLSVDASLTRGKQSNGLHGDYDVESGLQQLLDGSGLQVKPLGNNSWTLEPAPAPKEDALTVVGDWLGDARENDVFEHAGARDVIRREDFAKTGATTMREVLNRIPGVSAPENNGTGSHDLAMNFGIRGLNPRLASRSTVLMDGIPVPFAPYGQPQLSLAPVSLGNMDAIDVVRGGGAVRYGPQSVGGVVNFVTRAIPQDFGIEAGVEGQLSPTSSQNNPKETHNLMVGGTADNGFGTALLYSGTRGSDWREHSATRIDDLMLKSKYAPDEVHTFNSLLQYYDGEADMPGGLSRADYDADRWQSTRPYDRFWGRRKLASLGYQFQPDSQHKFNIQGFYTQTLRSGYLDQGKRITLSPRNYWVRGIEPRYSQIFMIGPSAHEVGVGYRYLNESTHEMRYYTATSSGQLPSGSSPYDRDTRSGTEAHAWYLDDKIDIGNWTITPGMRFEHIESYQNNAITGTHEEVSYNAPLPALNVLYHLTDSWNLYANTEGSFGTVQYSQIGKAVQSGNVEPEKARTWELGTRYDDGALTAEMGLFLINFNNQYDSNQTNDTVTARGKTRHTGLETQARYDLGTLTPTLDNVSIYASYAYVNAEIREKGDTYGNLVPFSPKHKGTLGVDYKPGNWTFNLNSDFQSSQFADNANTVKESADGSTGRIPGFMLWGARVAYDFGPQMADLNLAFGVKNIFDQDYFIRSYNDNNKGIYAGQPRTLYMQGSLKF

SEQ ID NO: 12945 - protein, 111 aa, Escherichia coli; identical to SEQ ID NO: 3096

SEQ ID NO: 12946 - protein, 191 aa, Escherichia coli; identical to SEQ ID NO: 2727

SEQ ID NO: 12947 - protein, 729 aa, Escherichia coli; identical to SEQ ID NO: 5961

SEQ ID NO: 12948 - protein, 719 aa, Escherichia coli; identical to SEQ ID NO: 4573

SEQ ID NO: 12949 - protein, 252 aa, Escherichia coli; identical to SEQ ID NO: 3400

SEQ ID NO: 12950 - protein, 554 aa, Escherichia coli; identical to SEQ ID NO: 5969

SEQ ID NO: 12951 - protein, 192 aa, Escherichia coli; identical to SEQ ID NO: 4587

SEQ ID NO: 12952 - protein, 729 aa, Escherichia coli; identical to SEQ ID NO: 4557

SEQ ID NO: 12953 - protein, 733 aa, Escherichia coli; identical to SEQ ID NO: 5945

SEQ ID NO: 12954 - protein, 673 aa, Escherichia coli; identical to SEQ ID NO: 2919

SEQ ID NO: 12955 - protein, 250 aa, Escherichia coli; identical to SEQ ID NO: 3048

SEQ ID NO: 12956 - protein, 224 aa, Escherichia coli; identical to SEQ ID NO: 4306

SEQ ID NO: 12957 - protein, 230 aa, Escherichia coli; identical to SEQ ID NO: 3348

SEQ ID NO: 12958 - protein, 208 aa, Escherichia coli; identical to SEQ ID NO: 1949

SEQ ID NO: 12959 - protein, 432 aa, Escherichia coli; identical to SEQ ID NO: 2026

SEQ ID NO: 12960 - protein, 541 aa, Escherichia coli; identical to SEQ ID NO: 4576

SEQ ID NO: 12961 - protein, 208 aa, Escherichia coli; identical to SEQ ID NO: 1948

SEQ ID NO: 12962 - protein, 517 aa, Escherichia coli; identical to SEQ ID NO: 2462

SEQ ID NO: 12963 - protein, 111 aa, Escherichia coli; identical to SEQ ID NO: 3419

SEQ ID NO: 12964 - protein, 250 aa, Escherichia coli; identical to SEQ ID NO: 3427

SEQ ID NO: 12965 - protein, 231 aa, Escherichia coli; identical to SEQ ID NO: 3055

SEQ ID NO: 12966 - protein, 243 aa, Escherichia coli; identical to SEQ ID NO: 6081

SEQ ID NO: 12967 - protein, 121 aa, Escherichia coli; identical to SEQ ID NO: 2522

SEQ ID NO: 12968 - protein, 360 aa, Escherichia coli; identical to SEQ ID NO: 4018

SEQ ID NO: 12969 - protein, 362 aa, Escherichia coli; identical to SEQ ID NO: 4554

SEQ ID NO: 12970 - protein, 650 aa, Escherichia coli; identical to SEQ ID NO: 5934

SEQ ID NO: 12971 - protein, 367 aa, Escherichia coli; identical to SEQ ID NO: 4285

SEQ ID NO: 12972 - protein, 663 aa, Escherichia coli; identical to SEQ ID NO: 5939

SEQ ID NO: 12973 - protein, 213 aa, Escherichia coli; identical to SEQ ID NO: 2232

SEQ ID NO: 12974 - protein, 541 aa, Escherichia coli; identical to SEQ ID NO: 3377

SEQ ID NO: 12975 - protein, 729 aa, Escherichia coli; identical to SEQ ID NO: 3979

SEQ ID NO: 12976 - protein, 249 aa, Escherichia coli; identical to SEQ ID NO: 9840

SEQ ID NO: 12977 - protein, 244 aa, Escherichia coli; identical to SEQ ID NO: 2964

SEQ ID NO: 12978 - protein, 146 aa, Escherichia coli; identical to SEQ ID NO: 5964

SEQ ID NO: 12979 - protein, 191 aa, Escherichia coli; identical to SEQ ID NO: 2728

SEQ ID NO: 12980 - protein, 331 aa, Escherichia coli; identical to SEQ ID NO: 2713

SEQ ID NO: 12981 - protein, 478 aa, Escherichia coli; identical to SEQ ID NO: 5942

SEQ ID NO: 12982 - protein, 331 aa, Escherichia coli; identical to SEQ ID NO: 5963

SEQ ID NO: 12983 - protein, 230 aa, Escherichia coli; identical to SEQ ID NO: 3019

SEQ ID NO: 12984 - protein, 517 aa, Escherichia coli; identical to SEQ ID NO: 2462

SEQ ID NO: 12985 - protein, 245 aa, Escherichia coli; identical to SEQ ID NO: 3410

SEQ ID NO: 12986 - protein, 628 aa, Escherichia coli; identical to SEQ ID NO: 9810

SEQ ID NO: 12987 - protein, 121 aa, Escherichia coli
MDAVLSVQGASAPVKKKSFFSKFTRLNMLRLVRAVIPAAVLMMFFPQLAMAAGGAGQDLMASGNNTVKATFGKDSSIVKWVVLAEVLVGAVMYMMTKNVKFLAGFAIISVFIAVGMAVVGL

SEQ ID NO: 12988 - protein, 360 aa, Escherichia coli; identical to SEQ ID NO: 6933

SEQ ID NO: 12989 - protein, 682 aa, Escherichia coli; identical to SEQ ID NO: 6899

SEQ ID NO: 12990 - protein, 236 aa, Escherichia coli; identical to SEQ ID NO: 5931

SEQ ID NO: 12991 - protein, 164 aa, Escherichia coli
MSTVPAPLLAAPPLILLKPGTTGTLRLLRTESDILPVDRETLFELSIASVPSGKVENQSVKVAMRSVFKLFWRPEGLPGDPLEAYQQLRWTRNSQGVQLTNPTPYYINLIQVSVNGKALSNAGVVPPKSQRQTSWCQAIAPCHVAWRAINDYGGLSAKKEQNLP

SEQ ID NO: 12992 - protein, 224 aa, Escherichia coli; identical to SEQ ID NO: 3115

SEQ ID NO: 12993 - protein, 386 aa, Escherichia coli; identical to SEQ ID NO: 3094

SEQ ID NO: 12994 - protein, 233 aa, Escherichia coli; identical to SEQ ID NO: 3276

SEQ ID NO: 12995 - protein, 224 aa, Escherichia coli; identical to SEQ ID NO: 3792

SEQ ID NO: 12996 - protein, 239 aa, Escherichia coli; identical to SEQ ID NO: 11531

SEQ ID NO: 12997 - protein, 722 aa, Escherichia coli; identical to SEQ ID NO: 5958

SEQ ID NO: 12998 - protein, 365 aa, Escherichia coli; identical to SEQ ID NO: 3084

SEQ ID NO: 12999 - protein, 241 aa, Escherichia coli; identical to SEQ ID NO: 5957

SEQ ID NO: 13000 - protein, 274 aa, Escherichia coli; identical to SEQ ID NO: 6497

SEQ ID NO: 13001 - protein, 224 aa, Escherichia coli; identical to SEQ ID NO: 4578

SEQ ID NO: 13002 - protein, 191 aa, Escherichia coli; identical to SEQ ID NO: 2727

SEQ ID NO: 13003 - protein, 686 aa, Escherichia coli; identical to SEQ ID NO: 3129

SEQ ID NO: 13004 - protein, 478 aa, Escherichia coli; identical to SEQ ID NO: 2405

SEQ ID NO: 13005 - protein, 235 aa, Escherichia coli; identical to SEQ ID NO: 4365

SEQ ID NO: 13006 - protein, 122 aa, Escherichia coli; identical to SEQ ID NO: 2915

SEQ ID NO: 13007 - protein, 446 aa, Escherichia coli; identical to SEQ ID NO: 2177

SEQ ID NO: 13008 - protein, 784 aa, Escherichia coli; identical to SEQ ID NO: 5933

SEQ ID NO: 13009 - protein, 239 aa, Escherichia coli; identical to SEQ ID NO: 5968

SEQ ID NO: 13010 - protein, 169 aa, Escherichia coli; identical to SEQ ID NO: 3373

SEQ ID NO: 13011 - protein, 222 aa, Escherichia coli; identical to SEQ ID NO: 1956

SEQ ID NO: 13012 - protein, 614 aa, Escherichia coli; identical to SEQ ID NO: 6666

SEQ ID NO: 13013 - protein, 353 aa, Escherichia coli; identical to SEQ ID NO: 6911

SEQ ID NO: 13014 - protein, 230 aa, Escherichia coli; identical to SEQ ID NO: 6078

SEQ ID NO: 13015 - protein, 629 aa, Escherichia coli
MENNRNFPARQFHSLTFFAGLCIGITPVAQALAAEGQTNADDTLVVEASTPSLYAPQQSADPKFSRPVADTTRTMTVISEQVIKDQGATNLTDALKNVPGVGAFFAGENGNSTTGDAIYMRGADTSNSIYIDGIRDIGSVSRDTFNTEQVEVIKGPSGTDYGRSAPTGSINMISKQPRNDSGIDASASIGSAWFRRGTLDVNQVIGDTTAVRLNVMGEKTHDAGRDKVKNERYGVAPSIAFGLGTANRLYLNYLHVTQHNTPDGGIPTIGLPGYSAPSAGTAALNHSGKVDTHNFYGTDSDYDDSTTDTATMRFEHDINDNTTIRNTTRWSRVKQDYLMTAIMGGASNITQPTSDVNSWTWSRTANTKDVSNKILTNQTNLTSTFYTGSIGHDVTTGVEFTRETQTNYGVNPVTLPAVNIYHPDSSIHPGGLTRNGANANGQTDTFAIYAFDTLQITRDFELNGGIRLDNYHTEYDSATACGGSGRGAITCPTGVAKGSPVTTVDTAKSGNLVNWKAGALYHLTENGNVYINYAVSQQPPGGNNFALAQSGSGNSANRTDFKPQKANTSEIGTKWQVLDKRLLLPPRYSVLISKMKLSKMMTELTRNTVRNVSKAMRYPWPGISLPRGR

SEQ ID NO: 13016 - protein, 246 aa, Escherichia coli; identical to SEQ ID NO: 3021

SEQ ID NO: 13017 - protein, 374 aa, Escherichia coli; identical to SEQ ID NO: 2982

SEQ ID NO: 13018 - protein, 446 aa, Escherichia coli; identical to SEQ ID NO: 2176

SEQ ID NO: 13019 - protein, 713 aa, Escherichia coli; identical to SEQ ID NO: 4590

SEQ ID NO: 13020 - protein, 122 aa, Escherichia coli; identical to SEQ ID NO: 2915

SEQ ID NO: 13021 - protein, 303 aa, Escherichia coli; identical to SEQ ID NO: 10633

SEQ ID NO: 13022 - protein, 241 aa, Escherichia coli; identical to SEQ ID NO: 9893

SEQ ID NO: 13023 - protein, 208 aa, Escherichia coli; identical to SEQ ID NO: 1949

SEQ ID NO: 13024 - protein, 233 aa, Escherichia coli; identical to SEQ ID NO: 3276

SEQ ID NO: 13025 - protein, 663 aa, Escherichia coli; identical to SEQ ID NO: 3453

SEQ ID NO: 13026 - protein, 169 aa, Escherichia coli; identical to SEQ ID NO: 3373

SEQ ID NO: 13027 - protein, 678 aa, Escherichia coli; identical to SEQ ID NO: 3014

SEQ ID NO: 13028 - protein, 255 aa, Escherichia coli; identical to SEQ ID NO: 5972

SEQ ID NO: 13029 - protein, 721 aa, Escherichia coli; identical to SEQ ID NO: 9824

SEQ ID NO: 13030 - protein, 405 aa, Escherichia coli
MKKLKINYLFIGILALLLAVALWPSIPWFGKADNRIAAIQARGELRVSTIHTPLTYNEINGKPFGLDYELAKQFADYLGVKLKVTVRQNISQLFDDLDNGNADLLAAGLVYNSERVKNYQPGPTYYSVSQQLVYKVGQYRPRTLGNLTAEQLTVAPGHVVVNDLQTLKDTKFPELSWKVDDKKGSAELMEDVIEGKLDYTIADSVAISLFQRVHPELAVALDITDEQPVTWFSPLDGDNTLSAALLDFFNEMNEDGTLARIEEKYLGHGDDFDYVDTRTFLRAVDAVLPQLKPLFEKYAEEIDWRLLAAIAYQESHWDAQATSPTGVRGMMMLTKNTAQSLGITDRTDAEQSISGGVRYLQDMMSKVPESVPENERIWFALAAYNMGYAHMLDARALNGKNQRES

SEQ ID NO: 13031 - protein, 360 aa, Escherichia coli; identical to SEQ ID NO: 3032

SEQ ID NO: 13032 - protein, 784 aa, Escherichia coli; identical to SEQ ID NO: 2244

SEQ ID NO: 13033 - protein, 517 aa, Escherichia coli; identical to SEQ ID NO: 2462

SEQ ID NO: 13034 - protein, 213 aa, Escherichia coli; identical to SEQ ID NO: 12258

SEQ ID NO: 13035 - protein, 760 aa, Escherichia coli; identical to SEQ ID NO: 9855

SEQ ID NO: 13036 - protein, 332 aa, Escherichia coli; identical to SEQ ID NO: 2701

SEQ ID NO: 13037 - protein, 274 aa, Escherichia coli; identical to SEQ ID NO: 2301

SEQ ID NO: 13038 - protein, 204 aa, Escherichia coli; identical to SEQ ID NO: 2957

SEQ ID NO: 13039 - protein, 432 aa, Escherichia coli; identical to SEQ ID NO: 2026

SEQ ID NO: 13040 - protein, 431 aa, Escherichia coli; identical to SEQ ID NO: 3408

SEQ ID NO: 13041 - protein, 673 aa, Escherichia coli; identical to SEQ ID NO: 2919

SEQ ID NO: 13042 - protein, 431 aa, Escherichia coli; identical to SEQ ID NO: 3408

SEQ ID NO: 13043 - protein, 746 aa, Escherichia coli; identical to SEQ ID NO: 4389

SEQ ID NO: 13044 - protein, 274 aa, Escherichia coli; identical to SEQ ID NO: 2300

SEQ ID NO: 13045 - protein, 241 aa, Escherichia coli; identical to SEQ ID NO: 2075

SEQ ID NO: 13046 - protein, 700 aa, Escherichia coli; identical to SEQ ID NO: 12225

SEQ ID NO: 13047 - protein, 241 aa, Escherichia coli; identical to SEQ ID NO: 2884

SEQ ID NO: 13048 - protein, 733 aa, Escherichia coli; identical to SEQ ID NO: 5314

SEQ ID NO: 13049 - protein, 235 aa, Escherichia coli; identical to SEQ ID NO: 9725

SEQ ID NO: 13050 - protein, 784 aa, Escherichia coli; identical to SEQ ID NO: 2241

SEQ ID NO: 13051 - protein, 204 aa, Escherichia coli; identical to SEQ ID NO: 2957

SEQ ID NO: 13052 - protein, 774 aa, Escherichia coli; identical to SEQ ID NO: 5966

SEQ ID NO: 13053 - protein, 347 aa, Escherichia coli
SVLMAMSAQAAEIYNKDSNKLDLYGKVNAKHYFSSNDADDGDTTYVRLGFKGETQINDQLTGFGQWEYEFKGNRAESQGSSKDKTRLAFAGLKFGDYGSIDYGRNYGVAYDIGAWTDVLPEFGGDTWTQTDVFMTGRTTGVATYRNNDFFGLVDGLNFAAQYQGKNDRTDVTEANGDGFGFSTTYEYEGFGVGATYAKSDRTNDQVIYGNNSLNASGQNAEVWAAGLKYDANNIYLATTYSETQNMTVFGNNHIANKAQNFEVVAQYQFDFGLRPSVAYLQSKGKDLGAWGDQDLVEYIDVGATYYFNKNMSTFVDYKINLIDKSDFTKASGVATDDIVAVGLVYQF

SEQ ID NO: 13054 - protein, 700 aa, Escherichia coli; identical to SEQ ID NO: 3128

SEQ ID NO: 13055 - protein, 430 aa, Escherichia coli; identical to SEQ ID NO: 2617

SEQ ID NO: 13056 - protein, 353 aa, Escherichia coli; identical to SEQ ID NO: 6704

SEQ ID NO: 13057 - protein, 654 aa, Escherichia coli; identical to SEQ ID NO: 3854

SEQ ID NO: 13058 - protein, 629 aa, Escherichia coli; identical to SEQ ID NO: 10744

SEQ ID NO: 13059 - protein, 250 aa, Escherichia coli; identical to SEQ ID NO: 3811

SEQ ID NO: 13060 - protein, 249 aa, Escherichia coli; identical to SEQ ID NO: 10618

SEQ ID NO: 13061 - protein, 696 aa, Escherichia coli; identical to SEQ ID NO: 5576

SEQ ID NO: 13062 - protein, 726 aa, Escherichia coli; identical to SEQ ID NO: 10726

SEQ ID NO: 13063 - protein, 554 aa, Escherichia coli
MALIPACIFLCFAALSVQAEETSVTPQPPDILLGPLFNDVQNAKLFPDQKTFADAVPNSDPLMILADYRMQQNQSGFDLRHFVNVNFTLPKEGEKYVPPEGQSLREHIDGLWPVLTRSTENTEKWDSLLPLPKPYVVPGGRFREVYYWDSYFTMLGLAESGHWDKVADMVANFAHEIDTYGHIPNGNRSYYLSRSQPPFFALMVELLAQHEGDAALKQYLPQMQKEYAYWMDGVENLQAGQQEKRVVKLQDGTLLNRYWDDRDTPRPESWVEDIPTAKSNPNRPATEIYRDLRSAAASGWDFSSRWMDNPQQLNTLRTTSIVPVDLNSLMFKMEKILARASKAAGDNAMANQYETLANARQKGIEKYLWNDQQGWYADYDLKSHKVRNQLTAAALFPLYVNAAAKDRASKMATATKTHLLQPGGLNTTSVKSGQQWDAPNGWAPLQWVATEGLQNYGQKEVAMDISWHFLTNVQHTYDREKKLVEKYDVSATGTGGGGGEYPLQDGFGWTNGVTLKMLDLICPKEQPCDNVPATRPLSESTTQPVKQKEAEPTP

SEQ ID NO: 13064 - protein, 243 aa, Escherichia coli; identical to SEQ ID NO: 2910

SEQ ID NO: 13065 - protein, 686 aa, Escherichia coli; identical to SEQ ID NO: 3129

SEQ ID NO: 13066 - protein, 386 aa, Escherichia coli; identical to SEQ ID NO: 12201

SEQ ID NO: 13067 - protein, 375 aa, Escherichia coli; identical to SEQ ID NO: 2432

SEQ ID NO: 13068 - protein, 823 aa, Escherichia coli
MFTVQFFIDCRNILIILLITICICNRVMARRGKRGHLLTNCTACLSGSKVFAVAGCVVLRTTMPDSCNSWQKCRNKTMNKKIHSLALLVNLGIYGVAQAQEPTDTPVSHDDTIVVTAAEQNLQAPGVSTITADEIRKNPVARDVSEIIRTMPGVNLTGNSTSGQRGNNRQIDIRGMGPENTLILIDGKPVSSRNSVRQGWRGERDTRGDTSWVPPEMIERIEVLRGPAAARYGNGAAGGVVNIITKKGSGEWHGSWDAYFNAPEHKEEGATKRTNFSLTGPLGDEFSFRLYGNLDKTQADAWDINQGHQSARAGTYATTLPAGREGVINKDINGVVRWDFAPLQSLELEAGYSRQGNLYAGDTQNTNSDAYTRSKYGDETNRLYRQNYALTWNGGWDNGVTTSNWVQYEHTRNSRIPEGLAGGTEGKFNEKATQDFVDIDLDDVMLHSEVNLPIDFLVNQTLTLGTEWNQQRMKDLSSNTQALTGANTGGAIDGVSATDRSPYSKAEIFSLFAENNMELTDSTIVTPGLRFDHHSIVGNNWSPALNISQGLGDDLTLKMGIARAYKAPSLYQTNPNYILYSKGQGCYASAGGCYLQGNDDLKAETSINKEIGLEFKRDGWLAGVTWFRNDYRNKIEAGYVAVGQNAVGTDLYQWDNVPKAVVEGLEGSLNVPVSETVMWTNNITYMLKSENKTTGDRLSIIPEYTLNSTLSWQAREDLSMQTTFTWYGKQQPKKYNYKGQPAVGPETKEISPYSIVGLSATWDVTKNVSLTGGVDNLFDKRLWRAGNAQTTGDLAGANYIAGAGAYTYNEPGRTWYMSVNTHF

SEQ ID NO: 13069 - protein, 266 aa, Escherichia coli; identical to SEQ ID NO: 1892

SEQ ID NO: 13070 - protein, 863 aa, Escherichia coli; identical to SEQ ID NO: 3946

SEQ ID NO: 13071 - protein, 118 aa, Escherichia coli [sequence omitted]

SEQ ID NO: 13072 - protein, 446 aa, Escherichia coli; identical to SEQ ID NO: 5547

SEQ ID NO: 13073 - protein, 478 aa, Escherichia coli; identical to SEQ ID NO: 7448

SEQ ID NO: 13074 - protein, 250 aa, Escherichia coli; identical to SEQ ID NO: 3048

SEQ ID NO: 13075 - protein, 880 aa, Escherichia coli; identical to SEQ ID NO: 3110

SEQ ID NO: 13076 - protein, 446 aa, Escherichia coli; identical to SEQ ID NO: 2182

SEQ ID NO: 13077 - protein, 700 aa, Escherichia coli
MKIFSVRQTVLPALLVLSPVVFAADEQTMIVSATPQVVSELDTPAAVSVVDGEEMRLATPRINLSESLTSVPGLQVQNRQNYAQDLQLSIRGFGSRSTYGIRGIRLYVDGIPATMPDGQGQTSNIDLSSVQNVEVLRGPFSALYGNASGGVMNVITQTGQQPPTIEASSYYGSFGSWRYGLKATGAMGDGTQPGDVDYTVSTTRFTTHGYRDHSGAQKNLANAKLGVRIDDASKLSLIFNSVDIKADDPGGLTEAEWKANPQQAPRAEQYDTRKTIKQTQAGLRYERSLSAQDDMSVMMYAGERETTQYQSIPMAPQLNPSHAGGVITLQRHYQGIDSRWTHRGELGVPLTFTTGLNYENMSENRKGYNNFRLNSGVPEYGQKGELRRDERNLMWNVDPYLQTQWQLSEKLSLDAGVRYSSVWFDSNDHYVTPGNGDDSGDASYHKWLPAGSLKYAMTDAWNIYLAAGRGFETPTINELSYRADGQSGMNFGLKPSTNDTIEIGSKTRIGDGLLSLALFQTDTDDEIVVDSSSGGRTTYKNAGKTRRQGAELAWDQRFAGDFRVKASWTWLDATYRSNVCNEQDCNGNRMPGIARNMGFASIGYVPEDGWYAGTEARYMGDIMADDENTAKAPSYTLVGLFTGYKYNYHNLTVDLFGRVDNLFDKEYVGSVIVNESNGRYYEPAPGRNYGVGMNIAWRFE

SEQ ID NO: 13078 - protein, 660 aa, Escherichia coli; identical to SEQ ID NO: 4097

SEQ ID NO: 13079 - protein, 402 aa, Escherichia coli
MLIPGVQAAKPQKVTLMVDDVPVAQVLQALAEQEKLNLVVSPDVSGTVSLHLTDVPWKQALQTVVKSAGLITRQEGNILSVHSVAWQNDNIARQEAEQARAQANLPLENRNITLQYADAGELAKAGEKLLSAKGSMTVDKRTNRLLLRDNKTALSALEQWVAQMDLPVGQVELSAHIVTINEKSLRELGVKWTLADAQHAGGVGQVTTLGSDLSVATATTHVGFNIGRINGRLLDLELSALEQKQQLDIIASPRLLASHLQPASIKQGSEIPYQVSSGESGATSVEFKEAVLGMEVTPTVLQKGRIRLKLHISQNVPGQVLQQADGEVLAIDKQEIETQVEVKSGETLALGGIFTRKNKSGQDSVPLLGDIPWFGQLFRHDGKEDERRELVVFITPRLVSSE

SEQ ID NO: 13080 - protein, 432 aa, Escherichia coli; identical to SEQ ID NO: 2026

SEQ ID NO: 13081 - protein, 567 aa, Escherichia coli
MKIKLCITIILISALCIFNGLLTPGAYAATANGYVANKENLRSFFETVSSYAGKPTIVSKLAMKKQISGNFDLTEPYALIERLSAQMGLIWYDDGKAIYIYDSSEMRNALINLRKVSTNEFNNFLKKSGLYNSRYEIKGGGNGTFYVSGPPVYVDLVVNAAKLMEQNSDGIEIGRNKVGIIHLVNTFVNDRTYELRGEKIVIPGMAKVLSTLLNNNIKQSTGVNVLSEISSRQQLKNVSRMPPFPGAEEDDDLQVEKIISTAGAPETDDIQIIAYPDTNSLLVKGTVSQVDFIEKLVATLDIPKRHIELSLWIIDIDKTDLEQLGADWSGTIKIGSSLSASFNNSGSISTLDGTQFIATIQALAQKRRAAVVARPVVLTQENIPAIFDNNRTFYTKLVGERTAELDEVTYGTMISVLPRFASRNQIELLLNIEDGNEINSDKTNVDDLPQVGRTLISTIARVPQGKSLLIGGYTRDTNTYESRKIPILGSIPFIGKLFGYEGTNANNIVRVFLIEPREIDERMMNNANEAAVDARAITQQMAKNKEINDELLQKWIKTYLNREVVGG

SEQ ID NO: 13082 - protein, 213 aa, Escherichia coli; identical to SEQ ID NO: 2232

SEQ ID NO: 13083 - protein, 729 aa, Escherichia coli; identical to SEQ ID NO: 4015

SEQ ID NO: 13084 - protein, 539 aa, Escherichia coli; identical to SEQ ID NO: 3050

SEQ ID NO: 13085 - protein, 659 aa, Escherichia coli
MLAAALCSSPVWAEEATFTANFKDTDLKSFIETVGANLNKTIIMGPGVQGKVSIRTMTPLNERQYYQLFLNLLEAQGYAVVPMENDVLKVVKSSAAKVEPLPLVGEGSDNYAGDEMVTKVVPVRNVSVRELAPILRQMIDSAGSGNVVNYDPSNVIMLTGRASVVERLTEVIQRVDHAGNRTEEVIPLDNASASEIARVLESLTKNSGENQPATLKSQIVADERTNSVIVSGDPATRDKMRRLIRRLDSEMERSGNSQVFYLKYSKAEDLVDVLKQVSGTLTAAKEEAEGTVGSGREVVSIAASKHSNALIVTAPQDIMQSLQSVIEQLDIRRAQVHVEALIVEVAEGSNINFGVQWASKDAGLMQFANGTQIPIGTLGAAISQAKPQKGSTVISENGATTINPDTNGDLSTLAQLLSGFSGTAVGVVKGDWMALVQAVKNDSSSNVLSTPSITTLDNQEAFFMVGQDVPVLTGSTVGSNNSNPFNTVERKKVGIMLKVTPQINEGNAVQMVIEQEVSKVEGQTSLDVVFGERKLKTTVLANDGELIVLGGLMDDQAGESVAKVPLLGDIPLIGNLFKSTADKKEKRNLMVFIRPTILRDGMAADGVSQRKYNYMRAEQIYRDEQGLSLMPHTAQPVLPAQNQALPPEVRAFLNAGRTR

SEQ ID NO: 13086 - protein, 814 aa, Escherichia coli
MCAGKKAVAEPVSSVFFRRAALALAVSAAFASATGIAGEKLDMSFIQGGAGVNPEVWAALNGSYAPGRYLVDLSLNGKEAGKQILDVTPQDSNELCLTEAWLTKAGIYVSADYFREGYDATRQCYVLTKAPSVKVDFDVSTQSLALSIPQKGLVKMPENVDWDYGTSAFRVNYNANANTGRNNTSAFGSADLKANIGHWVVSSSATASGGDSGDNSTTINMFTATRAIRALSADLAVGKTSTGDSLLGSTGTYGVSLSRNNSMKPGNLGYTPVFSGIANGPSRVTLTQNGRLLHSEMVPAGPFSITDVPLYTSGDVTMKITGEDGREQVQNFPLSVMAGQLSPGQHEFSVAAGLPDDDSDLKGGVFAASYGYGLDGLTLRTGGVFNQDWQGVSAGAVLGLSYLGAVSADGAYATAKYRDGSRSGNKVQLSWSKQLEMTNTGLRVSWSRQSEEYEDMSSFDPTELWSQSNHGRRTKDEWNAGVSQPVGGLFSLSVSGWQRSYYPASMTGSYRYSDDNGKDTGITGTLSTQIKGVSLNLGWSGSRNTRGENNWSASASVSVPFTLFDRRYSSSTSVSTSKDGGTGFSTGVSGSLNDRFSYGLGGGRDSGGGVSSYLNASYSGDRAYLNGALNHSQSGGTSGSVSVSGSVLAVPAAKDIMFSRTTGDTVAVVNVKDTPGVKVTSGDGQTDSDGNLVVPLNSYDWNTVTIDAGTLPLSTELTNTSQKVVPTDKAVVWMPFDALKVKRYLLQVKQRDGEFVPGGTWARDSKNTPLGFVANNGVLMINTVDAPGDITLGQCRIPAAKLQDTEKLQEITCE

SEQ ID NO: 13087 - protein, 805 aa, Escherichia coli
MKFKRFPKISLLALSIWYSHFSLAEELNLDFIQGVSVIPSILKSDTNYPEGQYIVDVAVNKERTERLELNISKEDEKNNMLCLSSEWLKKAGVMLKMDAYQDVFDEGKGCYVLAKKPHTLVDFDYGAQALNFNIPQAYLLDKTDPARWDYGVNGGRLKYYGNFNKTVHNDFNAFGNVDATINLGRWVLSSNMNVSHSDDKTEFTSSDLTLSTAISQVQGDLLLGKSQTRTELFSDFNFYGAALRSNSNMRPWEFRGYAPDISGVAPTPSRVTVKQNGYVVYSRMVPAGPYRLDDLNPMGNGDLVVTVEDENGNKTEQIYPITTLPTLLRPGEFQYNLAVGKKNNSNELDKAFDSDTGLFWLGSLDYGFTTTTLNSAALLNENYLSGGLGVTQMLGGLGALSLSANVSKASYNNGEEKTGQNFSAKYAKSFTDKTDLQLLTYRYQSKEYVEFADFNPKDIWRNARYGGQRSRYEARLSHRFDGTYLSGSYWWQDYWMHKGQDAGGTVSMSTSVFDSVSLFLNGTYSKYVWSDKPDYSVSLNVSVPFDLKGTRHYSSNSVGYTHNGGTTFNSSISTTLTDRFNYSLSANAGSKGDRGASVSAGYAFDAIQTNVGVSRSYSKQGYSQSSLSGSVSGSVLGTSETGPLFTKESSDTVGIVSIPGVEGVSVNGSMPTDRNGNTVVWLSEYSENNININMDNVPDNMEFETTSYNVVPTEKAMVYRKFGFKNVLRYILRVKDAQGNYLAGGDAKTEQGLNAGFISNNGVLLMNMLAEPKSVSVATGDGKQCRFSMAGLKANTNKVQEVRCE

SEQ ID NO: 13088 - protein, 758 aa, Escherichia coli
MNNNQISNGQKINWQKKGDKTIPCINDSLVDKFGLKPDIRQSLPQIDRCIDFSSRPEMLFNFDQANQQLNISIPQAWLAWHSENWAPPSTWKEGVAGVLMDYNLFASSYRPQDGSSSTNLNAYGTAGINAGAWRLRSDYQLNKTDSEDNHDQSGGISRTYLFRPLPQLGSKLTLGETDFSSNIFDGFSYTGAALASDDRMLPWELRGYAPQISGIAQTNATVTVSHSGRVIYQKKVPPGPFIIDDLNQSVQGTLDVKVTEEDGRVNNFQVSAASTPFLTRQGQVRYKLAAGQPRPSMSHQTENETFFSNEVSWGMLSNTSLYGGLLISGDDYHSAAMGIGQNMLWLGALSFDVTWASSQFDTQQDERGLSYRFNYSKQVDATNSTISLAAYRFSDRHFHSYANYLDHKYNDNDAQDEKQTISLSVGQPITPLNFNLYANLLHQTWWNADASTTANITAGFNVDIGNWRDISISTSFNTTHYEDKDRDNQIYLSISLPFGNGGRVGYDMQNSNHSTTHRMSWNDTLDERNSWGMSTGLQSDRPDNGAQVSGNYQHLSSAGEWDISGTYAANDYSSVSSSWSGSFTATQYGAAFHRRSSTNEPRLMVSTDGVADIPVQGNLDYTNHFGIAVVPLISSYQPSTVAVNMNDLPDGVTVADNVIKETWIEGAIGYKSLASRSGKDVNVIIRNASGQFPPLGADIRQEDSGISVGMVGEEGHAWLSGVAENQQFTVVWGDSQHCSLYLPEHMENTANRLILPCH

SEQ ID NO: 13089 - protein, 816 aa, Escherichia coli
MLRTTRWVAAIIFLYSFPGYAEETFDTHFMIGGMRGEKVSEYRFDNKQPLPGNYELDFYVNHQWRGKKDITIPESPAKPCLPKVLLTTLGVKTDNLNTEDNCILLDEAVHGGQYQWDISEHRLNLTVPQAYINELERGYVPPESWDRGIDAFYTSYNLSQYRSYDSNNNSNTASYGRFNSGLNLFSWQLHSDASYSKPDDMKGKWQSNTLYLERGWSQILSTVQIGENYTSSLIFDSLRFSGIRLFRDMQMLPDSMQSFTPLVQGVAQSNALITVSQNGYTIYQKEVPPGPFTIADLQLSGSGSDLDVSIKEADGSVRSFLVPYSSVPNMLQPGVSNFDFIAGRSQIYGVKNQEDFLEANYIYGLNNLLTLYGGTILSDNYNAITLGNGWNTPLGAISFDATRSSSKLNNDTRHEGTSYQVAYNKYLLQTATHFSVAAWRYASQDYRTFSDHLYENDKINHQSDDDDFYDIGRKNSLSANIMQPLSNNLGNVSLSALWRNYWGRSGNAKDYQFSYSNSWQRISYTFSASQSYDENDKEEERFNLFISIPFYWGDDIAKTRHQINLSNSTSFSKDGYSSNNTGITGIAGEHDQLNYGIYVNQQQQNNDTSLGTNLSWRTPIATIDGSYSHSKNAWQSGGSISSGLVVWPGGINITNQLSDTFAILDAPGLEGAHINGQKYNRTNSKGQVVYDLMIPHRENHLVLDIANSESETELQGNRQIIAPYRGAVSYVQFTTDQRKPWYIQALRPDGSPLTFGYDVLDLQENNIGVVGQGSRLFIRVDEIPTGIKVALNDEQNLFCTITFQHVIDENKTYICQ

SEQ ID NO: 13090 - protein, 873 aa, Escherichia coli
MQQEANVMKTKTSTKRHNLTRIAMYCSIMYSGATIGAESVEYDPTFLMGGNASSIDVSRYSDGNPTLPGVYDVSIYVNEQPVANLEIPFIAIPDKKNAQACITLKNLLQLHIKTPPADEENTILLPRDETLGNCLDLSLAIPKSSVNYDPSEQRLDINVPQAWVMKNYQNYVDPSLWENGINAATLSYNINAYRSENSNYTNDSVYTSFNGGVNLGAWRLRSSGNYSWRNDAGSNVEFMNRYVQRDITAIRSQLIMGESYTTGETFDSVSIRGIRLYSDSRMLPPVLANFAPTIRGVANTNAKVSITQSGYKIYETTVPPGPFVIDDLSPSGYGSDLIVTIEEADGSKRTFSQPFSSVIQMLRPGVSRWDISGGQINKDDLHHEPNLLQATYYRGLSNLFTGYTGFQVTDNHYAAGLLGIGMNTSVGAISFDVTHSSVDIPDDKRYQGQSYRISWNKFFDLTDTSLNIAAYRYSTQDYLGLNDALTLIDEVEHPTQDLDPKTMRNYGRMKNQFTVSINQPLRFGKDDYGSFYTSGSWSDYWGGSKSRSNYSVGYSNSASWGSYSISAQRSWDEYSQTENSIYLSFSIPIEKLMGTEHRDSGFQSIDTQLSTNMDGNNQFNMSSSGYSNDNRVSYSVNAGYGMNKTGKDLSNIGGYASYESPWGTLAGSVSATSDNNRQYSVNTDGGFVLHSGGLTFSNDSFSDNDTIALVKAPGAKGARINYGNNTVDRWGYGVTSALSPYQENKIALDTENLENDIEMKSTSTVAVPRQGSVIFAGFETNQGQSAIMNIKRSDGKGIPFAADIHDETNAIIGNVGQGGQAFVRGIQQQGTIKITWLEASMPKTCIAQYQQPNVTSEKIQQTIILNNILCQLQ

SEQ ID NO: 13091 - protein, 266 aa, Escherichia coli; identical to SEQ ID NO: 3338

SEQ ID NO: 13092 - protein, 203 aa, Escherichia coli; identical to SEQ ID NO: 2009

SEQ ID NO: 13093 - protein, 366 aa, Escherichia coli; identical to SEQ ID NO: 4014

SEQ ID NO: 13094 - protein, 377 aa, Escherichia coli
MRGYGYDNRTNYDAYYSPGSPLLDTRKLYSQSWDAGLRYNGELIKSQLITSYSHSKDYNYDPHYGRYDSSATLDEMKQYTVQWANNVTVGHGNIGAGVDWQKQTTTPGTGYVEDGYDQRNTGIYLTGLQQVGDFTFEGAARSDDNSQFGRHGTWQTSAGWEFIEGYRFIASYGTSYKAPNLGQLYGFYGNPNLNPEKSKQWEGAFEGLTAGVNWRISGYRNDVSDLIDYDDHTLKYYNEGKARIKGVEATANFDTGPLTHTVSYDYVDARNAITDAPLLRRAKQQVKYQLDWQLYDFDWGITYQYLGTRYDKDYSSYPYQTVKMGGVSLWDLAVAYPVTSHLTVRGKIANLFDKDYETVYGYQTAGREYTLSGSYTF

SEQ ID NO: 13095 - protein, 170 aa, Escherichia coli [sequence omitted]

SEQ ID NO: 13096 - protein, 230 aa, Escherichia coli; identical to SEQ ID NO: 8087

SEQ ID NO: 13097 - protein, 351 aa, Escherichia coli; identical to SEQ ID NO: 2872

SEQ ID NO: 13098 - protein, 570 aa, Escherichia coli; identical to SEQ ID NO: 7501

SEQ ID NO: 13099 - protein, 746 aa, Escherichia coli; identical to SEQ ID NO: 7482

SEQ ID NO: 13100 - protein, 203 aa, Escherichia coli; identical to SEQ ID NO: 2201

SEQ ID NO: 13101 - protein, 591 aa, Escherichia coli; identical to SEQ ID NO: 4273

SEQ ID NO: 13102 - protein, 213 aa, Escherichia coli; identical to SEQ ID NO: 2232

SEQ ID NO: 13103 - protein, 203 aa, Escherichia coli; identical to SEQ ID NO: 2009

SEQ ID NO: 13104 - protein, 646 aa, Escherichia coli; identical to SEQ ID NO: 7457

SEQ ID NO: 13105 - protein, 662 aa, Escherichia coli; identical to SEQ ID NO: 8124

SEQ ID NO: 13106 - protein, 765 aa, Escherichia coli; identical to SEQ ID NO: 7498

SEQ ID NO: 13107 - protein, 430 aa, Escherichia coli; identical to SEQ ID NO: 2617

SEQ ID NO: 13108 - protein, 565 aa, Escherichia coli; identical to SEQ ID NO: 2678

SEQ ID NO: 13109 - protein, 760 aa, Escherichia coli; identical to SEQ ID NO: 3923

SEQ ID NO: 13110 - protein, 243 aa, Escherichia coli; identical to SEQ ID NO: 3483

SEQ ID NO: 13111 - protein, 784 aa, Escherichia coli; identical to SEQ ID NO: 2244

SEQ ID NO: 13112 - protein, 729 aa, Escherichia coli; identical to SEQ ID NO: 2948

SEQ ID NO: 13113 - protein, 641 aa, Escherichia coli
MLAVDDDGETMVVTASSVEQNLKDAPASISVITQEDLQRKPVQNLKDVLKEVPGVQLTNEGDNRKGVSIRGLDSSYTLILVDGKRVNSRNAVFRHNDFDLNWIPVDSIERIEVVRGPMSSLYGSDALGGVVNIITKKIGQKWSGTVTVDTTIQEHRDRGDTYNGQFFTSGPLIDGVLGMKAYGSLAKREKDDPQNSTTTDTGETPRIEGFSSRDGNVEFAWTPNQNHDFTAGYGFDRQDRDSDSLDKNRLERQNYSVSHNGRWDYGTSELKYYGEKVENKNPGNSSPITSESNTVDGKYTLPLTAINQFLTVGGEWRHDKLSDAVNLTGGTSSKTSASQYALFVEDEWRIFEPLALTTGVRMDDHETYGEHWSPRAYLVYNATDTVTVKGGWATAFKAPSLLQLSPDWTSNSCRGACKIVGSPDLKPETSESWELGLYYMGEEGWLEGVESSVTVFRNDVKDRISISRTSDVNAAPGYQNFVGFETGANGRRIPVFSYYNVNKARIQGLETELKIPFNDEWKLSINYIYNDGRDVSNGENKPLSDLPFHTANGTLDWKPLALEDWSFYVSGHYTGQKRADSATAKTPGGYTIWNTGAAWQVTKDVKLRAGVLNLGDKDLSRDDYSYNEDGRRYFMAVDYRF

SEQ ID NO: 13114 - protein, 249 aa, Escherichia coli; identical to SEQ ID NO: 3492

SEQ ID NO: 13115 - protein, 162 aa, Escherichia coli; identical to SEQ ID NO: 1973

SEQ ID NO: 13116 - protein, 843 aa, Escherichia coli
MKNNTSFAVNGITYALMLSLVGAPAYAVDFNTDVLDAADRQNIDFSRFSQAGYIMPGQYQMEIMVNDQGISPSAFPVTFLEPPASGQDGKKPLPQACLTPEMVNRMGLTAASQEKVTYWNNGQCADLSQLPGVEIRPNPAEGMLYINMPQAWLEYSDASWLPPSRWDNGIPGLLFDYNINGTVNKPHKGKQSQSLSYNGTAGANFGAWRLRADYQGNLNHTTGSGQGTDSQFTWSRFYMYRAIPRWRANLTLGENYINSEIFSSWRYTGASLESDDRMLPPKLRGYAPQVSGIADTNARVVISQQGRILYDSTVPAGPFTIQDLDSSVRGRLDVEVIEQDGRKKTFQVDTAYVPYLTRPGQIRYKLVSGRSRNYEHTTEGPVFAAGEASWGISNKWSLYGGGIVAGDYNALAVGLGRDLNEFGTVSADVTQSVARIPGEDTKQGKSWRLSYSKRFDDVNADITFAGYRFSERNYMTMDQYLNARYRNDFTGREKELYTVTLNKNFEDWKTSVNLQYNHQTWWDRPASNSYTLSVNRYFDAFGFKNVSAGLAATRSRYSRNGVRGSGDNYNDSVFLRLSVPWGTGTASYSGSMSNDRYTNTVGYSDTLDKGLSSYSLNAGVSSGGGQPSQSQMSAYYNHSSPLANLSANFSAVENGYTSFGMSASGGATITAKGAALHAGGMNGRTRLLVDTDGVGGVPVDGGRVSTNRWGIGVVTDVSSYYRNTTSVDLNKLPEDMEATRSVVESVLTEGAIGYREFEVLKGSRLFAVLRLADNSHPPFGASVTNAKGRELGMVADSGLAWLSGVNPGETLNVGWDGRTQCVVDIPKNLDPAQQLPLPCRKAN

SEQ ID NO: 13117 - protein, 883 aa, Escherichia coli
MTAFRAAFKAYRMHQVLLLPRFARLTIALGLATAVFPVDAEYYFNPRFLSNDLAESVDLSAFTKGREAPPGTYRVDIYLNDEFITSRDITFIADDNNADLIPCLSTDLLVSLGIKKSALLDNKEHSAEKHVPDNSACTPLQDRLADASTEFDVGQQHLSLSVPQIYVGRMARGYVSPDLWEEGINAGLLNYSFNGNSINNRSNHNAGKSNYAYLNLQSGINIGSWRLRDNSTWSYNSGSSNSSDSNKWQHINTSAERDIIPLRSRLTVGDSYTDGDIFDSVNFRGLKINSTEAMLPNSQHGFAPVIHGIARGTAQVSVKQNGYDVYQTTVPPGPFTIDDINSAANGGDLQVTIKEADGSIQTLYVPYSSVPVLQRAGYTRYALAMGEYRSGNNLQSSPKFIQGSLMHGLEGNWTPYGGMQIAEDYQAFNLGIGKDLGLFGAFSFDITQANTTLADGTRHSGQSIKSVYSKSFYQTGTNIQVAGYRYSTQGFYNLSDSAYSRMSGYTVKPPTGDSNEQTQFIDYFNLFYSKRGQEQISISQQLGNYGTTFFSASRQSYWNTSRSDQQISFGLNVPFGDITTSLNYSYSNNIWQNDRDHLLAFTLNVPFSHWMRTDSQSAFRNSNASYSMSNDLKGGMTNLSGVYGTLLPDNNLNYSVQVGNTHGGNTSSGTSGYSSLNYRGAYGNTNVGYSRSGDSSQIYYGMSGGIIAHADGITFGQPLGDTMVLVKAPGADNVKIENQTGIHTDWRGYAILPFATEYRENRVALNANSLADNVELDETVVTVIPTHGAIARATFNAQIGGKVLMTLKYGNKSVPFGAIVTHGKNKNGSIVAENGQVYLTGLPQSGKLQVSWGKDKNSNCIVEYKLPEVSPGTLLNQQTAICR

SEQ ID NO: 13118 - protein, 856 aa, Escherichia coli; identical to SEQ ID NO: 6509

SEQ ID NO: 13119 - protein, 539 aa, Escherichia coli; identical to SEQ ID NO: 3050

SEQ ID NO: 13120 - protein, 361 aa, Escherichia coli; identical to SEQ ID NO: 3061

SEQ ID NO: 13121 - protein, 432 aa, Escherichia coli; identical to SEQ ID NO: 2026

SEQ ID NO: 13122 - protein, 863 aa, Escherichia coli; identical to SEQ ID NO: 3959

SEQ ID NO: 13123 - protein, 871 aa, Escherichia coli; identical to SEQ ID NO: 3519

SEQ ID NO: 13124 - protein, 826 aa, Escherichia coli; identical to SEQ ID NO: 3563

SEQ ID NO: 13125 - protein, 207 aa, Escherichia coli; identical to SEQ ID NO: 2211

SEQ ID NO: 13126 - protein, 236 aa, Escherichia coli; identical to SEQ ID NO: 3482

SEQ ID NO: 13127 - protein, 713 aa, Escherichia coli
MAKFTPSFSGIKGRALFSLLFAAPMIHATDTATTKDGETITVTADANTATEATDGYQPLSTSTATLTDMPMLDIPQVVNTVSDQVLENQNATTLDEALYNVSNVVQTNTLGGTQDAFVRRGFGANRDGSIMTNGLRTVLPRSFNAATERVEVLKGPASTLYGILDPGGLINVVTKRPEKTFHGSVSATSSSFGGGTGQLDITGPIEGTQLAYRLTGEVQDEDYWRNFGKERSTFIAPSLTWFGDNATVTMLYSHRDYKTPFDRGTIFDLTTKQPVNVDRKIRFDEPFNITDGQSDLAQLNAEYHLNSQWTARFDYSYSQDKYGDNQARVTAYDATTGTLTRRVDATQGSTQRMHATRADLQGNVDIAGFYNEILGGVSYEYYDLLRTDMIRCKNAKDFNIYNPVYGNTSKCTTVSASDSDQTIKQESYSAYAQDALYLTDNWIAVAGIRYQYYTQYAGKGRPFNVNTDSRDEQWTPKLGLVYKLTPSVSLFANYSQTFMPQSSIASYIGDLPPESSNAYEVGAKFELFDGITADIALFDIHKRNVLYTESIGDETIAKTAGRVRSRGVEVDLAGALTENINIIASYGYTDAKVLEDPDYAGKPLPNVPRHTGSLFLTYDIHNMPGNNTLTFGGGGHGVSRRSATNGADYYLPGYFVADAFAAYKMKLQYPVTLQLNVKNLFDKTYYTSSIATNNLGNQIGDPREVQFTVKMEF

SEQ ID NO: 13128 - protein, 828 aa, Escherichia coli; identical to SEQ ID NO: 2388

SEQ ID NO: 13129 - protein, 746 aa, Escherichia coli; identical to SEQ ID NO: 4130

SEQ ID NO: 13130 - protein, 193 aa, Escherichia coli; identical to SEQ ID NO: 2246

SEQ ID NO: 13131 - protein, 193 aa, Escherichia coli; identical to SEQ ID NO: 2246

SEQ ID NO: 13132 - protein, 514 aa, Escherichia coli; identical to SEQ ID NO: 8138

SEQ ID NO: 13133 - protein, 860 aa, Escherichia coli; identical to SEQ ID NO: 3544

SEQ ID NO: 13134 - protein, 274 aa, Escherichia coli; identical to SEQ ID NO: 2317

SEQ ID NO: 13135 - protein, 368 aa, Escherichia coli; identical to SEQ ID NO: 7478

SEQ ID NO: 13136 - protein, 266 aa, Escherichia coli; identical to SEQ ID NO: 1894

SEQ ID NO: 13137 - protein, 789 aa, Escherichia coli
MKKRIPTLLATMIATALYSQQGLAADLASQCMLGVPSYDRPLVQGDTNDLPVTINADHAKGDYPDDAVFTGSVDIMQGNSRLQADEVQLHQKEAPGQPEPVRTVDALGNVHYDDNQVILKGPKGWANLNTKDTNVWEGDYQMVGRQGRGKADLMKQRGENRYTILDNGSFTSCLPGSDTWSVVGSEIIHDREEQVAEIWNARFKVGPVPIFYSPYLQLPVGDKRRSGFLIPNAKYTTTNYFEFYLPYYWNIAPNMDATITPHYMHRRGNIMWENEFRYLSQAGAGLMELDYLPSDKVYEDEHPNDDSSRRWLFYWNHSGVMDQVWRFNVDYTKVSDPSYFNDFDNKYGSSTDGYATQKFSVGYAVQNFNATVSTKQFQVFSEQNTSSYSAEPQLDVNYYQNDVGPFDTRIYGQAVHFVNTRDDMPEATRVHLEPTINLPLSNNWGSINTEAKLLATHYQQTNLDWYNSNPQNNKLADSVNRVMPQFKVDGKMVFERDMNLLAPGFTQTLEPRAQYLYVPYRDQSDIYNYDSALLQSDYSGLFRDRTYGGLDRIASANQVTTGVTSRVYDDAAVERFNISVGQIYYFTESRTGDDNITWENDDKTGSLVWAGDTYWRISERWGLRGGIQYDTRLDNVATSSSSIEYRRDEDRLVQLNYRYASPEYIQATLPRDSRDKRWNAPQYKDGISQVGAVASWPIADRWSIVGAYYYDTNANKQADSMLGVQYSSCCYAIRVGYERKLNGWDNDKQHAVYDNAIGFNIELRGLSSNYGLGTQEMLRSNILPYQNTL

SEQ ID NO: 13138 - protein, 397 aa, Escherichia coli
MKRKVLAMLVPALLVAGAANAAEVYNKDGNKLDLYGKVAGLHYFSDDAGSDGDMSYARIGFKGETQIADQFTGYGQWEFNIGANGPESDKGNTATRLAFAGLGFGQNGTFDYGRNYGVVYDIEAWTDMLPEFGGDTYAGADNFLNGRANGVATYRNNGFFGQVDGLNFALQYQGNNEGSGGLWDQEGSGNGNNRKLSKENGDGFGMSTSYDFDFGLSLGAAYSNSDRTDNQRATGLGEQRSNKYAGGETAEAWTVGAKYDANNVYLAAMYAETRNMTAYGSGKDNNDIDRGGIANKTQNFEVVAQYQFDFGLRPSIAYLQSKGKDLGGWAHDGNGDPRYTNKDLVKYVEVGATYYFNKNMSTYVDYKINLLDNDDDFYEANGIATDDIVAVGLVYQF

SEQ ID NO: 13139 - protein, 106 aa, Escherichia coli
MKKVLALVVAAAMGLSSAAFAAETATTPAPTATTTKAAPAKTTHHKKQHKAAPAQKAQAAKKHHKNAKAEQKAPEQKSAGSEETRQETQPSATGKTCCTTRSVSYQ

SEQ ID NO: 13140 - protein, 747 aa, Escherichia coli; identical to SEQ ID NO: 2072

SEQ ID NO: 13141 - protein, 386 aa, Escherichia coli; identical to SEQ ID NO: 3094

SEQ ID NO: 13142 - protein, 367 aa, Escherichia coli; identical to SEQ ID NO: 4285

SEQ ID NO: 13143 - protein, 212 aa, Escherichia coli
MYKRKLLPLILWLLLSGAAAAQEYTTYSVLDKPVTETVQDNETVVEFFSFYCPPCYAFSQGYGIDGAIRESLPAGGKMVKYHADLLGSLGNELTRAWSVAMLSGLEEKVEPLLFEATMVSRTLKRPEDIRAVFVKAGMPAEEYELMLASQEVADMTEKQRRLFKEYGVTGTPSIYVNGRYHIQNSAFQADSVEAFRKSYVTAVMSLLNRKDK

SEQ ID NO: 13144 - protein, 368 aa, Escherichia coli; identical to SEQ ID NO: 2370

SEQ ID NO: 13145 - protein, 412 aa, Escherichia coli
MKIPTTTDIPQRYTWCLAGICYSSLAILPSFLSYAESYFNPAFLLENGTSVADLSRFERGNHQPAGVYRVDLWRNDEFIGSQDIVFESTTVNTGDKSGGLMPCFNQALLERIGLNSSAFPELAQQQNNKCINLLKAVPDATINFDFAAMRLNITIPQIALLSSAHGYIPPEEWDEGIPALLLNYNFTGNRGNGNDSYFFSELSGINIGPWRLRNNGSWNYFRGNGYHSEQWNNIGTWVQRAIIPLKSELVMGDGNTGSDIFDGVGFRGVRLYSSDNMYPDSQQGFAPTVRGIARTAAQLTIRQNGFIIYQSYVSPGAFEITDLHPTSSNGDLDVTIDERDGNQQNYTIPYSTVPILQREGRFKFDLTAGDFRSGNSQQSSPFFFRARHSAVYHRNLLPTAGRNYLQITPPFC

SEQ ID NO: 13146 - protein, 760 aa, Escherichia coli; identical to SEQ ID NO: 4114

SEQ ID NO: 13147 - protein, 663 aa, Escherichia coli
MFRLNPFVRVGLCLSAISCAWPVLAVDDDGETMVVTASSVEQNLKDAPASISVITQEDLQRKPVQNLKDVLKEVPGVQLTNEGDNRKGVSIRGLDSSYTLILVDGKRVNSRNAVFRHNDFDLNWIPVDSIERIEVVRGPMSSLYGSDALGGVVNIITKKIGQKWSGTVTVDTTIQEHRDRGDTYNGQFFTSGPLIDGVLGMKAYGSLAKREKDDPQNSTTTDTGETPRIEGFSSRDGNVEFAWTPNQNHDFTAGYGFDRQDRDSDSLDKNRLERQNYSVSHNGRWDYGTSELKYYGEKVENKNPGNSSPITSESNTVDGKYTLPLTAINQFLTVGGEWRHDKLSDAVNLTGGTSSKTSASQYALFVEDEWRIFEPLALTTGVRMDDHETYGEHWSPRAYLVYNATDTVTVKGGWATAFKAPSLLQLSPDWTSNSCRGACKIVGSPDLKPETSESWELGLYYMGEEGWLEGVESSVTVFRNDVKDRISISRTSDVNAAPGYQNFVGFETGANGRRIPVFSYYNVNKARIQGVETELKIPFNDEWKLSINYTYNDGRDVSNGENKPLSDLPFHTANGTLDWKPLALEDWSFYVSGHYTGQKRADSATAKTPGGYTIWNTGAAWKVTKDVKLRAGVLNLGDKDLSRDDYSYNEDGRRYFMAVDYRF

SEQ ID NO: 13148 - protein, 747 aa, Escherichia coli
MARSKTAQPKHSLRKIAVVVATAVSGMSVYAQAAVEPKEDTITVTAAPAPQESAWGPAATIAARQSATGTKTDTPIQKVPQSISVVTAEEMALHQPKSVKEALSYTPGVSVGTRGASNTYDHLIIRGFAAEGQSQNNYLNGLKLQGNFYNDAVIDPYMLERAEIMRGPVSVLYGKSSPGGLLNMVSKRPTTEPLKEVQFKAGTDSLFQTGFDFSDALDDDGVYSYRLTGLARSANAQQKGSEEQRYAIAPAFTWRPDDKTNFTFLSYFQNEPETGYYGWLPKEGTVEPLPNGKRLPTDFNEGAKNNTYSRNEKMVGYSFDHEFNDTFTVRQNLRFAENKTSQNSVYGYGVCSDPANAYSKQCAALAPADKGHYLARKYVVDDEKLQNFSVDTQLQSKFATGDIDHTLLTGVDFMRMRNDINAWFGYDDSVPLLDLYNPVNTDFDFNAKDPDNSGPYRILNKQKQTGVYVQDQAQWDKVLVTLGGRYDWADQESLNRVAGTTDKRDDKQFTWRGGVNYLFDNGVTPYFSYSESFEPSSQVGKDGNIFAPSKGKQYEVGVKYVPEDRPIVVTGAVYNLTKTNNLMADPEGSFFSVEGGEIRARGVEIEAKAALSASVNVVGSYTYTDAEYTTDTTYKGNTPAQVPKHMASLWADYTFFDGPLSGLTLGTGGRYTGSSYGDPANSFKVGSYTVVDALVRYDLARVGMAGSNVALHVNNLFDREYVASCFNTYGCFWGAERQVVATATFRF

SEQ ID NO: 13149 - protein, 878 aa, Escherichia coli
MSYLNLRLYQRNTQCLHIRKHRLAGFFVRLVVACAFAAQAPLSSAELYFNPRFLADDPQAVADLSRFENGQELPPGTYRVDIYLNNGYMATRDVTFNTGDSEQGIVACLTRAQLASMGLNTASVSGMNLLADDACVPLTSMIHDATAHLDVGQQRLNLTIPQAFMSNRARGYIPPELWDPGINAGLLNYNFSGNSVQNRIGGNSHYAYLNLQSGLNIGAWRLRDNTTWSYNSSDSSSGSKNKWQHINTWLERDIIPLRSRLTLGDGYTQGDIFDGINFRGAQLASDDNMLPDSQRGFAPVIHGIARGTAQVTIKQNGYDIYNSTVPPGPFTINDIYAAGNSGDLQVTIKEADGSTQIFTVPYSSVPLLQREGHTRYSITAGEYRSGNAQQEKPRFFQSTLLHGLPAGWTIYGGTQMADRYRAFNFGIGKNMGALGALSVDMTQANSTLPDDSQHDGQSVRFLYNKSLNESGTNIQLVGYRYSTSGYFNFADTTYSRMNGYNIETQDGVIQVKPKFTDYYNLAYNKRGKLQLTVTQQLGRTSTLYLSGSHQTYWGTNNVDEQFQAGLNTAFEDINWTLSYSLTKNAWQKGRDQMLALNVNIPFSHWLRSDSKSQWRHASASYSMSHDLNGRMTNLAGVYGTLLEDNNLSYSVQTGYAGGGDGNSGSTGYATLNYRGGYGNANIGYSHSDDIKQLYYGVSGGVLAHANGVTLGQPLNDTVVLVKAPGAKDAKVENQTGVRTDWRGYAVLPYATEYRENRVALDTNTLADNVDLDNAVANVVPTRGAIVRAEFKARVGIKLLMTLTHNNKPLPFGAMVTSESSQSSGIVADNGQVYLSGMPLAGKVQVKWGEEENAHCVANYQLPPESQQQLLTQLSAECR

SEQ ID NO: 13150 - protein, 484 aa, Escherichia coli
MPEHSFLRLRGLSWWIALAISGSPFNALADDTIQFDGRFLDLKGNTKIDLGRFSQKGYVEPGKYNLRVHVNNQPLPDDYDIYWYATENDPNKSYACLSPELVAQFGLKEDIAKNLQWIRDGQCLNTALLAGTEISGDLGQSALLVSVPQAYLEYTDSEWDPPSRWDDGIPGLIADYSINAQTRHENGGDDTNDISGNGTVGVNVGPWRLRADWQSDYQHTRSNDDGDTDDSGTQKNWEWSRYYAWRALPSLKAKLSLGEDYLNSDIFDGFSYIGGSISTDDQMLPPNLRGYAPDISGVAHTTAKVTVTQMGRVIYETQVPAGPFRIQDIGDSVSGTLHVRIEEQNGQVQEYDVSTASMPFLTRPGQVRYKVTMGRPQNWDHQVAGSFFSGGEASWGIANGWSLYGGALADENYQSAALGLGRDLALLGALAFDVTHSRVQLDDNSVYGNKTLDGNSYRVSYAKDFDELNSRVTFAGYRFSEKTT

SEQ ID NO: 13151 - protein, 826 aa, Escherichia coli; identical to SEQ ID NO: 3951

SEQ ID NO: 13152 - protein, 838 aa, Escherichia coli; identical to SEQ ID NO: 8135

SEQ ID NO: 13153 - protein, 241 aa, Escherichia coli; identical to SEQ ID NO: 2922

SEQ ID NO: 13154 - protein, 191 aa, Escherichia coli; identical to SEQ ID NO: 2727

SEQ ID NO: 13155 - protein, 678 aa, Escherichia coli
MVPSTFSRLKAARCLPVVLAALIFAGCGTHTPDQSTAYMQGTAQADSAFYLQQMQQSSDDTRINWQLLAIRALVKEDKTGQAVELFNQLPQELNDSQRREKTLLAAEIKLAQKDFAGAQNLLAKITPADLEQNQQARYWQAKIDASQGRPSIDLLRALIAQEPLLGAKEKQQNIDATWQTLSSMTQEQANTLVINADENILQGWLDLQRIWFDNRNDPDMMKAGIADWQKRYPNNPGAKMLPTQLVNVKAFKPASTNKIALLLPLNGQAAVFGRTIQQGFEAAKNIGTQPVAAQVAAAPAADVAEQPQPQTVDGVASPAQASVSDLTGEQPAAQPVPVSAPAATTAAVSAPANPSAELKIYDTSSQPLSQILSQVQQDGASIVVGPLLKNNVEELLKSNTPLNVLALNQPENIENRVNICYFALSPEDEARDAARHIRDQGKQAPLVLIPRSSLGDRVANAFAQEWQKLGGGTVLQQKFGSTSELRAGVNGGSGIALTGSPITPRATTDSGMTTNNPTLQTTPTDDQFTNNGGRVDAVYIVATPGEIAFIKPMIAMRNGSQSGATLYASSRSAQGTAGPDFRLEMEGLQYSEIPMLAGGNLPLMQQALSAVNNDYSLARMYAMGVDAWSLANHFSQMRQVQGFEINGNTGSLTANPDCVINRKLSWLQYQQGQVVPAS

SEQ ID NO: 13156 - protein, 200 aa, Escherichia coli; identical to SEQ ID NO: 1801

SEQ ID NO: 13157 - protein, 230 aa, Escherichia coli; identical to SEQ ID NO: 3019

SEQ ID NO: 13158 - protein, 362 aa, Escherichia coli; identical to SEQ ID NO: 2827

SEQ ID NO: 13159 - protein, 270 aa, Escherichia coli
MAGISYDWRDSVEAKKHEKDGSITHYDDNNQSAFNWQVMGKYHFANEDTLALSYYDRTRFPTLKERYTTSKPAYNQIAIVNPQLKPERARGVDLTWNGAFTHDWGFEVSVYYNRVSDAILSHNIDADTIQNQNSGTVDYSGLDAGIKGKISNILDVGLSYALIHADAKRKDIGKITDLPTQTMTAWMTLKPWEPLSVTLSEEARSSSYSNSNGSQKAAGFAVTHIRADYTLGHGFSVNASVNNLFDTQYAYSEGFIEEGRNFWAGIEYTF

SEQ ID NO: 13160 - protein, 368 aa, Escherichia coli
MNKTITALTIIMASFAANASVLPETPVPFKSGTGAIDNDTVYIGLGSAGTAWYKLDTQAKDKKWTALAAFPGGPRDQATSAFIDGNLYVFGGIGKNSEGLTQVFNDVHKYNPKTNSWVKLMSHAPMGMAGHVTFVHNGKAYVTGGVNQNIFNGYFEDLNEAGKDSTAIDKINAHYFDKKAEDYFFNKFLLSFDPSTQQWSYAGESPWYGTAGAAVVNKGDKTWLINGEAKPGLRTDAVFELDFTGNNLKWNKLDPVSSPDGVAGGFAGISNDSLIFAGGAGFKGSRENYQNGKNYAHEGLKKSYSADIHLWHNGKWDKSGELSQGRAYGVSLPWNNSLLIIGGETAGGKAVTDSVLISVKDNKVTVQN

SEQ ID NO: 13161 - protein, 826 aa, Escherichia coli; identical to SEQ ID NO: 7491

SEQ ID NO: 13162 - protein, 367 aa, Escherichia coli
MKVKVLSLLVPALLVAGAANAAEVYNKDGNKLDLYGKVDGLHYFSDDKSVDGDQTYMRLGFKGETQVTDQLTGYGQWEYQIQGNSAENENNSWTRVAFAGLKFQDVGSFDYGRNYGVVYDVTSWTDVLPEFGGDTYGSDNFMQQRGNGFATYRNTDFFGLVDGLNFAVQYQGKNGSVSGEGMTNNGRGALRQNGDGVGGSITYDYEGFGIGGAISSSKRTDDQNSPLYIGNGDRAETYTGGLKYDANNIYLAAQYTQTYNATRVGSLGWANKAQNFEAVAQYQFDFGLRPSVAYLQSKGKNLGVINGRNYDDEDILKYVDVGATYYFNKNMSTYVDYKINLLDDNRFTRDAGINTDDIVALGLVYQF

SEQ ID NO: 13163 - protein, 232 aa, Escherichia coli; identical to SEQ ID NO: 2087

SEQ ID NO: 13164 - protein, 774 aa, Escherichia coli; identical to SEQ ID NO: 7443

SEQ ID NO: 13165 - protein, 840 aa, Escherichia coli
MNNKNTFTGDKLSHAIKIALSGVVCSLLFVLPVHAVEFNVDMIDVEDRENIDISRFEKKGYITPGKYLVRVQINKNMLPQTLILEWVKADNESGSLLCLTKENLTSFGLNTEFIESLQTIAGSECLNLSQRQELTTRLDKATMILSLSVPQAWLKYQATNWTPPEFWDAGIAGFILDYNMYASQYSPHHGDSTQNVSSYGTLGFNLGAWRLRSDYQYNQNFADGRSVNHDSEFARTYLFRPIPSWSSKFTMGQYDLSSNLYDTFHFTGASLESDESMLPPDLQGYAPQITGIAQTNAKVTVAQNGRVLYQTTVAPGPFTISDLGQSFQGQLDVTVEEEDGRTSTFQVGSASIPYLTRKGQVRYKTSLGKPTSVGHNDINNPFFWTAEASWGWLNNVSLYGGGMFTADDYQAITTGIGFNLNQFGSLSFDVTGADASLQQQNSDNLRGYSYRFNYAKHFESTGSQITFAGYRFSDKDYVSMSEYLSSRNGDESIDNEKESYVISLNQYFETLELNSYLNVTRNTYWDSASNTNYSVSVSKNFDIGDFKGISASLAVSRIRWDDDEENQYYFSFSLPLQQNRNISYSMQRTGSSNTSQMISWYDSSDRNNIWNISASATDDNIRDGEPTLRGSYQHYSPWGRLNINGSVQPNQYNSVTAGWYGSLTATRHGVALHDYSYGDNARMMVDTDGISGVEINSNRTVTNGLGIAVIPSLSNYTTSMLRVNNNDLPEGVDVENSVIRTTLTQGAIGYAKLNATTGYQIVGVIRQENGRFPPLGVNVTDKATGKDVGLVAEDGFVYLSGIQENSILHLTWGDNTCEVTPPNQSNISESAIILPCKTVK

SEQ ID NO: 13166 - protein, 111 aa, Escherichia coli; identical to SEQ ID NO: 7471

SEQ ID NO: 13167 - protein, 658 aa, Escherichia coli; identical to SEQ ID NO: 7476

SEQ ID NO: 13168 - protein, 224 aa, Escherichia coli; identical to SEQ ID NO: 3115

SEQ ID NO: 13169 - protein, 231 aa, Escherichia coli; identical to SEQ ID NO: 3055

SEQ ID NO: 13170 - protein, 614 aa, Escherichia coli; identical to SEQ ID NO: 1884

SEQ ID NO: 13171 - protein, 696 aa, Escherichia coli
MQLSISAPQAWLKYKDANWTPPELWDHGIAGAFLDYNLYASHYAPHQGDNSQNISSYGQAGVNLGAWRLRTDYQYDQSFNNGKSQANNLDFPRIYLFRPIPAINAKLTIGQYDTESSIFDSFHFSGVSLKSDENMLPPDLRGYAPQITGVAQTNAKVTVSQNNRIIYQENVPPGPFAITNLFNTLQGQLDVKVEEEDGQVTQWQVASDSIPYLTRKGQIRYTTAMGKPTSVGGDSLQQPFFWTGEFSWGWLNNVSLYGGSVLTNRDYQSLAAGVGFNLNSLGSLSFDVTRSDAQLHNQDKETGYSYRANYSKRFESTGSQLTFAGYRFSDKNFVTMNEYINDTNHYTNYQNEKESYIVTFNQYLESLRLNTYVSLARNTYWDASSNVNYSLSLSRDFDIGPLKNVSTSLTFSRINWEEDNQDQLYLNISIPWGTSRTLSYGMQRNQDNKISHTASWYDSSDRNNSWSVSASGDNDEFKDMKASLRASYQHNTENGRLYLSGTSQRDSYYSLNASWNGSFTATRHGAAFHDYSGSADSRFMIDADGAEDIPLNNKRAVTNRYGIGVIPSVSSYITTSLSVDTRNLPENVDIENSVITTTLTEGAIGYAKLDTRKGYQIMGVIRLADGSHPPLGISVKDKTSHKELGLVADGGFVYLNGIQDDSKLTLRWGDKSCFIQPPNSSNLTTGTVILPCISQN

SEQ ID NO: 13172 - protein, 161 aa, Escherichia coli; identical to SEQ ID NO: 2582

SEQ ID NO: 13173 - protein, 226 aa, Escherichia coli; identical to SEQ ID NO: 3085

SEQ ID NO: 13174 - protein, 196 aa, Escherichia coli; identical to SEQ ID NO: 12076

SEQ ID NO: 13175 - protein, 331 aa, Escherichia coli; identical to SEQ ID NO: 2700

SEQ ID NO: 13176 - protein, 365 aa, Escherichia coli; identical to SEQ ID NO: 3878

SEQ ID NO: 13177 - protein, 208 aa, Escherichia coli; identical to SEQ ID NO: 1949

SEQ ID NO: 13178 - protein, 430 aa, Escherichia coli; identical to SEQ ID NO: 2617

SEQ ID NO: 13179 - protein, 191 aa, Escherichia coli
MKKSLLGLTFASLMFSAGSAVAADYKIDKEGQHAFVNFRIQHLGYSWLYGTFKDFDGTFTFDEKNPAADKVNVTINTTSVDTNHAERDKHLRSADFLNTAKYPLATFTSTSVKKDGDDLDITGDLTLNGVTKPVTLEAKLIGQGDDPWGGKRAGFEAEGKIKLKDFNIKTDLGPASQEVDLIISVEGVQQK

SEQ ID NO: 13180 - protein, 207 aa, Escherichia coli; identical to SEQ ID NO: 2211

SEQ ID NO: 13181 - protein, 204 aa, Escherichia coli; identical to SEQ ID NO: 7477

SEQ ID NO: 13182 - protein, 518 aa, Escherichia coli; identical to SEQ ID NO: 2349

SEQ ID NO: 13183 - protein, 518 aa, Escherichia coli
MKKLKINYLFIGILALLLAVALWPSIPWFGKADNRIAAIQARGELRVSTIHTPLTYNEINGKPFGLDYELAKQFADYLGVKLKVTVRQNISQLFDDLDNGNADLLAAGLVYNSERVKNYQPGPTYYSVSQQLVYKVGQYRPRTLGNLTAEQLTVAPGHVVVNDLQTLRETKFPELSWKVDDKKGSAELMEDVIEGKLDYTIADSVAISLFQRVHPELAVALDITDEQPVTWFSPLDGDNTLSAALLDFFNEMNEDGTLARIEEKYLGHGDDFDYVDTRTFLRAVDAVLPQLKPLFEKYAEEIDWRLLAAIAYQESHWDAQATSPTGVRGMMMLTKNTAQSLGITDRTDAEQSISGGVRYLQDMMSKVPESVPENERIWFALAAYNMGYAHMLDARALTAKTKGNPDSWADVKQRLPLLSQKPYYSKLTYGYARGHEAYAYVENIRKYQISLVGYLQEKEKQATEAAMQLAQDYPAVSPTELGKEKFPFLSFLSQSSSNYLTHSPSLLFSRKGSEEKQN

SEQ ID NO: 13184 - protein, 351 aa, Escherichia coli; identical to SEQ ID NO: 2872

SEQ ID NO: 13185 - protein, 161 aa, Escherichia coli; identical to SEQ ID NO: 2582

SEQ ID NO: 13186 - protein, 869 aa, Escherichia coli; identical to SEQ ID NO: 2903

SEQ ID NO: 13187 - protein, 161 aa, Escherichia coli; identical to SEQ ID NO: 2582

SEQ ID NO: 13188 - protein, 162 aa, Escherichia coli; identical to SEQ ID NO: 1967

SEQ ID NO: 13189 - protein, 359 aa, Escherichia coli
MKKYLALALIAPLLISCSTTKKGDTYNEAWVKDTNGFDILMGQFAHNIENIWGFKEVVIAGPKDYVKYTDQYQTRSHINFDDGTITIETIAGTEPAAHLRRAIIKTLLMGDDPSSVDLYSNVDDITISKEPFLYGQVVDNTGQPIRWEGRASNFADYLLKNRLQSRSNGLRIIYSVTINMVPNHLDKRAHKYLGMVRQASRKYGVDESLILAIMQTESSFNPYAVSRSDALGLMQVVQHTAGKDVFRSQGKSGTPSRSFLFDPASNIDTGTAYLAMLNNVYLGGIDNPTSRRYAVITAYNGGAGSVLRVFSNDKIQAANIINTMTPGDVYQTLTTRHPSAESRRYLYKVNTAQKSYRRR

SEQ ID NO: 13190 - protein, 274 aa, Escherichia coli; identical to SEQ ID NO: 3471

SEQ ID NO: 13191 - protein, 208 aa, Escherichia coli; identical to SEQ ID NO: 1949

SEQ ID NO: 13192 - protein, 478 aa, Escherichia coli
MTRIKINARRIFSLLIPFFFFTSVHAEQTAAPAKPVTVEAKNETFAPQHPDQYLSWKATSEQSERVDALAEDPRLVILWAGYPFSRDYNKPRGHAFAVTDVRETLRTGAPKNAEDGPLPMACWSCKSPDVARLIQKDGEDGYFHGKWARGGPEIVNNLGCADCHNTASPEFAKGKPELTLSRPYAARAMEAIGKPFEKAGRFDQQSMVCGQCHVEYYFDGKNKAVKFPWDDGMKVENMEQYYDKIAFSDWTNSLSKTPMLKAQHPEYETWTAGIHGKNNVTCIDCHMPKVQNAEGKLYTDHKIGNPFDNFAQTCANCHTQDKAALQKVVAERKQSINDLKIKVEDQLVHAHFEAKAALDAGATEAEMKPIQDDIRHAQWRWDLAIASHGIHMHAPEEGLRMLGTAMDKAADARTKLARLLATKGITHEIQIPDISTKEKAQKAIGLNMEQIKAEKQDFIKTVIPQWEEQARKNGLLSQ

SEQ ID NO: 13193 - protein, 118 aa, Escherichia coli [sequence omitted]

SEQ ID NO: 13194 - protein, 360 aa, Escherichia coli; identical to SEQ ID NO: 3354

SEQ ID NO: 13195 - protein, 232 aa, Escherichia coli
MQKNAAHTYAISSLLVLSLTGCAWIPSTPLVQGATSAQPVPGPTPVANGSIFQSAQPINYGYQPLFEDRRPRNIGDTLTIVLQENVSASKSSSANASRDGKSNFGFDTVPRYLQGLFGNARADVEASGGNTFNGKGGANASNTFSGTLTVTVDQVLVNGNLHVVGEKQIAINQGTEFIRFSGVVNPRTISGSNTVPSTQVADARIEYVGNGYINEAQNMGWLQRFFLNLSPM

SEQ ID NO: 13196 - protein, 512 aa, Escherichia coli; identical to SEQ ID NO: 2813

SEQ ID NO: 13197 - protein, 614 aa, Escherichia coli
MIKKASLLTACSVTAFSSWAQDTSPDTLVVTANRFEQPRSTVLAPTTVVTRQDIDRWQSTSVNDVLRRLPGVDITQNGGSGQLSSIFIRGTNASHVLVLIDGVRLNLAGGSGSADLSQFPIALVQRVEYIRGPRSAVYGSDAIGGVVNIITTRDEPGTEISAGWGSNSYQNYDVSTQQQLGDKTRVTLLGDYAHTHGYDVVAYGNTGTQAQPDNDGFLSKTLYGALEHNFTDAWSGFVRGYGYDNRTNYDAYYSPGSPLVDTRKLYSQSWDAGLRYNGELIKSQLITSYSHSKDYNYDPHYGRYDSSATLDEMKQYTVQWANNIIIGHGNVGAGVDWQKQSTAPGTAYVKDGYDQRNTGIYLTGLQQVGDFTFEGAARSDDNSQFGRHGTWQTSAGWEFIEGYRFIASYGTSYKAPNLGQLYGFYGNPNLDPEKSKQWEGAFEGLTAGVNWRISGYRNDVSDLIDYDDHTLKYYNEGKARIKGVEATANFDTGPLTHTVSYDYVDARNAITDTPLLRRAKQQVKYQLDWQLYDFDWGITYQYLGTRYDKDYSSYPYQTVKMGGVSLWDLAVAYPVTSHLTVRGKIANLFDKDYETVYGYQTAGREYTLSGSYTF

SEQ ID NO: 13198 - protein, 650 aa, Escherichia coli; identical to SEQ ID NO: 3057

SEQ ID NO: 13199 - protein, 232 aa, Escherichia coli; identical to SEQ ID NO: 2087

SEQ ID NO: 13200 - protein, 89 aa, Escherichia coli
MKKMFMAVLFALVSVNAMAADCAKGKIEFSKYNENDTFTVKVDGKEYWTSRWNLQPLLQSAQLTGMTVTIKSSTCESGSGFAEVQFNND

SEQ ID NO: 13201 - protein, 237 aa, Escherichia coli; identical to SEQ ID NO: 2816

SEQ ID NO: 13202 - protein, 517 aa, Escherichia coli; identical to SEQ ID NO: 2462

SEQ ID NO: 13203 - protein, 660 aa, Escherichia coli; identical to SEQ ID NO: 4092

SEQ ID NO: 13204 - protein, 539 aa, Escherichia coli; identical to SEQ ID NO: 3050

SEQ ID NO: 13205 - protein, 518 aa, Escherichia coli; identical to SEQ ID NO: 2351

SEQ ID NO: 13206 - protein, 227 aa, Escherichia coli; identical to SEQ ID NO: 3570

SEQ ID NO: 13207 - protein, 760 aa, Escherichia coli; identical to SEQ ID NO: 2078

SEQ ID NO: 13208 - protein, 715 aa, Escherichia coli; identical to SEQ ID NO: 3971

SEQ ID NO: 13209 - protein, 162 aa, Escherichia coli; identical to SEQ ID NO: 1969

SEQ ID NO: 13210 - protein, 365 aa, Escherichia coli
MKVKVLSLLVPALLVAGAANAAEVYNKDGNKLDLYGKVDGLHYFSDDKSVDGDQTYMRLGFKGETQVTDQLTGYGQWEYQIQGNSAENENNSWTRVAFAGLKFQDVGSFDYGRNYGVVYDVTSWTDVLPEFGGDTYGSDNFMQQRGNGFATYRNTDFFGLVDGLNFAVQYQGKNGSVSGEGMTNNGREALRQNGDGVGGSITYDYEGFGIGAAVSSSKRTDDQNSPLYIGNGDRAETYTGGLKYDANNIYLAAQYTQTYNATRVGSLGWANKAQNFEAVAQYSSTSSASVLAYLQSKGKPGCHHGRNYDDEDILKYVDVGATYYFNKNMSTYVDYKINLLDDNQFTRDAGINTDNIVALGLVYQF

SEQ ID NO: 13211 - protein, 678 aa, Escherichia coli; identical to SEQ ID NO: 2902

SEQ ID NO: 13212 - protein, 230 aa, Escherichia coli; identical to SEQ ID NO: 2995

SEQ ID NO: 13213 - protein, 193 aa, Escherichia coli; identical to SEQ ID NO: 2250

SEQ ID NO: 13214 - protein, 229 aa, Escherichia coli; identical to SEQ ID NO: 3589

SEQ ID NO: 13215 - protein, 828 aa, Escherichia coli; identical to SEQ ID NO: 2381

SEQ ID NO: 13216 - protein, 331 aa, Escherichia coli; identical to SEQ ID NO: 2705

SEQ ID NO: 13217 - protein, 246 aa, Escherichia coli
MKLPLITTGMICFLGICNFAQATVSPDRTRIIFNASNKSATVRLTNQSKIDPYLAQSWIEDASGKKTRDYISTLPPMERIEPDEQVQIRLMALASLNNLPQDRETLFYYNVREIPPRAKEQNVMQIAMQSRLKLFWRPKAIELKEGEMVPLQKVTITRTAVGLTLNNPTPYHITVGYIGTNGKTLMPGADSIMVAPFASATQHLNNLPSTFQLGFVADYGGLEMFKVVCNSVQSLCQSTPAKKGKI

SEQ ID NO: 13218 - protein, 113 aa, Escherichia coli; identical to SEQ ID NO: 7820

SEQ ID NO: 13219 - protein, 121 aa, Escherichia coli
MDAVLSVQGASAPVKKKSFFSKFTRLNMLRLARAVIPAAVLMMFFPQLVMAAGSSGQDLMASGNTTVKATFGKDSSVVKWVVLAEVLVGAVMYMMTKNVKFLAGFAIISVFIAVGMAVVGL

SEQ ID NO: 13220 - protein, 241 aa, Escherichia coli; identical to SEQ ID NO: 3582

SEQ ID NO: 13221 - protein, 747 aa, Escherichia coli; identical to SEQ ID NO: 2954

SEQ ID NO: 13222 - protein, 227 aa, Escherichia coli; identical to SEQ ID NO: 4009

SEQ ID NO: 13223 - protein, 121 aa, Escherichia coli; identical to SEQ ID NO: 6314

SEQ ID NO: 13224 - protein, 203 aa, Escherichia coli; identical to SEQ ID NO: 9490

SEQ ID NO: 13225 - protein, 89 aa, Escherichia coli; identical to SEQ ID NO: 2812

SEQ ID NO: 13226 - protein, 700 aa, Escherichia coli; identical to SEQ ID NO: 2926

SEQ ID NO: 13227 - protein, 412 aa, Escherichia coli; identical to SEQ ID NO: 2908

SEQ ID NO: 13228 - protein, 259 aa, Escherichia coli; identical to SEQ ID NO: 7163

SEQ ID NO: 13229 - protein, 263 aa, Escherichia coli
MSKRNAVTTFFTNRVTKALGMTLALMMTCQSAMASLAADQTRYIFRGDKDALTITVTNNDKERTFGGQAWVDNIVEKDTRPTFVVTPSFFKVKPNGQQTLRIIMASDHLPKDKESVYWLNLQDIPPALEGSGIAVALRTKLKLFYRPKALLEGRKGAEEGLSLQSRPDGRTMLVNTTPYIFAIGSLLDGNGKKIATDNETAQKLLMFMPGDEVQVKGNVVKVDSLNDWGSLQTWTINQKKAAAPSGQKASDSPVNPSDKADKK

SEQ ID NO: 13230 - protein, 242 aa, Escherichia coli
MTFVKGFPLILCASMCSHGAVQPDRTRIIFNSKDKATSLRVENRSDKLPYLAYSWIENEKGEKSDEFLVALPPIQRLEPKATSQVRIMKQAATAKLPTDRESLFYYNLREIPPVPEGSEGHAILQVAVQSRIKLFWRPAALRKKMGDHVEQQLQVSQQNNQLTLKTPTGYYLTIAYLGRDEKGVLPGFKSTMVAPFSSVTTSTGSYSGKQFYLGYMDDYGALRMNTLSCQRQCRLQPVENKK

SEQ ID NO: 13231 - protein, 366 aa, Escherichia coli; identical to SEQ ID NO: 3520

SEQ ID NO: 13232 - protein, 746 aa, Escherichia coli; identical to SEQ ID NO: 2949

SEQ ID NO: 13233 - protein, 252 aa, Escherichia coli; identical to SEQ ID NO: 3543

SEQ ID NO: 13234 - protein, 713 aa, Escherichia coli; identical to SEQ ID NO: 3523

SEQ ID NO: 13235 - protein, 230 aa, Escherichia coli; identical to SEQ ID NO: 2580

SEQ ID NO: 13236 - protein, 203 aa, Escherichia coli; identical to SEQ ID NO: 2201

SEQ ID NO: 13237 - protein, 233 aa, Escherichia coli; identical to SEQ ID NO: 3548

SEQ ID NO: 13238 - protein, 200 aa, Escherichia coli; identical to SEQ ID NO: 1789

SEQ ID NO: 13239 - protein, 696 aa, Escherichia coli; identical to SEQ ID NO: 4038

SEQ ID NO: 13240 - protein, 446 aa, Escherichia coli; identical to SEQ ID NO: 2180

SEQ ID NO: 13241 - protein, 231 aa, Escherichia coli; identical to SEQ ID NO: 2868

SEQ ID NO: 13242 - protein, 111 aa, Escherichia coli; identical to SEQ ID NO: 2911

SEQ ID NO: 13243 - protein, 998 aa, Escherichia coli; identical to SEQ ID NO: 3056

SEQ ID NO: 13244 - protein, 729 aa, Escherichia coli; identical to SEQ ID NO: 2948

SEQ ID NO: 13245 - protein, 261 aa, Escherichia coli
MRAVSVINAMLFYLVIINYANANGETFKESLDASDAKMGSRTFSIKIDKSRLIFNEDEFGEILTVYNTHEYPVLVQTYLLNEDKQTKNNKFISTPPIFKLDANQQSKIRIVPKAVTSDSGNKESLSWVCVKGIPPKTGDVWDEGYEKSPKKSNLMVNIAVSNCIKLIARPPSLPPIDSNSKLKVNWKISKGKLVAFNLTPYYINFNSLAVNEKVISNGEYVAPYSRKEITVNGGIRKGQNVSWEFITDLGGVSKVVDDVLE

SEQ ID NO: 13246 - protein, 478 aa, Escherichia coli; identical to SEQ ID NO: 2409

SEQ ID NO: 13247 - protein, 274 aa, Escherichia coli; identical to SEQ ID NO: 2304

SEQ ID NO: 13248 - protein, 203 aa, Escherichia coli; identical to SEQ ID NO: 2009

SEQ ID NO: 13249 - protein, 567 aa, Escherichia coli; identical to SEQ ID NO: 3518

SEQ ID NO: 13250 - protein, 243 aa, Escherichia coli
MLNKKNIVALCVASSMAFSMPVMADIVISGTRVIYKSDQKSVSVRLENKGNSHLLVQSWLDTGDDNAEPGSINVPFTATPPVSRIDAKRGQTIKLMYTGSTVLPSDKESVFWFNVLEVPPKPDASKVENQSLLQLAFRPRIKLFYRPAGLNGNPSEAPLALKWKWAEGKSGLSVYNPTPYYVSFNSAELIAGGKSNPLNVKMVAPKSEEIFTISGSGGKATSGKVHFSAINDFGGAIEGDVNL

SEQ ID NO: 13251 - protein, 243 aa, Escherichia coli
MLKMKPALKKTLMAVACLSAVPAAQAAISLDRTRVIFNGGEKSMTLNVANDNKQLPYLAQAWIENEKQEKITTGPIVVTPPVQRLEPGAKSMVRLASTPDISKLPQDRESLFYFNLREIPPKSDKANVLQIALQTKIKLFYRPKAIEAKPNAVWQDQLVLNKTSGGYRIENPTPYYVTVIGLGGSEKQAKEGEFEAVMLAPKSTQTVKSGTYSTPYLSYINDYGGRPVLQFSCSGDRCTAVKK

SEQ ID NO: 13252 - protein, 362 aa, Escherichia coli; identical to SEQ ID NO: 2998

SEQ ID NO: 13253 - protein, 224 aa, Escherichia coli; identical to SEQ ID NO: 3578

SEQ ID NO: 13254 - protein, 230 aa, Escherichia coli
MNKFAKGALVALLSLSFCGQSMAAFVLNGTRFIYEEGKKNLSFEVTNNANKTYGGQVWIDNTNQGNGVYMVPQPPFFKVGAKQKQIIRVMNTDSNLPKDRESLFWLNVQEVPPKPEVKDGEGSVLAIAMNTRVKLIYRPVSLKDGRKDAEKHLKLEQRGNETWLKNPTPYYIAIVNVKRDGKDIPLSDSVMKGVAQLKPFSDVSLGKNVSGKISVDAVNDWGGVQSYEIH

SEQ ID NO: 13255 - protein, 208 aa, Escherichia coli; identical to SEQ ID NO: 1949

SEQ ID NO: 13256 - protein, 236 aa, Escherichia coli; identical to SEQ ID NO: 3970

SEQ ID NO: 13257 - protein, 240 aa, Escherichia coli; identical to SEQ ID NO: 4020

SEQ ID NO: 13258 - protein, 627 aa, Escherichia coli; identical to SEQ ID NO: 3529

SEQ ID NO: 13259 - protein, 248 aa, Escherichia coli
MDFKNKCFSNRNINSLLKTQYIIRAGALFLLSAISINAIAAGGFGLGSTRLVYPSDSQQITLSVQNGGANTSYLIQSWIDDNQSSKKSQDFVVTPPLFMLPTRKEASLRIMFIGKSQLPTDRETLFWMNVKAIPPTDEKNTQKNTLQLALQNRIKLFYRPTNLPVQAGKARDMLRFKYEGKQLRVINPSPYYLTVTGIRVQGAKLPNAFVPPKSDVTVSSPVTLAGEITYQTINDYGATTARQKGTMQ

SEQ ID NO: 13260 - protein, 229 aa, Escherichia coli; identical to SEQ ID NO: 4047

SEQ ID NO: 13261 - protein, 213 aa, Escherichia coli; identical to SEQ ID NO: 2232

SEQ ID NO: 13262 - protein, 241 aa, Escherichia coli; identical to SEQ ID NO: 2887

SEQ ID NO: 13263 - protein, 249 aa, Escherichia coli; identical to SEQ ID NO: 4132

SEQ ID NO: 13264 - protein, 351 aa, Escherichia coli; identical to SEQ ID NO: 2872

SEQ ID NO: 13265 - protein, 859 aa, Escherichia coli; identical to SEQ ID NO: 4088

SEQ ID NO: 13266 - protein, 359 aa, Escherichia coli; identical to SEQ ID NO: 2332

SEQ ID NO: 13267 - protein, 122 aa, Escherichia coli; identical to SEQ ID NO: 2915

SEQ ID NO: 13268 - protein, 191 aa, Escherichia coli; identical to SEQ ID NO: 2727

SEQ ID NO: 13269 - protein, 243 aa, Escherichia coli
MTFMKGLPLLLLVASLCSHAALQPDRTRIVFNANDKATSLRVDNRSDKLPYLAYSWLENEKGEKSDDLLVALPPIQRLEPKATTQVRIVKQASTTKLPGDRETLFFYNMREIPPSPEKNSGHAVLQVAIQSRIKVFWRPSALRKKAGEKVELQLQVSQQGNQLNLKNPTGYYLTIAYLGRNEQGILPGFKTVMVAPFSTVNTNTGSYSGRQFYLGYMDDYGALRMTTLNCSGQCRLQAVEAKK

SEQ ID NO: 13270 - protein, 121 aa, Escherichia coli
MDVVLSVQGASAPVKKKSFFSKFTRLNMLRLARAVLPAAVLMMFFPQLAMAAGSSGQDLMASGNTTVKATFGKDSSVVKWVVLAEVLVGAVMYMMTKNVKFLAGFAIISVFIAVGMAVVGL

SEQ ID NO: 13271 - protein, 233 aa, Escherichia coli
MLRNITAIIVAFLVINVANASVILNNTRIVIDNAKMEKNVQFTNSGDNPVLVQIQAQENGENDCPPFIALPAVFRMLPGAGQTVKVSLTKRDIPKDRESLFYMDYIEVPSVKKDDQNRNKLYLIIRSRVKVIFRPEGLVFSVNKLHKQLSYEQFGNIVTIKNNSPFYANIRSFYLTGKTGNINYPGSVTVPPYGESRVQVKKVGETYAGLKMTALIINDFGADEKVDIAKKIT

SEQ ID NO: 13272 - protein, 839 aa, Escherichia coli; identical to SEQ ID NO: 7587

SEQ ID NO: 13273 - protein, 255 aa, Escherichia coli
MTIFAPQLDKLLQKYQKAGNKLGGSAENIGDNLGKTGSVLSTFQNFLGTALSSMKIDELIKKQKSGSNVSSSELAKASIELINQLVDTAASLNNNVNSFSQQLNKLGSVLSNTKHLNGVGNKLQNLPNLDNIGAGQRNATQACHMGGQDPSRRISQLLRLITQSEGLAEAARLTFSSKGAHSPCVEGVNTAKLQAGRSAELQRLSEELIFGHYQPMPARWGYIPKSNGKLRPLGIPAMRYCSAGHADGDGADMEE

SEQ ID NO: 13274 - protein, 845 aa, Escherichia coli
MSHYSLSGLKYRVIYLCCLSGLYMLSVPLWAAEDAEFDPSFLSRTPGSSVIDVRRFTHGNPVPSGNYYSDIYLNGEWKGNAELSFRDMSSLQEESVLCVTPELLSILDVSPEAVAREPDTGNDRCMPFSAVVPDAKIRFDLSLLRLNVEIPQAMLVSRPRGYISPSQWQTGVPAAFVSYDVNHWRYRTPDMENNQSYLGLRAGFNAGGWAFRHRGTESWSDSHAEGYRSIETNLQHDIAMFRAQLTLGDFTTTGELMDSNSLRGIRLASDDRMLPGSLRGYAPVVRGMAGSNARVTVRQNGNIIYETTVPAGPFSISDLYPSGYGGDLTVTVTESDGQTRSFIVPFASVAQLVRPGFSRWQVAAGRYRYGNRTFSDTVFQGTLQYGLTNDITLNTGMSTAPHYLSGLGGVAFNTPLGAVATDITLARTTFPGSDTTHRGYSLHAGYSARIPETSTNVTLAAYRYSSRDFWSLRDAILTRNRDVINDSSVRSATGYRPRNQLQLTVNQSLGEGWGNLYLTGATYHYWGHTGTFNEYQAGYNNVWKKMSYQIGFSQTRRSGDYHHDNRFFFSFSLPLSDMGRTLLSTTVNVSDKNSNSIQSSISGVSGDDNQLSYGVSLNTQENGPTGYAVNGSYRSPVATLQATAGNDSRHNRQISAGISGAIVAHPFGVTASNDLGDTFTVIHADGAGGAVINNAPGNRLDPWGNGIVPYVTPYEKNYISIDPTALAADVELSATEREIIPRANSTTMVTFTTKTGKAMLFDVKMPDGTPPPMAAEALTADGKSAGYIAQGGRLFVRDLDAEKGMLRIVWGSGQNDSCVIHYSASGENARGNAVPENHHVVCMRQ

SEQ ID NO: 13275 - protein, 254 aa, Escherichia coli; identical to SEQ ID NO: 7601

SEQ ID NO: 13276 - protein, 240 aa, Escherichia coli
MKHILLFIFTVLLSLPSYGSVVIMGTRVIYPAEQKSINVRLNNGDSTPSLIQAWLDTGDPSSPPDSVRVPFIITPPVFRVEPLSGQTMRIMYTGENLPADRESLFWLNVLDIPAKPSFAGKSEKAQGYNYLQFAVRSRIKFFFRPDGLPFSPDDAYKKVTWQLTGGDTLQASNPTPYFITFSTVSVGQGAQKVSSTQGGMAAPFSSVTFRLKQKVSPSGKVEWTVVNDNGGYQKGESVVK

SEQ ID NO: 13277 - protein, 871 aa, Escherichia coli; identical to SEQ ID NO: 3519

SEQ ID NO: 13278 - protein, 816 aa, Escherichia coli; identical to SEQ ID NO: 4456

SEQ ID NO: 13279 - protein, 207 aa, Escherichia coli
MPLPDFRLIRLLPLAALVLTACSVTTPKGPGKSPDSPQWRQHQQDVRNLNQYQTRGAFAYISDQQKVYARFFWQQTGQDRYRLLLTNPLGSTELELNAQPGNVQLVDNKGQRYTADDAEEMIGKLTGMPIPLNSLRQWILCLPGDATDYKLDDQYRLSEITYSQNGKNWKVVYGGYDTKTQPAMPANMELTDGGQRIKLKMDNWIVK

SEQ ID NO: 13280 - protein, 823 aa, Escherichia coli
MTPLASAIVALLLGIEAYAAEETFDTHFMIGGMKDQQVANIRLDDNQPLPGQYDIDIYVNKQWRGKYEIIVKDNPQETCLSIEVIKRLGINSDNFASGKQCLTFEQLVQGRSYTWDIGVFRLDFSVPQAWVEELESGYVPPENWERGINAFYTSYYVSQYYSDYKASGNSKSTYVRFNSGLNLLGWQLHSDASFSKTNNNPGVWKSNTLYLERGFAQLLGTLRVGDIYTSSDIFDSVRFSGVRLFRDMQMLPNSKQNFTPRVQGIAQSNALVTIEQNGFVVYQKEVPPGPFAITDLQLAGGGADLDVSVKEADGSVTTYLVPYAAVPNMLQPGVSKYDFAAGRSHIEGASKQSDFVQAGYQYGFNNLLTLYGGSMVANNYYAFTLGTGWNTRFGAISVDATKSHSKQDNGDVFDGQSYQIAYNKFVSQTSTRFGLAAWRYSSRDYRTFNDHVWANNKDNYRRDENDVYDIADYYQNDFGRKNSFSANMSQSLPEGWGSVSLSTLWRDYWGRSGSSKDYQLSYSNNWRRISYILAASQAYDENHHEEKRFNIFISIPFDWGDDVTTPRRQIYMSNSTTFDDQGFASNNTGLSGTVGSRDQFNYGVNLSYQNQGNETTAGANLTWNAPVATVNGSYSQSSTYRQAGASVSGGIVAWSGGVNLANRLSETFAVMNAPGIKDAYVNGQKYRTTNRNGVVVYDGMTPYRENHLMLDVSQSDSEAELRGNRKIAAPYRGAVVLVNFDTDQRKPWFIKALRADGQPLMFGYEVNDIHGHNIGVVGQGSQLFIRTNEVPPSVNVAIDKQQGLSCTITFGKEIDESRNYICQ

SEQ ID NO: 13281 - protein, 869 aa, Escherichia coli; identical to SEQ ID NO: 2903

SEQ ID NO: 13282 - protein, 861 aa, Escherichia coli; identical to SEQ ID NO: 11195

SEQ ID NO: 13283 - protein, 207 aa, Escherichia coli; identical to SEQ ID NO: 2211

SEQ ID NO: 13284 - protein, 851 aa, Escherichia coli; identical to SEQ ID NO: 6877

SEQ ID NO: 13285 - protein, 826 aa, Escherichia coli; identical to SEQ ID NO: 3563

SEQ ID NO: 13286 - protein, 856 aa, Escherichia coli; identical to SEQ ID NO: 6509

SEQ ID NO: 13287 - protein, 678 aa, Escherichia coli; identical to SEQ ID NO: 2902

SEQ ID NO: 13288 - protein, 659 aa, Escherichia coli
MFRLNPFVRVGLCLSAISCAWPVLAVDDDGETMVVTASSVEQNLKDAPASISVITQEDLQRKPVQNLKDVLKEVPGVQLTNEGDNRKGVSIRGLDSSYTLILVDGKRVNSRNAVFRHNDFDLNWIPVDSIERIEVVRGPMSSLYGSDALGGVVNIITKKIGQKWSGTVTVDTTIQEHRDRGDTYNGQFFTSGPLIDGVLGMKAYGSLAKREKDDPQNSTTTDTGETPRIEGFSSRDGNVEFAWTPNQNHDFTAGYGFDRQDRDSDSLDKNRLERQNYSVSHNGRWDYGTSELKYYGEKVENKNPGNSSPITSESNTVDGKYTLPLTAINQFLTVGGEWRHDKLSDAVNLTGGTSSKTSASQYALFVEDEWRIFEPLALTTGVRMDDHETYGEHWSPRAYLVYNATDTVTVKGGWATAFKAPSLLQLSPDWTSNSCRGACKIVGSPDLKPETSESWELGLYYMGEEGWLEGVESSVTVFRNDVKDRISISRTSDVNAAPGYQNFVGFTANGVPVFSYYNVNKARIQGVETELKIPFNDEWKLSLNYTYNDGRDVSNGENKPLSDLPFHTANGTLDWKPLALEDWSFYVSGHYTGQKRADSATAKTPGGYTIWNSGAAWQVTKDVKLRAGVLNLGDKDLSRDDYSYNEDGRRYFMAVDYRF

SEQ ID NO: 13289 - protein, 860 aa, Escherichia coli; identical to SEQ ID NO: 6118

SEQ ID NO: 13290 - protein, 89 aa, Escherichia coli; identical to SEQ ID NO: 2833

SEQ ID NO: 13291 - protein, 213 aa, Escherichia coli; identical to SEQ ID NO: 2232

SEQ ID NO: 13292 - protein, 700 aa, Escherichia coli; identical to SEQ ID NO: 2926

SEQ ID NO: 13293 - protein, 760 aa, Escherichia coli; identical to SEQ ID NO: 2078

SEQ ID NO: 13294 - protein, 122 aa, Escherichia coli; identical to SEQ ID NO: 2915

SEQ ID NO: 13295 - protein, 193 aa, Escherichia coli; identical to SEQ ID NO: 2250

SEQ ID NO: 13296 - protein, 241 aa, Escherichia coli; identical to SEQ ID NO: 3582

SEQ ID NO: 13297 - protein, 87 aa, Escherichia coli
EDVYGGFIALASVNAMAADCAKGKIEFSKYNEDDTFTVKVDGKEYWTSRWNLQPLLQSAQLTGMTVTIKSSTCESGSGFAEVQFNND

SEQ ID NO: 13298 - protein, 660 aa, Escherichia coli; identical to SEQ ID NO: 10401

SEQ ID NO: 13299 - protein, 512 aa, Escherichia coli; identical to SEQ ID NO: 2813

SEQ ID NO: 13300 - protein, 614 aa, Escherichia coli; identical to SEQ ID NO: 1883

SEQ ID NO: 13301 - protein, 232 aa, Escherichia coli; identical to SEQ ID NO: 2087

SEQ ID NO: 13302 - protein, 746 aa, Escherichia coli; identical to SEQ ID NO: 2949

SEQ ID NO: 13303 - protein, 517 aa, Escherichia coli; identical to SEQ ID NO: 2462

SEQ ID NO: 13304 - protein, 243 aa, Escherichia coli; identical to SEQ ID NO: 3561

SEQ ID NO: 13305 - protein, 366 aa, Escherichia coli; identical to SEQ ID NO: 3520

SEQ ID NO: 13306 - protein, 266 aa, Escherichia coli; identical to SEQ ID NO: 1892

SEQ ID NO: 13307 - protein, 224 aa, Escherichia coli; identical to SEQ ID NO: 3578

SEQ ID NO: 13308 - protein, 132 aa, Escherichia coli; identical to SEQ ID NO: 10348

SEQ ID NO: 13309 - protein, 241 aa, Escherichia coli; identical to SEQ ID NO: 2887

SEQ ID NO: 13310 - protein, 863 aa, Escherichia coli; identical to SEQ ID NO: 3946

SEQ ID NO: 13311 - protein, 539 aa, Escherichia coli; identical to SEQ ID NO: 3050

SEQ ID NO: 13312 - protein, 840 aa, Escherichia coli; identical to SEQ ID NO: 3591

SEQ ID NO: 13313 - protein, 567 aa, Escherichia coli; identical to SEQ ID NO: 3518

SEQ ID NO: 13314 - protein, 863 aa, Escherichia coli; identical to SEQ ID NO: 3959

SEQ ID NO: 13315 - protein, 650 aa, Escherichia coli; identical to SEQ ID NO: 3057

SEQ ID NO: 13316 - protein, 834 aa, Escherichia coli
MYKKLKLTTISELIKNIYCSLSVLIIGCASAYAVGFNKDLIEAEDRENVNLSQFETDGQLPVGKYSLNALINNKRTPIHLDLQWVLIDNQTAVCLTPEQLTLLGFTDEIIEVAQQNLIDGCYPIEKEKQITTYLDKGKMQLSISAPQAWLKYKDANWTPPELWDHGIAGAFLDYNLYASHYAPHQGDNSQNISSYGQVGVNLGAWRLRTDYQYDQSFNNGKSQANNLDFPRIYLFRPIPAINAKLTIGQYDTESSIFDSFHFSGVSLKSDENMLPPDLRGYAPQITGVAQTNAKVTVSQNNRIIYQENVPPGPFAITNLFNTLQGQLDVKVEEEDGQVTQWQVASDSIPYLTRKGQIRYTTAMGKPTSVGGDSLQQPFFWTGEFSWGWLNNVSLYGGSVLTNRDYQSLAAGVGFNLNSLGSLSFDVTRSDAQLHNQDKETGYSYRANYSKRFESTGSQLTFAGYRFSDKNFVTMNEYINDTNHYTNYQNEKESYIVTFNQYLESLRLNTYVSLARNTYWDASSNVNYSLSLSRDFDIGPLKNVSTSLTFSRINWEEDNQDQLYLNISIPWGTSRTLSYGMQRNQDNKISHTASWYDSSDRNNSWSVSASGDNDEFKDMKASLRASYQHNTENGRLYLSGTSQRDSYYSLNASWNGSFTATRHGAAFHDYSGSADSRFMIDADGAEDIPLNNKRAVTNRYGIGVIPSVSSYITTSLSVDTRNLPENVDIENSVITTTLTEGAIGYAKLDTRKGYQIMGVIRLADGSHPPLGISVKDKTSHKELGLVADGGFVYLNGIQDDSKLTLRWGDKSCFIQPPNSSNLTTGTVILPCISQN

SEQ ID NO: 13317 - protein, 641 aa, Escherichia coli; identical to SEQ ID NO: 10808

SEQ ID NO: 13318 - protein, 838 aa, Escherichia coli; identical to SEQ ID NO: 8135

SEQ ID NO: 13319 - protein, 662 aa, Escherichia coli; identical to SEQ ID NO: 8124

SEQ ID NO: 13320 - protein, 386 aa, Escherichia coli; identical to SEQ ID NO: 3094

SEQ ID NO: 13321 - protein, 351 aa, Escherichia coli; identical to SEQ ID NO: 2872

SEQ ID NO: 13322 - protein, 161 aa, Escherichia coli; identical to SEQ ID NO: 2582

SEQ ID NO: 13323 - protein, 539 aa, Escherichia coli; identical to SEQ ID NO: 3050

SEQ ID NO: 13324 - protein, 203 aa, Escherichia coli; identical to SEQ ID NO: 2009

SEQ ID NO: 13325 - protein, 274 aa, Escherichia coli; identical to SEQ ID NO: 3471

SEQ ID NO: 13326 - protein, 331 aa, Escherichia coli; identical to SEQ ID NO: 2700

SEQ ID NO: 13327 - protein, 236 aa, Escherichia coli; identical to SEQ ID NO: 3482

SEQ ID NO: 13328 - protein, 241 aa, Escherichia coli; identical to SEQ ID NO: 2922

SEQ ID NO: 13329 - protein, 512 aa, Escherichia coli; identical to SEQ ID NO: 2974

SEQ ID NO: 13330 - protein, 230 aa, Escherichia coli
MMTKIKLLMLIIFYLIISASAHAAGGIALGATRIIYPADAKQTAVWIRNSHTNERFLVNSWIENSSGVKEKSFIITPPLFVSEPKSENTLRIIYTGPPLAADRESLFWMNVKTIPSVDKNALNGRNVLQLVILSRMKLFLRPIQLQELPAEAPDTLKFSRSGNYINVHNPSPFYVTLVNLQVGSQKLGNAMAAPRVSSQIPLPSGVQGKLKFQTVNDYGSVTPVREVNLN

SEQ ID NO: 13331 - protein, 820 aa, Escherichia coli; identical to SEQ ID NO: 8131

SEQ ID NO: 13332 - protein, 365 aa, Escherichia coli; identical to SEQ ID NO: 3878

SEQ ID NO: 13333 - protein, 518 aa, Escherichia coli; identical to SEQ ID NO: 2349

SEQ ID NO: 13334 - protein, 659 aa, Escherichia coli; identical to SEQ ID NO: 8368

SEQ ID NO: 13335 - protein, 430 aa, Escherichia coli; identical to SEQ ID NO: 2617

SEQ ID NO: 13336 - protein, 119 aa, Escherichia coli; identical to SEQ ID NO: 2527

SEQ ID NO: 13337 - protein, 191 aa, Escherichia coli; identical to SEQ ID NO: 2727

SEQ ID NO: 13338 - protein, 432 aa, Escherichia coli; identical to SEQ ID NO: 2026

SEQ ID NO: 13339 - protein, 765 aa, Escherichia coli; identical to SEQ ID NO: 7498

SEQ ID NO: 13340 - protein, 696 aa, Escherichia coli; identical to SEQ ID NO: 4038

SEQ ID NO: 13341 - protein, 118 aa, Escherichia coli
MKKRGAFLGLLLVSASASVFAANNETSKSVTFPKCEGLDAAGIAASVKRDYQQNRVARWADDQKIVGQADPVAWVSLQDIQGKDDKWSVPLTVRGKSADIHYQVSVDCKAGMAEYQRR

SEQ ID NO: 13342 - protein, 266 aa, Escherichia coli; identical to SEQ ID NO: 1894

SEQ ID NO: 13343 - protein, 351 aa, Escherichia coli; identical to SEQ ID NO: 2872

SEQ ID NO: 13344 - protein, 203 aa, Escherichia coli; identical to SEQ ID NO: 2201

SEQ ID NO: 13345 - protein, 232 aa, Escherichia coli; identical to SEQ ID NO: 2087

SEQ ID NO: 13346 - protein, 213 aa, Escherichia coli; identical to SEQ ID NO: 2232

SEQ ID NO: 13347 - protein, 715 aa, Escherichia coli; identical to SEQ ID NO: 3971

SEQ ID NO: 13348 - protein, 368 aa, Escherichia coli; identical to SEQ ID NO: 2370

SEQ ID NO: 13349 - protein, 237 aa, Escherichia coli; identical to SEQ ID NO: 2816

SEQ ID NO: 13350 - protein, 196 aa, Escherichia coli
NFNSFKFKGGVLKTDENMYPYSEKTYSPIVKGSAKTQAKVEFFQDGVKIYSSIVPPGDFSISDYILSGSNSDLYVKVIEENGSIQEFIVPFTYPAVAVREGFTYYEIAMGETQQSNDYFTQLSFTRGLPYDFTVLTSLEYSGFYRSLEIGLGKMLGNLGALSLIYGQSNFSKSDNSKNKKWDIRYNKNIPDLNTYL

SEQ ID NO: 13351 - protein, 65 aa, Escherichia coli
DLMASGNTTVKATFGKDSSVVKWVVLAEVLVGAVMYMMTKNVKFLAGFAIISVFIAVGMAVVGLK

SEQ ID NO: 13352 - protein, 747 aa, Escherichia coli; identical to SEQ ID NO: 6089

SEQ ID NO: 13353 - protein, 200 aa, Escherichia coli; identical to SEQ ID NO: 1788

SEQ ID NO: 13354 - protein, 227 aa, Escherichia coli; identical to SEQ ID NO: 3570

SEQ ID NO: 13355 - protein, 230 aa, Escherichia coli; identical to SEQ ID NO: 2995

SEQ ID NO: 13356 - protein, 233 aa, Escherichia coli; identical to SEQ ID NO: 3548

SEQ ID NO: 13357 - protein, 469 aa, Escherichia coli
REHSATRIDDLMLKSKYAPDEVHTFNSLLQYYDGEADMPGGLSRADYDADRWQSTRPYDRFWGRRKLASLGYQFQPDSQHKFNIQGFYTQTLRSGYLEQGKRITLSPRNYWVCGIEPRYSQIFMIGPSAHEVGVGYRYLNESTHEMRYYTATSSGQLPSGSSPYDRDTRSGTEAHAWYLDDKIDIGNWTITPGMRFEHIESYQNNAITGTHEEVSYNAPLPALNVLYHLTDSWNLYANTEGSFGTVQYSQIGKAVQSGNVEPEKARTWELGTRYDDGALTAEMGLFLINFNNQYDSNQTNDTVTARGKTRHTGLETQARYDLGTLTPTLDNVSIYASYAYVNAEIREKGDTYGNLVPFSPKHKGTLGVDYKPGNWTFNLNSDFQSSQFADNANTVKESADGSTGRIPGFMLWGARVAYDFGPQMADLNLAFGVKNIFDQDYFIRSYDDNNKGIYAGQPRTLYMQGSLKF

SEQ ID NO: 13358 - protein, 229 aa, Escherichia coli; identical to SEQ ID NO: 3589

SEQ ID NO: 13359 - protein, 713 aa, Escherichia coli; identical to SEQ ID NO: 5996

SEQ ID NO: 13360 - protein, 412 aa, Escherichia coli; identical to SEQ ID NO: 2908

SEQ ID NO: 13361 - protein, 208 aa, Escherichia coli; identical to SEQ ID NO: 1949

SEQ ID NO: 13362 - protein, 50 aa, Escherichia coli
FGPQMADLNLAFGVKNIFDQDYFIRSYDDNNKGIYAGQPRTLYMQGSLKF

SEQ ID NO: 13363 - protein, 656 aa, Escherichia coli; identical to SEQ ID NO: 4901

SEQ ID NO: 13364 - protein, 203 aa, Escherichia coli; identical to SEQ ID NO: 2009

SEQ ID NO: 13365 - protein, 446 aa, Escherichia coli; identical to SEQ ID NO: 2180

SEQ ID NO: 13366 - protein, 359 aa, Escherichia coli; identical to SEQ ID NO: 2332

SEQ ID NO: 13367 - protein, 193 aa, Escherichia coli; identical to SEQ ID NO: 2246

SEQ ID NO: 13368 - protein, 162 aa, Escherichia coli; identical to SEQ ID NO: 1969

SEQ ID NO: 13369 - protein, 226 aa, Escherichia coli
MIFAVLSLLVAGELRAGVVVGGTRFIFPADRESISILLTNTSQESWLINSKINRPTRWAGGEASTVPAPLLAAPPLILLKPGTTGTLRLLRTESDILPVDRETLFELSIASVPSGKVENQSVKVAMRSVFKLFWRPEGLPGDPLEAYQQLRWTRNSQGVQLTNPTPYYINLIQLSVNGKALSNAGVVPPKSQRQTSWCQVIAPCHVAWRAINDYGGLSAKKEQNLP

SEQ ID NO: 13370 - protein, 998 aa, Escherichia coli; identical to SEQ ID NO: 2918

SEQ ID NO: 13371 - protein, 614 aa, Escherichia coli; identical to SEQ ID NO: 1884

SEQ ID NO: 13372 - protein, 518 aa, Escherichia coli; identical to SEQ ID NO: 2351

SEQ ID NO: 13373 - protein, 208 aa, Escherichia coli; identical to SEQ ID NO: 1949

SEQ ID NO: 13374 - protein, 760 aa, Escherichia coli; identical to SEQ ID NO: 3923

SEQ ID NO: 13375 - protein, 243 aa, Escherichia coli; identical to SEQ ID NO: 3483

SEQ ID NO: 13376 - protein, 729 aa, Escherichia coli; identical to SEQ ID NO: 2948

SEQ ID NO: 13377 - protein, 478 aa, Escherichia coli; identical to SEQ ID NO: 2404

SEQ ID NO: 13378 - protein, 111 aa, Escherichia coli; identical to SEQ ID NO: 7471

SEQ ID NO: 13379 - protein, 51 aa, Escherichia coli
MDLFTRYQVTKNFSLQGNVNNLFDKTYDTNVEGSIVYGAPRNFSITGTYQF

SEQ ID NO: 13380 - protein, 162 aa, Escherichia coli; identical to SEQ ID NO: 1973

SEQ ID NO: 13381 - protein, 367 aa, Escherichia coli; identical to SEQ ID NO: 4285

SEQ ID NO: 13382 - protein, 227 aa, Escherichia coli; identical to SEQ ID NO: 5868

SEQ ID NO: 13383 - protein, 747 aa, Escherichia coli; identical to SEQ ID NO: 2072

SEQ ID NO: 13384 - protein, 191 aa, Escherichia coli; identical to SEQ ID NO: 2727

SEQ ID NO: 13385 - protein, 672 aa, Escherichia coli
MLSTQFNRDNQYQAITKPSLLAGCIALALLPSAAFAAPATEETVIVEGSATAPDDGENDYSVTSTSAGTKMQMTQRDIPQSVTIVSQQRMEDQQLQTLGEVMENTLGISKSQADSDRALYYSRGFQIDNYMVDGIPTYFESRWNLGDALSDMALFERVEVVRGATGLMTGTGNPSAAINMVRKHATSREFKGDVSAEYGSWNKERYVADLQSPLTEDGKIRARIVGGYQNNDSWLDRYNSEKTFFSGIVDADLGDLTTLSAGYEYQRIDVNSPTWGGLPRWNTDGSSNSYDRARSTAPDWAYNDKEINKVFMTLKQRFADTWQATLNATHSEVEFDSKMMYVDAYVNKADGMLVGPYSNYGPGFDYVGGTGWNSGKRKVDALDLFADGSYELFGRQHNLMFGGSYSKQNNRYFSSWANIFPDEIGSFYNFNGNFPQTDWSPQSLAQDDTTHMKSLYAATRVTLADPLHLILGARYTNWRVDTLTYSMEKNHTTPYAGLVFDINDNWSTYASYTSIFQPQNDRDSSGKYLAPITGNNYELGLKSDWMNSRLTTTLAIFRIEQDNVAQSTGTPIPGSNGETAYKAVDGTVSKGVEFELNGAITDNWQLTFGATRYIAEDNEGNAVNPNLPRTTVKMFTSYRLPVMPELTVGGGVNWQNRVYTDTVTPYGTFRAE

SEQ ID NO: 13386 - protein, 230 aa, Escherichia coli; identical to SEQ ID NO: 3348

SEQ ID NO: 13387 - protein, 203 aa, Escherichia coli; identical to SEQ ID NO: 2201

SEQ ID NO: 13388 - protein, 231 aa, Escherichia coli; identical to SEQ ID NO: 2868

SEQ ID NO: 13389 - protein, 199 aa, Escherichia coli; identical to SEQ ID NO: 3906

SEQ ID NO: 13390 - protein, 249 aa, Escherichia coli; identical to SEQ ID NO: 3492

SEQ ID NO: 13391 - protein, 746 aa, Escherichia coli; identical to SEQ ID NO: 7482

SEQ ID NO: 13392 - protein, 700 aa, Escherichia coli; identical to SEQ ID NO: 8081

SEQ ID NO: 13393 - protein, 360 aa, Escherichia coli; identical to SEQ ID NO: 6933

SEQ ID NO: 13394 - protein, 828 aa, Escherichia coli; identical to SEQ ID NO: 2381

SEQ ID NO: 13395 - protein, 446 aa, Escherichia coli; identical to SEQ ID NO: 5547

SEQ ID NO: 13396 - protein, 784 aa, Escherichia coli
MKKRIPTLLATMIATALYSQQGLAADLASQCMLGVPSYDRPLVQGDTNDLPVTINADHAKGDYPDDAVFTGSVDIMQGNSRLQADEVQLHQKEAPGQPEPVRTVDALGNVHYDDNQVILKGPKGWANLNTKDTNVWEGDYQMVGRQGRGKADLMKQRGENRYTILDNGSFTSCLPGSDTWSVVGSEIIHDREEQVAEIWNARFKVGPVPIFYSPYLQLPVGDKRRSGFLIPNAKYTTTNYFEFYLPYYWNIAPNMDATITPHYMHRRGNIMWENEFRYLSQAGAGLMELDYLPSDKVYEDEHPNDDSSRRWLFYWNHSGVMDQVWRFNVDYTKVSDPSYFNDFDNKYGSSTDGYATQKFSVGYAVQNFNATVSTKQFQVFSEQNTSSYSAEPQLDVNYYQNDVGPFDTRIYGQAVHFVNTRDDMPEATRVHLEPTINLPLSNNWGSINTEAKLLATHYQQTNLDWYNSRNTTKLDESVNRVMPQFKVDGKMVFERDMEMLAPGYTQTLEPRAQYLYVPYRDQSDIYNYDSSLLQSDYSGLFRDRTYGGLDRIASANQVTTGVTSRIYDDAAVERFNISVGQIYYFTEPRTGDDNITWENDDKTGSLVWAGDTYWRISERWGLRGGIQYDTRLDNVATSNSSIEYRRDEDRLVQLNYRYASPEYIQATLPKYYSTAEQYKNGISQVGAVASWPIADRWSIVGAYYYDTNANKQADSMLGVQYSSCCYAIRVGYERKLNGWDNDKQHAVYDNAIGFNIELRGLSSNYGLGTQEMLRSNILPYQNTL

SEQ ID NO: 13397 - protein, 236 aa, Escherichia coli; identical to SEQ ID NO: 3970

SEQ ID NO: 13398 - protein, 92 aa, Escherichia coli
LRLARAVIPAAVLMMFFPQLAMAAQGQDLMASGNTTVKATFGKDSSVVKWVVLAEVLVGAVMYMMTKNVKFLAGFAIISVFIAVGMAVVGLK

SEQ ID NO: 13399 - protein, 192 aa, Escherichia coli; identical to SEQ ID NO: 3894

SEQ ID NO: 13400 - protein, 204 aa, Escherichia coli; identical to SEQ ID NO: 7477

SEQ ID NO: 13401 - protein, 462 aa, Escherichia coli
MAASPNSFTAAHTINGSQQVAVIESKGDKTTIESVTLKDISKYIKDDIGFSYQGYFRSGWGTGNHGSPQTYAAGSLGRFGNEMSGWFDLTLNQRVYNQDGKTANAVVTYDGNVGEQYNDAWFGDSANENIMQFSDIYLTTRGFLPFAPEADFWVGKHKLPQYEIQMLDWKTLTTDVAAGVGIENWALGVGLFDMSLSRDDVDVYSRDFSRTSQMNTNSVDVRYRNIPLWDDATLSLMAKYSAPNKTDQQQDNENDNSYFEMKDSWMLTSVLRQNLQRDTFNEFTLQVANNSYASSFASFSDASNTMAHGRYYYGDHTNGIAWRLISQGEMYLTDNIIMANALVYSHGEDVYSYESGAHSDFDSIRTVIRPAWIWNTWNQTGLELGWFKQQNKTQQGVTLNESAYKTTLWHALKVGESILGSRPEIRFYGTYINILDNELSNFKFNENSKDEFMAGIQAEVWW

SEQ ID NO: 13402 - protein, 237 aa, Escherichia coli
MVYDALGYTDMLPEFGGDTAYSDDFFVGRVGGVATYRNSNFFGLVDGLNFAVQYLGKNERDTARRSNGDGVGGSISYEYEGFGIVGAYGAADRTNQQEAQPLGNGKKAEQWATGLKYDANNIYLAANYGETRNATPITNKFTNTSGFANKTQDVLLVAQYQFDFGLRPSIAYTKSKAKDVEGIGDVDLVNYFEVGATYYFNKNMSTYVDYIINQIDSDNKLGVGSDDTVAVGIVYQF

SEQ ID NO: 13403 - protein, 252 aa, Escherichia coli; identical to SEQ ID NO: 3543

SEQ ID NO: 13404 - protein, 274 aa, Escherichia coli; identical to SEQ ID NO: 2304

SEQ ID NO: 13405 - protein, 224 aa, Escherichia coli; identical to SEQ ID NO: 3115

SEQ ID NO: 13406 - protein, 224 aa, Escherichia coli; identical to SEQ ID NO: 3604

SEQ ID NO: 13407 - protein, 331 aa, Escherichia coli; identical to SEQ ID NO: 2705

SEQ ID NO: 13408 - protein, 229 aa, Escherichia coli; identical to SEQ ID NO: 4047

SEQ ID NO: 13409 - protein, 362 aa, Escherichia coli; identical to SEQ ID NO: 2998

SEQ ID NO: 13410 - protein, 170 aa, Escherichia coli [sequence omitted]

SEQ ID NO: 13411 - protein, 161 aa, Escherichia coli; identical to SEQ ID NO: 2582

SEQ ID NO: 13412 - protein, 840 aa, Escherichia coli
MNKSVVSISAAMLVLLCQPVMGSEISPATPSDEDNYTFDPQLFRGSRFSQSSLAKLTTRESVAPGNYKMDIYTNNKLSGSWNVTFKEAADGRVLPCLTPEVADAIGLKTGEDKGEKDPVCTFAKELAPGITSQTQLSQLRLDLSVPQSQLISRPRGYVPPSELDTGASLAFMNYIANYYNVAYSGQNAHSQRSLWASFNGGINLGAWQYRQLSNITWDNDKGNQWNNIRSYLQRPLPAINSQLMMGQLITSGRFFSGLSYHGVSLATDERMLPDSMRGYAPTIRGVAATNARVSVMQNGHEIYQTTVAPGPFEINDLYPTSYSGDLDVTVTEANGAVSRFSVPFSAVPESMRPGTSRYNVEVGKTQDSGDDSMFGDFTWQHGLTNTLTFNSGSRIADGYQALMLGGVYGSSLGAFGANLTWSHARVPESEAQSGWMSQLTWSKTFQPTSTTVSLAGYRYSTSGYRDLADVLGERHAASNKQSWDSSQWRQQSRFDLTLSQSLANYGNLFVSGSTQNYRGGKSRDTQLQLGYSNSFSHGISMNLSVGRQRMGGYKDNSDDMQTVTSLSFSFPLGGNGPRVPSLSNSWTHSTDGSSQLQSSLTGMLDEAQTTNYSLNVMRDQQYKQTTLSGNMQKRFSQTTVGLNASKGQDYWQASGNVQGAMAVHGGGVTFGPYLGETFALVEAKGAEGAKVYNSSQLEINDSGYALVPAVTPYRYNRISLDPQGMDGDAELVDSEKQVAPVAGAAVKVVFRTRPGKALLIKSRMADGSELPMGADVLDENNTVVGIAGQGGQIYLRTEQTKGHLSVRWGEGANDSCQLPFDISGKDSNSPIIRLNETCQS

SEQ ID NO: 13413 - protein, 219 aa, Escherichia coli
MSLNFTVIVWLRLSIGGVYVLAFCRSSLKSKKYFIILLALAAIAGLGTHAAWSSNGLPRIDNKTLARLAQQHPVVVLFRHAERCDRSTNQCLSDKTGITVKGTQDARELGNAFSADIPDFDLYSSNTVRTIQSATWFSAGKKLTVDKRLLQCGNEIYSAIKDLQSKAPDKNIVIFTHNHCLTYIAKDKRDATFKPDYLDGLVMHVEKGKVYLDGEFVNH

SEQ ID NO: 13414 - protein, 871 aa, Escherichia coli
MHQVLLLPRFVRLTIALGLATAVFPVDAEYYFNPRFLSNDLAESVDLSAFTKGREAPPGTYRVDIYLNDEFMTSRDITFIADDNNADLIPCLSTDLLVSLGIKKSALLDNKEHSAEKHVPDNSACTPLQDRLVDASTEFDVGQQHLSLSVPQIYVGRMARGYVSPELWEEGINAGLLNYSFNGNSINNRSNHNAGKSNYAYLNLQSGINIGSWRLRDNSTWSYNSGSSNSSDSNKWQHINTSAERDIIPLRSRLTVGDSYTDGDIFDSVNFRGLKINSTEAMLPDSQHGFAPVIHGIARGTAQVSVKQNGYDVYQTTVPPGPFTIDDINSAANGGDLQVTIKEADGSIQTLYVPYSSVPVLQRAGYTRYALAMGEYRSGNNLQSSPRFIQGSLMHGLEGNWTPYGGMQIAEDYQAFNLGIGKDLGLFGAFSFDITQANTTLADGTRHSGQSVKSVYSKSFYQTGTNIQVAGYRYSTQGFYNLSDSAYSRMSGYTVKPPTGDSNEQTQFIDYFNLFYSKRGQEQISISQQLGNYGTTFFSASRQSYWNTSRSDQQISFGLNVPFGDITTSLNYSYSNNIWQNDRDHLLAFTLNVPFSHWMRTDSQSAFRNSNASYSMSNDLKGGMTNLSGVYGTLLPDNNLNYSVQVGNTHGGNTSSGTSGYSSLNYRGAYGNTNVGYSRSGDSSQIYYGMSGGIIAHADGITFGQPLGDTMVLVKAPGADNVKIENQTGIHTDWRGYAILPFATEYRENRVALNANSLADNVELDETVVTVIPTHGAIARATFNAQIGGKVLMTLKYGNKSVPFGAIVTHGENKNGSIVAENGQVYLTGLPQSGKLQVSWGNDKNSNCIVDYKLPEVSPGTLLNQQTAICR

SEQ ID NO: 13415 - protein, 878 aa, Escherichia coli; identical to SEQ ID NO: 3957

SEQ ID NO: 13416 - protein, 207 aa, Escherichia coli; identical to SEQ ID NO: 2211

SEQ ID NO: 13417 - protein, 826 aa, Escherichia coli; identical to SEQ ID NO: 3256

SEQ ID NO: 13418 - protein, 207 aa, Escherichia coli
MPLPDFRLIRLLPLAALVLTACSVTTPKGPGKSPDSPQWRQHQQDVRNLNQYQTRGAFAYISDQQKVYARFFWQQTGQDRYRLLLTNPLGSTELELNAQPGNVQLVDNKGQRYTADDAEEMIGKLTGMPIPLNSLRQWILGLPGDATDYKLDDQYRLSEITYSQNGKNWKVVYGSYDTKTQPAMPANIELTDGGQRIKLKMDNWIVK

SEQ ID NO: 13419 - protein, 816 aa, Escherichia coli; identical to SEQ ID NO: 4401

SEQ ID NO: 13420 - protein, 816 aa, Escherichia coli; identical to SEQ ID NO: 4689

SEQ ID NO: 13421 - protein, 826 aa, Escherichia coli
MLRMTPLASAIVALLLGIEAYAAEETFDTHFMIGGMKDQQVANIRLDDNQPLPGQYDIDIYVNKQWRGKYEIIVKDNPQETCLSIEVIKRLGINSDNFASGKQCLTFEQLVQGGSYTWDIGVFRLDFSVPQAWVEELESGYVPPENWERGINAFYTSYYVSQYYSDYKASGNSKSTYVRFNSGLNLLGWQLHSDASFSKTNNNPGVWKSNTLYLERGFAQLLGTLRVGDMYTSSDIFDSVRFRGVRLFRDMQMLPNSKQNFTPRVQGIAQSNALVTIEQNGFVVYQKEVPPGPFAITDLQLAGGGADLDVSVKEADGSVTTYLVPYAAVPNMLQPGVSKYDLAAGRSHIEGASKQSDFVQAGYQYGFNNLLTLYGGSMVANNYYAFTLGAGWNTRIGAISVDATKSHSKQDNGDVFDGQSYQIAYNKFVSQTSTRFGLAAWRYSSRDYRTFNDHVWANNKDNYRRDENDVYDIADYYQNDFGRKNSFSANMSQSLPEGWGSVSLSTLWRDYWGRSGSSKDYQLSYSNNLRRISYTLAASQAYDENHHEEKRFNIFISIPFDWGDDVSTPRRQIYMSNSTTFDDQGFASNNTGLSGTVGSRDQFNYGVNLSHQHQGNETTAGANLTWNAPVATVNGSYSQSSTYRQAGASVSGGIVAWSGGVNLANRLSETFAVMNAPGIKDAYVNGQKYRTTNRNGVVIYDGMTPYRENHLMLDVSQSDSEAELRGNRKIAAPYRGAVVLVNFDTDQRKPWFIKALRADGQSLTFGYEVNDIHGHNIGVVGQGSQLFIRTNEVPSSVNVAIDKQQGLSCTITFGKEIDESRNYICQ

SEQ ID NO: 13422 - protein, 866 aa, Escherichia coli; identical to SEQ ID NO: 3025

SEQ ID NO: 13423 - protein, 161 aa, Escherichia coli; identical to SEQ ID NO: 2582

SEQ ID NO: 13424 - protein, 360 aa, Escherichia coli; identical to SEQ ID NO: 3354

SEQ ID NO: 13425 - protein, 869 aa, Escherichia coli
MKIPTTTDIPQRYTWCLAGICYSSLAILPSFLSYAESYFNPAFLLENGTSVADLSRFERGNHQPAGVYRVDLWRNDEFIGSQDIVFESTTENTGDKSGGLMPCFNQVLLERIGLNSSAFPELAQQQNNKCINLLKAVPDATINFDFAAMRLNITIPQIALLSSAHGYIPPEEWDEGIPALLLNYNFTGNRGNGNDSYFFSELSGINIGPWRLRNNGSWNYFRGNGYHSEQWNNIGTWVQRAIIPLKSELVMGDGNTGSDIFDGVGFRGVRLYSSDNMYPDSQQGFAPTVRGIARTAAQLTIRQNGFIIYQSYVSPGAFEITDLHPTSSNGDLDVTIDERDGNQQNYTIPYSTVPILQREGRFKFDLTAGDFRSGNSQQSSPFFFQGTALGGLPQEFTAYGGTQLSANYTAFLLGLGRNLGNWGAVSLDVTHARSQLADDSRHEGDSIRFLYAKSMNTFGTNFQLMGYRYSTQGFYTLDDVAYRRMEGYEYDYDYDGEHRDEPIIVNYHNLRFSRKDRLQLNISQSLNDFGSLYISGTHQKYWNTSDSDTWYQVGYTSSWVGISYSLSFSWNESVGIPDNERIVGLNVSVPFNVLTKRRYTRENALDRAYASFNANRNSNGQNSWLAGVGGTLLEGHNLSYHVSQGDTSNNGYTGSATANWQAAYGTLGIGYNYDRDQHDVNWQLSGGVVGHENGITLSQPLGDTNVLIKAPGAGGVRIENQTGILTDWRGYAVMPYATVYRYNRIALDTNTMGNSIDVEKNISSVVPTQGALVRANFDTRIGVRALITVTQGGKPVPFGSLVRENSTGITSMVGDDGQVYLSGAPLSGELLVQWGDGANSRCIAHYVLPKQSLQQAVTVISAVCTHPGS

SEQ ID NO: 13426 - protein, 430 aa, Escherichia coli; identical to SEQ ID NO: 2617

SEQ ID NO: 13427 - protein, 204 aa, Escherichia coli; identical to SEQ ID NO: 2957

SEQ ID NO: 13428 - protein, 356 aa, Escherichia coli
MMKRNILAVIVPALLVAGTANAAEIYNKDGNKVDLYGKAVGLHYFSKGNGENSYGGNGDMTYARLGFKGETQINSDLTGYGQWEYNFQGNNSEGTDAQTGNKTRLAFAGLKYADVGSFDYGRNYGVVYDALGYTDMLPEFGGDTAYSDDFFVGRVGGVATYRNSNFFGLVDGLNFAVQYLGKNERDTARRSNGDGVGGSISYEYEGFGIVGAYGAADRTNLQEAQPLGKGKKAEQWATGLKYDANNIYLAANYGETRNATPIDGGFANKTQDVLLVAQYQFDFGLRPSIAYTKSKAKDVEGIGDVDLVNYFEVGATYYFNKNMSTYVDYIINQIDSDNKLGVGSDDTVAVGIVYQF

SEQ ID NO: 13429 - protein, 233 aa, Escherichia coli
MKTCITKGIVTVSLTAILFSCSSAWAAGKGGIGLAATRLVYSEGEEQISLGVRNTSPDVPYLIQSWVMTPDNKKSADFIITPPLFVLNPANENLLRIMYIGAPLAKDRETLFFTSVRAVPSTTKREEGNTLKIATQSVIKLFWRPKGLAYPLGEAPAKLRCTSSADMVTVSNPTPYFITLTDLKIGGKVVKNQMISPFDKYQFSLPKGAKNSSVTYRTINDYGAETPQLNCKS

SEQ ID NO: 13430 - protein, 240 aa, Escherichia coli
MDMEKIRMNIFAYLLVLVFSMSMSSSAFASVVMTGTRIIFPGDAKEKTIQLRNTSDQPYIINIHVEDERGSDKNVPFMPTPQTFRMEAAAGQALRLLYTGNNLPQDRESVFWFSFSQLPYLNKNDKSQNQLILALTNRVKIFYRPSSIVGKSSDAPKNLTYQVKQNRIEVTNPTGYYVVIRAAELLSNGKKVPLANSVMIAPQSTTEWTLRSGISVARGALIHLVTVNDYGVNVTSEHAL

SEQ ID NO: 13431 - protein, 191 aa, Escherichia coli; identical to SEQ ID NO: 2727

SEQ ID NO: 13432 - protein, 883 aa, Escherichia coli
MDTCMPDHSLFRLRVLPCCIALAMSGSYVNAWAEDEIQFDSRFLELKDDTKIDLKRFSSQGYVEPGKYNLQVQLNKQPLAEEYDIYWYASENDASKTYACLTPELVSQFGLKEDVAKNLQWIHDGKCLKPGQLEGIDIKADLSQSALVISLPQAYLEYTDINWDPPSRWDDGISGLIADYSITAQTRHEENGGDDSNEISGNGTVGVNLGAWRLRADWQTDYLHSKSNDDDVINGDDTQKNWEWSRYYAWRALPSLKAKLALGEDYLNSDIFDGFNYVGGSISTDDQMLPPNLRGYAPDISGVAHTTAKVTVSQMGRVIYETQVPAGPFRIQDLGDSVSGTLHIRIEEQNGQVQEYDINTASMPFLTRPGQVRYKLMMGRPQEWGHHVEGGFFSGGEASWGIANGWSLYGGALADEHYQSAALGVGRDLSVFGAVAFDITHSHTRLDKETAYGKGSLDGNSFRVSYSKDFDELNSRVTFAGYRFSEENFMTMSEYLDASDSEMVRTGNDKEMYTATYNQNFRDAGVSVYLNYTRHTYWDRDEQTNYNVMLSHYFNLGSIRNMSISMTGYRYEYDNQADKGVYISLSMPWGDSSTISYNGNYGSGSDSSQVGYFSRVDDATHYQLNVGTSDKHSSVDGYYSHDGSLAQVDLSANYHEGQYTSAGISLQGGATPTAQGGALHRTQNMGGTRLLIDADGVAGVPVEGNGAAVYTNMFGKAVVADVNNYYRNQAYIDLNNLPENAEATQSVVQATLTEGAIGYRKFSVISGQKAMAVLRLQDGSHPPFGAEVKNDNAQNVGLVDDDGNVYLAGVKPGEHMTVSWGGVAHCDIHLPDPLPADLFNGLLLPCQQTGAISPSMPHEIKPVIQEQTQQVMPTEAPVSVSAN

SEQ ID NO: 13433 - protein, 381 aa, Escherichia coli
MCHLNCSRQETVTMNKTITALAIMMASFAANASVLPETPVPFKSGTGAIDNDTVYIGLGSAGTAWYKLDTQAKDKKWTALAAFPGGPRDQATSAFIDGNLYVFGGIGKNSEGLTQVFNDVHKYNPKTNSWVKLMSHAPMGMAGHVTFVHNGKAYVTGGVNQNIFNGYFEDLNEAGKDSTAIDKINAHYFDKKAEDYFFNKFLLSFDPSTQQWSYAGESPWYGTAGAAVVNKGDKTWLINGEAKPGLRTDAVFELDFTGNNLKWNKLAPVSSPDGVAGGFAGISNDSLIFAGGAGFKGSRENYQNGKNYAHEGLKKSYSTDIHLWHNGKWDKSGELSQGRAYGVSLPWNNSLLIIGGETAGGKAVTDSVLITVKDNKVTVQN

SEQ ID NO: 13434 - protein, 266 aa, Escherichia coli; identical to SEQ ID NO: 8481

SEQ ID NO: 13435 - protein, 857 aa, Escherichia coli
MSRKTVSRTFSSFSISVVAVAVASTFSAHAGKFNPKFLEDVQGVGQHVDLTMFEKGQEQQLPGIYRVSVYVNEQRMETRTLEFKEATEAQRKAMGESLVPCLSRTQLAEMGVRVESFPALNLVPAEACVPFDEIIPQASSHFDFSEQKLVLSFPQAAMHQVARGTVPESLWDEGIPALLLDYSFSGSNSEYDSTGSSSSYVDDNGTVHHDDGKDTLKSDSYYLNLRSGLNLGAWRLRNYSTWSHSGGKAQWDNIGTSLSRAIIPFKAQLTMGDTATAGDIFDSVQMRGAMLASDEEMLPDSQRGFAPIVRGIAKSNAEVSIEQNGYVIYRTYVQPGAFEINDLYPTANSGDLTVIIKEADGSEQRFIQPFSSVPIFQREGHLKYSFAAGEYQAGNYDSASPRFGQLDLIYGLPWGMTAYGGVLISNNYNAFALGIGKNFGYIGAISIDVTQAKSELNNDRDSQGQSYRFLYSKSFESGTDFRLAGYRYSTSGFYTFQEATDVRSDADSDYNRYHKRSEIQGNLTQQLGAYGSVYLNLTQQDYWNDAGKQNTVSAGYNGRIGKVSYSIAYSWNKSPEWDESDRLWSFNISVPLGRAWSNYRVTTDQDGRTNQQVGVSGTLLEDRNLSYSVQEGYASNGVGNSGNANVGYQGGSGNVNVGYSYGKDYRQLNYSVRGGVIVHSEGVTLSQPLGETMTLISVPGARNARVVNNGGVQVDWMGNAIVPYAMPYRENEISLRSDSLGDDVDVENAFQKVVPTRGAIVRARFDTRVGYRVLMTLLRSAGSPVPFGATATLITDKQNEVSSIVGEEGQLYISGMPEEGRVLIKWGNDASQQCVAPYKLSLELKQGGIVPVSANCQ

SEQ ID NO: 13436 - protein, 232 aa, Escherichia coli
MDRMMKSKFVALALSLFLSQSVLAGGVGLSATRVIYDGSKKEASLTVQNKSKTEEFLIQSWVDDAAGSKKTPFIITPPLFRLDPGKNNILRIVNTTPGLPQDRESVYWVNVKAIPSKSDDSENKNVLQIAVRTRIKLFYRPAGLQGDVKTAPNELRFTRSGNQIRVDNPTVFNITFNQFFANDKEIEKAGMVPAKGSLNITLPAGAGSVSKIKYNTINDFGSSAEMMTKNVD

SEQ ID NO: 13437 - protein, 774 aa, Escherichia coli
MTPLRVFRKTTPLVNAIRLSLLPLAGLSFSAFAAQVNIAPGSLDKALNQYAAHSGFTLSVDASLTRGKQSNGLHGDYDVESGLQQLLDGSGLQVKPLGNNSWTLEPAPAPKEDALTVVGDWLGDARENDVFEHAGARDVIRREDFAKTGATTMREVLNRIPGVSAPENNGTGSHDLAMNFGIRGLNPRLASRSTVLMDGIPVPFAPYGQPQLSLAPVSLGNMDAIDVVHGGGAVRYGPQSVGGVVNFVTRAIPQDFGIEAGVEGQLSPTSSQNNPKETHNLMVGGTADNGFGTALLYSGTRGSDWREHSATRIDDLMLKSKYAPDEVHTFNSLLQYYDGEADMPGGLSRADYDADRWQSTRPYDRFWGRRKLASLGYQFQPDSQHKFNIQGFYTQTLRSGYLEQGKRITLSPRNYWVRGIEPRYSQIFMIGPSAHEVGVGYRYLNESTHEMRYYTATSSGQLPSGSSPYDRDTRSGTEAHAWYLDDKIDIGNWTITPGMRFEHIESYQNNTITGTHEEVSYNAPLPALNVLYHLTDSWNLYANTEGSFGTVQYSQIGKAVQSGNVEPEKARTWELGTRYDDGALTAEMGLFLINFNNQYDSNQTNDTVTARGKTRHTGLETQARYDLGTLTPTLDNVSIYASYAYVNAEIREKGDTYGNLVPFSPKHKGTLGVDYKPGNWTFNLNSDFQSSQFADNANTVKESADGSTGRIPGFMLWGARVAYDFGPQMADLNLAFGVKNIFDQDYFIRSYNDNNKGIYAGQPRTLYMQGSLKF

SEQ ID NO: 13438 - protein, 237 aa, Escherichia coli
MRKITQAISAVCLLFALNSSAVALASSPSPLNLGTNVARLAEQAPIHWVSVAQIENSLAGRPPMAVGFDIDDTVLFSSPGFWRGKKTFSPESEDYLKNPVFWEKMNNGWDEFSIPKEVARQLIDMHVRRGDAIFFVTGRSPTKTETVSKTLADNFHIPATNMNPVIFAGDKPGQNTKSQWLQDKNIRIFYGDSDNDITAARDVGARGIRILRASNSTYKPLPQAGAFGEEVIVNSEY

SEQ ID NO: 13439 - protein, 729 aa, Escherichia coli; identical to SEQ ID NO: 2948

SEQ ID NO: 13440 - protein, 213 aa, Escherichia coli; identical to SEQ ID NO: 2232

SEQ ID NO: 13441 - protein, 551 aa, Escherichia coli; identical to SEQ ID NO: 2446

SEQ ID NO: 13442 - protein, 700 aa, Escherichia coli; identical to SEQ ID NO: 4860

SEQ ID NO: 13443 - protein, 122 aa, Escherichia coli
MEKNMKKRGAFLGLLLVSACASVFAANNGTSKSVTFPKCEGLDAAGIAASVKRDYQQNRVARWADDQKIVGQADPVAWVSLQDIQGKDDKWSVPLTVRGKSADIHYQVSVDCKAGMAEYQRR

SEQ ID NO: 13444 - protein, 366 aa, Escherichia coli; identical to SEQ ID NO: 3901

SEQ ID NO: 13445 - protein, 239 aa, Escherichia coli
MHQMQTTRTPYSISFMATVLLLLLFACHSTVANAAVALGATRVNYPANQKQVLLPVTNNDPASVYLIQSWIENAGDQKDTQFVITPPLFSMQGKKENTLRIINATNHQLPGDRESLFWVNVKAIPAMEKDQKNENTLQLAIISRIKMFYRPTNLAMAPEEAPAMLRFRRSGSKLTLINPTPYFITVTNMKAGNSNLPNTMVPPKGEVSVDIPHAATGDISFQTINDYGALTPRIKATMQ

SEQ ID NO: 13446 - protein, 828 aa, Escherichia coli; identical to SEQ ID NO: 2381

SEQ ID NO: 13447 - protein, 243 aa, Escherichia coli
MLMFPLVKKTVSALFVSTLLASAPAFADIIISGTRIIYNADKKDVNVRLENKGNRPLLIQNWLDTGDDNADPSQIKVPFTATPPVSRVEPKRGQTVKVMYTGATALPKDRESVYWFNVLEVPPKPKDAEADKNLLQLAFRTRIKLFYRPSGLQGEPAEAPAKITWKLNNAQLQANNPTPYYVSFNEVKLESGGKTYNVNSSMVAPFSQASFGVTGLPGSVSSGKVVFKAINDFGGNIDGSATF

SEQ ID NO: 13448 - protein, 162 aa, Escherichia coli; identical to SEQ ID NO: 1965

SEQ ID NO: 13449 - protein, 498 aa, Escherichia coli; identical to SEQ ID NO: 9872

SEQ ID NO: 13450 - protein, 678 aa, Escherichia coli
MVPSTFSRLKAARCLPVVLAALIFAGCGTHTPDQSTAYMQGTAQADSAFYLQQMQQSSDDTRINWQLLAIRALVKEGKTGQAVELFNQLPQELNDSQRREKTLLAVEIKLAQKDFAGAQNLLAKITPADLEQNQQVRYWRAKIDASQGRPSIDLLRALIAQEPLLGAKEKQQNIDATWQALSSMTQEQANTLVINADENILQGWLDLQRVWFDNRNDPDMMKAGIADWQKRYPNNPGAKMLPTQLVNVKAFKPASTNKIALLLPLNGQAAVFGRTIQQGFEAAKNIGTQPVAAQVAAAPAADVAEQPQPQTVDGVASPAQASVSDLTGEQPAAQPVPVSAPATSTAAVSAPANPSAELKIYDTSSQPLSQILSQVQQDGASIVVGPLLKNNVEELLKSNTPLNVLALNQPENIENRVNICYFALSPEDEARDAARHIRDQGKQAPLVLIPRSSLGDRVANAFAQEWQKLGGGTVLQQKFGSTSELRAGVNGGSGIALTGSPITLRATTDSGMTTNNPTLQTTPTDDQFTNNGGRVDAVYIVATPGEIAFIKPMIAMRNGSQSGATLYASSRSAQGTAGPDFRLEMEGLQYSEIPMLAGGNLPLMQQALSAVNNDYSLARMYAMGVDAWSLANHFSQMRQVQGFEINGNTGSLTANPDCVINRKLSWLQYQQGQVVPAS

SEQ ID NO: 13451 - protein, 656 aa, Escherichia coli
MRLKKHYLCTALSLAFTQQAVAAQESDSLTVWSSPVSSTTTTVLDQPTMKALDKQNVAQALSVVPGVVLQKSGSRNEEQVKVRGFDSRQVPVYFDGVPIYVPYDGNLDLARILTNNLGAVEVSKGYSSLLQGPNQMGGAINITTQKPTKPLEASLGYRQGWSRSQDNAYDMHASFAASSDLGYLQVSGSQLKQDFLGLPHGVNNDIAGKHGKMINSSADDKRGIVKLGFTPRENDEYTLTYIKQDGEKDNPPYSGNSGQKSRYWQWPEYDKESFYYQGTTQLNDRFTLKSRLYRDTFENTLMMYNSLADLKNKKGSYSHYSDYSDGAGLQLAADVRENDLLSFAVNWKDDVHREKGAPHAAYDRYEDRTWSLASEYQWAAADNVDVVAGISYDWRDSVEAKKHEKDGSITHYDDNNQSAFNWQVMGKYHFANEDTLALSYYDRTRFPTLKERYTTSKPAYNQIAIVNPQLKPERARGVDLTWNGAFTRDWGFEVSVYYNRVSDAILSHNIDADTIQNQNSGTVDYSGLDAGIKGKISNILDVGLSYALIHADAKRKDIGKITDLPTQTMTAWMTLKPWEPLSVTLSEEARSSSYSNSDGSQKAAGFAVTHIRADYTLGHGFSVNASVNNLFDTQYAYSEGFIEEGRNFWAGVEYTF

SEQ ID NO: 13452 - protein, 565 aa, Escherichia coli
MKSPAPSRPQKMALIPACIFLCFAALSVQAEETPVTPQPPDILLGPLFNDVQNAKLFPDQKTFADAVPNSDPLMILADYRMQQNQSGFDLRHFVNVNFTLPTEGEKYVPPEGQSLREHIDGLWPVLTRSTENTEKWDSLLPLPEPYVVPGGRFREVYYWDSYFTMLGLAESGHWDKVADMVANFAHEIDTYGHIPNGNRSYYLSRSQPPFFALMVELLAQHEGDAALKQYLPQMQKEYAYWMDGVENLQAGQQEKRVVKLQDGTLLNRYWDDRDTPRPESWVEDIATAKSNPNRPATEIYRDLRSAAASGWDFSSRWMDNPQQLNTLRTTSIVPVDLNSLMFKMEKILARASKAAGDNAMANQYETLANARQKGIEKYLWNDQQGWYADYDLKSHKVRNQLTAAALFPLYVNAAAKDRANKMATATKTHLLQPGGLNTTSVKSGQQWDAPNGWAPLQWVATEGLQNYGQKEVAMDISWHFLTNVQHTYDREKKLVEKYDVSTTGTGGGGGEYPLQDGFGWTNGVTLKMLDLICPKEQPCDNVPATRPLIESTTQPVKQKEAEPTP

SEQ ID NO: 13453 - protein, 660 aa, Escherichia coli
MSRPQFTSLRLSLLALAVSATLPTFAFATETMTVTATGNARSSFEAPMMVSVIDTSAPENQTATSATDLLRHVPGITLDGTGRTNGQDVNMRGYDHRGVLVLVDGVRQGTDTGHLNGTFLDPALIKRVEIVRGPSALLYGSGALGGVISYDTVDAKDLLQEGQSSGFRVFGTGGTGDHSLGLGASAFGRTENLDGIVAWSSRDRGDLRQSNGETAPNDESINNMLAKGTWQIDSAQSLSGLVRYYNNDAREPKNPQTVEASESSNPMVDRSTIQRDVQLSYKLAPQGNDWLNADAKIYWSEVRINAQNTGSSGEYREQITKGARLENRSTLFADSFASHLLTYGGEYYRQEQHPGGATTGFPQAKIDFSSGWLQDEITLRDLPITLLGGTRYDSYRGSSDGYKDVDADKWSSRAGMTINPTNWLMLFGSYAQAFRAPTMGEMYNDSKHFSIGRFYTNYWVPNPNLRPETNETQEYGFGLRFDDLMLSNDALEFKASYFDTKAKDYISTTVDFAAATTMSYNVPNAKIWGWDVMTKYTTDLFSLDVAYNRTRGKDTDTGEYISSINPDTVTSTLNIPIAHSGFSVGWVGTFADRSTHISSSYSKQPGYGVNDFYISYQGQQALKGMTTTLVLGNAFDKEYWSPQGIPQDGRNGKIFVSYQW

SEQ ID NO: 13454 - protein, 746 aa, Escherichia coli; identical to SEQ ID NO: 3031

SEQ ID NO: 13455 - protein, 686 aa, Escherichia coli; identical to SEQ ID NO: 3015

SEQ ID NO: 13456 - protein, 116 aa, Escherichia coli
MYIGAPLAKDRETLFFTSVRAVPSTTKREEGNTLKIATQSVIKLFWRPKGLAYPLGEAPAKLRCTSSADMVTVSNPTPYFITLTDLKIGGKVVKNQMISPFDKYQFSLPKGAKIAA

SEQ ID NO: 13457 - protein, 213 aa, Escherichia coli; identical to SEQ ID NO: 2232

SEQ ID NO: 13458 - protein, 511 aa, Escherichia coli; identical to SEQ ID NO: 2457

SEQ ID NO: 13459 - protein, 203 aa, Escherichia coli; identical to SEQ ID NO: 2009

SEQ ID NO: 13460 - protein, 412 aa, Escherichia coli; identical to SEQ ID NO: 3323

SEQ ID NO: 13461 - protein, 721 aa, Escherichia coli
MDEIPALAEKDDDSVINSLEQIIPGTAAEFDFNHQRLNLSIPQIALYRDARGYVSPSRWDDGIPTLFTNYSFTGSDNRYRQGNRSQRQYLNMQNGANFGPWRLRNYSTWTRNDQASSWNTISSYLQRDIKALKSQLLLGESATSGSIFSSYTFTGVQLASDDNMLPNSQRGFAPTVRGIANSSAIVTIRQNGYVIYQSNVPAGAFEINDLYPSSNSGDLEVTIEESDGTQRRFIQPYSSLPMMQRPGHLKYSATAGRYRADANSDSKEPEFAEATAIYGLNNTFTLYGGLLGSEDYYALGIGIGGTLGALGALSMDINRADTQFDNQHSFHGYQWRTQYIKDIPETNTNIAVSYYRYTNDGYFSFNEANTRNWNYNSRQKSEIQFNISQTIFDGVSLYASGSQQDYWGNNDKNRNISVGVSGQQWGIGYSLNYQYSRYTDQNNDRALSLNLSIPLERWLPRSRVSYQMTSQKDRPTQHEMRLDGSLLDDGRLSYSLEQSLDDDNNHNSSLNASYRSPYGTFSAGYSYGNDSSQYNYGVTGGVVIHPHGVTLSQYLGNAFALIDANGASGVRIQNYPGIATDPFGYAVVPYLTTYQENRLSVDTTQLPDNVDLEQTTQFVVPNRGAMVAARFNANIGYRVLVTVSDRNGKPLPFGALASNDETGQQSIVDEGGILYLSGISSKSQSWTVRWGNQADQQCQFAFSTPDSEPTTSVLQGTAQCH

SEQ ID NO: 13462 - protein, 311 aa, Escherichia coli
MHYMSDNDSKDGDQSYIRFGFKGETQINDQLTGYGRWEAEFAGNKAESDTAQQKTRLAFAGLKYKDLGSFDYGRNLGALYDVEAWTDMFPEFGGDSSAQTDNFMTKRASGLATYRNTDFFGVIDGLNLTLQYQGKNENRDVKKQNGDGFGTSLTYDFGGSDFAISGAYTNSDRTNEQNLQSRGTGKRAEAWATGLKYDANNIYLATFYSETRKMTPITGGFANKTQNFEAVAQYQFDFGLRPSLGYVLSKGKDIEGIGDEDLVNYIDVGATYYFNKNMSAFVDYKINQLDSDNKLNINNDDIVAVGMTYQF

SEQ ID NO: 13463 - protein, 784 aa, Escherichia coli; identical to SEQ ID NO: 2244

SEQ ID NO: 13464 - protein, 700 aa, Escherichia coli; identical to SEQ ID NO: 3047

SEQ ID NO: 13465 - protein, 753 aa, Escherichia coli
MPDNSACTPLQDRLADASTEFDVGQQHLSLSVPQIYVGRMARGYVSPELWEEGINAGLLNYSFNGNSINNRSNHNAGKSNYAYLNLQSGINIGSWRLRDNSTWSYNSGSSNSSNSNKWQHINTSAERDIIPLRSRLTVGDSYTDGDIFDSVNFRGLKINSTEAMLPDSQHGFAPVIHGIARGTAQVSVKQNGYDVYQTTVPPGPFTIDDINSAANGGDLQVTIKEADGSIQTLYVPYSSVPVLQRAGYTRYALAMGEYRSGNNLQSSPKFIQGSLMHGLEGNWTPYGGMQIAEDYQAFNLGIGKDLGLFGAFSFDITQANTTLADGTRHSGQSVKSVYSKSFYQTGTNIQVAGYRYSTQGFYNLSDSAYSRMSGYTVKPPTGDTNEQTQFIDYFNLFYSKRGQEQISISQQLGNYGTTFFSASRQSYWNTSRSDQQISFGLNVPFGDITTSLNYSYSNNIWQNDRDHLLAFTLNVPFSHWMRTDSQSAFRNSNASYSMSNDLKGGMTNLSGVYGTLLPDNNLNYSVQVGNTHGGNTSSGTSGYSSLNYRGAYGNTNVGYSRNGDSSQIYYGMSGGIIAHADGITFGQPLGDTMVLVKAPGADNVKIENQTGIHTDWRGYAILPFATEYRENRVALNANSLADNVELDETVVTVIPTHGAIARATFNAQIGGKVLMTLKYGNKSVPFGAIVTHGENKNGSIVAENGQVYLTGLPQSGKLQVSWGKDKNSNCIVEYKLPEVSPGTLLNQQTAICR

SEQ ID NO: 13466 - protein, 834 aa, Escherichia coli; identical to SEQ ID NO: 3207

SEQ ID NO: 13467 - protein, 663 aa, Escherichia coli; identical to SEQ ID NO: 1910

SEQ ID NO: 13468 - protein, 274 aa, Escherichia coli; identical to SEQ ID NO: 2303

SEQ ID NO: 13469 - protein, 250 aa, Escherichia coli; identical to SEQ ID NO: 3048

SEQ ID NO: 13470 - protein, 137 aa, Escherichia coli
MITLRKLPLAVAVAAGVMSAQAMAVDFHGYARSGIGWTGSGGEQQCFQTTGAQSKYRLGNECETYAELKLGQEVWKEGDKSFYFDTNVAYSVAQQNDWEATDPAFREANVQGKNLIEWLPGSTIWQVSASTNVMTFI

SEQ ID NO: 13471 - protein, 478 aa, Escherichia coli; identical to SEQ ID NO: 2404

SEQ ID NO: 13472 - protein, 614 aa, Escherichia coli; identical to SEQ ID NO: 3301

SEQ ID NO: 13473 - protein, 784 aa, Escherichia coli; identical to SEQ ID NO: 2244

SEQ ID NO: 13474 - protein, 118 aa, Escherichia coli [sequence omitted]

SEQ ID NO: 13475 - protein, 246 aa, Escherichia coli; identical to SEQ ID NO: 3021

SEQ ID NO: 13476 - protein, 111 aa, Escherichia coli; identical to SEQ ID NO: 3096

SEQ ID NO: 13477 - protein, 673 aa, Escherichia coli; identical to SEQ ID NO: 3295

SEQ ID NO: 13478 - protein, 849 aa, Escherichia coli
MLHINSMVKVCFFVIIAFSLFHTRNSDGKTYSFDASLLKRRGEGVDLTLFENGGQLPGIYPVDIFLNGTIVGSEDIFFHAEHSNGKPYLKACLSEELLMRYGVKTEKYPKLFLSHYGKKDERQCADLSVIPQATEEFLFEAQKLVLSIPQVAIRSPLRGVASDLIWEDGISTFLLNWQVEAGHSEFQHYEKTTSDNFWVSLEPGINIGPWRIRNLTTLNKSSGQVGKWESSYIRAERGLNNIKSRLTLGEDYTPADIFASVPFRGVMLGTDENMIPYDQRGFAPVIRGIARTQARIEIRQNGYLIQSQTVAAGPFALTDLPITGSGGEFQVTIFESDGAIQSFNVPFTTPAIALREGYLKYNISAGQYRSSDESVEKAYLWQATAMYGLPRALTVFGGVQTAEHYQAAALGVGLSLGNMGAASLDTIYSRGQQKGYDFDTGNSWRIRYDKSFELTDTSFSAASYQYSNEGYHELSDILDTYRSGANFVFNDTDRKRRRITININQSLGPWGFIGLSGGRDEYKGGDRQDYIGASYSMSWKDISFSVNWTRNRNVGDYFSNRTFNEDTVGMWMSIPLKHWLGKNDNDVNATAQIQHSTRQNTRYEMGLNGRAFDQKLYWDIREQIVPGSKYDADTSRLNMRWSGSYGELVGMYSYNSHTRQMNAGMSGSIAMHSEGITFGQRFGDTMALIAAPGVRGASVGGWPGVSTDSRGYALVSYITPYQENIITLDPTTFPENAEVLQTDTRVVPTKGAVVRAKFKTRVGNRAVVRLARADGTPLPFGTVVTLEGKTEVSNSTGVVDDKGMVYLSGLSEAGKLKAQWGMNSHCYANYRLPVKKGPAGLYLTSAVCI

SEQ ID NO: 13479 - protein, 120 aa, Escherichia coli; identical to SEQ ID NO: 3383

SEQ ID NO: 13480 - protein, 230 aa, Escherichia coli; identical to SEQ ID NO: 3019

SEQ ID NO: 13481 - protein, 518 aa, Escherichia coli; identical to SEQ ID NO: 2349

SEQ ID NO: 13482 - protein, 243 aa, Escherichia coli; identical to SEQ ID NO: 3483

SEQ ID NO: 13483 - protein, 432 aa, Escherichia coli; identical to SEQ ID NO: 2026

SEQ ID NO: 13484 - protein, 89 aa, Escherichia coli; identical to SEQ ID NO: 2810

SEQ ID NO: 13485 - protein, 203 aa, Escherichia coli; identical to SEQ ID NO: 2201

SEQ ID NO: 13486 - protein, 230 aa, Escherichia coli; identical to SEQ ID NO: 2580

SEQ ID NO: 13487 - protein, 243 aa, Escherichia coli; identical to SEQ ID NO: 4409

SEQ ID NO: 13488 - protein, 111 aa, Escherichia coli; identical to SEQ ID NO: 3096

SEQ ID NO: 13489 - protein, 725 aa, Escherichia coli; identical to SEQ ID NO: 2986

SEQ ID NO: 13490 - protein, 266 aa, Escherichia coli; identical to SEQ ID NO: 1894

SEQ ID NO: 13491 - protein, 249 aa, Escherichia coli
MTNLFSAKTVATTLAFLITATSLQAQASVTPDRTRLIFNESDKSISVTLRNNDPKMPYLAQSWMEDEQGNKISSPLTVLPPVQRIDSMMNGQVKVQGMPDINKLPADRESVFYFNVREIPPKSNKPNTLQIALQTRIKLFWRPKALENVSMKNPWQHKVTLTRSGQEFTVNNPTPYFVVISNASAQKNGNPAAGFSPMVISPKTSVPLKVKMDSVPVLTYVNDYGARMPLYFKCGGDTCQVDVEQSRKG

SEQ ID NO: 13492 - protein, 615 aa, Escherichia coli
MFWRDITLSVWRKKTTGLKTKKRLLPLVLAAALCSSPVWAEEATFTANFKDTDLKSFIETVGANLNKTIIMGPGVQGKVSIRTMTPLNERQYYQLFLNLLEAQGYAVVPMENDVLKVVKSSAAKVEPLPLVGEGSDNYAGDEMVTKVVPVRNVSVRELAPILRQMIDSAGSGNVVNYDPSNVIMLTGRASVVERLTEVIQRVDHAGNRTEEVIPLDNASASEIARVLESLTKNSGENQPATLKSQIVADERTNSVIVSGDPATRDKMRRLIRRLDSEMERSGNSQVFYLKYSKAEDLVDVLKQVSGTLTAAKEEAEGTVGSGREVVSIAASKHSNALIVTAPQDIMQSLQSVIEQLDIRRAQVHVEALIVEVAEGSNINFGVQWASKDAGLMQFANGTQIPIGTLGAAISQAKPQKGSTVISENGATTINPDTNGDLSTLAQLLSGFSGTAVGVVKGDWMALVQAVKNDSSSNVLSTPSITTLDNQEAFFMVGQDVPVLTGSTVGSNNSNPFNTVERKKVGIMLKVTPQINEGNAVQMVIEQEVSKVEGQTSLDVVFGERKLKTTVLANDGELIVLGGLMDDQAGESVAKVPLLGDIPLIGNLFKSTADKKENVT

SEQ ID NO: 13493 - protein, 193 aa, Escherichia coli; identical to SEQ ID NO: 2246

SEQ ID NO: 13494 - protein, 243 aa, Escherichia coli; identical to SEQ ID NO: 2910

SEQ ID NO: 13495 - protein, 241 aa, Escherichia coli; identical to SEQ ID NO: 2922

SEQ ID NO: 13496 - protein, 119 aa, Escherichia coli
MNAVLSVQGASVPVKKKSFFSKFTRLNMLRLARAVIPAAVLMMFFPQLAMAAQGQDLMASGNTTVKATFGKDSSVVKWVVLAEVLVGAVMYMMTKNVKFLAGFAIISVFIAVGMAVVGL

SEQ ID NO: 13497 - protein, 466 aa, Escherichia coli
MLGMKAYGSLAKREKDDPQNSTTTDTGETPRIEGFSSRDGNVEFAWTPNQNHDFTAGYGFDRQDRDSDSLDKNRLERQNYSVSHNGRWDYGTSELKYYGEKVENKNPGNSSPITSESNTVDGKYTLPLTAINQFLTVGGEWRHDKLSDAVNLTGGTSSKTSASQYALFVEDEWRIFEPLALTTGVRMDDHETYGEHWSPRAYLVYNATDTVTVKGGWATAFKAPSLLQLSPDWTSNSCRGACKIVGSPDLKPETSESWELGLYYMGEEGWLEGVESSVTVFRNDVKDRISISRTSDVNAAPGYQNFVGFETGANGRRIPVFSYYNVNKARIQGVETELKIPFNDEWKLSINYTYNDGRDVSNGENKPLSDLPFHTANGTLDWKPLALEDWSFYVSGHYTGQKRADSATAKTPGGYTIWNTGAAWQVTKDVKLRAGVLNLGDKDLSRDDYSYNEDGRRYFMAVDYRF

SEQ ID NO: 13498 - protein, 682 aa, Escherichia coli; identical to SEQ ID NO: 6899

SEQ ID NO: 13499 - protein, 731 aa, Escherichia coli; identical to SEQ ID NO: 3290

SEQ ID NO: 13500 - protein, 828 aa, Escherichia coli; identical to SEQ ID NO: 2380

SEQ ID NO: 13501 - protein, 228 aa, Escherichia coli; identical to SEQ ID NO: 3034

SEQ ID NO: 13502 - protein, 869 aa, Escherichia coli; identical to SEQ ID NO: 3012

SEQ ID NO: 13503 - protein, 308 aa, Escherichia coli
MIDFYYWDISGPGAGLENIDVGFGKLSLAATRSSEAGGSSSFASNNIYDYTNETANDVFDVRLAQMEINPGGTLELGVDYGRANLRDNYRLVDGASKDGWLFTAEHTQSVLKGFNKFVVQYATDSMTSQGKGLSQGSGVAFDNEKFAYNINNNGHMLRILDHGAISMGDNWDMMYVGMYQDINWDNDNGTKWWTVGIRPMYKWTPIMSTVMEIGYDNVESQRTGDKNNQYKITLAQQWQAGDSIWSRPAIRVFATYAKWDEKWGYDYNGDSKVNPNYGKAVTADFNGGSFGRGDSDEWTFGAQMEIWW

SEQ ID NO: 13504 - protein, 819 aa, Escherichia coli
MDAVNIYRLSVLSCLAMVTPPALAAEFNLNVLDKSIRDSVDISLLNQKGVVAPGDYFVSVTVNNNKISNGQQIRWQKSGDKIIPCINESLIELFGLKSDFRKKLPAIKECVNFSVFPEIIFTFDQANQQLNITIPQAWLAWHSENWTPPSTWNNGIPGFLMDYNLFASTYRPQSGSSSNNLNAYGTTGLNAGAWRLRSDYQLSQSDSGDNREQSGAISRTYLFRPLPQIGSRLTLGETDFSSNIFDGFSYTGAALASDDRMLPWELRGYAPQISGIAQTNATVTISHSGRVIYQKKVPPGPFIIDDLNQSVQGTLDVKVSEEDGRVNNFQVSAASTPFLTRQGQVRYKLAAGRPRSSMSHHTEDETFISHEVSWGMLSNTSLYGGMLLAGDDYRSGALGIGQNMLWLGALSFDVTWADSHFDIQQDEQGYSYRFNYSKQVDATNSTISLAAYRFSDRHFHSYANYIDHKYNDADAQDEKQTISLSFGQPITPLNLNLYANILHQSWWNADTSTTANITAGFNVDIGDWKDISVSTSFNTTHYEDKDRDNQIYFSISLPIGESGRLGYDMQNNSNTTTHRMSWNDTLDERNSWGMSAGIQSDRPDNGAQVSGNYQHLSSAGEWDLTGTYAANDYTSASASWSGSFTATQHGAAFHRRSSTNEPRLMVSTDGVGDIPIQGNIDYTNRFGIAVVPFVSSYQPTTVAVNMNDLPDGVTVSENVVKETWTEGAIGFKSLASRAGKDLNVIISDANGHFPPLGADVRQAEGGVSVGMVGENGHAWLSGVDENQQFTVHWGDQKTCAIHLPEHLEDVTKRLILPCH

SEQ ID NO: 13505 - protein, 656 aa, Escherichia coli; identical to SEQ ID NO: 9895

SEQ ID NO: 13506 - protein, 696 aa, Escherichia coli; identical to SEQ ID NO: 3314

SEQ ID NO: 13507 - protein, 721 aa, Escherichia coli
MDEIPALAEKDDDSVINSLEQIIPGTAAEFDFNHQRLNLSIPQIALYRDARGYVSPSRWDDGIPTLFTNYSFTGSDNRYRQGNRSQRQYLNMQNGANFGPWRLRNYSTWTRNDQASSWNTISSYLQRDIKALKSQLLLGESATSGSIFSSYTFTGVQLASDDNMLPNSQRGFAPTVRGIANSSAIVTIRQNGYVIYQSNVPAGAFEINDLYPSSNSGDLEVTIEESDGTQRRFIQPYSSLPMMQRPGHLKYSATAGRYRADANSDSKEPEFAEATAIYGLNNTFTLYGGLLGSEDYYALGIGIGGTLGALGALSMDINRADTQFDNQHSFHGYQWRTQYIKDIPETNTNIAVSYYRYTNDGYFSFDEANTRNWDYNSRQKSEIQFNISQTIFDGVSLYASGSQQDYWGNNEKNRNISVGVSGQQWGIGYSLNYQYSRYTDQNNDRALSLNLSIPLERWLPRSRVSYQMTSQKDRPTQHEMRLDGSLLDDGRLSYSLEQSLDDDNNHNSSLNASYRSPYGTFSAGYSYGNDSSQYNYGVTGGVVIHPHGVTLSQYLGNAFALIDANGASGVRIQNYPGIATDPFGYAVVPYLTTYQENRLSVDTTQLPDNVDLEQTTQFVVPNRGAMVAARFNANIGYRVLVTVSDRNGKPLPFGALASNDETGQQSIVDEGGILYLSGISSKSQSWTVRWGNQADQQCQFAFSTPDSEPTTSVLQGTAQCH

SEQ ID NO: 13508 - protein, 208 aa, Escherichia coli
MKKIWLALAGLVLAFSASAAQYEDGKQYTTLEKPVAGAPQVLEFFSFFCPHCYQFEEVLHISDNVKKKLPEGVKMTKYHVNFMGGDLGKDLTQAWAVAMALGVEDKVTVPLFEGIQKTQTIRSASDIRDVFINAGIKGEEYDAAWNSFVVKSLVAQQEKAAADVQLRGVPAMFVNGKYQLNPQGMDTSNMDVFVQQYADTVKYLSEKK

SEQ ID NO: 13509 - protein, 162 aa, Escherichia coli; identical to SEQ ID NO: 1965

SEQ ID NO: 13510 - protein, 478 aa, Escherichia coli
MTRIKINARRIFSLLIPFFFFTSVHAEQTAAPAKPVTVEAKNETFAPQHPDQYLSWKATSEQSERVDALAEDPRLVILWAGYPFSRDYNKPRGHAFAVTDVRETLRTGAPKNAEDGPLPMACWSCKSPDVARLIQKDGEDGYFHGKWARGGPEIVNNLGCTDCHNTASPEFAKGKPESTLSRPYAARAMEAIGKPFEKAGRFDQQSMVCGQCHVEYYFDGKNKAVKFPWDDGMKVENMEQYYDKIAFSDWTNSLSKTPMLKAQHPEYETWTAGIHGKNNVTCIDCHMPKVQNAEGKLYTDHKIGNPFDNFAQTCANCHTQDKAALQKVVAERKQSINDLKIKVEDQLVHAHFEAKAALDAGATEAEMKPIQDDIRHAQWRWDLAIASHGIHMHAPEEGLRMLGTAMDKAADARTKLARLLATKGITHEIQIPDISTKEKAQQAIGLNMEQIKAEKQDFIKTVIPQWEEQARKNGLLSQ

SEQ ID NO: 13511 - protein, 351 aa, Escherichia coli; identical to SEQ ID NO: 3010

SEQ ID NO: 13512 - protein, 229 aa, Escherichia coli
MKSVLLLLTVLFVQSVEAGIMPASSRIIYRDGDREKTLMLDNTNDYPVLVQSWVDNGEGSPEAASPPFVVLPPVFRLAARRTQGLRIIYNHDPLPQDRESAFWLNLYEMPPETPHQDPTHLTLAMNTQLKIFYRPKSVTMTPQEAMRKISWHLVNNGSSSYIELNNPTPLNISFTSISIGATKVEQESDMMIKPFSQRRYWLASKNVSGIVTATYLDDNGAQIKQQLTQ

SEQ ID NO: 13513 - protein, 232 aa, Escherichia coli; identical to SEQ ID NO: 2087

SEQ ID NO: 13514 - protein, 332 aa, Escherichia coli; identical to SEQ ID NO: 2701

SEQ ID NO: 13515 - protein, 231 aa, Escherichia coli; identical to SEQ ID NO: 3055

SEQ ID NO: 13516 - protein, 565 aa, Escherichia coli; identical to SEQ ID NO: 2669

SEQ ID NO: 13517 - protein, 231 aa, Escherichia coli; identical to SEQ ID NO: 4955

SEQ ID NO: 13518 - protein, 760 aa, Escherichia coli; identical to SEQ ID NO: 3026

SEQ ID NO: 13519 - protein, 235 aa, Escherichia coli; identical to SEQ ID NO: 4365

SEQ ID NO: 13520 - protein, 367 aa, Escherichia coli; identical to SEQ ID NO: 3016

SEQ ID NO: 13521 - protein, 729 aa, Escherichia coli; identical to SEQ ID NO: 3052

SEQ ID NO: 13522 - protein, 245 aa, Escherichia coli
MPARHLYFIMTNTWNRLALLIFAVLSLLVAGELQAGVVVGGTRFIFPADRESKSILLTNTSQESWLINSKINRPTRWAGGEASTVPAPLLAAPPLILLKPGTTGTLRLLRTESDILPVDRETLFELSIASVPSGKVENQSVKVAMRSVFKLFWRPEGLPGDPLEAYQQLRWTRNSQGVQLTNPTPYYINLIQVSVNGKALSNVGVVPPKSQRQTSWCQAIAPCHVAWRAINDYGGLSAKKEQNLP

SEQ ID NO: 13523 - protein, 567 aa, Escherichia coli; identical to SEQ ID NO: 4814

SEQ ID NO: 13524 - protein, 360 aa, Escherichia coli
MKKLTVAISAVAASVLMAMSAQAAEIYNKDSNKLDLYGKVNAKHYFSSNDADDGDTTYARLGFKGETQINDQLTGFGQWEYEFKGNRAESQGSSKDKTRLAFAGLKFGDYGSIDYGRNYGVAYDIGAWTDVLPEFGGDTWTQTDVFMTGRTTGVATYRNNDFFGLVDGLNFAAQYQGKNDRNEVTEANGDGFGFSTTYEYEGFGVGATYAKSDRTNNQVIYGNNGLNASGQNAEVWAAGLKYDANNIYLATTYSETQNMTVFGNNHIANKAQNFEAVAQYQFDFGLRPSVAYLHSKVKDLGVWGDQDLVEYVDVGATYYFNKNMSTFVDYKINLIDKSDFTKASGVATDDIVAVGMVYQF

SEQ ID NO: 13525 - protein, 362 aa, Escherichia coli; identical to SEQ ID NO: 2434

SEQ ID NO: 13526 - protein, 430 aa, Escherichia coli; identical to SEQ ID NO: 2617

SEQ ID NO: 13527 - protein, 237 aa, Escherichia coli; identical to SEQ ID NO: 3022

SEQ ID NO: 13528 - protein, 678 aa, Escherichia coli; identical to SEQ ID NO: 3014

SEQ ID NO: 13529 - protein, 774 aa, Escherichia coli; identical to SEQ ID NO: 4771

SEQ ID NO: 13530 - protein, 273 aa, Escherichia coli
MITDVWKYRGKSNTYAGADNFMNGRANSVATYRNNGFFGQVDGLNFALQYQGNNEKSGLFDQEGSGNGNGRKLAKENGDGYGMSTSYDFDFGLSLGAAYSNSDRTDNQVHKGTHNTRYGDRFDATAGGETAEAWTVGAKYDANNVYLAAMYAETRNMTGYGDADAIANKTQNFEVVAQYQFDFGLRPSIAYLQSKGKDLGGVNSDNFDSQGNHHYTNKDLVKYVDIGMTYYFNKNMSTYVDYKINLLDNDDDFYKENGIATDDIVAVGLVYQF

SEQ ID NO: 13531 - protein, 161 aa, Escherichia coli; identical to SEQ ID NO: 3647

SEQ ID NO: 13532 - protein, 446 aa, Escherichia coli
MMITLRKLPLAVAVAAGVMSAQAMAVDFHGYARSGIGWTGSGGEQQCFQTTGAQSKYRLGNECETYAELKLGQEVWKEGDKSFYFDTNVAYSVAQQNDWEATDPAFREANVQGKNLIEWLPGSTIWAGKRFYQRHDVHMIDFYYWDISGPGAGLENIDVGFGKLSLAATRSSEAGGSSSFASNNIYDYTNETANDVFDVRLAQMEINPGGTLELGVDYGRANLRDNYRLVDGASKDGWLFTAEHTQSVLKGFNKFVVQYATDSMTSQGKGLSQGSGVAFDNEKFAYNINNNGHMLRILDHGAISMGDNWDMMYVGMYQDINWDNDNGTKWWTVGIRPMYKWTPIMSTVMEIGYDNVESQRTGDKNNQYKITLAQQWQAGDSIWSRPAIRVFATYAKWDEKWGYDYTGNADTNANFGKAVPADFNGGSFGRGDSDEWTFGAQMEIWW

SEQ ID NO: 13533 - protein, 412 aa, Escherichia coli
MKQWIAALLLMLIPGVQAAKPQKVTLMVDDVPVAQVLQALAEQEKLNLVVSPDVSGTVSLHLTDVPWKQALQTIVKSAGLITRQEGNILSVHSVAWQNDNIARQEAEQARAQANLPLENRNITLQYADAGELAKAGEKLLSAKGSMTVDKRTNRLLLRDNKTALSALEQWVAQMDLPVGQVELSAHIVTINEKSLRELGVKWTLADAQQAGGVGQVTTLGSDLSVATATTHVGFNIGRINGRLLDLELSALEQKQQLDIIASPRLLASHLQPASIKQGSEIPYQVSSGESGATSVEFKEAVLGMEVTPTVLQKGRIRLKLHISQNVPGQVLQQADGEVLAIDKQEIETQVEVKSGETLALGGIFTRKNKSGQDSVPLLGDIPWFGQLFRHDGKEDERRELVVFITPRLVSSE

SEQ ID NO: 13534 - protein, 359 aa, Escherichia coli; identical to SEQ ID NO: 2328

SEQ ID NO: 13535 - protein, 224 aa, Escherichia coli
MKGLLSLLIFSMVLPAHAGIVIYGTRIIYPAENKEVMVQLMNQGHRSSLLQAWIDDGDTSLPPEKIQVPFMLTPPVAKIGANSGQQVKIKIMPNKLPTNKESIFYLNVLDIPPNSPEQEGKNALKFAMQNRIKLFYRPAGIAPVNKATFKKLLVSRSGNGLVIKNDSANWVTISDVKANNVKVNYETIMIAPLESQSVNVKSNNANNWYLTIIDDHGNYISDKI

SEQ ID NO: 13536 - protein, 227 aa, Escherichia coli; identical to SEQ ID NO: 4508

SEQ ID NO: 13537 - protein, 517 aa, Escherichia coli; identical to SEQ ID NO: 2462

SEQ ID NO: 13538 - protein, 224 aa, Escherichia coli; identical to SEQ ID NO: 3035

SEQ ID NO: 13539 - protein, 760 aa, Escherichia coli
MENNRNFPARQFHSLTFFAGLCIGITPVAQALAAEGQTNADDTLVVEASTPSLYAPQQSADPKFSRPVADTTRTMTVISEQVIKDQGATNLTDALKNVPGVGAFFAGENGNSTTGDAIYMRGADTSNSIYIDGIRDIGSVSRDTFNTEQVEVIKGPSGTDYGRSAPTGSINMISKQPRNDSGIDASASIGSAWFRRGTLDVNQVIGDTTAVRLNVMGEKTHDAGRDKVKNERYGVAPSVAFGLGTANRLYLNYLHVTQHNTPDGGIPTIGLPGYSAPSAGTATLNHSGKVDTHNFYGTDSDYDDSTTDTATMRFEHDINDNTTIRNTTRWSRVKQDYLMTAIMGGASNITQPTSDVNSWTWSRTANTKDVSNKILTNQTNLTSTFYTGSIGHDVSTGVEFTRETQTNYGVNPVTLPAVNIYHPDSSIHPGGLTRNGANANGQTDTFAIYAFDTLQITRDFELNGGIRLDNYHTEYDSATACGGSGRGAITCPAGVAKGSPVTTVDTAKSGNLVNWKAGALYHLTENGNVYINYAVSQQPPGGNNFALAQSGSGNSANRTDFKPQKANTSEIGTKWQVLDKRLLLTAALFRTDIENEVEQNDDGTYSQYGKKRVEGYEISVAGNITPAWQVIGGYTQQKATIKNGKDVAQDGSSSLPYTPEHAFTLWSQYQATDDISVGAGARYIGSMHKGSDGAVGTPAFTEGYWVADAKLGYRVNRNLDFQLNVYNLFDTDYVASINKSGYRYHPGEPRTFLLTANMHF

SEQ ID NO: 13540 - protein, 731 aa, Escherichia coli; identical to SEQ ID NO: 4830

SEQ ID NO: 13541 - protein, 518 aa, Escherichia coli
MKKLKINYLFIGILALLLAVALWPSIPWFGKADNRIAAIQARGELRVSTIHTPLTYNEINGKPFGLDYELAKQFADYLGVKLKVTVRQNISQLFDDLDNGNADLLAAGLVYNSERVKNYQPGPTYYSVSQQLVYKVGQYRPRTLGNLTAEQLTVAPGHVVVNDLQTLKETKFPELSWKVDDKKGSAELMEDVIEGKLDYTIADSVAISLFQRVHPELAVALDITDEQPVTWFSPLDGDNTLSAALLDFFNEMNEDGTLARIEEKYLGHGDDFDYVDTRTFLRAVDAVLPQLKPLFEKYAEEIDWRLLAAIAYQESHWDAQATSPTGVRGMMMLTKNTAQSLGITDRTDAEQSISGGVRYLQDMMSKVPESVPENERIWFALAAYNMGYAHMLDARALTAKTKGNPDSWADVKQRLPLLSQKPYYSKLTYGYARGHEAYAYVENIRKYQISLVGYLQEKEKQATEAAMQLAQDYPAVSPTELGKEKFPFLSFLSQSSSNYLPHSPSLLFSRKGSEEKQN

SEQ ID NO: 13542 - protein, 170 aa, Escherichia coli [sequence omitted]

SEQ ID NO: 13543 - protein, 217 aa, Escherichia coli
MFSLHLGATRVIYNIFSSGETLTIINDYDYPMLVQSEVLLEDQKTPAPFIITPPLFRLDALQSSRLRIVRTGGDFPKDRETLQWICVKGIPPKSDEKWAESNKNSLNNVTLNVQVSLSTCIKMFVRPSSVKGHPEDVAGEVKWQRVNNKLKGVNPTPFYINLSELRVGGEEISEHHYIAPFSSFEYPIPVSKSSKVQWKIVTDYGGVSEFFETDINL

SEQ ID NO: 13544 - protein, 274 aa, Escherichia coli; identical to SEQ ID NO: 2309

SEQ ID NO: 13545 - protein, 766 aa, Escherichia coli
MLMTTMPDSCNSWQKCRNKTMNKKIHSLALLVNLGIYGVAQAQEPTDTPVSHDDTIVVTAAEQNLQAPGVSTITADEIRKNPVARDVSEIIRTMPGVNLTGNSTSGQRGNNRQIDIRGMGPENTLILIDGKPVSSRNSVRQGWRGERDTRGDTSWVPPEMIERIEVLRGPAAARYGNGAAGGVVNIITKKGSGEWHGSWDAYFNAPEHKEEGATKRTNFSLTGPLGDEFSFRLYGNLDKTQADAWDINQGHQSARAGTYATTLPAGREGVINKDINGVVRWDFAPLQSLELEAGYSRQGNLYAGDTQNTNSDAYTRSKYGDETNRLYRQNYSLTWNGGWDNGVTTSNWVQYEHTRNSRIPEGLAGGTEGKFNEKATQDFVDIDLDDVMLHSEVNLPIDFLVNQTLTLGTEWNQQRMKDLSSNTQALTGTNTGGAIDGVSATDRSPYSKAEIFSLFAENNMELTDSTIVTPGLRFDHHSIVGNNWSPALNISQGLGDDFTLKMGIARAYKAPSLYQTNPNYILYSKGQGCYASAGGCYLQGNDDLKAETSINKEIGLEFKRDGWLAGITWFRNDYRNKIEAGYVAVGQNAVGTDLYQWDNVPKAVVEGLEGSLNVPVSETVMWTNNITYMLKSENKTTGDRLSIIPEYTLNSTLSWQAREDLSMQTTFTWYGKQQPKKYNYKGQPAVGPETKEISPYSIVGLSATWDVTKNVSLTGGVDNLFDKRLWRAGNAQTTGDLAGANYIAGAGAYTYNEPGRTWYMSVNTHF

SEQ ID NO: 13546 - protein, 733 aa, Escherichia coli; identical to SEQ ID NO: 4570

SEQ ID NO: 13547 - protein, 249 aa, Escherichia coli; identical to SEQ ID NO: 3028

SEQ ID NO: 13548 - protein, 191 aa, Escherichia coli; identical to SEQ ID NO: 2727

SEQ ID NO: 13549 - protein, 200 aa, Escherichia coli; identical to SEQ ID NO: 1784

SEQ ID NO: 13550 - protein, 432 aa, Escherichia coli; identical to SEQ ID NO: 2026

SEQ ID NO: 13551 - protein, 208 aa, Escherichia coli; identical to SEQ ID NO: 1949

SEQ ID NO: 13552 - protein, 370 aa, Escherichia coli; identical to SEQ ID NO: 2975

SEQ ID NO: 13553 - protein, 193 aa, Escherichia coli; identical to SEQ ID NO: 2246

SEQ ID NO: 13554 - protein, 331 aa, Escherichia coli; identical to SEQ ID NO: 2700

SEQ ID NO: 13555 - protein, 385 aa, Escherichia coli
MNIYRAVTSFFNNSSKKGLTMKKLTVAISAVAASVLMAMSAQAAEIYNKDSNKLDLYGKVNAKHYFSSNDADDGDTTYARLGFKGETQINDQLTGFGQWEYEFKGNRAESQGSSKDKTRLAFAGLKFGDYGSIDYGRNYGVAYDIGAWTDVLPEFGGDTWTQTDVFMTQRATGVATYRNNDFFGLVDGLNFAAQYQGKNDRSDFDNYTEGNGDGFGFSATYEYEGFGIGATYAKSDRTDTQVNAGKVLPEVFASGKNAEVWAAGLKYDANNIYLATTYSETQNMTVFADHFVANKAQNFEAVAQYQFDFGLRPSVAYLQSKGKDLGVWGDQDLVKYVDVGATYYFNKNMSTFVDYKINLLDKNDFTKALGVSTDDIVAVGLVYQF

SEQ ID NO: 13556 - protein, 747 aa, Escherichia coli; identical to SEQ ID NO: 2072

SEQ ID NO: 13557 - protein, 408 aa, Escherichia coli
MPDHSLFRLRILPWCIALAMSGSYSSVWAEDDIQFDSRFLELKGDTKIDLKRFSSQGYVEPGKYNLQVQLNKQPLAEEYDIYWYAGEDDASKSYACLTPELVAQFGLKEDVAKNLQWSHDAKCLKSGQLEGMEIKADLSQSALVISLPQAYLEYTWPDWDPPSRWDDGISGIVADYSINAQTRHEENGGDDSNEISGNGTVGVNLGPWRMRADWQTNYQHTRSNDDDEFSGDETQKKWEWSRYYAWRALPSLKAKLALGEDYLRSDIFDGFNYVGGSVSTDDQMLPPNLRGYAPDISGVAHTTAKVTVSQMGRVIYETQVPAGPFRIQDLGDSVSGTLHIRIEEQNGQLQEYDISTASMPYLTRPGQVRYKIMMGRPQEWGHHVEGEFFLVLKLPGGSLTAGRYMAAH

SEQ ID NO: 13558 - protein, 823 aa, Escherichia coli
MTPLASAIVALLLGIEAYAAEETFDTHFMIGGMKDQQVANIRLDDNQPLPGQYDIDIYVNKQWRGKYEIIVKDNPQETCLSREVIKRLGINSDNFASGKQCLTFEQLVQGGSYSWDIGVFRLDFSVPQAWVEELESGYVPPENWERGINAFYTSYYVSQYYSDYKASGNNKSTYVRFNSGLNLLEWQLHSDASFSKTNNNPGVWKSNTLYLERGFAQLLGTLRVGDMYTSSDIFDSVRFSGVRLFRDMQMLPNSKQNFTPRVQGIAQSNALVTIEQNGFVVYQKEVPPGPFAITDLQLAGGGADLDVSVKEADGSVTTYLVPYAAVPNMLQPGVSNYDFAAGRSHIEGASKQSDFVQAGYQYGFNNLLTLYGGSMVANNYYAFTLGTGWNTRIGAISVDATKSHSKQDNGDVFDGQSYQIAYNKFVSQTSTRFGLAAWRYSSRDYRTFNDHVWANNKDNYRRDENDIYDIADYYQNDFGRKNSFSANMSQSLPEGWGSVSLSTLWRDYWGRSGSSKDYQLSYSNNWRRISYTLAASQAYDENHHEEKRFNIFISIPFDWGDDVTTPRRQIYMSNSTTFDDQGFASNNTGLSGTVGSRDQFNYGGNLSYQHQGNETTAGANLTWNAPVATVNGSYSQSSTYRQAGASVSGGIVAWSGGVNLANRLSETFAVMNAPGIKDAYVNGQKYRTTNRNGVVIYDGMTPYRENHLMLDVSQSDSEAELRGNRKIAAPYRGAVVLVNFDTDQRKPWFIKALRADGQPLMFGYEVNDIHGHNIGVVGQGSQLFIRTNEVPPSVNVAIDKQQGLSCTITFGKEIDESRNYICQ

SEQ ID NO: 13559 - protein, 266 aa, Escherichia coli
MAKSLFRALVALSFLAPLWLNAAPRVITLSPANTELAFAAGITPVGVSSYSDYPPQAQKIEQVSTWQGMNLERIVALKPDLVIAWRGGNAERQVDQLASLGIKVMWVDATSIEQIANALRQLAPWSPQPDKAEQAAQSLLDQYAQLKAQYADKPKKRVFLQFGINPPFTSGKESIQNQVLEVCGGENIFKDSRLPWPQVSREQVLARSPQAIVITGGPDQIPKIKQYWGEQLKIPVIPLTSDWFERASPRIILAAQQLCNALSQVD

SEQ ID NO: 13560 - protein, 721 aa, Escherichia coli
MDEIPALAEKDDDSVINSLEQIIPGTAAEFDFNHQRLNLSIPQIALYRNARGYVSPSRWDDGIPTLFTNYSFTGSDNRYRQGNRSQRQYLNMQNGANFGPWRLRNYSTWTRNDQASSWNTISSYLQRDIKALKSQLLLGESATSGSIFSSYTFTGVQLASDDNMLPNSQRGFAPTVRGIANSSAIVTIRQNGYVIYQSNVPAGAFEINDLYPSSNSSDLEVTIEESDGTQRRFIQPYSSLPMMQRPGHLKYSATAGRYRADANSDSKEPEFAEATAIYGLNNTFTLYGGLLGSEDYYALGIGIGGTLGALGALSMDINRADTQFDNQHSFHGYQWRTQYIKDIPETNTNIAVSYYRYTNDGYFSFDEANTRNWDYNSRQKSEIQFNISQTIFDGVSLYASGSQQDYWGNNEKNRNISVGVSGQQWGIGYSLNYQYSRYTDENNDRALSLNLSIPLERWLPHSRVSYQMTSQKDRPTQHEMRLDGSLLDDGRLSYSLEQSLDDDNNHNSSLNASYRSPYGTFSAGYSYGNDSSQYNYGVTGGVVIHPHGVTLSQYLGNAFALIDANGASGVRIQNYPGIATDPFGYAVIPYLTTYQENRLSVDTTQLPDNVDLEQTTQFVVPNRGAMVAARFNANIGYRVLVTVSDRNGKPLPFGALASNDDTGQQSIVDEGGILYLSGISSKSQSWTVRWGNQADQQCQFAFSTPDSEPTTSVLQGTAQCH

SEQ ID NO: 13561 - protein, 388 aa, Escherichia coli
MHIRKHRLAGFFVRLFVACAFAAQAPLSSAELYFNPRFLADDPQAVADLSRFENGQELPPGTYRVDIYLNNGYMATRDVTFNTGDSEQGIVPCLTRAQLASMGLNTASVSGMNLLADDACVPLTSMIHDATAHLDVGQQRLNLTIPQAFMSNRARGYIPPELWDPGINAGLLNYNFSGNSVQNRIGGNSHYAYLNLQSGLNIGAWRLRDNTTWSYNSSDSSSGSKNKWQHINTWLERDIIPLRSRLTLGDGYTQGDIFDGINFRGAQLASDDNMLPDSQRGFAPVIHGIARGTAQVTIKQNGYDIYNSTVPPGPFTINDIYAAGNSGDLQVTIKEADGSTQIFTVPYSSVPLLQREGHTRYSITAGEYRSGNAQQEKPLRNPQKTRQA

SEQ ID NO: 13562 - protein, 819 aa, Escherichia coli
MDTVNIYRLSFVSCLVMAMPCALAVEFNLNVLDKSMRDRIDISLLKEKGVIAPGEYFVSVAVNNNQISNGQKINWQKKGDKTIPCINDSLVDKFGLKPDIRQSLPQIDRCIDFSSRPEMLFNFDQANQQLNISIPQAWLAWHSENWAPPSTWKEGVAGVLMDYNLFASNYRPQDGSSSTNLNAYGTTGINAGSWRLRSDYQLNNTDSEDSHEQSGGISRTYLFRPLPQLGSKLTLGETDFSSNIFDGFSYTGAALASDDRMLPWELRGYAPQISGIAQTNATVTISQSGRVIYQKKVPPGPFIIDDLNQSVQGTLDVKVTEEDGRVNNFQVSAASTPFLTRQGQVRYKLAAGQPRPSMSHQTENETFFSNEVSWGMLSNTSLYGGLLLSGDDYHSAAMGIGQNMLWLGALSFDVTWASSHFDTQQDERGLSYRFNYSKQVDATNSTISLAAYRFSDRHFHSYANYLDHKYNDSDAQDEKQTISLSVGQPITPLNLNLYANLLHQTWWNADASTTANITAGFNVDIGDWRDISISTSFNTTHYEDKDRDNQIYLSISLPFGNGGRVGYDMQNSSHSTTHRMSWNDTLDERNSWGMSAGLQSDRPDNGAQVSGNYQHLSSAGEWDISGTYAANDYSSVSSSWSGSFTATQYGAAFHRRSSTNEPRLMVSTDGVADIPVQGNLDYTNHFGIAVVPLISSYQPSTVAVNMNDLPDGVTVAENVIKETWIEGAIGYKSLASRSGKDVNVIIRNASGQFPPLGADIRQDDSGISVGMVGEEGHAWLSGVAENQKFTVVWGDSQHCSLHLPEHMEDTANRLILPCH

SEQ ID NO: 13563 - protein, 266 aa, Escherichia coli; identical to SEQ ID NO: 1894

SEQ ID NO: 13564 - protein, 207 aa, Escherichia coli; identical to SEQ ID NO: 2211

SEQ ID NO: 13565 - protein, 863 aa, Escherichia coli
MHIRKHRLAGFFVRLFVACAFAAQAPLSSAELYFNPRFLADDPQAVADLSRFENGQELPPGTYRVDIYLNNGYMATRDVTFNTGDSEQGIVPCLTRAQLASMGLNTASVSGMNLLADDACVPLTSMIHDATAHLDVGQQRLNLTIPQAFMSNRARGYIPPELWDPGINAGLLNYNFSGNSVQNRIGGNSHYAYLNLQSGLNIGAWRLRDNTTWSYNSSDSSSGSKNKWQHINTWLERDIIPLRSRLTLGDGYTQGDIFDGINFRGAQLASDDNMLPDSQRGFAPVIHGIARGTAQVTIKQNGYDIYNSTVPPGPFTINDIYAAGNSGDLQVTIKEADGSTQIFTVPYSSVPLLQREGHTRYSITAGEYRSGNAQQEKPRFFQSTLLHGLPAGWTIYGGTQLADRYRAFNFGIGKNMGALGALSVDMTQANSTLPDDSQHDGQSVRFLYNKSLNESGTNIQLVGYRYSTSGYFNFADTTYSRMNGYNIETQDGVIQVKPKFTDYYNLAYNKRGKLQLTVTQQLGRTSTLYLSGSHQTYWGTSNVDEQFQAGLNTAFEDSNWTLSYSLTKNAWQKGRDQMLALNVNIPFSHWLRSDSKSQWRHASASYSMSHDLNGRMTNLVGVYGTLLEDNNLSYSVQTGYAGGGDGNSGSTGYATLNYRGGYGNANIGYSHSDDIKQLYYGVSGGILAHANGVTLGQPLNETVVLVKAPGAKDAKVENQTGVRTDWRGYAVLPYATEYRENRVALDTNTLADNVDLDNAVANVVPTRGAIVRAEFKARVGIKLLMTLTHNNKPLPFGAMVTSESSQSSGIVADNGQVYLSGMPLAGKVQVKWGEEENAHCVANYQLPPESQQQLLTQLSAECR

SEQ ID NO: 13566 - protein, 368 aa, Escherichia coli; identical to SEQ ID NO: 3872

SEQ ID NO: 13567 - protein, 266 aa, Escherichia coli; identical to SEQ ID NO: 1894

SEQ ID NO: 13568 - protein, 826 aa, Escherichia coli; identical to SEQ ID NO: 6475

SEQ ID NO: 13569 - protein, 191 aa, Escherichia coli; identical to SEQ ID NO: 2727

SEQ ID NO: 13570 - protein, 213 aa, Escherichia coli; identical to SEQ ID NO: 2232

SEQ ID NO: 13571 - protein, 784 aa, Escherichia coli; identical to SEQ ID NO: 2244

SEQ ID NO: 13572 - protein, 822 aa, Escherichia coli; identical to SEQ ID NO: 11208

SEQ ID NO: 13573 - protein, 678 aa, Escherichia coli; identical to SEQ ID NO: 6376

SEQ ID NO: 13574 - protein, 646 aa, Escherichia coli
MRLATPRINLSESLTGVPGLQVQNRQNYAQDLQLSIRGFGSRSTYGIRGIRLYVDGIPATMPDGQGQTSNIDLSSVQNVEVLRGPFSALYGNASGGVMNVTTQTGQQPPTIEASSYYGSFGSWRYGLKATGATGDGTQPGDFDYTVSTTRFTTHGYRDHSGAQKNLANAKLGVRIDDASKLSLIFNSVDIKADDPGGLTEAEWKANPQQAPRAEQYDTRKTIKQTQAGLRYERSLSAQDDMSVMMYAGERETTQYQSIPMAPQLNPSHAGGVITLQRHYQGIDSRWTHRGELGVPVTLSTGLNYENMSENRKGYNNFRLNRGVPEYGQKGELRRDERNLMWNVDPYLQTQWQLTDKLSLDAGVRYSSVWFDSNDHYVTPGNGDDSGDASYHKWLPAGSLKYAMTDAWNVYLAAGRGFETPTINELSYRADGQSGMNFGLKPSTNDTIEIGSKTRIGDGLLSLALFQTDTDDEIVVDSSSGGRTIYKNAGKTRRQGAELAWDQRFAGDFRVKASWTWLDATYRSNVCNEQDCNGNRMPGIARNMAFASIGYIPEDGWYAGTEARYMGDIMADDENTAKAPSYTLVGLFTGYKYNYHNLTVDLFGRVDNLFDKEYVGSVIVNESNGRYYEPAPGRNYGVGINIAWRFE

SEQ ID NO: 13575 - protein, 660 aa, Escherichia coli; identical to SEQ ID NO: 6291

SEQ ID NO: 13576 - protein, 224 aa, Escherichia coli; identical to SEQ ID NO: 3431

SEQ ID NO: 13577 - protein, 606 aa, Escherichia coli; identical to SEQ ID NO: 12174

SEQ ID NO: 13578 - protein, 857 aa, Escherichia coli
MDGRFAHLHFFFPFSLSVLALTVAGSFSATAGKFNPRFLEDTAGINQHVDLSMYETDHGAQLPGTYRVSLIVNEQKMETRTLEFKAATESQRKEMGEFLIPCLSRTQLADMGVRVDSFSALNLIPAEACVAFNEIIPQATSHFDFSEQKLVMSFPQAAMQQVARGTVPESRWDDGVPALLLDYSFSGSNSSHDTKSYNRYIDENGNHHQDKNETSQTNDSYYLSMRSGLNLGAWRLRNYSNWSYSNGEKQWDNIGTYVTRAIVPLKAQLTLGDTATPSDIFDSVQMRGALLASDEEMLPDSQRGFAPVVRGIAKSNAEVSIEQNGYVIYRAFVQPGAFEINDLYPTANSGDLTVIVKEADGSEQRFIQPFSSVAVFQREGHLKYSLSAGEYRAGNYDSANPRFGQFNAMYGLPFGMTTYGGALISKDYNAFALGLGKNFGSIGAISVDITQAKSTLNNNATDQGQSYRFLYSKSFASGTDFRLLGYKYSTSGFYTFQEATDVRSGADSDYGRYHKRSEIQGNLTQQLGTYGSVYFNMTQQDYWNDDGKRLSLATGYNGRIGRVNYSIAYSWNKSPEWDENDQLWSFNISIPFGRAWSNYRVTTDQDGRTIQQLGVNGTLLEDRNLSYNVQEGYSSNGVGNSGNASLAYQGGAGNISVGYSYGKDYQQTNYSLRGGIVAHSEGISLSQPLGETIAIVSAPGARGAKVLNNSGVSVDWQGNAVVPYLSIYRENDVSIRSETLNDSVDMNSAFQTIVPTRGAVVRAHFDTRVGYRVLMTLIRQNGVSVPFGATATLVSDTTEQISGIVGEDGQLYISGMPKTGNVKIVWGKDTSQQCVAKYELPVEEKNSGIISVTANCQ

SEQ ID NO: 13579 - protein, 863 aa, Escherichia coli
MHIRKHRLAGFFVRLFVACAFAAQATLSSAELYFNPRFLADDPQAVADLSRFENGQELPPGTYRVDIYLNNGYMATRDVTFNTGDSEQGIVPCLTRAQLASMGLNTASVSGMNLLADDACVPLTSMIHDATAHLDVGQQRLNLTIPQAFMSNRARGYIPPELWDPGINAGLLNYNFSGNSVQNRIGGNSHYAYLNLQSGLNIGAWRLRDNTTWSYNSSDRSSGSKNKWQHINTWLERDIIPLRSRLTLGDGYTQGDIFDGINFRGVQLASDDNMLPDSQRGFAPVIHGIARGTAQVTIKQNGYDIYNSTVPPGPFTINDIYAAGNSGDLQVTIKEADGSTQIFTVPYSSVPLLQREGHTRYSITAGEYRSGNAQQEKPRFFQSTLLHGLPAGWTIYGGTQLADRYRAFNFGIGKNMGALGALSVDMTQANSTLPDDSQHDGQSVRFLYNKSLNESGTNIQLVGYRYSTSGYFNFADTTYSRMNGYNIETQDGVIQVKPKFTDYYNLAYNKRGKLQLTVTQQLGRTSTLYLSGSHQTYWGTSNVDEQFQAGLNTAFEDINWTLSYSLTKNAWQKGRDQMLALNVNIPFSHWLRSDSKSQWRHASASYSMSHDLNGRMTNLAGVYGTLLEDNNLSYSVQTGYAGGGDGNSGSTGYATLNYRGGYGNANIGYSHSDDIKQLYYGVSGGVLAHANGVTLGQPLNETVVLVKAPGAKDAKVENQTGVRTDWRGYAVLPYATEYRENRVALDTNTLADNVDLDNAVANVVPTRGAIVRAEFKARVGIKLLMTLTHNNKPLPFGAMVTSESSQSSGIVADNGQVYLSGMPLAGKVQVKWGEEENAHCVANYQLPPESQQQLLTQLSAECR

SEQ ID NO: 13580 - protein, 774 aa, Escherichia coli
MTPLRVFRKTTPLVNAIRLSLLPLAGLSFSAFAAQVNIAPGSLDKALNQYAAHSGFTLSVDASLTRGKQSNGLHGDYDVESGLQQLLDGSGLQVKPLGNNSWTLEPAPAPKEDALTVVGDWLGDARENDVFEHAGARDVIRREDFAKTGATTMREVLNRIPGVSAPENNGTGSHDLAMNFGIRGLNPRLASRSTVLMDGIPVPFAPYGQPQLSLAPVSLGNMDAIDVVRGGGAVRYGPQSVGGVVNFVTRAIPQDFGIEAGVEGQLSPTSSQNNPKETHNLMVGGTADNGFGTALLYSGTRGSDWREHSATRIDDLMLKSKYAPDEVHTFNSLLQYYDGEADMPGGLSRADYDADRWQSTRPYDCFWGRRKLASLGYQFQPDSQHKFNIQGFYTQTLRSGYLEQGKRITLSPRNYWVRGIEPRYSQIFMIGPSAHEVGVGYRYVNESTHEMRYYTATSSGQLPSGSSPYDRDTRSGTEAHAWYLDDKIDIGNWTITPGMRFEHIESYQNNAITGTHEEVSYNAPLPALNVLYHLTDSWNLYANTEGSFGTVQYSQIGKAVQSGNVEPEKARTWELGTRYDDGALTAEMGLFLINFNNQYDSNQTNDTVTARGKTRHTGLETQARYDLGTLTPTLDNVSIYASYAYVNAEIREKGDTYGNLVPFSPKHKGTLGVDYKPGNWTFNLNSDFQSSQFADNANTVKESADGSTGRIPGFMLWGARVAYDFGPQMADLNLAFGVKNIFDQDYFIRSYDDNNKGIYAGQPRTLYMQGSLKF

SEQ ID NO: 13581 - protein, 170 aa, Escherichia coli; identical to SEQ ID NO: 2564

SEQ ID NO: 13582 - protein, 765 aa, Escherichia coli
MQFHISSPDKNSGKAILLKRDDDLGDCLNLAEMISQSSIRYDVNDQRLDIDVPQAWIMKNYQNYVDPSLWENGINAAMLSYNLNGYHSESPGRTNDSIYAAFNGGINLGAWRLRASGNYNWMTNVHSDYDFQNRYLQRDLASLRSQLVIGESYTTGETFDSVSIRGIRLYSDSRMLPPVLASFAPIIHGVANTNAKVTVMQNGYKIYETTVPPGAFAIDDLSPSGYGSDLIVTIEEADGTKRTFSQPFSSVVQMLRPGVGRWDISAGQVLKDSIQDEPNLFQASYYYGLNNYLTGYTGIQLTDNNYTAGLLGLGMNTPVGAFSVDVTHSNVSIPDDKTYQGQSYRISWNKLFENTSTSLNIAAYRYSTQHYLGLNDALTLIDEVEHPEQDLEPKSMRNYSRMKNQVTVSINQPLKFEKKDYGSFYLSGSWSDYWASGQNSTNYSIGYSNSASWGSYSISAQRSLNEDGQTDDSIYLSFTIPIENLLDTDHRSSGFQSIDTQLNSDFKGNNQLNISSSGYSDTNRISYSVNTGYMMNKSSDDLSYIGGHASYESPWGTLSGSASASSDNSRQFSLNTDGGFVLHSGGLTFSNDSFSDSDTLAVIQAPGAKGARINYGNSTVDRWSYGVTSALSPYHENRIALDINDLENDVELKSTSTVAIPRQGAVVFADFETVQGQSAIMNIVRSDGKNIPFAEDIYDEQNNIIGNVGQGGQAFVHGIEQEENIRITWIEEGKPVSCFAHYQQNTASEKIAQSIILNGLRCQIQ

SEQ ID NO: 13583 - protein, 200 aa, Escherichia coli; identical to SEQ ID NO: 5121

SEQ ID NO: 13584 - protein, 208 aa, Escherichia coli; identical to SEQ ID NO: 1948

SEQ ID NO: 13585 - protein, 826 aa, Escherichia coli; identical to SEQ ID NO: 5098

SEQ ID NO: 13586 - protein, 165 aa, Escherichia coli; identical to SEQ ID NO: 5130

SEQ ID NO: 13587 - protein, 351 aa, Escherichia coli; identical to SEQ ID NO: 4688

SEQ ID NO: 13588 - protein, 200 aa, Escherichia coli; identical to SEQ ID NO: 1785

SEQ ID NO: 13589 - protein, 274 aa, Escherichia coli; identical to SEQ ID NO: 2301

SEQ ID NO: 13590 - protein, 249 aa, Escherichia coli; identical to SEQ ID NO: 5120

SEQ ID NO: 13591 - protein, 518 aa, Escherichia coli; identical to SEQ ID NO: 2350

SEQ ID NO: 13592 - protein, 760 aa, Escherichia coli
MENNRNFPARQFHSLTFFAGLCIGITPVAQALAAEGQANADDTLVVEASTPSLYAPQKSADPKFSRPVADTTRTMTVISEQVIKDQGATNLTDALKNVPGVGAFFAGENGNSTTGDAIYMRGADTSNSIYIDGIRDIGSVSRDTFNTEQVEVIKGPSGTDYGRSAPTGSINMISKQPRNDSGIDASASIGSAWFRRGTLDVNQVIGDTTAVRLNVMGEKTHDAGRNKVKNERYGVAPSVAFGLGTANRLYLNYLHVTQHNTPDGGIPTIGLPGYSAPSAGTAALNHSGKVDTHNFYGTDSDYDDSTTDTATMRFEHDINDNTTIRNTTRWSRVKQDYLMTAIMGGASNITQPTSDVNSWTWSRTANTKDVSNKILTNQTNLTSTFYTGAIGHDVSTGVEFTRETQTNYGVNPVTLPAVNIYHPDSSIHPGGLTRNGANANGQTDTFAIYAFDTLQITRDFELNGGIRLDNYHTEYDSATACGGSGRGAITCPAGVAKGSPVTTVDTAKSGNLVNWKAGALYHLTENGNVYINYAVSQQPPGGNNFALAQSGSGNSANRTDFKPQKANTSEIGTKWQVLDKRLLLTAALFRTDIENEVEQNDDGTYSQYGKKRVEGYEISVAGNITPAWQMIGGYTQQKATIKNGKDVAQDGSSSLPYTPEHAFTLWSQYQATDDISVGAGARYIGSMHKGSDGAVGTPAFTEGYWVADAKLGYRVNRNLDFQLNVYNLFDTDYVASINKSGYRYHPGEPRTFLLTANMHF

SEQ ID NO: 13593 - protein, 162 aa, Escherichia coli; identical to SEQ ID NO: 1965

SEQ ID NO: 13594 - protein, 222 aa, Escherichia coli
MLIIFYLIISASAHAAGGIALGATRIIYPADAKQTAVWIRNSHTNERFLVNSWIENSSGVKEKSFIITPPLFVSEPKSENTLRIIYTGPPLAADRESLFWMNVKTIPSVDKNALNGRNVLQLAILSRMKLFLRLIQLQELPAEAPDTLKFSRSGNYINVHNPSPFYVTLVNLQVGSQKLGNAMAAPRVNSQIPLPSGVQGKLKFQTVNDYGSVTPVREVNLN

SEQ ID NO: 13595 - protein, 237 aa, Escherichia coli
MRKITQAISAVCLLFALNSSAVALASSPSPLNPGTNVARLAEQAPIHWVSVAQIENSLAGRPPMAVGFDIDDTVLFSSPGFWRGKKTFSPESEDYLKNPVFWEKMNNGWDEFSIPKEVARQLIDMHVRRGDAIFFVTGRSPTKTETVSKTLADNFHIPATNMNPVIFAGDKLGQNTKSQWLQDKNIRIFYGDSDNDITAARDVGARGIRILRASNSTYKPLPQAGAFGEEVIVNSEY

SEQ ID NO: 13596 - protein, 478 aa, Escherichia coli; identical to SEQ ID NO: 2404

SEQ ID NO: 13597 - protein, 200 aa, Escherichia coli; identical to SEQ ID NO: 1784

SEQ ID NO: 13598 - protein, 250 aa, Escherichia coli; identical to SEQ ID NO: 3707

SEQ ID NO: 13599 - protein, 361 aa, Escherichia coli; identical to SEQ ID NO: 3061

SEQ ID NO: 13600 - protein, 266 aa, Escherichia coli; identical to SEQ ID NO: 5141

SEQ ID NO: 13601 - protein, 512 aa, Escherichia coli; identical to SEQ ID NO: 2973

SEQ ID NO: 13602 - protein, 243 aa, Escherichia coli
MTFMKGLPLLLLVASLCSHAALQPDRTRIVFNANDKATSLRVDNRSDKLPYLAYSWLENEKGEKSDDLLVALPPIQRLEPKATTQVRIVKQASTTKLPGDRETLFFYNMREIPPAPEKNSDHAVLQVAIQSRIKVFWRPAALREKAGEKVELQLQVSQQGNQLTLKNPTAYYLTIAYLGRNEKGVLPGFKTVMVAPFSTVNTNIGNYSGSQFYLGYMDDYGALRMTTLNYSGQCHLQAVEAKK

SEQ ID NO: 13603 - protein, 866 aa, Escherichia coli; identical to SEQ ID NO: 4866

SEQ ID NO: 13604 - protein, 760 aa, Escherichia coli; identical to SEQ ID NO: 3026

SEQ ID NO: 13605 - protein, 359 aa, Escherichia coli; identical to SEQ ID NO: 2329

SEQ ID NO: 13606 - protein, 729 aa, Escherichia coli; identical to SEQ ID NO: 3720

SEQ ID NO: 13607 - protein, 834 aa, Escherichia coli; identical to SEQ ID NO: 3692

SEQ ID NO: 13608 - protein, 823 aa, Escherichia coli
MALIIKRCLPMVLTGSGMLCTTANAEEYYFDPIMLETTKSGMQTTDLSRFSKKYAQLPGTYQVDIWLNKKKVSQKKITFTANAEQLLQPQFTVEQLRELGIKVDEIPALAEKDDDSVINSLEQIIPGTAAEFDFNHQRLNLSIPQIALYRDARGYVSPSRWDDGIPTLFTNYSFTGSDNRYRQGNRSQRQYLNMQNGANFGPWRLRNYSTWTRNDQASSWNTISSYLQRDIKALKSQLLLGESATSGSIFSSYTFTGVQLASDDNMLPNSQRGFAPTVRGIANSSAIVTIRQNGYVIYQSNVPAGAFEINDLYPSSNSGDLEVTIEESDGTQRRFIQPYSSLPMMQRPGHLKYSATAGRYRADANSDSKEPEFAEATAIYGLNNTFTLYGGLLGSEDYYALGIGIGGTLGALGALSMDINRADTQFDNRHSFHGYQWRTQYIKDIPETNTNIAVSYYRYTNDGYFSFDEANTRNWDYNSRQKSEIQFNISQTIFDGVSLYASGSQQDYWGNNDKNRNISVGVSGQQWGIGYSLNYQYSRYTDQNNDRALSLNLSIPLERWLPRSRVSYQMTSQKDRPTQHEMRLDGSLLDDGRLSYSLEQNLDDDNNHNSSLNASYRSPYGTFSAGYSYGNDSSQYNYGVTGGVVIHPHGVTLSQYLGNAFALIDANGASGVRIQNYPGIATDPFGYAVVPYLTTYQENRLSVDTTQLPDNVDLEQTTQFVVPNRGAMVAARFNANIGYRVLVTVSDRNGKPLPFGALASNDETGQQSIVDEGGILYLSGISSKSQSWTVRWGNQADQQCQFAFSTPDSEPTTSVLQGTAQCH

SEQ ID NO: 13609 - protein, 678 aa, Escherichia coli; identical to SEQ ID NO: 3014

SEQ ID NO: 13610 - protein, 185 aa, Escherichia coli; identical to SEQ ID NO: 8349

SEQ ID NO: 13611 - protein, 170 aa, Escherichia coli [sequence omitted]

SEQ ID NO: 13612 - protein, 998 aa, Escherichia coli; identical to SEQ ID NO: 2953

SEQ ID NO: 13613 - protein, 102 aa, Escherichia coli; identical to SEQ ID NO: 1824

SEQ ID NO: 13614 - protein, 432 aa, Escherichia coli; identical to SEQ ID NO: 2026

SEQ ID NO: 13615 - protein, 241 aa, Escherichia coli; identical to SEQ ID NO: 2922

SEQ ID NO: 13616 - protein, 866 aa, Escherichia coli; identical to SEQ ID NO: 3688

SEQ ID NO: 13617 - protein, 246 aa, Escherichia coli; identical to SEQ ID NO: 3021

SEQ ID NO: 13618 - protein, 747 aa, Escherichia coli; identical to SEQ ID NO: 3670

SEQ ID NO: 13619 - protein, 266 aa, Escherichia coli; identical to SEQ ID NO: 1894

SEQ ID NO: 13620 - protein, 161 aa, Escherichia coli; identical to SEQ ID NO: 2582

SEQ ID NO: 13621 - protein, 840 aa, Escherichia coli; identical to SEQ ID NO: 6560

SEQ ID NO: 13622 - protein, 721 aa, Escherichia coli
MDEIPALAEKDDDSVINSLEQIIPGTAAEFDFNHQRLNLSIPQIALYRDARGYVSPSRWDDGIPTLFTNYSFTGSDNRYRQGNRSQRQYLNMQNGANFGPWRLRNYSTWTRNDQASSWNTISSYLQRDIKALKSQLLLGESATSGSIFSSYTFTGVQLASDDNMLPNSQRGFAPTVRGIANSSAIVTIRQNGYVIYQSNVPAGAFEINDLYPSSNSGDLEVTIEESDGTQRRFIQPYSSLPMMQRPGHLKYSATAGRYRADANSDSKEPEFAEATAIYGLNNTFTLYGGLLGSEDYYALGIGIGGTLGALGALSMDINRADTQFDNQHSFHGYQWRTQYIKDIPETNTNIAVSYYRYTNDGYFSFDEANTRNWDYNSRQKSEIQFNISQTIFDGVSLYASGSQQDYWGNNEKNRNISVGVSGQQWGIGYSLNYQYSRYTDENNDRALSLNLSIPLERWLPRSRVSYQMTSQKDRPTQHEMRLDGSLLDDGRLSYSLEQSLDDDNNHNSSLNASYRSPYGTFSAGYSYGNDSSQYNYGVTGGVVIHPHGVTLSQYLGNAFALIDANGASGVRIQNYPGIATDPFGYAVVPYLTTYQENRLSVDTTQLPDNVDLEQTTQFVVPNRGAMVAARFNANIGYRVLVTVSDRNGKPLPFGALASNDETGQQSIVDEGGILYLSGISSKSQSWTVRWGNQADQQCQFAFSTPDSEPTTSVLQGTAQCH

SEQ ID NO: 13623 - protein, 162 aa, Escherichia coli; identical to SEQ ID NO: 1965

SEQ ID NO: 13624 - protein, 193 aa, Escherichia coli; identical to SEQ ID NO: 2246

SEQ ID NO: 13625 - protein, 207 aa, Escherichia coli; identical to SEQ ID NO: 2212

SEQ ID NO: 13626 - protein, 539 aa, Escherichia coli; identical to SEQ ID NO: 3050

SEQ ID NO: 13627 - protein, 407 aa, Escherichia coli; identical to SEQ ID NO: 11408

SEQ ID NO: 13628 - protein, 224 aa, Escherichia coli; identical to SEQ ID NO: 3115

SEQ ID NO: 13629 - protein, 881 aa, Escherichia coli; identical to SEQ ID NO: 3713

SEQ ID NO: 13630 - protein, 521 aa, Escherichia coli
MPSFIGGLVVFVSAAFNAQAETWFDPAFFKDDPSMVADLSRFEKGQKITPGGYRVDIVLNQTIVDTRNVNFVEITPEKGIAACLTTESLDAMGVNTDAFPAFKQLDKQACVPLAEIIPDASVTFNVNKLRLEISVPQIAIKSNARGYVPPERWDEGINALLLGYSFSGANSIHSSADSDSGDSYFLNLNSGVNLGPWRLRNNSTWSRSSGQTAEWKNLSSYLQRAVIPLKGELTVGDDYTAGDFFDSVSFRGVQLASDDNMLPDSLKGFAPVVRGIAKSNAQITIKQNGYTIYQTYVSPGAFEISDLYSTSSSGDLLVEIKEADGSVNSYSVPFSSVPLLQRQGRIKYAVTLAKYRTNSNEQQESKFAQATLQWGGPWGTTWYGGGQYAEYYRAAMFGLGFNLGDFGAISFDATQAKSTLADQSEHKGQSYRFLYAKTLNQLGTNFQLMGYRYSTSGFYTLSDTMYKHMDGYEFNDGDDEDTPMWSRYYNLFYTKRGKLQVNISQQLGEYGSFYLSGSQQT

SEQ ID NO: 13631 - protein, 816 aa, Escherichia coli; identical to SEQ ID NO: 12597

SEQ ID NO: 13632 - protein, 728 aa, Escherichia coli
MTPQDSDELCLTEAWLAKAGIYVSADYFREGYDATRQCYVLTKAPSVKVDFDVSTQSLALSIPQKGLVKMPENVDWDYGTGAFRVNYNANANIGRNNTSTFGSADLKANIGHWVVNSSASASGGDSGDNSATINAFTATRAIRALSADLTVGKTSTGSSLLGSTGTYGVSLSRNNSMKPGNLGYTPVFSGIANGASRVTLTQNGRLLHSEMVPAGPFSITDVPLYTSGDVTMKITGEDGREQTQLFPLSVMAGQLNPGQHEFSVAVGLSDDDSDLKGGVFAASYGYGLDGLTLRTGGVFNRDWQGISAGAVLGLSYLGAVSADGAYAMAEYRDGSRSGNKVQLSWSKQLEMTNTGLRVSWSRQSEEYEDMSSFDPTELWSQSNHGRRPKDEWNAGISQSVGGLFSLSVSGWQRSYYPAQMTGRYRYSDDNGLDTGITGTLSTQIKGVSLNLGWSGSRNSQGENNRSASASISVPFTLFERRYSSSTSVSTSKGGGTGFSTGVSGSLNDRFSYSLGGGRDSGGGVSSYLNASYSGDRAYLNGALNHSQSGGTSGSVSVSGSVLVVPMAKDIMFSRTTGDTVAVVNVKDTPGVKVTSGDGQTDSDGNLVVPLNSYDWNTVTIDAGTLPLSTELTNTSQKVVPTDKAVVWMPFDALKVKRYLLQVKQRDGEFVPGGTWARDSKNTPLGFVANNGVLMINTVDAPGDITLGQCRIPAARLQDTEKLQEITCE

SEQ ID NO: 13633 - protein, 869 aa, Escherichia coli; identical to SEQ ID NO: 8419

SEQ ID NO: 13634 - protein, 368 aa, Escherichia coli; identical to SEQ ID NO: 3171

SEQ ID NO: 13635 - protein, 673 aa, Escherichia coli; identical to SEQ ID NO: 3719

SEQ ID NO: 13636 - protein, 686 aa, Escherichia coli; identical to SEQ ID NO: 9611

SEQ ID NO: 13637 - protein, 446 aa, Escherichia coli; identical to SEQ ID NO: 2177

SEQ ID NO: 13638 - protein, 363 aa, Escherichia coli; identical to SEQ ID NO: 3347

SEQ ID NO: 13639 - protein, 249 aa, Escherichia coli; identical to SEQ ID NO: 3492

SEQ ID NO: 13640 - protein, 565 aa, Escherichia coli; identical to SEQ ID NO: 5118

SEQ ID NO: 13641 - protein, 386 aa, Escherichia coli; identical to SEQ ID NO: 3094

SEQ ID NO: 13642 - protein, 465 aa, Escherichia coli
MQLSISAPQAWLKYKDANWTPPELWDHGIAGAFLDYNLYASHYAPHQGDNSQNISSYGQAGVNLGAWRLRTDYQYDQSFNNGKSQANNLDFPRIYLFRPIPAINAKLTIGQYDTESSIFDSFHFSGVSLKSDENMLPPDLRGYAPQITGVAQTNAKVTVSQNNRIIYQENVPPGPFAITNLFNTLQGQLDVKVEEEDGQVTQWQVASNSIPYLTRKGQIRYTTAMGKPTSVGGDSLQQPFFWTGEFSWGWLNNVSLYGGSVLTNRDYQSLAAGVGFNLNSLGSLSFDVTRSDAQLHNQDKETGYSYRANYSKRFESTGSQLTFAGYRFSDKNFVTMNEYINDTNHYTNYQNEKESYIVTFNQYLESLRLNTYVSLARNTYWDASSNVNYSLSLSRDFDIGPLKNVSTSLTFSRINWEEDNQDQLYLNISIPWGTSRTLSYGMQRNQDNKISHTASWYDSSDRNNS

SEQ ID NO: 13643 - protein, 765 aa, Escherichia coli
MQFHINSPDINNEKAVLLARDETLGNCLNLTEIIPQASVRYDVNEQRLDIDVPQAWVMKNYQNYVDPSLWENGINAAMLSYNLNGYHSETPGRRNDSIYAAFNGGMNLGAWRLRASGNYNWMTDSGSNYDFKNRYIQRDIASLRSQLILGESYTTGETFDSVSIRGIRLYSDSRMLPPTLASFAPIIHGVANTNAKVTITQGGYKIYETTVSPGAFVIDDLSPSGYGSDLIVTVEESDGSKRTFSQPFSSVVQMLRPGVGRWDISGGQVLKDDIQDEPNLFQASYYYGLNNYLTGYTGIQITDNNYTAGLLGLGLNTSVGAFSFDVTHSNVRIPDDKTYQGQSYRVSWNKLFEETSTSLNIAAYRYSTQNYLGLNDALTLIDEVKHPEQDLEPKSMRNYSRMKNQVTVSINQPLKFEKKDYGSFYLSGSWSDYWASGQNRSNYSIGYSNSASWGSYSVSAQRSWNEDGDTDDSVYLSFTIPIEKLLGTEQRTSGFQSIDTQMSSDFKGNNQLNVSSSGYSDNARVSYSVNTGYTMNKASKDLSYVGGYASYESPWGTLAGSVSANSDNSRQVSLSTDGGFVLHSGGLTFSNDSFSDSDTLAVVQAPGAQGARINYGNSTIDRWGYGVTSALSPYHENRIALDINDLENDVELKSTSAVAVPRQGSVVFADFETVQGQSAIMNITRSDGKNIPFAADIYDEQGNVIGNVGQGGQAFVRGIEQQGNISIKWLEESKPVSCLAHYQQSSEAEKIAQSIILNGIRCQIQ

SEQ ID NO: 13644 - protein, 213 aa, Escherichia coli; identical to SEQ ID NO: 2232

SEQ ID NO: 13645 - protein, 121 aa, Escherichia coli
MNAILSVQGASAPVKKKSFFSKFTRLNMLRLVRAVIPAAVLMMFFPQLAMAAGGAGQDLMASGNTTVKATFGKDSSVVKWVVLAEVLVGAVMYMMTKNVKFLAGFAIISVFIAVGMAVVGL

SEQ ID NO: 13646 - protein, 228 aa, Escherichia coli; identical to SEQ ID NO: 3034

SEQ ID NO: 13647 - protein, 514 aa, Escherichia coli; identical to SEQ ID NO: 8138

SEQ ID NO: 13648 - protein, 161 aa, Escherichia coli; identical to SEQ ID NO: 2582

SEQ ID NO: 13649 - protein, 565 aa, Escherichia coli; identical to SEQ ID NO: 2678

SEQ ID NO: 13650 - protein, 826 aa, Escherichia coli; identical to SEQ ID NO: 3700

SEQ ID NO: 13651 - protein, 237 aa, Escherichia coli; identical to SEQ ID NO: 3793

SEQ ID NO: 13652 - protein, 430 aa, Escherichia coli; identical to SEQ ID NO: 2617

SEQ ID NO: 13653 - protein, 721 aa, Escherichia coli
MDEIPALAENDDDSVINSLEQIIPGTAAEFDFNHQRLNLSIPQIALYRDARGYVSPSRWDDGIPTLFTNYSFTGSDNRYRQGNRSQRQYLNMQNGANFGPWRLRNYSTWTRNDQASSWNTISSYLQRDIKALKSQLLLGESATSGSIFSSYTFTGVQLASDDNMLPNSQRGFAPTVRGIANSSAIVTIRQNGYVIYQSNVPAGAFEINDLYPSSNSGDLEVTIEESDGTQRRFIQPYSSLPMMQRPGHLKYSATAGRYRADANSDSKEPEFAEATAIYGLNNTFTLYGGLLGSEDYYALGIGIGGTLGALGALSMDINRADTQFDNQHSFHGYQWRTQYIKDIPETNTNIAVSYYRYTNDGYFSFDEANTRNWNYNSRQKSEIQFNISQTIFDGVSLYASGSQQDYWGNNDKNRNISVGVSGQQWGVGYSLNYQYSRYTDQNNDRALSLNLSIPLERWLPRSRVSYQMTSQKDRPTQHEMRLDGSLLDDGRLSYSLEQSLDDDNNHNSSVNASYRSPYGTFSAGYSYGNDSSQYNYGVTGGVVIHPHGVTLSQYLGNAFALIDANGASGVRIQNYPGIATDPFGYAVVPYLTTYQENRLSVDTTQLPDNVDLEQTTQFVVPNRGAMVAARFNANIGYRVLVTVSDRNGKPLPFGALASNDETGQQSIVDEGGILYLSGISSKSQSWTVRWGNQADQQCQFAFSTPDSEPTTSVLQGTAQCH

SEQ ID NO: 13654 - protein, 193 aa, Escherichia coli; identical to SEQ ID NO: 2246

SEQ ID NO: 13655 - protein, 355 aa, Escherichia coli; identical to SEQ ID NO: 5115

SEQ ID NO: 13656 - protein, 729 aa, Escherichia coli; identical to SEQ ID NO: 5131

SEQ ID NO: 13657 - protein, 224 aa, Escherichia coli; identical to SEQ ID NO: 3165

SEQ ID NO: 13658 - protein, 641 aa, Escherichia coli; identical to SEQ ID NO: 3774

SEQ ID NO: 13659 - protein, 118 aa, Escherichia coli [sequence omitted]

SEQ ID NO: 13660 - protein, 236 aa, Escherichia coli; identical to SEQ ID NO: 3286

SEQ ID NO: 13661 - protein, 221 aa, Escherichia coli; identical to SEQ ID NO: 3672

SEQ ID NO: 13662 - protein, 231 aa, Escherichia coli; identical to SEQ ID NO: 3055

SEQ ID NO: 13663 - protein, 203 aa, Escherichia coli; identical to SEQ ID NO: 2007

SEQ ID NO: 13664 - protein, 430 aa, Escherichia coli; identical to SEQ ID NO: 2617

SEQ ID NO: 13665 - protein, 774 aa, Escherichia coli; identical to SEQ ID NO: 3122

SEQ ID NO: 13666 - protein, 274 aa, Escherichia coli; identical to SEQ ID NO: 3721

SEQ ID NO: 13667 - protein, 746 aa, Escherichia coli; identical to SEQ ID NO: 5132

SEQ ID NO: 13668 - protein, 412 aa, Escherichia coli
MKQWIAALLLMLIPGVQAAKPQKVTLMVDDVPVAQVLQALAEQEKLNLVVSPDVSGTVSLHLTDVPWKQALQTVVKSAGLITRQEGNILSVHSVAWQNDNIARQEAEQTRAQANLPLENRNITLQYADAGELAKAGEKLLSAKGSMTVDKRTNRLLLRDNKTALSTLEQWVSQMDLPVGQVELSAHIVTINEKSLRELGVKWTLADAQQAGGVGQVTTLGSDLSVATATTHIGFNIGRINGRLLDLELSALEQKQQLDIIASPRLLASHLQPASIKQGSEIPYQVSSGESGATSVEFKEAVLGMEVTPTVLQKGRIRLKLHISQNVPGQVLQQADGEVLAIDKQEIETQVEVKSGETLALGGIFTRKNKSGQDSVPLLGDIPWFGQLFRHDGKEDERRELVVFITPRLVSSE

SEQ ID NO: 13669 - protein, 203 aa, Escherichia coli; identical to SEQ ID NO: 2201

SEQ ID NO: 13670 - protein, 161 aa, Escherichia coli; identical to SEQ ID NO: 2582

SEQ ID NO: 13671 - protein, 879 aa, Escherichia coli; identical to SEQ ID NO: 5138

SEQ ID NO: 13672 - protein, 711 aa, Escherichia coli; identical to SEQ ID NO: 5144

SEQ ID NO: 13673 - protein, 111 aa, Escherichia coli; identical to SEQ ID NO: 5097

SEQ ID NO: 13674 - protein, 161 aa, Escherichia coli
MKKWLLAAGLGLALATSAQAADKIAIVNMGSLFQQVAQKTGVSNMLENEFKGRASELQRMETDLQAKMKKLQSMKAGSDRTKLEKDVMAQRQTFAQKAQAFEQDRARRSNEERGKLVTRIQTAVKSVANSQDIDLVVDANAVAYNSSDVKDITADVLKQVK

SEQ ID NO: 13675 - protein, 591 aa, Escherichia coli; identical to SEQ ID NO: 6379

SEQ ID NO: 13676 - protein, 161 aa, Escherichia coli; identical to SEQ ID NO: 2582

SEQ ID NO: 13677 - protein, 238 aa, Escherichia coli; identical to SEQ ID NO: 8905

SEQ ID NO: 13678 - protein, 371 aa, Escherichia coli; identical to SEQ ID NO: 5126

SEQ ID NO: 13679 - protein, 446 aa, Escherichia coli; identical to SEQ ID NO: 2176

SEQ ID NO: 13680 - protein, 816 aa, Escherichia coli
MNIYRLSFVSCLVVAMPCALAVEFNLNVLDKSMRDRIDISLLKEKGVIAPGEYFVSVAVNNNQISNGQKINWHKNDDKTIPCINDLLVDKFGLKPEVRQSLPLINHCVDFSSRPEMLFNFDQASQQLNITIPQAWLAWHSENWTPPSTWKEGVAGILMDYNLFASSYRPQDGSSSTNLNAYGTAGINTGAWRLRSDYQLNQTDSDDNHEQSGEISRTYLFRPLPQLGSKLTLGETDFSSNIFDGFSYTGAALASDDRMLPWELRGYAPQISGIAQTNATVTISQSGRVIYQKKVPPGPFIIDDLNQSVQGTLDVKVTEEDGRVNNFQVSAASTPFLTRQGQVRYKLAAGQPRPSMSHQTENETFFSNEVSWGMLSNTSLYGGLLLSGDDYHSAAIGIGQNMLWLGALSFDVTWASSHFDTQQDERGLSYRFNYSKQVDATNSTISLAAYRFSDRHFHSYANYLDHKYNDSDAQDEKQTISLSVGQPITPLNLNLYANLLHQTWWNADASTTANITAGFNVDIGDWRDISISTSFNTTHYEDKDRDNQIYLSISLPFGNGGRVGYDMQNSSHSTTHRMSWNDTLDERNSWGMSAGLQSDRPDNGAQVSGNYQHLSSAGEWDISGTYAANDYSSVSSSWSGSFTATQYGAAFHRRSSTNEPRLMVSTDGVADIPVQGNLDYTNHFGIAVVPLISSYQPSTVAVNMNDLPDGVTVAENVIKETWIEGAIGYKSLASRSGKDVNVIIRNASGQFPPLGADIRQDDSGISVGMVGEEGHAWLSGVAENQKFTVVWGDSQHCSLHLPEHMEDTANRLILPCH

SEQ ID NO: 13681 - protein, 669 aa, Escherichia coli
MIVSASGYEKKLTNAAASVSVISQEELQSSQYHDLAEALRSVEGVDVESGTGKTGGLEISIRGMPASYTLILIDGVRQGGSSDVTPNGFSAMNTGFMPPLAAIERIEVIRGPMSTLYGSDAMGGVVNIITRKNADKWLSSVNAGLNLQESNKWGNSSQFNFWSSGPLVDDSVSLQVRGSTQQRQGSSVTSLSDTAATRIPYPTESQNYNLGARLDWKASEQDVLWFDMDTTRQRYDNRDGQLGSLTGGYDRTLRYERNKISAGYDHTFTFGTWKSYLNWNETENKGRELVRNVLKRDKWGLAGQLRELKESNLILNSLLLTPLGESHLVTVGGEYQSSSMKDGVVLASTGETFRQKSWSVFAEDEWHLTDALALTAGSRYEHHEQFGGHFSPRAYLVWDVADAWTLKGGVTTGYKAPRMGQLHKGISGVSGQGKTNLLGNPDLKPEESVSYEAGVYYDNPAGLNANITGFMTDFSNKIVSYSINDNTNSYINSGKARLHGVEFAGTLPLWSEDVTLSLNYTWTRSEQRDGDNKGAPLSYTPEHMVNAKLNWQITEEVASWLGARYRGKTPRFTQNYSSLSAVQKKVYDEKGEYLKAWTVVDAGLSWKVTDALTLNAAVNNLLNKDYSDVSLYSAGKSTLYAGDYFQTGSSTTGYVIPERNYWMSLNYQF

SEQ ID NO: 13682 - protein, 551 aa, Escherichia coli; identical to SEQ ID NO: 2447

SEQ ID NO: 13683 - protein, 656 aa, Escherichia coli; identical to SEQ ID NO: 5108

SEQ ID NO: 13684 - protein, 878 aa, Escherichia coli; identical to SEQ ID NO: 12633

SEQ ID NO: 13685 - protein, 191 aa, Escherichia coli; identical to SEQ ID NO: 2727

SEQ ID NO: 13686 - protein, 518 aa, Escherichia coli; identical to SEQ ID NO: 2349

SEQ ID NO: 13687 - protein, 546 aa, Escherichia coli
MYKKLKLTTISELIKNIYCSLSVIIIGCASAYAVEFNKDLIEAEDRENVNLSQFETDGQLPVGKYSLSTLINNKRTPIHLDLQWVLIDNLTAVCVTPEQLTLLGFTDEIIEEAQQNLIDGCYPIEKEKQITTYLDKGKMQLSISAPQAWLKYKDANWTPPELWDHGIAGAFLDYNLYASHYAPHQGDNSQNISSYGQAGVNLGAWRLRTDYQYDQSFNNGKSQANNLDFPRIYLFRPIPAINAKLTIGQYDTESSIFDSFHFSGVSLKSDENMLPPDLRGYAPQITGVAQTNAKVTVSQNNRIIYQENVPPGPFSITNLFNTLQGQLDVKVEEEDGRVTQWQVASNSIPYLTRKGQIRYTTAMGKPTSVGGDSLQQPFFWTGEFSWGWLNNVSLYGGSVLTNRDYQSLATGVGFNLNSLGSLSFDVTRSDAQLHNQNKETGYSYRANYSKRFESTGSQLTFAGYRFSDKNFVSMNEYINDTNHYTNYQNEKESYIVTFNQYLESLRLNTYVSLARNTHWDASSNVNYSLSLSRDFDIGPLKTYPPH

SEQ ID NO: 13688 - protein, 118 aa, Escherichia coli [sequence omitted]

SEQ ID NO: 13689 - protein, 368 aa, Escherichia coli
MNKTITALAILMASFAANASVLPETPVPFKSGTGAIDNDTVYIGLGSAGTAWYKLDTQAKDKKWTALAAFPGGPRDQATSAFIDGNLYVFGGIGKNSEGLTQVFNDVHKYNPKTNSWVKLVSHAPMGMAGHVTFVHNGKAYVTGGVNQNIFNGYFEDLNEAGKDSTAIDKINAHYFDKKAEDYFFNKFLLSFDPSTQQWSYAGESPWYGTAGAAVVNKGDKTWLINGEAKPGLRTDAVFELDFTGNNLKWNKLAPVSSPDGVAGGFAGISNDSLIFAGGAGFKGSRENYQNGKNYAHEGLKKSYSADIHLWHNGKWDKSGELSQGRAYGVSLPWNNSLLIIGGETAGGKAVTDSVLISVKDNKVTVQN

SEQ ID NO: 13690 - protein, 731 aa, Escherichia coli
MARSKTAQPKHSLRKIAVVVATAVSGMSVYAQAAVEPKEDTITVTAAPAPQESAWGPAATIAAKHSATATKTDTPIEKTPQSISVVTREEMDIKQPATVKEALDYTPSVFSTRGSSTTYDVVSIRGFTTASTVNTNQYLDGLKLQGDNYSEASIDPYFLERVELLRGPVSVLYGKSHPGGVVSMVSKRPSTDPIKEIQFKMGTDNLWQTGFDFSDAIDDDGVWSYRLTGLGRSQDAQQKYAKTTRYAVAPSFSWRPDDKTDFTFLSNFQSDPDAGYYGWLPRQGTVVPYQDANGSWHKLPTDFNEGEKDNKMSRRQQLIGYSFAHEFNDTFTVRQNLRYTRIHTLYDAVYGNGYIAPAQISRAYVRSDEDLNSFTVDTQLQSNFAIGAVAHTLLTGVDYLRMRNDIDANYGTANPISMTDPQYGNANININFPYAVINRQEQTGLYIQDQSEWNKWVLTLGGRYDFAKTSTYTRSTSSLDEINDQQFTWRGGINYLFDNGISPYFSYSESFEPVSGATKEGKPFDPSRGKQYEAGVKYVPKDTPVTVTASVFQLTKDKNLTADPSNTLFSVQGGEIRSRGFEIEAKAAVNANINVTAAYSYTDAEYTKDTLYKGKRPAEVPRNMASLWADYTFHETALSGLSLGAGARYFGDTSSFYTTGDKTNQTFNVGGYTLVDAMIKYDLARFGMPGSSVGVNVNNLFDREYVSSCYRDYACYWGAERQVVATATFRF

SEQ ID NO: 13691 - protein, 232 aa, Escherichia coli; identical to SEQ ID NO: 2087

SEQ ID NO: 13692 - protein, 614 aa, Escherichia coli; identical to SEQ ID NO: 3301

SEQ ID NO: 13693 - protein, 130 aa, Escherichia coli; identical to SEQ ID NO: 3706

SEQ ID NO: 13694 - protein, 203 aa, Escherichia coli; identical to SEQ ID NO: 2009

SEQ ID NO: 13695 - protein, 407 aa, Escherichia coli; identical to SEQ ID NO: 6407

SEQ ID NO: 13696 - protein, 432 aa, Escherichia coli; identical to SEQ ID NO: 2026

SEQ ID NO: 13697 - protein, 208 aa, Escherichia coli; identical to SEQ ID NO: 1949

SEQ ID NO: 13698 - protein, 641 aa, Escherichia coli; identical to SEQ ID NO: 6206

SEQ ID NO: 13699 - protein, 331 aa, Escherichia coli; identical to SEQ ID NO: 2705

SEQ ID NO: 13700 - protein, 359 aa, Escherichia coli; identical to SEQ ID NO: 2329

SEQ ID NO: 13701 - protein, 368 aa, Escherichia coli; identical to SEQ ID NO: 4616

SEQ ID NO: 13702 - protein, 888 aa, Escherichia coli
MIGMGLVCSALPALAMEAWNNQQGGNKYQVIFDGKIYENAWWVSSTNCPGKAKANDATNPWRLKRTATAAEISQFGNTLSCEKSGSSSSSNSNTPASNTPANGGSATPAQGTVPSNSSVVAWNKQQGGQTWYVVFNGAVYKNAWWVASSNCPGDAKGNDASNPWRYVRAATATEISETSNPQSCTSAPQPAPDVKPAPDVKPAPDVQPAPADKSNDNYAVVAWKGQEGSSTWYVIYNGGIYKNAWWVGAANCPGDAKENDASNPWRYVRAATATEISQYGNPGSCSVKPDNNGGAVTPVDPTPETPVTPTPDNSEPSTPADSGNDYSLQAWSGQEGSEIYHVIFNGNVYKNAWWVGSKDCPRGTSAENSNNPWRLERTATAAELSQYGNPTTCEIDNGGVIVADGFQASKAYSADSIVDYNDAHYKTSVDQDAWGFVPGGDNPWKKYEPAKAWSASTVYVKGDRVVVDGQAYEALFWTQSDNPALVANQNATGSNSRPWKPLGKAQSYSNEELNNAPQFNPETLYASDTLIRFNGVNYISQSKVQKVSPSDSNPWRVFVDWTGTKERVGTPKKAWPKHVYAPYVDFTLNTIPDLAALAKNHNVNHFTLAFVVSKDANTCLPTWGTAYGMQNYAQYSKIKALREAGGDVMLSIGGANNAPLAASCKNVDDLMQHYYDIVDNLNLRVLDFDIEGTWVADQASIERRNLAVKKVQDKWKSEGKDIAIWYTLPILPTGLTPEGMNVLSDAKAKGVELAGVNVMTMDYGNAICQSANTEGQNIHGKCATSAIANLHSQLKGLHPNKSDAEIDAMMGTTPMVGVNDVQGEVFYLSDARLVMQDAQKRNLGMVGIWSIARDLPGGTNLSPEFHGLTKEQAPKYAFSEIFAPFTKQ

SEQ ID NO: 13703 - protein, 823 aa, Escherichia coli
MTPLASAIVALLLGIEAYAAEETFDTHFMIGGMKDQQVANIRLDDNQPLPGQYDIDIYVNKQWRGKYEIIVKDNPQETCLSREVIKRLGINSDNFASGKQCLTFEQLVQGGSYTWDIGVFRLDFSVPQAWVEELESGYVPPENWERGINAFYTSYYLSQYYSDYKASGNNKSTYVRFNSGLNLLGWQLHSDASFSKTNNNPGVWKSNTLYLERGFAQLLGTLRVGDMYTSSDIFDSVRFRGVRLFRDMQMLPNSKQNFTPRVQGIAQSNALVTIEQNGFVVYQKEVPPGPFAITDLQLAGGGADLDVSVKEADGSVTTYLVPYAAVPNMLQPGVSKYDLAAGRSHIEGASKQSDFVQAGYQYGFNNLLTLYGGSMVANNYYAFTLGAGWNTRIGAISVDATKSHSKQDNGDVFDGQSYQIAYNKFVSQTSTRFGLAAWRYSSRDYRTFNDHVWANNKDNYRRDENDVYDIADYYQNDFGRKNSFSANMSQSLPEGWGSVSLSTLWRDYWGRSGSSKDYQLSYSNNLRRISYTLAASQAYDENHHEEKRFNIFISIPFDWGDDVTTPRRQIYMSNSTTFDDQGFASNNTGLSGTVGSRDQFNYGVNLSYQHQGNETTAGANLTWNAPVATVNGSYSQSSTYRQAGASVSGGIVAWSGGVNLANRLSETFAVMNAPGIKDAYVNGQKYRTTNRNGVVVYDGMTPYRENHLMLDVSQSDSEAELRGNRKIAAPYRGAVVLVNFDTDQRKPWFIKALRADGQPLTFGYEVNDIHGHNIGVVGQGSQLFIRTNEIPPSVNVAINKQHGLSCTITFGKEIDESRNYICQ

SEQ ID NO: 13704 - protein, 765 aa, Escherichia coli; identical to SEQ ID NO: 7498

SEQ ID NO: 13705 - protein, 207 aa, Escherichia coli; identical to SEQ ID NO: 2211

SEQ ID NO: 13706 - protein, 424 aa, Escherichia coli
MTTSNWVQYEHTRNSRIPEGLAGGTEGKFNEKATQDFVDIDLDDVMLHSEVNLPIDILVNQTLTLGTEWNQQRMKDLSSNTQALTGANTGGAIDGMSATDRSPYSKAEIFSLFAENNMELTDSTIVTPGLRFDHHSIVGNNWSPALNISQGLGDDFTLKMGIARAYKAPSLYQTNPNYILYSKGQGCYASAGGCYLQGNDDLKAETSINKEIGLEFKRDGWLAGVTWFRNDYRNKIEAGYVAVGQNAVGTDLYQWDNVPKAVVEGLEGSLNVPVSETVMWTNNITYMLKSENKTTGDRLSIIPEYTLNSTLSWQAREDLSMQTTFTWYGKQQPKKYNYKGQPAVGPETKEISPYSIVGLSATWDVTKNVSLTGGVDNLFDKRLWRAGNAQTTGDLAGANYIAGAGAYTYNEPGRTWYMSVNTHF

SEQ ID NO: 13707 - protein, 243 aa, Escherichia coli; identical to SEQ ID NO: 2910

SEQ ID NO: 13708 - protein, 203 aa, Escherichia coli; identical to SEQ ID NO: 2201

SEQ ID NO: 13709 - protein, 780 aa, Escherichia coli
MKIPTTTDIPQRYTWCLAGICYSSLAILPSFLSYAESYFNPAFLLENGTSVADLSRFERGNHQPAGVYRVDLWRNDEFIGSQDIVFESTTENTGDKSGGLMPCFNQVLLERISLNSSALPELAQQQNNKCINLLKAVPDATINFDFAAMRLNITIPQIALLSSAHGYIPPEEWDEGIPALLLNYNFTGNRGNGNDSYFFSELSGINIGPWRLRNNGSWNYFRGNGYHSEQWNNIGTWVQRAIIPLKSELVMGDGNTGSDIFDGVGFRGIRLYSSDNMYPDSQQGFAPTVRGIARTAAQLTIRQNGFIIYQSYVSPGAFEITDLHPTSSNGDLDVTIDERDGNQQNYTIPYSTVPILQREGRFKFDLTAGDFRSGNSQQSSPFFFQGTALGGLPQEFTAYGGTQLSANYTAFLLGLGRNLGNWGTVSLDVTHARSQLADDSRHEGDSIRFLYAKSMNTFGTNFQLMGYRYSTQGFYTLDDVAYRRMEGYEYDYDYDGEHRDEPIIVNYHNLRFSRKDRLQLNISQSLNDFGSLYISGTHQKYWNTSDSDTWYQVGYTSSWVGISYSLSFSWNESVGIPDNERIVGLNVSVPFNVLTKRRYTRENALDRAYASFNANRNSNGQNSWLAGVGGTLLEGHNLSYHVSQGDTSNNGYTGSATANWQAAYGTLGVGYNYDRDQHDVNWQLSGGVVGHENGITLSQPLGDTNVLIKAPGAGGVRIENQTGILTDWRGYAVMPYATVYRYNRIALDTNTMGNSIDVEKILAALCRRKARWFVPILIPA

SEQ ID NO: 13710 - protein, 672 aa, Escherichia coli; identical to SEQ ID NO: 7919

SEQ ID NO: 13711 - protein, 207 aa, Escherichia coli
MPLPDFRLIRLLPLAALVLTACSVTTPKGPGKSPDSPQWRQHQQDVRNLNQYQTRGAFAYISDQQKVYARFFWQQTGQDRYRLLLTNPLGSTELELNAQPGNVQLVDNKGQRYTADDAEEMIGKLTGMPIPLNSLRQWILGLPGDATDYKLDNQYRLSEITYSQNGKNWKVVYGGYDTKTQPAMPANMELTDGGQRIKLKMDNWIVK

SEQ ID NO: 13712 - protein, 880 aa, Escherichia coli
MPDHSLFRLRILPWCIALAMSGSYSSVWAEDDIQFDSRFLELKGDTKIDLKRFSSQGYVEPGKYNLQVQLNKQPLAEEFDIYWYAGEDDASKSYACLTPELVAQFGLKEDVAKNLQWSHDAKCLKSGQLEGMEIKADLSQSALVISLPQAYLEYTYPDWDPPSRWDDGISGIVADYSINAQTRHEENGGDDSNEISGNGTVGVNLGPWRVRADWQTNYQHTRSNDDDEFSGDETQKKWEWSRYYAWRALPSLKAKLALGEDYLRSDIFDGFNYVGGSVSTDDQMLPPNLRGYAPDISGVAHTTAKVTVSQMGRVIYETQVPAGPFRIQDLGDSVSGTLHIRIEEQNGQVQEYDISTASMPYLTRPGQVRYKIMMGRPQEWGHHVEGEFFSGAEASWGIANGWSLYGGALGDENYQSAALGVGRDLSTFGAVAFDVTHSHTKLDKDTAYGKGSLDGNSFRVSYSKDFDQLNSRVTFAGYRFSEENFMTMSEYLDASDSGMVRTGNDKEMYTATYNQNFRDAGVSVYLNYTRHTYWDREEQTNYNIMLSHYFNMGSIRNVSISMTGYRYEYDNREDKGMYISLSMPWGDNSTVSYNGNYGSGTDSSQVGYFSRVDDATHYQLNVGTSDKHTSVDGYYSHDGSLAQVDLSANYHEGQYTSAGLSLQGGATLTAHGGALHRTQNMGGTRLLIDADGVADVPVEGNGAAVYTNMFGKAVVSDVNNYYRNQAYIDLNRLPENAEATQSVVQATLTEGAIGYRKFAVISGQKAMAVLRLQDGSHPPFGAEVKNDNEQTVGLVDDDGNVYLAGVKPGEHMSVFWSGVAHCDINLPDPLPADLFNGLLLPCQHKGNVAPVVPDDIKPVIQEQTQQVTPTNPPVSVSANQ

SEQ ID NO: 13713 - protein, 360 aa, Escherichia coli; identical to SEQ ID NO: 3694

SEQ ID NO: 13714 - protein, 232 aa, Escherichia coli; identical to SEQ ID NO: 2087

SEQ ID NO: 13715 - protein, 207 aa, Escherichia coli; identical to SEQ ID NO: 2211

SEQ ID NO: 13716 - protein, 351 aa, Escherichia coli; identical to SEQ ID NO: 3691

SEQ ID NO: 13717 - protein, 331 aa, Escherichia coli; identical to SEQ ID NO: 2700

SEQ ID NO: 13718 - protein, 871 aa, Escherichia coli; identical to SEQ ID NO: 6388

SEQ ID NO: 13719 - protein, 236 aa, Escherichia coli; identical to SEQ ID NO: 3286

SEQ ID NO: 13720 - protein, 51 aa, Escherichia coli
MKVGESILGSRPEIRFYGTYINILDNELSNFKFNENSKDEFMAGIQAEVWW

SEQ ID NO: 13721 - protein, 250 aa, Escherichia coli; identical to SEQ ID NO: 5817

SEQ ID NO: 13722 - protein, 539 aa, Escherichia coli; identical to SEQ ID NO: 3050

SEQ ID NO: 13723 - protein, 700 aa, Escherichia coli
MKIFSVRQTVLPALLALSPVVFAADEQTMIVSAAPQVVSELDTPAAVSVVDGEEMRLATPRINLSESLTSVPGLQVQNRQNYAQDLQLSIRGFGSRSTYGIRGIRLYVDGIPATMPDGQGQTSNIDLSSVQNVEVLRGPFSALYGNASGGVMNVTTQTGQQPPTIEASSYYGSFGSWRYGLKATGATGDGTQPGDVDYTVSTTRFTTHGYRDHSGAQKNLANAKLGVRIDDASKLSLIFNSVDIKADDPGGLTKAEWKANPQQAPRAEQYDTRKTIKQTQAGLRYERSLSSRDDMSVMMYAGERETTQYQSIPMAPQLNPSHAGGVITLQRHYQGIDSRWTHRGELGVPVTFTTGLNYENMSENRKGYNNFRLNSGMPEYGQKGELRRDERNLMWNIDPYLQTQWQLSEKLSLDAGVRYSSVWFDSNDHYITPGNGDDSGDASYHKWLPAGSLKYAMTDAWNIYLAAGRGFETPTINELSYRADGQSGMNFGLKPSTNDTIEIGSKTRIGDGLLSLALFQTDTDDEIVVDSSSGGRTTYKNAGKTRRQGAELAWDQRFAGDFRVNASWTWLDATYRSNVCNEQDCNGNRMPGIARNMGFTSIGYVPEDGWYAGTEARYMGDIMADDENTAKAPSYTLIGLFTGYKYNYHNLTVDLFGRVDNLFDKEYVGSVIVNESNGRYYEPAPGRNYGVGVNIAWRFE

SEQ ID NO: 13724 - protein, 729 aa, Escherichia coli
MLSTQFNRDNQYQAITKPSLLAGCIALALLPSAAFAAPATEETVIVEGSATAPDDGENDYSVTSTSAGTKMQMTQRDIPQSVTIVSQQRMEDQQLQTLGEVMENTLGISKSQADSDRALYYSRGFQIDNYMVDGIPTYFESRWNLGDALSDMALFERVEVVRGATGLMTGTGNPSAAINMVRKHATSREFKGDVSAEYGSWNKERYVADLQSPLTEDGKIRARIVGGYQNNDSWLDRYNSEKTFFSGIVDADLGDLTTLSAGYEYQRIDVNSPTWGGLPRWNTDGSSNSYDRARSTAPDWAYNDKEINKVFMTLKQRFADTWQATLNATHSEVEFDSKMMYVDAYVNKADGMLVGPYSNYGPGFDYVGGTGWNSGKRKVDALDLFADGIYELFGRQHNLMFGGSYSKQNNRYFSSWANIFPDEIGSFYNFNGNFPQTDWSPQSLAQDDTTHMKSLYAATRVTLADPLHLILGARYTNWRVDTLTYSMEKNHTTPYAGLVFDINDNWSTYASYTSIFQPQNARDSSGKYLAPITGNNYELGLKSDWMNSRLTTTLAIFRIEQDNVAQSTGTPIPGSNGETAYKAVDGTVSKGVEFELNGAITDNWQLTFGATRYIAEDNEGNAVNPNLPRTTVKMFTSYRLPVMPELTVGGGVNWQNRVYTDTVTPYGTFRAEQGSYALVDLFTRYQVTKNFSLQGNVNNLFDKTYDTNVEGSIVYGTPRNFSITGTYQF

SEQ ID NO: 13725 - protein, 386 aa, Escherichia coli
MVDDVPVAQVLQALAEQEKLNLVVSPDVSGTVSLHLTDVPWKQALQTVVKSAGLITRQEGNILSVHSIAWQNNNIARQEAEQARAQANLPLENCSITLQYADAGELAKAGEKLLSAKGSMTVDKRTNRLLLRDNKTALSALEQWVAQMDLPVGQVELSAHIVTINEKSLRELGVKWTLADAQHAGGVGQVTTLGSDLSVATATTHVGFNIGRINGRLLDLELSALEQKQQLDIIASPRLLASHLQPASIKQGSEIPYQVSSGESGATSVEFKEAVLGMEVTPTVLQKGRIRLKLHISQNVPGQVLQQADGEVLAIDKQEIETQVEVKSGETLALGGIFTRKNKSGQDSVPLLGDIPWFGQLFRHDGKEDERRELVVFITPRLVSSE

SEQ ID NO: 13726 - protein, 631 aa, Escherichia coli
MVVTASSVEQNLKDAPASISVITQEDLQRKPVQNLKDVLKEVPGVQLTNEGDNRKGVSIRGLDSSYTLILVDGKRVNSRNAVFRHNDFDLNWIPVDSIERIEVVRGPMSSLYGSDALGGVVNIITKKIGQKWSGTVTVDTTIQEHRDRGDTYNGQFFTSGPLIDGVLGMKAYGSLAKREKDDPQNSTTTDTGETPRIEGFSSRDGNVEFAWTPNQNHDFTAGYGFDRQDRDSDSLDKNRLERQNYSVSHNGRWDYGTSELKYYGEKVENKNPGNSSPITSESNTVDGKYTLPLTAINQFLTVGGEWRHDKLSDAVNLTGGTSSKTSASQYALFVEDEWRIFEPLALTTGVRMDDHETYGEHWSPRAYLVYNATDTVTVKGGWATAFKAPSLLQLSPDWTSNSCRGACKIVGSPDLKPETSESWELGLYYMGEEGWLEGVESSVTVFRNDVKDRISISRTSDVNAAPGYQNFVGFETGANGRRIPVFSYYNVNKARIQGVETELKIPFNDEWKLSLNYTYNDGRDVSNGENKPLSDLPFHTANGTLDWKPLALEDWSFYVSGHYTGQKRADSATAKTPGGYTIWNTGAAWQVTKDVKLRAGVLNLGDKDLSRDDYSYNEDGRRYFMAVDYRF

SEQ ID NO: 13727 - protein, 162 aa, Escherichia coli
MKTILPAVLFAAFATTSAWAAESVQPLEKIAPYPQAEKGMKRQVIQLTPQEDESTLKVELLIGQTLEVDCNLHRLGGKLESKTLEGWGYDYYVFDKVSSPVSTMMACPDGKKEKKFVTAYLGDAGMLRYNSKLPIVVYTPDNVDVKYRVWKAEEKIDNAEVR

SEQ ID NO: 13728 - protein, 200 aa, Escherichia coli; identical to SEQ ID NO: 1784

SEQ ID NO: 13729 - protein, 784 aa, Escherichia coli; identical to SEQ ID NO: 2244

SEQ ID NO: 13730 - protein, 593 aa, Escherichia coli
MYPDSQQGFAPTVRGIARTAAQLTIRQNGFIIYQSYVSPGAFEITDLHPTSSNGDLDVTIDERDGNQQNYTIPYSTVPILQREGRFKFDLTAGDFRSGNSQQSSPFFFQGTALGGLPQEFTAYGGTQLSANYTAFLLGLGRNLGNWGAVSLDVTHARSQLADDSRHEGDSIRFLYAKSMNTFGTNFQLMGYRYSTQGFYTLDDVAYRRMEGYEYDYDYDGEHRDEPIIVNYHNLRFSRKDRLQLNISQSLNDFGSLYISGTHQKYWNTSDSDTWYQVGYTSSWVGISYSLSFSWNESVGIPDNERIVGLNVSVPFNVLTKRRYTRENALDRAYASFNANRNSNGQNSWLAGVGGTLLEGHNLSYHVSQGDTSNNGYTGSATANWQATYGTLGVGYNYDRDQHDVNWQLSGGVVGHENGITLSQPLGDTNVLIKAPGAGGVRIENQTGILTDWRGYAVMPYATVYRYNRIALDTNTMGNSIDVEKNISSVVPTQGALVRANFDTRIGVRALITVTQGGKPVPFGSLVRENSTGITSMVGDDGQVYLSGAPLSGELLVKWGDGANSRCIAHYVLPKQSLQQAVTVISAVCTHPGS

SEQ ID NO: 13731 - protein, 680 aa, Escherichia coli
MNKKIHSLALLVNLGIYGVAQAQEPTDTPVSHDDTIVVTAAEQNLQAPGVSTITADEIRKNPVARDVSEIIRTMPGVNLTGNSTSGQRGNNRQIDIRGMGPENTLILIDGKPVSSRNSVRQGWRGERDTRGDTSWVPPEMIERIEVLRGPAAARYGNGAAGGVVNIITKKGSGEWHGSWDAYFNAPEHKEEGATKRTNFSLTGPLGDEFSFRLYGNLDKTQADAWDINQGHQSARAGTYATTLPAGREGVINKDINGVVRWDFAPLQSLELEAGYSRQGNLYAGDTQNTNSDSYTRSKYGDETNRLYRQNYSLTWNGGWDNGVTTSNWVQYEHTRNSRIPEGLAGGTEGKFNEKATQDFVDIDLDDVMLHSEVNLPIDFLVNQTLTLGTEWNQQRMKDLSSNTQALTGANTGGAIDGVSATDRSPYSKAEIFSLFAENNMELTDSTIVTPGLRFDHHSIVGNNWSPALNISQGLGDDFTLKMGIARAYKAPSLYQTNPNYILYSKGQGCYASAGGCYLQGNDDLKAETSINKEIGLEFKRDGWLAGVTWFRNDYRNKIEAGYVAVGQNAVGTDLYQWDNVPKAVVEGLEGSLNVPVSETVMWTNNITYMLKSENKTTGDRLSIIPEYTLNSTLSWQAREDLSMQTTFTWYGKQQPKNTTTKVSQRLARKPKKSVLTALWV

SEQ ID NO: 13732 - protein, 446 aa, Escherichia coli; identical to SEQ ID NO: 2176

SEQ ID NO: 13733 - protein, 614 aa, Escherichia coli; identical to SEQ ID NO: 1888

SEQ ID NO: 13734 - protein, 132 aa, Escherichia coli; identical to SEQ ID NO: 9984

SEQ ID NO: 13735 - protein, 114 aa, Escherichia coli
MCSFCIGQALAGGIVLQRTRVIYDASRKEAALPVANKGAETPYLLQSWVDNIDGTSRAPFIITPPLFRLEAGDDSSLRIIKTADNLPENKESLFYINVRAIPAKKNQMMLMLTS

SEQ ID NO: 13736 - protein, 216 aa, Escherichia coli; identical to SEQ ID NO: 3112

SEQ ID NO: 13737 - protein, 224 aa, Escherichia coli
MTVSLTAILLSCSSAWAAGKGGIGLAATRLVYSEGEEQISLGVRNTSPDVPYLIQSWVMTPDNKKSADFIITPPLFVLNPANENLLRIMYIGAPLAKDRETLFFTSVRAVPSTTKREEGNTLKIATQSVIKLFWRPKGLAYPLAEAPAKLRCTSSADMVTVSNPTPYFITLTDLKIGGKVVKNQMISPFDKYQFSLPKGAKNSSVTYRTINDYGAETPQLNCKS

SEQ ID NO: 13738 - protein, 107 aa, Escherichia coli
MNSIAWGAIIPDRTRIIMNESDKGEALKLTNQSKKLPYLAQTWIEDTKGNKSRDFIVTVPPMVRLNPNEQIQIRMITQEKIAQLPKDRETLFYFNVREIPPKTDKKM

SEQ ID NO: 13739 - protein, 193 aa, Escherichia coli
MRYLATLLLSLAVLITAGCGWHLRDTTQMPATMKVMILDSGDPNGPLSRAVRNQLRLNGVELLDKETTRKDVPSLRLGKVSIAKDTASVFRNGQTAEYQMIMTVNATVLIPGRDIYPISAKVFRSFFDNPQMALAKDNEQDMIVKEMYDRAAEQLIRKLPSIRAADIRSDEEQTSTTTDTPATPARVSTTLGN

SEQ ID NO: 13740 - protein, 760 aa, Escherichia coli; identical to SEQ ID NO: 2080

SEQ ID NO: 13741 - protein, 170 aa, Escherichia coli
MGGKCRWCKGWSFYRDATSVCDEGKKENTLRILDATNNQLPQDRESLFWMNVKAIPSMDKSKLTENTLQLVIISRIKLYYRPAKLALPPDQAAEKLRFRRSANSLTLINPTPYYLTVTELNAGTRILENALVPPMGESTVKLPSDAGSNITYRTINDYGALTPKMTGVME

SEQ ID NO: 13742 - protein, 170 aa, Escherichia coli [sequence omitted]

SEQ ID NO: 13743 - protein, 351 aa, Escherichia coli; identical to SEQ ID NO: 2519

SEQ ID NO: 13744 - protein, 102 aa, Escherichia coli; identical to SEQ ID NO: 1824

SEQ ID NO: 13745 - protein, 613 aa, Escherichia coli
MFWRDITLSIWRKKTTGLKTKKRLLPLVLAAALCSSPVWAEEATFTANFKDTDLKSFIETVGANLNKTIIMGPGVQGKVSIRTMTPLNERQYYQLFLNLLEAQGYAVVPMENDVLKVVKSSAAKVEPLPLVGEGSDNYAGDEMVTKVVPVRNVSVRELAPILRQMIDSAGSGNVVNYDPSNVIMLTGRASVVERLTEVIQRVDHAGNRTEEVIPLDNASASEIARVLESLTKNSGENQPATLKSQIVADERTNSVIVSGDPATRDKMRRLIRRLDSEMERSGNSQVFYLKYSKAEDLVDVLKQVSGTLTAAKEEAEGTVGSGREIVSIAASKHSNALIVTAPQDIMQSLQSVIEQLDIRRAQVHVEALIVEVAEGSNINFGVQWASKDAGLMQFANGTQIPIGTLGAAISQAKPQKGSTVISENGATTINPDTNGDLSTLAQLLSGFSGTAVGVVKGDWMALVQAVKNDSSSNVLSTPSITTLDNQEAFFMVGQDVPVLTGSTVGSNNSNPFNTVERKKVGIMLKVTPQINEGNAVQMVIEQEVSKVEGQTSLDVVFGERKLKTTVLANDGELIVLGGLMDDQAGESVAKVPLLGDIPLIGNLFKSTADKKKT

SEQ ID NO: 13746 - protein, 359 aa, Escherichia coli; identical to SEQ ID NO: 2328

SEQ ID NO: 13747 - protein, 237 aa, Escherichia coli; identical to SEQ ID NO: 4356

SEQ ID NO: 13748 - protein, 614 aa, Escherichia coli; identical to SEQ ID NO: 1888

SEQ ID NO: 13749 - protein, 360 aa, Escherichia coli
MKKLTVAISAVAASVLMAMSAQAAEIYNKDSNKLDLYGKVNAKHYFSSNDADDGDTTYARLGFKGETQINDQLTGFGQWEYEFKGNRAESQGSSKDKTRLAFAGLKFGDYGSIDYGRNYGVAYDIGAWTDVLPEFGGDTWTQTDVFMTGRTTGVATYRNNDFFGLVDGLNFAAQYQGKNDRTDVTQANGDGFGFSTTYEYEGFGVGATYAKSDRTNNQVIYGNNSLNASGQNAEVWAAGLKYDANNIYLATTYSETQNMTVFGNNHIANKAQNFEVVAQYQFDFGLRPSVAYLQSKGKDLGAWGDQDLVEYIDVGATYYFNKNMSTFVDYKINLIDKSDFTKASGVATDDIVAVGMVYQF

SEQ ID NO: 13750 - protein, 191 aa, Escherichia coli
MKKSLLGLTFASLMFSAGSAVAADYKIDKEGQHAFVNFRIQHLGYSWLYGTFKDFDGTFTFDEKNPAADKVNVTINTTSVDTNHAERDKHLRSADFLNTAKYPQATFTSTSVKKDGDELDITGDLTLNGVTKPVTLEAKLIGQGDDPWGGKRAGFEAEGKIKLKDFNIKTDLGPASQDVDLIISVEGVQQK

SEQ ID NO: 13751 - protein, 200 aa, Escherichia coli; identical to SEQ ID NO: 1793

SEQ ID NO: 13752 - protein, 162 aa, Escherichia coli; identical to SEQ ID NO: 1973

SEQ ID NO: 13753 - protein, 828 aa, Escherichia coli; identical to SEQ ID NO: 2388

SEQ ID NO: 13754 - protein, 539 aa, Escherichia coli; identical to SEQ ID NO: 3050

SEQ ID NO: 13755 - protein, 170 aa, Escherichia coli
MSGILTRWRQFGKRYFWPHLLLGMVAASLGLPALSNAAEPNAPAKATTRNHEPSAKVNFGQLVLLEANTRRPNSNYSVDYWHQHAIRTVIRHLSFAMAPQTLPVAEESLPLQAQHLALLDTLSALLTQEGTPSEKGYRIDYAHFTPQAKFSTPVWISQAQGIRAGPQRLT

SEQ ID NO: 13756 - protein, 230 aa, Escherichia coli; identical to SEQ ID NO: 3348

SEQ ID NO: 13757 - protein, 654 aa, Escherichia coli
MNVIRTVICTLIILPVGLQAATSHSSMAKDTITVVATGNQNTVFETPSMVSVITNDTPWSQNAVTSAGMLKGVAGLSQTGAGRTNGQTFNLRGYDKSGVLVLVDGVRQLSDMAKSSGTYLDPALIKRIEVVRGPNSSLYGSGGLGGVVDFRTADAADFLPPGETNGVSLWGNIASGDHSTGSGLTWFGKTGKTDALLSVIMRKRGNIYQSDGERAPNKEKPAALFAKGSVSITDSNKAGASLRLYQNNTTEPGNPTLTHGDNGLRDRKTAQNDVQFWYQYSPADNSLINVKSTLYLSDITIKTNGHNKTAEWRNNRTSGVNVVNRSHTLIFPGAHQLSYGAEYYRQQQKPEGSATLYPEGNIDFTSLYFQDEMTMKSNPVNIIVGSRYDRYKSFNPRAGKLKAERLSPRAAISVSPTDWLMMYGSISSAFRAPTMAEMYRDDVHFYRKGKPNYWVPNLNLKPENNITREIGAGIQLDGLLTDNDRLQLKSGYFGTDARNYIATRVDMKRMRSYSYNVSRARIWGWDMQGNYQSDYFDWMLSYNRTESMDASSREWLGSGNPDTLISDISIPVGHGGVSAGWRAELSAAATHVKKGDPHQAGYAVHSFSLSYKPVSVKGFEASVTLDNAFNKLAMNGKGVPLSGRTVSLYTRYQW

SEQ ID NO: 13758 - protein, 404 aa, Escherichia coli
MSVVVSGTLKSPDGEAISGANITLTALTVSPDALSGTSASAVTREGGYYGMTMDPGEYAVSVTVKGKTAVYGRVRIEGTESTVTLNMLLRRSLVEVSIPGELLTDFRQIQNNVADDLATIRRLNEDTATKNTQATQSKESAAASAKSASDSAKTATSRAAEAGQKATDATEAATRAITAAGNAEESSTRAGESEKAAGADAEKARQHAEKARLAQESAGEILKRAEAATVSAEEARRMAENARGPRGPQGETGPKGDVGPKGETGPVGPQGPAGPKGERGDVGAQGAVGPAGPRGEKGEQGERGPQGIPGLKGDTGERGPKGDQGDMGPKGEKGDPGGPAGPQGPKGERGEAGPQGPMGARGERGETGPRGEPGPAGPRGERGETGPSGTSWRARSGRQRCKCG

SEQ ID NO: 13759 - protein, 61 aa, Escherichia coli; identical to SEQ ID NO: 9050

SEQ ID NO: 13760 - protein, 416 aa, Escherichia coli
MLAPTTVVTRQDIDRWQSTSVNDVLRRLPGVDITQNGGSGQLSSIFIRGTNASHVLVLIDGVRLNLAGVSGSADLSQFPIALVQRVEYIRGPRSAVYGSDAIGGVVNIITTRDEPGTEISAGWGSNSYQNYDVSTQQQLGDKTRVTLLGDYAHTHGYDVVAYGNTGTQAQTDNDGFLSKTLYGALEHNFTDAWSGFVRGYSYDNRTNYDAYYSPGSPLLDTRKLYSQSWDAGLRYNGELIKSQLITSYSHSKDYNYDPHFGRYDSSATLDEMKQYTVQWANNVIVGHGSIGAGVDWQKQTTTPGTGYVENGYDQRNTGIYLTGLQQVGDFTFEGAARSDDNSQFGRHGTWQTSAGWEFIEGYRFIASYGTSYKAPNLGQLYGFYGNPNLDPEKSKQWEGAFEGLTAGVNWRIVRIS

SEQ ID NO: 13761 - protein, 230 aa, Escherichia coli; identical to SEQ ID NO: 3019

SEQ ID NO: 13762 - protein, 360 aa, Escherichia coli; identical to SEQ ID NO: 3062

SEQ ID NO: 13763 - protein, 184 aa, Escherichia coli; identical to SEQ ID NO: 3244

SEQ ID NO: 13764 - protein, 374 aa, Escherichia coli; identical to SEQ ID NO: 2982

SEQ ID NO: 13765 - protein, 430 aa, Escherichia coli; identical to SEQ ID NO: 2617

SEQ ID NO: 13766 - protein, 274 aa, Escherichia coli; identical to SEQ ID NO: 3160

SEQ ID NO: 13767 - protein, 695 aa, Escherichia coli
MRITTLASVVIPCLGFSASSMAAEDVMIVSASGYEKKLTNAAASVSVISQEELQSSQYHDLAEALRAVEGVDVESGTGKTGGLEISIRGMPASYTLILIDGVRQGGSGDVTPNGFSAMNTGFMPPLAAIERIEVIRGPMSTLYGSDAMGGVVNIITKKNADKWLSSVNAGLNLQESNKWGNSSQFNFWSSGPLVDDSVSLQIRGSTQQRQGSSVTSLSDTSATRIPYPTESQNYNLGARIDWKATEQDVLWFDMDTTRQRYDNQDGQLGSLTGGYDHTLRYERNKISAGYDHTFTFGTWKSYLNWNETENKGRELVRSVLKSDKWGLAGKPRELKESNLILNSLLLTPLGESHLLTVGGEYQSSSMKDGVVLASTGETFRQKSWSVFAEDEWHLTDVLALTAGSRYEHHDQFGGHFSPRAYLVWDVTDAWTLKGGVTTGYKAPTMGQLHKGISGVSGQGRTNLLGNPELKPEESVSYEAGVYYDNLSGLNANITGFITDFSNKIVSYSIDDNTNSYTNSGKARLHGVEFAGTLPLWSEDVTLSLNYTWTQSEQRDGDNKGAPLSYTPEHMVNAKLNWQITEEVASWLGARYRGKTPRFTRNYSSLSAVQKKVYDEKGEYLKAWTVVDAGLSWKVTDALTLNAAVNNLLNKDYSDVSLYSADKSTLYAGDYFQTGSSTTGYVIPERNYWMSLNYQF

SEQ ID NO: 13768 - protein, 518 aa, Escherichia coli; identical to SEQ ID NO: 2350

SEQ ID NO: 13769 - protein, 432 aa, Escherichia coli; identical to SEQ ID NO: 2026

SEQ ID NO: 13770 - protein, 191 aa, Escherichia coli; identical to SEQ ID NO: 2727

SEQ ID NO: 13771 - protein, 360 aa, Escherichia coli; identical to SEQ ID NO: 3354

SEQ ID NO: 13772 - protein, 613 aa, Escherichia coli
MFWRDITLSVWRKKTTGLKTKKRLLPLVLAAALCSSPVWAEEATFTANFKDTDLKSFIETVGANLNKTIIMGPGVQGKVSIRTMTPLNERQYYQLFLNLLEAQGYAVVPMENDVLKVVKSSAAKVEPLPLVGEGSDNYAGDEMVTKVVPVRNVSVRELAPILRQMIDSAGSGNVVNYDPSNVIMLTGRASVVERLTEVIQRVDHAGNRTEEVIPLDNASASEIAHVLESLTKNSGENQPATLKSQIVADERTNSVIVSGDPATRDKMRRLIRRLDSEMERSGNSQVFYLKYSKAEDLVDVLKQVSGTLTAAKEEAEGTVGSGREIVSIAASKHSNALIVTAPQDIMQSLQSVIEQLDIRRAQVHVEALIVEVAEGSNINFGVQWASKDAGLMQFANGTQIPIGTLGAAISQAKPQKGSTVISENGATTINPDTNGDLSTLAQLLSGFSGTAVGVVKGDWMALVQAVKNDSSSNVLSTPSITTLDNQEAFFMVGQDVPVLTGSTVGSNNSNPFNTVERKKVGIMLKVTPQINEGNAVQMVIEQEVSKVEGQTSLDVVFGERKLKTTVLANDGELIVLGGLMDDQAGESVAKVPLLGDIPLIGNLFKSTADKKKT

SEQ ID NO: 13773 - protein, 87 aa, Escherichia coli; identical to SEQ ID NO: 2871

SEQ ID NO: 13774 - protein, 646 aa, Escherichia coli; identical to SEQ ID NO: 6626

SEQ ID NO: 13775 - protein, 385 aa, Escherichia coli
MDDVPVAQVLQALAEQEKLNLVVSPDVSGTVSLHLTDVPWKQALQTVVKSAGLITRQEDNILSVHSIAWQNNNIARQEAEQARAQANLPLENRSITLQYADAGELAKAGEKLLSAKGSMTVDKRTNRLLLRDNKTALSALEQWVAQMDLPVGQVELSAHIVTINEKSLRELGVKWTLADAQHAGGVGQVTTLGSDLSVATATTHVGFNIGRINGRLLDLELSALEQKQQLDIIASPRLLASHLQPASIKQGSEIPYQVSSGESGATSVEFKEAVLGMEVTPTVLQKGRIRLKLHISQNVPGQVLQQADGEVLAIDKQEIETQVEVKSGETLALGGIFTRKNKSGQDSVPLLGDIPWFGQLFRHDGKEDERRELVVFITPRLVSSE

SEQ ID NO: 13776 - protein, 193 aa, Escherichia coli; identical to SEQ ID NO: 2246

SEQ ID NO: 13777 - protein, 274 aa, Escherichia coli; identical to SEQ ID NO: 2311

SEQ ID NO: 13778 - protein, 203 aa, Escherichia coli; identical to SEQ ID NO: 2015

SEQ ID NO: 13779 - protein, 386 aa, Escherichia coli
MVDDVPVAQVLQALAEQEKLNLVVSPDVSGTVSLHLTDVPWKQALQTVVKSAGLITRQEGNILSVHSIAWQNNNIARQEAEQARAQANLPLENRSITLQYADAGELAKAGEKLLSAKGSMTVDKRTNRLLLRDNKTALSALEQWVAQMDLPVGQVELSAHIVTINEKSLRELGVKWTLADAQHAGGVGQVTTLGNDLSVATATTHVGFNIGRINGRLLDLELSALEQKQQLDIIASPRLLASHLQPASIKQGSEIPYQVSSGESGATSVEFKEAVLGMEVTPTVLQKGRIRLKLHISQNVPGQVLQQADGEVLAIDKQEIETQVEVKSGETLALGGIFTRKNKSGQDSVPLLGDIPLFGQLFRHDGKEDERRELVVFITPRLVSSE

SEQ ID NO: 13780 - protein, 351 aa, Escherichia coli
MKKSTLALVVMGIVASASVQAAGIYNKDGNKLDVYGKVKAMHYMSDNDSKDGDQSYIRFGFKGETQINDQLTGYGRWEAEFAGNKAESDTAQQKTRLAFAGLKYKDLGSFDYGRNLGALYDVEAWTDMFPEFGGDSSAQTDNFMTKRASGLATYRNTDFFGVIDGLNLTLQYQGKNENRDVKKQNGDGFGTSLTYDFGGSDFAISGAYTNSDRTNEQNLQSRGTGKRAEAWATGLKYDANNIYLATFYSETRKMTPITGGFANKTQNFEAVAQYQFDFGLRPSLGYVLSKGKDIEGIGDEDLVNYIDVGATYYFNKNMSAFVDYKINQLDSDNKLNINNDDIVAVGMTYQF

SEQ ID NO: 13781 - protein, 351 aa, Escherichia coli
MKKSTLALVVMGIVASASVQAAEIYNKDGNKLDVYGKVKAMHYMSDNDSKDGDQSYIRFGFKGETQINDQLTGYGRWEAEFAGNKAESDTAQQKTRLAFAGLKYKDLGSFDYGRNLGALYDVEAWTDMFPEFGGDSSAQTDNFMTKRASGLATYRNTDFFGVIDGLNLTLQYQGKNENRDVKKQNGDGFGTSLTYDFGGSDFAISGAYTNSDRTNEQNLQSRGTGKRAEAWATGLKYDANNIYLATFYSETRKMTPITGGFANKTQNFEAVAQYQFDFGLRPSLGYVLSKGKDIEGISDEDLVNYIDVGATYYFNKNMSAFVDYKINQLDSDNKLNINNDDIVAVGMTYQF

SEQ ID NO: 13782 - protein, 614 aa, Escherichia coli; identical to SEQ ID NO: 1889

SEQ ID NO: 13783 - protein, 152 aa, Escherichia coli; identical to SEQ ID NO: 5601

SEQ ID NO: 13784 - protein, 224 aa, Escherichia coli; identical to SEQ ID NO: 3035

SEQ ID NO: 13785 - protein, 241 aa, Escherichia coli
MFPIIKKTVSALFISTLLTSAPAFADIIISGTRIIYNADKKDVNVRLENKGNRPLLIQNWLDTGDDNADPSQIKVPFTSTPPVSRIESKRGQTVKVMFTGTTQLPADRESVFWFNVLEVPPKPKDAESDKNLLQLAFRTRIKLFYRPSGLKGEPAEAPAKLTWKLNNAQLQVNNPTPYYVSFNDVAIESGGKSYKVDSSMVAPFGQVSFAVTDIASSVSSGKVIYKAINDYGGNIDGSTSL

SEQ ID NO: 13786 - protein, 232 aa, Escherichia coli; identical to SEQ ID NO: 2087

SEQ ID NO: 13787 - protein, 331 aa, Escherichia coli; identical to SEQ ID NO: 2705

SEQ ID NO: 13788 - protein, 94 aa, Escherichia coli
MIYDASRKEAALPVANKGAETPYLLQSWVDNIDGKSRAPFIITPPLFRLEAGDDSSLRIIKTADNLPENKESLFYINVRAIPAKKNQMMLMLTS

SEQ ID NO: 13789 - protein, 381 aa, Escherichia coli; identical to SEQ ID NO: 5696

SEQ ID NO: 13790 - protein, 94 aa, Escherichia coli; identical to SEQ ID NO: 9644

SEQ ID NO: 13791 - protein, 641 aa, Escherichia coli; identical to SEQ ID NO: 3774

SEQ ID NO: 13792 - protein, 828 aa, Escherichia coli; identical to SEQ ID NO: 5894

SEQ ID NO: 13793 - protein, 200 aa, Escherichia coli; identical to SEQ ID NO: 1784

SEQ ID NO: 13794 - protein, 236 aa, Escherichia coli; identical to SEQ ID NO: 3286

SEQ ID NO: 13795 - protein, 760 aa, Escherichia coli; identical to SEQ ID NO: 2080

SEQ ID NO: 13796 - protein, 729 aa, Escherichia coli; identical to SEQ ID NO: 3052

SEQ ID NO: 13797 - protein, 203 aa, Escherichia coli; identical to SEQ ID NO: 2201

SEQ ID NO: 13798 - protein, 208 aa, Escherichia coli; identical to SEQ ID NO: 1949

SEQ ID NO: 13799 - protein, 774 aa, Escherichia coli
MTPLRVFRKTTPLVNAIRLSLLPLAGLSFSAFATQVNIAPGSLDKALNQYAAHSGITLSVDASLTRGKQSNGLHGDYDVESGLQQLLDGSGLQVKPLGNNSWTLEPAPAPKEDALTVFGDWLGDARENDVFEHAGARDVIRREDFAKTGATTMREVLNRIPGVSAPENNGTGSHDLAMNFGIRGLNPRLASRSTVLMDGIPVPFAPYGQPQLSLAPVSLGNMDAIDVVRGGGAVRYGPQSVGGVVNFVTRAIPQDFGIEAGVEGQLSPTSSQNNPKETHNLMVGGTADNGFGTALLYSGTRGSDWREHSATRIDDLMLKSKYAPDEVHTFNSLLQYYDGEADMPGGLSRADYDADRWQSTRPYDRFWGRRKLASLGYQFQPDSQHKFNIQGFYTQTLRSGYLEQGKRITLSPRNYWVRGIEPRYSQIFMIGPSAHEVGVGYRYVNESTHEMRYYTATSSGQLPSGSSPYDRDTRSGTEAHAWYLDDKIDIGNWTITPGMRFEHIESYQNNAITGTHEEVSYNAPLPALNVLYHLTDSWNLYANTEGSFGTVQYSQIGKAVQSGNVEPEKARTWELGTRYDDGALTAEMGLFLINFNNQYDSNQTNDTVTARGKTRHTGLETQARYDLGTLTPTLDNVSIYASYAYVNAEIREKGDTYGNLVPFSPKHKGTLGVDYKPGNWTFNLNSDFQSSQFADNANTVKESADGSTGRIPGFMLWGARVAYDFGPQMADLNLAFGVKNIFDQDYFIRSYDDNNKGIYAGQPRTLYMQGSLKF

SEQ ID NO: 13800 - protein, 138 aa, Escherichia coli
MLRTESDILPVDRETLFELSIASVPSGKVENQSVKVAMRSVFKLFWRPEGLPGDPLEAYQQLRWTRNSQGVQLTNPTPYYINLIQVSVNGKALSNAGVVPPKSQRQTSWCQAIAPCHVAWRAINDYGGLSAKKEQNLP

SEQ ID NO: 13801 - protein, 430 aa, Escherichia coli
MKQALRVAFGFLILWASALHAEVRIVIDSGVDSGRPIGVVPFQWAGPGAAPEDIGGIVAADLRNSGKFNPLDRARLPQQPGSAQEVQPAAWSALGIDAVVVGQVTPNPDGSYNVAYQLVDTGGAPGTVLAQNSYKVNKQWLRYAGHTASDEVFEKLTGIKGAFRTRIAYVVQTNGGQFPYELRVSDYDGYNQFVVHRSPQPLMSPAWSPDGSKLAYVTFESGRSALVIQTLANGAVRQVASFPRHNGAPAFSPDGSKLAFALSKTGSLNLYVMDLASGQIRQVTDGRSNNTEPTWFPDSQNLAFTSDQAGRPQVYKVNINGGAPQRITWEGSQNQDADVSSDGKFMVMVSSNGGQQHIAKQDLATGGVQVLSSTFLDETPSLAPNGTMVIYSSSQGMGSVLNLVSTDGRFKARLPATDGQVKFPAWSPYL

SEQ ID NO: 13802 - protein, 430 aa, Escherichia coli
MSKIVKIIGREIIDSRGNPTVEAEVHLEGGFVGMAAAPSGASTGSREALELRDGDKSRFLGKGVTKAVAAVNGPIAQALIGKDAKDQAGIDKIMIDLDGTENKSKFGANAILAVSLANAKAAAAAKGMPLYEHIAELNGTPGKYSMPVPMMNIINGGEHADNNVDIQEFMIQPVGAKTVKEAIRMGSEVFHHLAKVLKAKGMNTAVGDEGGYAPNLGSNAEALAVIAEAVKAAGYELGKDITLAMDCAASEFYKDGKYVLAGEGNKAFTSEEFTHFLEELTKQYPIVSIEDGLDESDWDGFAYQTKVLGDKIQLVGDDLFVTNTKILKEGIEKGIANSILIKFNQIGSLTETLAAIKMAKDAGYTAVISHRSGETEDATIADLAVGTAAGQIKTGSMSRSDRVAKYNQLIRIEEALGEKAPYNGRKEIKG

SEQ ID NO: 13803 - protein, 360 aa, Escherichia coli; identical to SEQ ID NO: 6933

SEQ ID NO: 13804 - protein, 243 aa, Escherichia coli
MTFMKGLPLLLLVASLCSHAALQPDRTRIVFNANDKATSLRVDNRSDKLPYLAYSWLENEKGEKSDDLLVALPPIQRLEPKATTQVRIVKQASTTKLPGDRETLFFYNMREIPPAPEKNSDHAVLQVAIQSRIKVFWRPAALRKKAGEKVELQLQVSQQGNQLTLKNPTAYYLTIAYLGRNEKGVLPCFKTVMVAPFSTVNTNTGNYSGSQFYLGYMDDYGALRMTTLNCSGQCHLQAVEAKK

SEQ ID NO: 13805 - protein, 162 aa, Escherichia coli; identical to SEQ ID NO: 1973

SEQ ID NO: 13806 - protein, 361 aa, Escherichia coli
MKRNILAVIVPALLVAGTANAAEIYNKDGNKVDLYGKAVGLHYFSKDNGVNSYGGNGDKTYARLGFKGETQINSDLTGYGQWEYNFQGNNSEGADAQTGNKTRLAFAGLKYADIGSFDYGRNYGVVYDALGYTDMLPEFGGDTAYSDDFFVGRVGGVATYRNSNFFGLVDGLNFAVQYLGKNERDTARRSNGDGVGGSISYEYEGFGIVGAYGAADRTNLQEAQPLGNGKKAEQWATGLKYDANNIYLAANYGETRNATPITNKFTNTSGFANKTQDVLLVAQYQFDFGLRPSIAYTKSKAKDVEGIGDVDLVNYFEVGATYYFNKNMSTYVDYIINQIDSDNKLGVGSDDTVAVGIVYQF

SEQ ID NO: 13807 - protein, 361 aa, Escherichia coli; identical to SEQ ID NO: 3061

SEQ ID NO: 13808 - protein, 128 aa, Escherichia coli; identical to SEQ ID NO: 7495

SEQ ID NO: 13809 - protein, 213 aa, Escherichia coli; identical to SEQ ID NO: 2232

SEQ ID NO: 13810 - protein, 130 aa, Escherichia coli; identical to SEQ ID NO: 7391

SEQ ID NO: 13811 - protein, 260 aa, Escherichia coli; identical to SEQ ID NO: 5814

SEQ ID NO: 13812 - protein, 118 aa, Escherichia coli [sequence omitted]

SEQ ID NO: 13813 - protein, 230 aa, Escherichia coli; identical to SEQ ID NO: 5808

SEQ ID NO: 13814 - protein, 430 aa, Escherichia coli; identical to SEQ ID NO: 2617

SEQ ID NO: 13815 - protein, 678 aa, Escherichia coli
MVPSTFSRLKAARCLPVVLAALIFAGCGTHTPDQSTAYMQGTAQADSAFYLQQMQQSSDDTRINWQLLAIRALVKEGKTGQAVELFNQLPQELNDAQRREKTLLAVEIKLAQKDFAGAQNLLAKITPADLEQNQQARYWQAKIDASQGRPSIDLLRALIAQEPLLGAKEKQQNIDATWQALSSMTQEQANTLVINADENILQGWLDLQRVWFDNRNDPDMMKAGIADWQKRYPNNPGAKMLPTQLVNVKAFKPASTNKIALLLPLNGQAAVFGRTIQQGFEAAKNIGTQPVAAQVAAAPAADVAEQPQPQTVDGVASPAQASVSDLTGEQPAAQPVPVSAPATSTAAVSAPANPSAELKIYDTSSQPLSQILSQVQQDGASIVVGPLLKNNVEELLKSNTPLNVLALNQPENIENRVNICYFALSPEDEARDAARHIRDQGKQAPLVLIPRSSLGDRVANAFAQEWQKLGGGTVLQQKFGSTSELRAGVNGGSGIALTGSPITLRATTDSGMTTNNPTLQTTPTDDQFTNNGGRIDAVYIVATPGEIAFIKPMIAMRNGSQSGATLYASSRSAQGTAGPDFRLEMEGLQYSEIPMLAGGNLPLMQQALSAVNNDYSLARMYAMGVDAWSLANHFSQMRQVQGFEINGNTGSLTANPDCVINRKLSWLQYQQGQVVPVS

SEQ ID NO: 13816 - protein, 518 aa, Escherichia coli; identical to SEQ ID NO: 2349

SEQ ID NO: 13817 - protein, 619 aa, Escherichia coli
MGDGNTGSDIFDGVGFRGVRLYSSDNMYPDSQQGFAPTVRGIARTAAQLTIRQNGFIIYQSYVSPGAFEITDLHPTSSNGDLDVTIDERDGNQQNYTIPYSTVPILQREGRFKFDLTAGDFRSGNSQQSSPFFFQGTALGGLPQEFTAYGGTQLSANYTAFLLGLGRNLGNWGAVSLDVTHARSQLADDSRHEGDSIRFLYAKSMNTFGTNFQLMGYRYSTQGFYTLDDVAYRRMEGYEYDYDYDGEHRDELIIVNYHNLRFSRKDRLQLNISQSLNDFGSLYISGTHQKYWNTSDSDTWYQVGYTSSWVGISYSLSFSWNESVGIPDNERIVGLNVSVPFNVLTKRRYTRENALDRAYASFNANRNSNGQNSWLAGVGGTLLEGHNLSYHVSQDDTSNNGYTGSATANWQATYGTLGVGYNYDRDQHDVNWQLSGGVVGHENGITLSQPLGDTNVLIKAPGAGGVRIENQTGILTDWRGYAVMPYATVYRYNRIALDTNTMGNSIDVEKNISSVVPTQGALVRANFDTRIGVRVLITVTQGGKPVPFGSLVRENSTGITSMVGDDGQVYLSGAPLSGELLVQWGDGANSRCIAHYVLPKQSLQQAVTVISAVCTHPGS

SEQ ID NO: 13818 - protein, 111 aa, Escherichia coli; identical to SEQ ID NO: 3370

SEQ ID NO: 13819 - protein, 249 aa, Escherichia coli; identical to SEQ ID NO: 3492

SEQ ID NO: 13820 - protein, 353 aa, Escherichia coli
MNERELSIIRALGEEFSAVLADLKRTFEGKIAAQAQTFEEKLASLSVVLQKCVTGDDVRPMLEQMVKEAVSHIPVPRDGRDYDPDVLQKAVNDAVGKIPVPANGKSITPDDVRPMIEQMVKEAVSHIPVPRDGRDYDPDVLQKAVNDAVGKIPVPANGKSITPDDVRPMIEQMVKEAVSHIPVPRDGRDYDPEVLQKAVLDAVSALPAPQDGRDATALEIHPAIDDQKSFPRGTYATHQGGLWRAYEKTHGMRGWECLVDGVADIDVSMTGERLFSVVVRQSSGQRTEKTFSLPVMLYRGVFRAGETYHPGDTVTWGGSLWHCNSMTGDKPGEAHSLAWTLAAKRGRDAGGGK

SEQ ID NO: 13821 - protein, 678 aa, Escherichia coli
MVPSTFSRLKAARCLPVVLAALIFAGCGTHTPDQSTAYMQGTAQADSAFYLQQMQQSSDDTRINWQLLAIRALVKEGKTGQAVELFNQLPQELNDAQRREKTLLAVEIKLAQKDFAGAQNLLAKITPADLEQNQQARYWQAKIDASQGRPSIDLLRALIAQEPLLGAKEKQQNIDATWQALSSMTQEQANTLVINADENILQGWLDLQRVWFDNRNDPDMMKAGIADWQKRYPNNPGAKMLPTQLVNVKAFKPASTNKIALLLPLNGQAAVFGRTIQQGFEAAKNIGTQPVAAQVAAAPAADVAEQPQPQTVDGVASPAQASVSDLTGEQPAAQPVPVSAPATSTAAVSAPANPSAELKIYDTSSQPLSQILSQVQQDGASIVVGPLLKNNVEELLKSNTPLNVLALNQPENIENRVNICYFALSPEDEARDAARHIRDQGKQAPLVLIPRSSLGDRVANAFAQEWQKLGGGTVLQQKFGSTSELRAGVNGGSGIALTGSPITPRATTDSGMTTNNPTLQTTPTDDQFTNNGGRVDAVYIVATPGEIAFIKPMIAMRNGSQSGATLYASSRSAQGTAGPDFRLEMEGLQYSEIPMLAGGNLPLMQQALSAVNNDYSLARMYAMGVDAWSLANHFSQMRQVQGFEINGNTGSLTANPDCVINRKLSWLQYQQGQVVPAS

SEQ ID NO: 13822 - protein, 828 aa, Escherichia coli
MKLSRRSFMKANAVAAAAAAAGLSVPGVARAVVGQQEAIKWDKAPCRFCGTGCGVLVGTQQGRVVACQGDPDAPVNRGLNCIKGYFLPKIMYGKDRLTQPLLRMKNGQYDKEGEFTPITWDQAFDVMEEKFKTALKEKGPESIGMFGSGQWTIWEGYAASKLFKAGFRSNNIDPNARHCMASAVVGFMRTFGMDEPMGCYDDIEQADAFVLWGANMAEMHPILWSRITNRRLSNQNVTVAVLSTYQHRSFELADNGIIFTPQSDLVILNYIANYIIQNNAINQDFFSKHVNLRKGATDIGYGLRPTHPLEKAAKNPGSDASEPMSFEDYKAFVAEYTLEKTAEMTGVPKDQLEQLAQLYADPNKKVISYWTMGFNQHTRGVWANNLVYNLHLLTGKISQPGCGPFSLTGQPSACGTAREVGTFAHRLPADMVVTNEKHRDICEKKWNIPSGTIPAKIGLHAVAQDRALKDGKLNVYWTMCTNNMQAGPNINEERMPGWRDPRNFIIVSDPYPTVSALAADLILPTAMWVEKEGAYGNAERRTQFWRQQVQAPGEAKSDLWQLVQFSRRFKTEEVWPEELLAKKPELRGKTLYEVLYATPEVSKFPVSELAEDQLNDESRELGFYLQKGLFEEYAWFGRGHGHDLAPFDDYHKARGLRWPVVNGKETQWRYSEGNDPYVKAGEGYKFYGKPDGKAVIFALPFEPAAEAPDEEYDLWLSTGRVLEHWHTGSMTRRVPELHRAFPEAVLFIHPLDAKARDLRRGDKVKVVSRRGEVISIVETRGRNRPPQGLVYMPFFDAAQLVNKLTLDATDPLSKETDFKKCAVKLEKV

SEQ ID NO: 13823 - protein, 68 aa, Escherichia coli
MGLSATWDVTKNVSLTGGVDNLFDKRLWRAGNAQTTGDLAGANYIAGAGAYTYNEPGRTWYMSVNTHF

SEQ ID NO: 13824 - protein, 650 aa, Escherichia coli
MKGLNKITCCLLAALLMPCAGHAENEQYGANFNNADIRQFVEIVGQHLGKTILIDPSVQGTISVRSNDTFSQQEYYQFFLSILDLYGYSVITLDNGFLKVVRSANVKTSPGMIADSSRPGVGDELVTRIVPLENVPARDLAPLLRQMMDAGSVGNVVHYEPSNVLILTGRASTINKLIEVIKRVDVIGTEKQQIIHLEYASAEDLAEILNQLISESHGKSQMPALLSAKIVADKRTNSLIISGPEKARQRITSLLKSLDVEESEEGNTRVYYLKYAKATNLVEVLTGVSEKLKDEKGNARKPSSSGAMDNVAITADEQTNSLVITADQSVQEKLATVIARLDIRRAQVLVEAIIVEVQDGNGLNLGVQWANKNVGAQQFTNTGLPIFNAAQGVADYKKNGGITSANPAWDMFSAYNGMAAGFFNGDWGVLLTALASNNKNDILATPSIVTLDNKLASFNVGQDVPVLSGSQTTSGDNVFNTVERKTVGTKLKVTPQVNEGDAVLLEIEQEVSSVDSSSNSTLGPTFNTRTIQNAVLVKTGETVVLGGLLDDFSKEQVSKVPLPGDIPLVGQLFRYTSTERAKRNLMVFIRPTIIRDDDVYRSLSKEKYTRYRQEQQQRIDGKSKALVGSEDLPVLDENTFNSHAPAPSSR

SEQ ID NO: 13825 - protein, 224 aa, Escherichia coli; identical to SEQ ID NO: 4515

SEQ ID NO: 13826 - protein, 613 aa, Escherichia coli
MFWRDITLSVWRKKTTCLKTKKRLLPLVLAAALCSSPVWAEEATFTANFKDTDLKSFIETVGANLNKTIIMGPGVQGKVSIRTMTPLNERQYYQLFLNLLEAQGYAVVPMENDVLKVVKSSAAKVEPLPLVGEGSDNYAGDEMVTKVVPVRNVSVRELAPILRQMIDSAGSSNVVNYDPSNVIMLTGRASVVERLTEVIQRVDHAGNRTEEVIPLDNASASEIARVLESLTKNSGENQPAPLKSQIVADERTNSVIVSGDPATRDKMRRLIRRLDSEMERSGNSQVFYLKYSKAEDLVDVLKQVSGTLTAAKEEAEGTVGSGREIVSIAASKHSNALIVTAPQDIMQSLQSVIEQLDIRRAQVHVEALIVEVAEGSNINFGVQWASKDAGLMQFANGTQIPIGTLGAAISQAKPQKGSTVISENGATTINPDTNGDLSTLAQLLSGFSGTAVGVVKGDWMALVQAVKNDSSSNVLSTPSITTLDNQEAFFMVGQDVPVLTGSTVGSNNSNPFNTVERKKVGIMLKVTPQINEGNAVQMVIEQEVSKVEGQTSLDVVFGERKLKTTVLANDGELIVLGGLMDDQAGESVAKVPLLGDIPLIGNLFKSTADKKKT

SEQ ID NO: 13827 - protein, 597 aa, Escherichia coli
MLPPNLRGYAPDISGVAHTTAKVTVSQMGRVIYETQVPAGPFRIQDLGDSVSGTLHIRIEEQNGQVQEYDISTASMPYLTRPGQVRYKIMMGRPQEWGHHVEGEFFSGAEASWGIANGWSLYGGALGDENYQSAALGVGRDLSTFGAVAFDVTHSHTKLDKDTAYGKGSLDGNSFRVSYSKDFDQLNSRVTFAGYRFSEENFMTMSEYLDASDSEMVRTGNDKEMYTATYNQNFRDAGVSVYLNYTRHTYWDREEQTNYNIMLSHYFNMGSIRNMSVSLTGYRYEYDNRADKGMYISLSMPWGDNSTVSYNGNYGSGTDSSQVGYFSRVDDATHYQLNVGTSDKHTSVDGYYSHDGSLAQVDLCANYHEGQYTSAGLSLQGGATLTAHGGALHRTQNMGGTRLLIDADGVADVPVEGNGAAVYTNMFGKAVVSDVNNYYRNQAYIDLNKLPENAEATQSVVQATLTEGAIGYRKFAVISGQKAMAVLRLQDGSHPPFGAEVKNDNEQTVGLVDDDGNVYLAGVKPGEHMRVFWSGVAHCDINLPDPLPADLFNGLLLPCQHKGNVAPVTSPAVKPAIQEQTQRVTPTEPPTSISVNQ

SEQ ID NO: 13828 - protein, 232 aa, Escherichia coli; identical to SEQ ID NO: 2087

SEQ ID NO: 13829 - protein, 213 aa, Escherichia coli; identical to SEQ ID NO: 2232

SEQ ID NO: 13830 - protein, 230 aa, Escherichia coli
MAFSSSSIADIVISGTRVIYKSDQKSVNVRLENKGNNPLLVQSWLDTGDDNAEPSSITVPFTATPPVSRIDAKRGQTIKLMYTASTSLPKDRESVFWFNVLEVPPKPDAEKVANQSLLQLAFRTRIKLFYRPDGLKGNPSEAPLALKWFWSGSEGKASLRVTNPTPYYVSFSSGDLEASGKRYPIDVKMIAPFSDEVMKVTGLNGKASSAKVHFYAINDFGGAIEGNASL

SEQ ID NO: 13831 - protein, 224 aa, Escherichia coli; identical to SEQ ID NO: 3165

SEQ ID NO: 13832 - protein, 203 aa, Escherichia coli; identical to SEQ ID NO: 2201

SEQ ID NO: 13833 - protein, 208 aa, Escherichia coli; identical to SEQ ID NO: 1949

SEQ ID NO: 13834 - protein, 250 aa, Escherichia coli; identical to SEQ ID NO: 3048

SEQ ID NO: 13835 - protein, 224 aa, Escherichia coli; identical to SEQ ID NO: 3165

SEQ ID NO: 13836 - protein, 130 aa, Escherichia coli; identical to SEQ ID NO: 3184

SEQ ID NO: 13837 - protein, 678 aa, Escherichia coli
MVPSTFSRLKAARCLPVVLAALIFAGCGTHTPDQSTAYMQGTAQADSAFYLQQMQQSSDDTRINWQLLAIRALVKEGKTGQAVELFNQLPQELNDSQRREKTLLAVEIKLAQKDFAGAQNLLAKITPADLEQNQQARYWQAKIDASQGRPSIDLLRALIAQEPLLGAKEKKQNIDATWQALSSMTQEQANTLVINADENILQGWLDLQRVWFDNRNDPDMMKAGIADWQKRYPNNPGAKMLPTQLVNVKAFKPASTNKIALLLPLNGQAAVFGRTIQQGFEAAKNIGTQPVAAQVAAAPAADVAEQPQPQTADGVASPAQASVSDLTGDQPAAQPVPVSAPATSTAAVSAPANPSAELKIYDTSSQPLSQILSQVQQDGASIVVGPLLKNNVEELLKSNTPLNVLALNQPENIENRVNICYFALSPEDEARDAARHIRDQGKQAPLVLIPRSSLGDRVANAFAQEWQKLGGGTVLQQKFGSTSELRAGVNGGSGIALTGTPITPRATTDSGMTTNNPTLQTTPTDDQFTNNGGRVDAVYIVATPGEIAFIKPMIAMRNGSQSGAMLYASSRSAQGTAGPDFRLEMEGLQYSEIPMLAGGNLPLMQQALSAVNNDYSLARMYAMGVDAWSLANHFSQMRQVQGFEINGNTGSLTANPDCVINRKLSWLQYQQGQVVPAS

SEQ ID NO: 13838 - protein, 154 aa, Escherichia coli
MLTPPVAKIGANSGQQVKIKIMPNKLPTNKESIFYLNVLDIPPNSPEQEGKNALKFAMQNRIKLFYRPAGIAPVNKATFKKLLVNRSGNGLVIKNDSANWVTISDVKANNVKVNYETIMIAPLESQSVNIKSNNANNWYLTIIDDHGNYISDKI

SEQ ID NO: 13839 - protein, 111 aa, Escherichia coli; identical to SEQ ID NO: 2911

SEQ ID NO: 13840 - protein, 191 aa, Escherichia coli; identical to SEQ ID NO: 2727

SEQ ID NO: 13841 - protein, 660 aa, Escherichia coli
MGAFFAGENGNSTTGDAIYMRGADTSNSIYIDGIRDIGSVSRDTFNTEQVEVIKGPSGTDYGRSAPTGSINMISKQPRNDSGIDASASIGSAWFRRGTLDVNQVIGDTTAVRLNVMGEKTHDAGRDKVKNERYGVAPSVAFGLGTANRLYLNYLHVTQHNTPDGGIPTIGLPGYSAPSAGAAALNHSGKVDTHNFYGTDSDYDDSTTDTATMRFEHDINDNTTIRNTTRWSRVKQDYLMTAIMGGASNITQPTSDVNSWTWSRTANTKDVSNKILTNQTNLTSTFYTGSIGHDVSTGVEFTRETQTNYGVNPVTLPAVNIYHPDSSIHPGGLTRNGANANGQTDTFAIYAFDTLQITRDFELNGGIRLDNYHTEYDSATACGGSGRGAITCPTGVAKGSPVTTVDTAKSGNLMNWKAGALYHLTENGNVYINYAVSQQPPGGNNFALAQSGSGNSANRTDFKPQKANTSEIGTKWQVLDKRLLLTAALFRTDIENEVEQNDDGTYSQYGKKRVEGYEISVAGNITPAWQVIGGYTQQKATIKNGKDVAQDGSSSLPYTPEHAFTLWSQYQATDDISVGAGARYIGSMHKGSDGAVGTPAFTEGYWVADAKLGYRVNRNLDFQLNVYNLFDTDYVASINKSGYRYHPGEPRTFLLTANMHF

SEQ ID NO: 13842 - protein, 387 aa, Escherichia coli; identical to SEQ ID NO: 3908

SEQ ID NO: 13843 - protein, 445 aa, Escherichia coli; identical to SEQ ID NO: 6625

SEQ ID NO: 13844 - protein, 213 aa, Escherichia coli; identical to SEQ ID NO: 2232

SEQ ID NO: 13845 - protein, 341 aa, Escherichia coli; identical to SEQ ID NO: 6505

SEQ ID NO: 13846 - protein, 446 aa, Escherichia coli; identical to SEQ ID NO: 2176

SEQ ID NO: 13847 - protein, 387 aa, Escherichia coli; identical to SEQ ID NO: 3908

SEQ ID NO: 13848 - protein, 747 aa, Escherichia coli; identical to SEQ ID NO: 4126

SEQ ID NO: 13849 - protein, 250 aa, Escherichia coli; identical to SEQ ID NO: 3048

SEQ ID NO: 13850 - protein, 747 aa, Escherichia coli
MARSKTAQPKHSLRKIAVVVATAVSGMSVYAQAAVEPKEDTITVTAAPAPQESAWGPAATIAARQSATGTKTDTPIQKVPQSISVVTAEEMALHQPKSVKEALSYTPGVSVGTRGAFNTYDHLIIRGFAAEGQSQNNYLNGLKLQGNFYNDAVIDPYMLERAEIMRGPVSVLYGKSSPGGLLNMVSKRPTTEPLKEVQFKAGTDSLFQTGFDFSDSLDDDGVYSYRLTGLARSANAQQKGSEEQRYAIAPAFTWRPDDKTNFTFLSYFQNEPETGYYGWLPKEGTVEPLPNGKRLPTDFNEGAKNNTYSRNEKMVGYSFDHEFNDTFTVRQNLRFAENKTSQNSVYGYGVCSDPANAYSKQCAALAPADKGHYLARKYVVDDEKLQNFSVDTQLQSKFATGDIDHTLLTGVDFMRMRNDINAWFGYDDSVPLLNLYNPVNTDFDFNAKDPANSGPYRILNKQKQTGVYVQDQAQWDKVLVTLGGRYDWADQESLNRVAGTTDKRDDKQFTWRGGVNYLFDNGVTPYFSYSESFEPSSQVGKDGNIFAPSKGKQYEVGVKYVPEDRPIVVTGAVYNLTKTNNLMADPEGSFFSVEGGEIRARGVEIEAKAALSASVNVVGSYTYTDAEYTTDTTYKGNTPAQVPKHMASLWADYTFFDGPLSGLTLGTGGRYTGSSYGDPANSFKVGSYTVVDALVRYDLARVGMAGSNVALHVNNLFDREYVASCFNTYGCFWGAERQVVATATFRF

SEQ ID NO: 13851 - protein, 645 aa, Escherichia coli
MLTRVKYPTLASICLTESHTALRSDYQLNQTDSDDNHEQSGGISRTYLFRPLPQLGSKLTLGETDFSSNIFDGFSYTGAALASDERMLPWELRGYAPQISGIAQTNATVTISQSGRVIYQKKVPPGPFIIDDLNQSVQGTLDVKVTEEDGRVNNFQVSAASTPFLTRQGQVRYKLAAGQPRPSMSHQTENETFFSNEVSWGMLSNTSLYGGLLLSGDDYHSAAMGIGQNMLWLGALSFDVTWASSHFDTQQDERGLSYRFNYSKQVDATNSTISLAAYRFSDRHFHSYANYLDHKYNDSDAQDEKQTISLSVGQPITPLNLNLYANLLHQTWWNADASTTANITAGFNVDIGDWRDISISTSFNTTHYEDKDHDNQIYLSISLPFGNGGRVGYDMQNSSHSTTHRMSWNDTLDERNSWGMSAGLQSDRPDNGAQVSGNYQHLSSAGEWDISGTYAANDYSSVSSSWSGSFTATQYGAAFHRRSSTNEPRLMVSTDGVADIPVQGNLDYTNHFGIAVVPLISSYQPSTVAVNMNDLPDGVTVAENVIKETWIEGAIGYKSLASRSGKDVNVIIRNASGQFPPLGADIRQDDSGISVGMVGEEGHAWLSGVAENQKFTVVWGDSQHCSLHLPEHMEDTANRLILPCH

SEQ ID NO: 13852 - protein, 371 aa, Escherichia coli
MKVKVLSLLVPALLVAGAANAAEVYNKDGNKLDLYGKVDGLHYFSDNKDVDGDQTYMRLGFKGETQVTDQLTGYGQWEYQIQGNSAENENNSWTRVAFAGLKFQDVGSFDYGRNYGVVYDVTSWTDVLPEFGGDTYGSDNFMQQRGNGFATYRNTDFFGLVDGLNFAVQYQGKNGNPSGEGFTSGVTNNGRDALRQNGDGVGGSITYDYEGFGIGGAISSSKRTDAQNTAAYIGNGDRAETYTGGLKYDANNIYLAAQYTQTYNATRVGSLGWANKAQNFEAVAQYQFDFGLRPSVAYLQSKGKNLGTIAGRNYDDEDILKYVDVGATYYFNKNMSTYVDYKINLLDDNQFTRDAGINTDNIVALGLVYQF

SEQ ID NO: 13853 - protein, 222 aa, Escherichia coli; identical to SEQ ID NO: 5603

SEQ ID NO: 13854 - protein, 130 aa, Escherichia coli; identical to SEQ ID NO: 3184

SEQ ID NO: 13855 - protein, 774 aa, Escherichia coli; identical to SEQ ID NO: 3648

SEQ ID NO: 13856 - protein, 518 aa, Escherichia coli; identical to SEQ ID NO: 2349

SEQ ID NO: 13857 - protein, 511 aa, Escherichia coli; identical to SEQ ID NO: 2466

SEQ ID NO: 13858 - protein, 237 aa, Escherichia coli; identical to SEQ ID NO: 1814

SEQ ID NO: 13859 - protein, 646 aa, Escherichia coli
MRLATPRINLSESLTGVPGLQVQNRQNYAQDLQLSIRGFGSRSTYGIRGIRLYVDGIPATMPDGQGQTSNIDLSSVQNVEVLRGPFSALYGNASGGVMNVTTQTGQQPPTIEASSYYGSFGSWRYGLKATGATGDGTQPGDVDYTVSTTRFTTHGYRDHSGAQKNLANAKLGVRIDEASKLSLIFNSVDIKADDPGGLTKAEWKANPQQAPRAEQYDTRKTIKQTQAGLRYERSLSAQDDMSVMMYAGERETTQYQSIPMAPQLNPSHAGGVITLQRHYQGIDSRWTHRGELGVPVTFTTGLNYENMSENRKGYNNFRLNSGMPEYGQKGELRRDERNLMWNIDPYLQTQWQLSEKLSLDAGVRYSSVWFDSNDHYVTPGNGDDSGDASYHKWLPAGSLKYAMTDAWNIYLAAGRGFETPTINELSYRADGQSGMNFGLKPSTNDTIEIGSKTRIGDGLLSLALFQTDTDDEIVVDSSSGGRTTYKNAGKTRRQGAELAWDQRFAGDFRVNASWTWLDATYRSNVCNEQDCNGNRMPGIARNMGFASIGYVPEDGWYAGTEAHYMGDIMADDENTAKAPSYTLVGLFTGYKYKYHNLTVDLFGRVDNLFDKEYVGSVIVNESNGRYYEPSPGRNYGVGMNIAWRFE

SEQ ID NO: 13860 - protein, 432 aa, Escherichia coli; identical to SEQ ID NO: 2026

SEQ ID NO: 13861 - protein, 368 aa, Escherichia coli
MKVKVLSLLVPALLVAGAANAAEVYNKDGNKLDLYGKVDGLHYFSDNKSEDGDQTYVRLGFKGETQVTDQLTGYGQWEYQIQGNTSEDNKENSWTRVAFAGLKFQDVGSFDYGRNYGVVYDVTSWTDVLPEFGGDTYGSDNFMQQRGNGFATYRNTDFFGLVDGLNFAVQYQGKNGSVSGEGMTNNGRDALRQNGDGVGGSITYDYEGFGIGAAVSSSKRTDAQNTAAYIGNGDRAETYTGGLKYDANNIYLAAQYTQTYNATRVGSLGWANKAQNFEAVAQYQFDFGLRPSVAYLQSKGKNLGTIGTRNYDDEDILKYVDVGATYYFNKNMSTYVDYKINLLDDNQFTRDAGINTDNIVALGLVYQF

SEQ ID NO: 13862 - protein, 128 aa, Escherichia coli; identical to SEQ ID NO: 3240

SEQ ID NO: 13863 - protein, 784 aa, Escherichia coli; identical to SEQ ID NO: 2244

SEQ ID NO: 13864 - protein, 221 aa, Escherichia coli
MKNYLWLVAQLPLLSGCESQAILVKKDDAYFAPPKTEAPPPADGRAGGVFETGYNWSLTADRRAYRVGDILTVILEESTQSSKQAKTNFGKSNTVDIGAPTIFGHTKDKLSGSIDANRDFDGSATSQQQNSLRREITVSVHAVQPNGILEIRGEKWLTLNQGDEYIRLSGLVRADDIQNDNSVSSQRIADARISYAGRGALSDANAAGWLTRLFNHPLFPI

SEQ ID NO: 13865 - protein, 232 aa, Escherichia coli; identical to SEQ ID NO: 2087

SEQ ID NO: 13866 - protein, 193 aa, Escherichia coli; identical to SEQ ID NO: 2246

SEQ ID NO: 13867 - protein, 331 aa, Escherichia coli; identical to SEQ ID NO: 2700

SEQ ID NO: 13868 - protein, 107 aa, Escherichia coli; identical to SEQ ID NO: 6556

SEQ ID NO: 13869 - protein, 729 aa, Escherichia coli; identical to SEQ ID NO: 5961

SEQ ID NO: 13870 - protein, 746 aa, Escherichia coli; identical to SEQ ID NO: 5629

SEQ ID NO: 13871 - protein, 729 aa, Escherichia coli
MLSTQFNRDNQYQAITKPSLLAGCIALALLPSAAFAAPATEETVIVEGSATAPDDGENDYSVTSTSAGTKMQMTQRDIPQSVTIVSQQRMEDQQLQTLGEVMENTLGISKSQADSDRALYYSRGFQIDNYMVDGIPTYFESRWNLGDALSDMALFERVEVVRGATGLMTGTGNPSAAINMVRKHATSREFKGDVSAEYGSWNKERYVADLQSPLTEDGKIRARIVGGYQNNDSWLDRYNSEKTFFSGIVDADLGDLTTLSAGYEYQRNDVNSPTWGGLPRWNTDGSSNSYDRARSTAPDWAYNDKEINKVFMTLKQRFADTWQATLNATHSEVEFDSKMMYVDAYVNKADGMLVGPYSNYAPGFDYVGGTGWNSGKRKVDALDLFADGSYELFGRQHNLMFGGSYSKQNNRYFSSWANIFPDEIGSFYNFNGNFPQTDWSPQSLAQDDTTHMKSLYAATRVTLADPLHLILGARYTNWRVDTLTYSMEKNHTTPYAGLVFDINDNWSTYASYTSIFQPQNDRDSSGKYLAPITGNNYELGLKSDWMNSRLTTTLAIFRIEQDNVAQSTGTPIPGSNGETAYKAVDGTVSKGVEFELNGAITDNWQLTFGATRYIAEDNEGNAVNPNLPRTTVKMFTSYRLPVMPELTVGGGVNWQNRVYTNTVTPYGTFRAEQGSYALVDLFTRYQVTKNFSLQGNVNNLFDKTYDTNVEGSIVYGTPRNFSITSTYQF

SEQ ID NO: 13872 - protein, 170 aa, Escherichia coli
MSGILTRWRQFGKRYFWPHLLLGMVAASLGLPALSNAAEPNVPAKATTRNHEPSAKVNFGQLALLEANTRRPNSNYSVDYWHQHAIRTVIRHLSFAMAPQTLPVAEESLPLQAQHLALLDTLSALLTQEGTPSEKGYRIDYAHFTPQAKFSTPVWISQAQGIRAGPQRLT

SEQ ID NO: 13873 - protein, 274 aa, Escherichia coli; identical to SEQ ID NO: 3471

SEQ ID NO: 13874 - protein, 361 aa, Escherichia coli; identical to SEQ ID NO: 3061

SEQ ID NO: 13875 - protein, 203 aa, Escherichia coli; identical to SEQ ID NO: 2201

SEQ ID NO: 13876 - protein, 243 aa, Escherichia coli; identical to SEQ ID NO: 4043

SEQ ID NO: 13877 - protein, 203 aa, Escherichia coli; identical to SEQ ID NO: 2009

SEQ ID NO: 13878 - protein, 295 aa, Escherichia coli
MQTTRTPYSISFMATVLLLLLFACHSTVANAAVALGATRVISSNSSDSNKWQHINTSAERDIIPLRSRLTVGDSYTDGDIFDSVNFRGLKINSTEAMLPDSQHGFAPVIHGIARGTAQVSVKQNGYDVYQTTVPPGPFTIDDINSAANGGDLQVTIKEADGSIQTLYVPYSSVPVLQRAGYTRYALAMGEYRSGNNLQSSPKFIQGSLMHGLEGNWTPYGGMQIAEDYQAFNLGIGKDLGLFGAFSFDITQANTTLADGTRHSGQSVKSVYSKSFYQTGTNIQVAGYRYSTLRLR

SEQ ID NO: 13879 - protein, 539 aa, Escherichia coli; identical to SEQ ID NO: 3050

SEQ ID NO: 13880 - protein, 241 aa, Escherichia coli; identical to SEQ ID NO: 2851

SEQ ID NO: 13881 - protein, 161 aa, Escherichia coli; identical to SEQ ID NO: 2582

SEQ ID NO: 13882 - protein, 900 aa, Escherichia coli; identical to SEQ ID NO: 9699

SEQ ID NO: 13883 - protein, 805 aa, Escherichia coli
MTAFRAAFKVYRMHQVLILPRFARLTFALGLATAVFPVDAEYYFNPRFLSNDLAESVDLSAFTKGREAPPGTYRVDIYLNDEFMASRDITFIADDNNADLIPCLSTDLLVSLGIKKSALLDNKEHSADKHVPDNSACTPLQDRLADASSEFDVGQQHLSLSVPQIYVGRMARGYVSPDLWEEGINAGLLNYSFNGNSINNRSNHNAGKSNYAYLNLQSGINIGSWRLRDNSTWSYNSGSSNSSDSNKWQHINTSAERDIIPLRSRLTVGDSYTDGDIFDSVNFRGLKINSTEAMLPDSQHGFAPVIHGIARGTAQVSVKQNGYDVYQTTVPPGPFTIDDINSAANGGDLQVTIKEADGSIQTLYVPYSSVPVLQRAGYTRYALAMGEYRSGNNLQSTPKFVQASLMHGLKGNWTPYGGMQIAEDYQAFNLGIGKDLGLFGAFSFDITQANTTLADDTRHSGQSVKSVYSKSFYQTGTNIQVAGYRYSTQGFYNLSDSAYSRMSGYTVKPPTGDTSEQTLFIDYFNLFYSKRGQEQISISQQLGNYGTTFFSASRQSYWNTSRSDQQISFGLNVPFGDITTSLNYSYSNNIWQNDRDHLLAFTLNVPFSHWMRTDSQSAFHNSNASYSMSNDLKGGMTNLSGVYGTLLPDNNLNYSVQVGNTHGGNTSSGTSGYSSLNYRGAYGNTNVGYSRSGDSSQIYYGMSGGIIAHADGITFGQPLGDTMVLVKAPGADNVKIENQTGIHTDWRGYAILPFATEYRENRVALNANSLADNVELDYPQIVLLKLAGASSIMAAQSHRIRLILP

SEQ ID NO: 13884 - protein, 883 aa, Escherichia coli
MTAFRAAFKAYRMHQVLLLPRFARLTIALGLATAVFPVDAEYYFNPRFLSNDLAESVDLSAFTKGREAPPGTYRVDIYLNDEFITSRDITFIADDNNADLIPCLSTDLLVSLGIKKSALLDNKEHSAEKHVPDNSACTPLQDRLADASTEFDVGQQHLSLSVPQIYVGRMARGYVSPDLWEEGINAGLLNYSFNGNSINNRSNHNAGKSNYAYLNLQSGINIGSWRLRDNSTWSYNSGSSNSSDSNKWQHINTSAERDIIPLRSRLTVGDSYTDGDIFDSVNFRGLKINSTEAMLPDSQHGFAPVIHGIARGTAQVSVKQNGYDVYQTTVPPGPFTIDDINSAANGGDLQVTIKEADGSIQTLYVPYSSVPVLQRAGYTRYALAMGEYRSGNNLQSSPKFIQGSLMHGLEGNWTPYGGMQIAEDYQAFNLGIGKDLGLFGAFSFDITQANTTLADGTRHSGQSIKSVYSKSFYQTGTNIQVAGYRYSTQGFYNLSDSAYSRMSGYTVKPPTGDSNEQTQFIDYFNLFYSKRGQEQISISQQLGNYGTTFFSASRQSYWNTSRSDQQISFGLNVPFGDITTSLNYSYSNNIWQNDRDHLLAFTLNVPFSHWMRTDSQSAFRNSNASYSMSNDLKGGMTNLSGVYGTLLPDNNLNYSVQVGNTHGGNTSSGTSGYSSLNYRGAYGNTNVGYSRSGDSSQIYYGMSGGIIAHADGITFGQPLGDTMVLVKAPGADNVKIENQTGIHTDWRGYAILPFATEYRENRVALNANSLADNVELDETVVTVIPTHGAIARATFNAQIGGKVLMTLKYGNKSVPFGAIVTHGKNKNGSIVAENGQVYLTGLPQSGKLQVSWGKDKNSNCIVEYKLPEVSPGTLLNQQTAICR

SEQ ID NO: 13885 - protein, 840 aa, Escherichia coli; identical to SEQ ID NO: 9665

SEQ ID NO: 13886 - protein, 831 aa, Escherichia coli
MQELPMLRMTPLASAIVALLIGIEAYAAEETFDTHFMIGGMKDQQVSNIRLEDNQPLPGPYDIDIYVNKQWRGKYEIIVKDNPQETCLSREMIKRLGINTDSFASGKQCLTFKQLIQGGSYTWDIGAFRLDFSVPQAWVEDLESGYVPPENWERGINAFYTSYYVSQYYSDYKASGNSKSTYVRFNSGLNLQGWQLHSDASFSKTNNNPGVWKSNTLYLERGFAQLLGTLRVGDMYTSSDIFDSVRFSGVRLFRDMQMLPNSKQNFTPRVQGIAQSNALVTIEQNGFVVYQKEVPPGPFAITDLQLAGGGADLDVSVKEADGSVTTYLVPYAAVPNMLQPGVSKYDFAAGRSHIEGASKQSDFVQAGYQYGFNNLLTLYGGSMVANNYYAFTLGTGWNTRIGAISVDATKSHSIQDNGDVFDGQSYQIAYNKFVSQTSTRFGLAAWRYSSRDYRTFNDHVWANNKDNYRRDENDIYDIADYYQNDFGRKNSFSANMSQSLPEGWGSVSLSTLWRDYWGRSGSSKDYQLSYSNNLRRISYTLAASHAYDENHHEEKRFNIFISIPFDWGDDVTTPRRQIYMSNSTTFDDQGVASNNTGLSGTVGSRDQFNYGVNLSYQYQGNETTAGANLTWNAPVATVNGSYSQSSAYRQAGASVSGGIVAWSGGVNLANRLSETFAVMNAPGIKDAYVNGQKYRTTNRNGVVVYDGMTPYRENYLMLDVSQSDSEAELRGNRKIAAPYRGAVVLVNFDTDQRKPWFIKALRADGQPLTFGYEVNDIHGHNIGVVGQGSQLFIRTNEVPPSVNVAIDKQQGLSCTITFGKEIDESRNYICQ

SEQ ID NO: 13887 - protein, 219 aa, Escherichia coli; identical to SEQ ID NO: 13413

SEQ ID NO: 13888 - protein, 836 aa, Escherichia coli
MKDRIPFAVNNITCVILLSLFCNAASAVEFNTDVLDAADKKNIDFTRFSEAGYVLPGQYLLDVIVNGQSISPASLQISFVEPQSSGDKAEKKLPQACLTSDMVRLMGLTAESLDKVVYWHDGQCADFHGLPGVDIRPDTGAGVLRINMPQAWLEYSDATWLPPSRWDDGIPGLMLDYNLNGTVSRNYQGGDSHQFSYNGTVGGNLGPWRLRADYQGSQEQSRYNGEKTTNRNFTWSRFYLFRAIPRWRANLTLGENNINSDIFRSWSYTGASLESDDRMLPPRLRGYAPQITGIAETNARVVVSQQGRVLYDSMVPAGPFSIQDLDSSVRGRLDVEVIEQNGRKKTFQVDTASVPYLTRPGQVRYKLVSGRSRGYGHETEGPVFATGEASWGLSNQWSLYGGAVLAGDYNALAAGAGWDLGVPGTLSADITQSVARIEGERTFQGKSWRLSYSKRFDNADADITFAGYRFSERNYMTMEQYLNARYRNDYSSREKEMYTVTLNKNVADWNTSFNLQYSRQTYWDIRKTDYYTVSVNRYFNVFGLQGVAVGLSASRSKYLGRDNDSAYLRISVPLGTGTASYSGSMSNDRYVNMAGYTDTFNDGLDSYSLNAGLNSGGGLTSQRQINAYYSHRSPLANLSANIASLQKGYTSFGVSASGGATITGKGAALHAGGMSGGTRLLVDTDGVGGVPVDGGQVVTNRWGTGVVTDISSYYRNTTSVDLKRLPDDVEATRSVVESALTEGAIGYRKFSVLKGKRLFAILRLADGSQPPFGASVTSEKGRELGMVADEGLAWLSGVTPGETLSVNWDGKIQCQVNVPETAISDQQLLLPCTPQK

SEQ ID NO: 13889 - protein, 861 aa, Escherichia coli; identical to SEQ ID NO: 9671

SEQ ID NO: 13890 - protein, 237 aa, Escherichia coli; identical to SEQ ID NO: 1814

SEQ ID NO: 13891 - protein, 816 aa, Escherichia coli; identical to SEQ ID NO: 3939

SEQ ID NO: 13892 - protein, 882 aa, Escherichia coli; identical to SEQ ID NO: 9664

SEQ ID NO: 13893 - protein, 883 aa, Escherichia coli
MDTPMPEHSFLRLRGLSWWIALAISGSPFNALADDTIQFDGRFLDLKGNTKIDLGRFSQKGYVEPGKYNLRVHVNNQPLPDDYDIYWYATENDPNKSYACLSPELVAQFGLKEDIAKNLQWIRDGQCLNTALLAGTEISGDLGQSALLVSVPQAYLEYTDSEWDPPSRWDDGIPGLIADYSINAQTRHENGGDDTNDISGNGTVGVNVGPWRLRADWQSDYQHTRSNDDGDTDDSGTQKNWEWSRYYAWRALPSLKAKLSLGEDYLNSDIFDGFSYIGGSISTDDQMLPPNLRGYAPDISGVAHTTAKVTVTQMGRVIYETQVPAGPFRIQDIGDSVSGTLHVRIEEQNGQVQEYDVSTASMPFLTRPGQVRYKVTMGRPQNWDHQVAGSFFSGGEASWGIANGWSLYGGALADENYQSAALGLGRDLALLGALAFDVTHSRVQLDDNSVYGNKTLDGNSYRVSYAKDFDELNSRVTFAGYRFSEKNYMTMSEYLDANDDDRARTGNDKEMYTVTYNQNFTDARVSVYLNYSHHTYWDRQDQTNYNMMLSHYFNLGSLRNLSVSLTGYRYEYDKSADKGVYLSLSLPWGDNSTISYNGNYGSGADSNQVSLYHRIDDASHYTVSAGTSENHSSVDGYYSHDGTLAKVDLSANYHEGQYTSAGISLQGGATLTAHGGALHRTQNMGGTRLLIDADGVANVPVEGNGSAVYTNMFGKAVVADVNDYYRNQAYIDLNKLPENAEATKSVVQATLTEGAIGYRKFAVISGEKAMAVLRLQDGSHPPFGAEVKNDNQQQVGLVDDEGNVYLAGVKPGEHMTVFWEGESHCDISLPDPLPNDLFNGLLLPCQQKGGSSPVIPHDIQPVIQEQTQQVTPMEPPMSVSSNQ

SEQ ID NO: 13894 - protein, 266 aa, Escherichia coli; identical to SEQ ID NO: 3338

SEQ ID NO: 13895 - protein, 831 aa, Escherichia coli
MQELPMLRMTPLASAIVALLLGIEAYAAEETFDTHFMIGGMKDQQVANIRLDDNQPLPGQYDIDIYVNKQWRGKYEIIVKDNPQETCLSREIIKRLGINTDNFASGKQCLTFEQLVQGGSYTWDIGVFRLDFSVPQAWVEELESGYVPPENWERGINAFYTSYYVSQYYSDYKASGNSKSTYVRFNSGLNLLGWQLHSDASFSKTNSNPGVWKSNTLYLERGFAQLLGTLRVGDMYTSSDIFDSVRFSGVRLFRDMQMLPNSKQNFTPRVQGIAQSNALVTIEQNGFVVYQKEVPPGPFAITDLQLAGGGADLDVSVKEADGSVTTYLVPYAAVPNMLQPGVSKYDFAAGRSHIEGASKQSDFVQAGYQYGFNNLLTLYGGSMVANNYYAFTLGTSWNTRIGAISVDATKSHSKQDNGDVFDGQSYQIAYNKFVSQTSTRFGLAAWRYSSRDYRTFNDHVWANNKDNYRRDENDIYDIADYYQNDFGRKNSFSANMSQSLPEGWGSVSLSTLWRDYWGRSGSSKDYQLSYSNNLRRISYTLAASQAYDENHHEEKRFNIFISIPFDWGDDVTTPRRQIYMSNSTTFDDQGFASNNTGLSGTVGNRDQFNYGVNLSHQHQGNETTAGANLTWNAPVATVNGSYSQSSTYRQAGASVSGGIVAWSGGVNLANRLSETFAVMNAPGIKDAYVNGQKYRTTNRNGVVVYDGMTPYRENHLMLDVSQSDSEAELRGNRKIAAPYRGAVVLVNFDTDQRKPWFIKALRTDGQPLTFGYEVNDIHGHNIGVVGQGSQLFIRTNEVPPSVNVAIDKQQGLSCTITFGKEIDESRNYICQ

SEQ ID NO: 13896 - protein, 368 aa, Escherichia coli; identical to SEQ ID NO: 2368

SEQ ID NO: 13897 - protein, 229 aa, Escherichia coli; identical to SEQ ID NO: 9651

SEQ ID NO: 13898 - protein, 891 aa, Escherichia coli
MILAAQLKAMSICKTRDLMQQEANVMKTKTSTKRHNLTRIAMYCSIMYSGATIGAESVEYDPTFLMGGNASSIDVSRYSDGNPTLPGVYDVSIYVNEQPVANLEIPFIAIPDKKNAQACITLKNLLQLHIKTPPADEENTILLPRDETLGNCLDLSLAIPKSSVNYDPSEQRLDINVPQAWVMKNYQNYVDPSLWENGINAATLSYNINAYRSENSNYTNDSVYTSFNGGVNLGAWRLRSSGNYSWRNDAGSNVEFMNRYVQRDITAIRSQLIMGESYTTGETFDSVSIRGIRLYSDSRMLPPVLANFAPTIRGVANTNAKVSITQSGYKIYETTVPPGPFVIDDLSPSGYGSDLIVTIEEADGSKRTFSQPFSSVIQMLRPGVSRWDISGGQINKDDLHHEPNLLQATYYRGLSNLFTGYTGFQVTDNHYAAGLLGIGMNTSVGAISFDVTHSSVDIPDDKRYQGQSYRISWNKFFDLTDTSLNIAAYRYSTQDYLGLNDALTLIDEVEHPTQDLDPKTMRNYGRMKNQFTVSINQPLRFGKDDYGSFYTSGSWSDYWGGSKSRSNYSVGYSNSASWGSYSISAQRSWDEYSQTENSIYLSFSIPIEKLMGTEHRDSGFQSIDTQLSTNMDGNNQFNMSSSGYSNDNRVSYSVNAGYGMNKTGKDLSNIGGYASYESPWGTLAGSVSATSDNNRQYSVNTDGGFVLHSGGLTFSNDSFSDNDTIALVKAPGAKGARINYGNNTVDRWGYGVTSALSPYQENKIALDTENLENDIEMKSTSTVAVPRQGSVIFAGFETNQGQSAIMNIKRSDGKGIPFAADIHDETNAIIGNVGQGGQAFVRGIQQQGTIKITWLEASMPKTCIAQYQQPNVTSEKIQQTIILNNILCQLQ

SEQ ID NO: 13899 - protein, 819 aa, Escherichia coli
MDTVNIYRLSFISCLVMAIPSALAVEFNLNVLDKSMRDRIDISLLKGKGGIAPGEYFVSVAVNNNQISNGQKIDWKKNGDQTIPCINDLLVDKFGLKPEVRQSLPRLNQCVDFSSRPEILFIFDQASQQLNITIPQAWLAWHSDNWTPPSTWKEGVAGVLMDYNLFASSYRPQDGSNSTNLNAYGTAGINAGAWRLRSDYQLNQTDSDDNHEQSGEISRTYLFRPLPQLGSKLTLGETDFSSNIFDGFSYTGAALASDDRMLPWELRGYAPQISGIAQTNATVTVSHSGRVIYQKKVPPGPFIIDDLNQSVQGTLDVKVTEEDGRVNNFQVSAASTPFLTRQGQVRYKLAAGQPRTSMSHQTENETFFSNEVSWGMLSNTSLYGGLLISGDNYHSAAMGIGQNMLWLGALSFDVTWASSQFDTQQDERGLSYRFNYSKQVDATNSTISLAAYRFSDRHFHSYANYLDHKYNDNDAQDEKQTISLSVGQPITPLNLNLYANLLHQTWWNADASTTANITAGFNVDIGNWRDISISTSFNTTHYEDKDRDNQIYLSISLPFGNGGRVGYDMQNSNHSTTHRMSWNDTLDERNSWGMSTGLQSDRPDNGAQVSGNYQHLSSAGEWDISGTYAANDYSSVSSSWSGSFTATQYGAAFHRRSSTNEPRLMVSTDGVADIPVQGNLDYTNHFGIAVVPLISSYQPSTVAVNMNDLPDGVTVADNVIKETWIEGAIGYKSLASRSGKDVNLIIRNASGQFPPLGADIRQEDSGISVGMVGEEGHAWLSGVAENQQFTVIWGDSQRCSIHLPEHMEDTANRLILPCH

SEQ ID NO: 13900 - protein, 161 aa, Escherichia coli; identical to SEQ ID NO: 2582

SEQ ID NO: 13901 - protein, 266 aa, Escherichia coli; identical to SEQ ID NO: 1893

SEQ ID NO: 13902 - protein, 207 aa, Escherichia coli; identical to SEQ ID NO: 2211

SEQ ID NO: 13903 - protein, 878 aa, Escherichia coli; identical to SEQ ID NO: 12145

SEQ ID NO: 13904 - protein, 890 aa, Escherichia coli
MAADFIFSLSVGADMFFGDGGQLLSDKSLTGSAGGGNNRMKFNILPLAFFIGIIVSPARAELYFNPRFLSDDPDAVADLSAFTQGQELPPGVYRVDIYLNDTYISTRDVQFQMSQDGKQLAPCLSPEHMSAMGVNRYAVPGMERLPADTCTSLNSMIQGATFRFDVGQQRLYLTVPQIYMSNQARGYIAPEYWDNGITAALLNYDFSGNRVRDSYGGTSDYAYLNLKTGLNIGSWRLRDNTSWSYSAGKGYSQNNWQHINTWLERDIVPLRSRLTMGDSYTRGDIFDGVNFRGIQLASDDNMVPDSQRGYAPTIHGISRGTSRISIRQNGYEIYQSTLPPGPFEINDIYPAGSGGDLQVTLQEADGSVQRFNVPWSSVPVLQREGHLKYALSAGEFRSGGHQQDNPRFAEGTLKYGLPAGWTVYGGAWIAERYRAFNLGVGKNMGWLGAVSLDATRANARLPDESRHDGQSYRFLYNKSLTETGTNIQLIGYRYSTRGYFSFADTAWKKMSGYSVLTQDGVIQIQPKYTDYYNLAYNKRGRVQVSISQQTGESSTLYLSGSHQSYWGTDRTDRQLNAGFNSSVNDISWSLNYSLSRNAWQHETDRILSFDVSIPFSHWMRSDSTSAWRNASARYSQTLEAHGQAASTAGLYGTLLEDNNLGYSIQSGYTRGGYEGSSKTGYASLNYRGGYGNASAGYSHSGGYRQLYYGLSGGILAHANGLTLSQPLGDTLILVRAPGASDTRIENQTGVSTDWRGYAVLPYATDYRENRVALDTNTLADNVDIENTVVSVVPTHGAVVRADYKTRVGVKVLMTLMRNGKAVPFGSVVTARNGGSSIAGENGQVYLSGMPLSGQVSVKWGSQTTDQCTADYKLPKESAGQILSHVTVSCR

SEQ ID NO: 13905 - protein, 869 aa, Escherichia coli; identical to SEQ ID NO: 3938

SEQ ID NO: 13906 - protein, 850 aa, Escherichia coli
MEERNNKYELSALYIAVLSSLPFFFCADVAARSYTFEPSMLNVDGNDIDLSIFESGAQLPGTYYVDIMLNGKLVDTKEMEFSRERNKDGEFVLSSCLTQSMLNRYGVKVGDYPELFVNSSNGKVCGDLSVIPGAFSYFDFYNQQLNLSIPNVALYPKYKGIASEELWDNGINAFLMNYQANAQINQYRNKKNREVSSYWARIEPGMNIGSWRIRNLTTFTKENGNSEKRESVYTYAERGLTSIKSNLLIGESYTNSDIFDSISFRGIMLHSDESMVPYSKYAFAPVIRGIAQSQALIEVRQNGYLIHTVSVAPGAFEISDLPVTGSGGDLQVSVIETNGKNQSFTVPYTTPVIALRENYLKYSLVGGMYRSAYSGVDNTALIQMTAMYGMPWNLTTFVGFQGSEHYNSVATGVGLSMGDMGAISLDGIYARGQKEKQNKEDGYSWRVRYSKVFDITGTNFIAASHQYSSDGYQTLSDVLDTYGHSNYSYGGYANRSMRNSLTISQSMGEWGTFSFGGVRDEYRGNRSPQNSINALYSNSMEWGTLSLNWSQNKITDSSRSVKDKKENIFSFWVSIPLYRLLGNTSNNINATTQIQKYDNQKMQYEFGMNGRAFNRQLYWDISQRLAPGNENYNDASRLNLEWYGTYGQIRGGYGYSDSLRQMNAGISGTAIVHSNGVTFGQKQGGTIALVEAQGVDGAEVIGWPGVKTDFRGYTALGHLTPYQENTVSLNPASFPEYAEVLQTDTKVIPTKGAVVSARFKTSIGKKALFKLTRHDGKKVPFGAVVSSATADDNKRVVGIVNESGEVYMSGLSEKGQLDVKWNSHGSCKAVYKLSDNKSIVNIYNASLTCI

SEQ ID NO: 13907 - protein, 856 aa, Escherichia coli; identical to SEQ ID NO: 5296

SEQ ID NO: 13908 - protein, 825 aa, Escherichia coli; identical to SEQ ID NO: 9695

SEQ ID NO: 13909 - protein, 368 aa, Escherichia coli; identical to SEQ ID NO: 2374

SEQ ID NO: 13910 - protein, 367 aa, Escherichia coli; identical to SEQ ID NO: 3998

SEQ ID NO: 13911 - protein, 122 aa, Escherichia coli; identical to SEQ ID NO: 2915

SEQ ID NO: 13912 - protein, 386 aa, Escherichia coli; identical to SEQ ID NO: 7196

SEQ ID NO: 13913 - protein, 243 aa, Escherichia coli; identical to SEQ ID NO: 4001

SEQ ID NO: 13914 - protein, 746 aa, Escherichia coli; identical to SEQ ID NO: 4130

SEQ ID NO: 13915 - protein, 679 aa, Escherichia coli
LQGLTTMKMTRLYPLALGGLLLPAIANAQTSQQDESTLVVTASKQSSRSASANNVSSTVVSAPELSDAGVTASDKLPRVLPGLNIENSGNMLFSTISLRGVSSAQDFYNPAVTLYVDGVPQLSTNTIQALTDVQSVELLRGPQGTLYGKSAQGGIINIVTQQPDSTPRGYIEGGVSSRDSYRSKFNLSGPIQDGLLYGSVTLLRQVDDGDMINPATGSDDLGGTRASIGNVKLRLAPDDQPWEMGFAASRECTRATQDAYVGWNDIKGRKLSISDGSPDPYMRRCTDSQTLSGKYTTDDWVFNLISAWQQQHYSRTFPSGSLIVNMPQRWNQDVQELRAATLGDARTVDMVFGLYRQNTREKLNSAYDMPTMPYLSSTGYTTAETLAAYSDLTWHLTDRFDIGGGVRFSHDKSSTQYHGSMLGNPFGDQGKSNDDQVLGQLSAGYMLTDDWRVYTRVAQGYKPSGYNIVPTAGLDAKPFVAEKSINYELGTRYETADVTLQAATFYTHTKDMQLYSGPVGMQTLSNAGKADATGVELEAKWRFAPGWSWDINGNVIRSEFTNDSELYHGNRVPFVPRYGAGSSVNGVIDTRYGALMPRLAVNLVGPHYFDGDNQLRQGTYATLDSSLGWQATERMNISVYVDNLFDRRYRTYGYMNGSSAVAQVNMGRTVGINTRIDFF

SEQ ID NO: 13916 - protein, 760 aa, Escherichia coli; identical to SEQ ID NO: 9855

SEQ ID NO: 13917 - protein, 353 aa, Escherichia coli; identical to SEQ ID NO: 4626

SEQ ID NO: 13918 - protein, 353 aa, Escherichia coli; identical to SEQ ID NO: 6704

SEQ ID NO: 13919 - protein, 784 aa, Escherichia coli; identical to SEQ ID NO: 2244

SEQ ID NO: 13920 - protein, 614 aa, Escherichia coli; identical to SEQ ID NO: 6666

SEQ ID NO: 13921 - protein, 654 aa, Escherichia coli; identical to SEQ ID NO: 3854

SEQ ID NO: 13922 - protein, 753 aa, Escherichia coli; identical to SEQ ID NO: 6655

SEQ ID NO: 13923 - protein, 224 aa, Escherichia coli
MATVLLLLLFACHSTIANAAVALGATRVIYPANQKQVLLPVTNNDPASVYLIQSWIENAGDQKDTQFVITPPLFSMQGKKENTLRIINATNHQLPGDRESLFWVNVKAIPAMEKDQKNENTLQLAIISRIKMFYRPTNLAMAPEEAPAMLRFRRSGSKLTLINPTPYFITVTNMKAGNSNLPNTMVPPKGEVSVDIPHAATGDISFQTINDYGALTPRIKATMQ

SEQ ID NO: 13924 - protein, 518 aa, Escherichia coli; identical to SEQ ID NO: 2349

SEQ ID NO: 13925 - protein, 249 aa, Escherichia coli
MNIMKLPLITTGMICFLGICNFAQATVSPDRTRIIFNASNKSATVRLTNQSKIDPYLAQSWIEDASGKKTRDYISTLPPMERIEPDEQVQIRLMALASLNNLPQDRETLFYYNVREIPPRAKEQNVMQIAMQSRLKLFWRPKAIELKEGEMVPLQKVTITRPAAGLTLNNPTPYHITVGYIGTNGKTLMPGADSIMVAPFASATQHLNNLPSTFQLGFVADYGGLEMFKVVCNSVQSLCQSTPAKKGKI

SEQ ID NO: 13926 - protein, 713 aa, Escherichia coli; identical to SEQ ID NO: 4590

SEQ ID NO: 13927 - protein, 656 aa, Escherichia coli; identical to SEQ ID NO: 4094

SEQ ID NO: 13928 - protein, 213 aa, Escherichia coli; identical to SEQ ID NO: 2232

SEQ ID NO: 13929 - protein, 729 aa, Escherichia coli; identical to SEQ ID NO: 4557

SEQ ID NO: 13930 - protein, 191 aa, Escherichia coli; identical to SEQ ID NO: 2730

SEQ ID NO: 13931 - protein, 235 aa, Escherichia coli; identical to SEQ ID NO: 4365

SEQ ID NO: 13932 - protein, 366 aa, Escherichia coli; identical to SEQ ID NO: 4014

SEQ ID NO: 13933 - protein, 122 aa, Escherichia coli; identical to SEQ ID NO: 2915

SEQ ID NO: 13934 - protein, 111 aa, Escherichia coli; identical to SEQ ID NO: 3419

SEQ ID NO: 13935 - protein, 362 aa, Escherichia coli; identical to SEQ ID NO: 2827

SEQ ID NO: 13936 - protein, 828 aa, Escherichia coli; identical to SEQ ID NO: 2388

SEQ ID NO: 13937 - protein, 219 aa, Escherichia coli
MSFFILPVHAGVVIYGTRIIYPEKNREVLVQLMNQSKNASLIQAWIDDGNTTIAPEKIQVPFILTPPVSRVAGGSGQQLKIRKMPNNLPHNKESLFYLNVLDIPPNNPQNAGKNKIKLALQNRIKLLWRPSGIAPVDKKSLSQLNIKKKNNAISINNETANWITVTTIKAQNVKVNNESILLPPFSNNDITLKNNHASEYELTVVDDYGNNIHSKIAAR

SEQ ID NO: 13938 - protein, 208 aa, Escherichia coli; identical to SEQ ID NO: 1949

SEQ ID NO: 13939 - protein, 721 aa, Escherichia coli; identical to SEQ ID NO: 9824

SEQ ID NO: 13940 - protein, 753 aa, Escherichia coli
MGMVIIIFSNVEHFLPLRLQFSQLLNVSCRFVFHIFTILLPWRRFPILNLAFFMKIFSVRQTVLPALLVLSPVVFAADEQTMIVSAAPQVVSELDTPAAVSVVDGEEMRLATPRINLSESLTSVPGLQVQNRQNYAQDLQLSIRGFGSRSTYGIRGIRLYVDGIPATMPDGQGQTSNIDLSSVQNVEVLRGPFSALYGNASGGVMNVITQTGQRPPTIEASSYYGSFGSWRYGLKATGAMGDGTQPGDVDYTVSTTRFTTHGYRDHSGAQKNLANAKLGVRIDDASKLSLIFNSVDIKADDPGGLTEAEWKANPQQAPRAEQYDTRKTIKQTQAGLRYERSLSAQDDMSVMMYAGERETTQYQSIPMAPQLNPSHAGGVITLQRHYQGIDSRWTHRGELGVPLTFTTGLNYENMSENRKGYNNFRLNSGVPEYGQKGELRRDERNLMWNVDPYLQTQWQLSEKLSLDAGVRYSSVWFDSNDHYVTPGNGDDSGDASYHKWLPAGSLKYAMTDAWNIYLAAGRGFETPTINELSYRADGQSGMNFGLKPSTNDTIEIGSKTRIGDGLLSLALFQTDTDDEIVVDSSSGGRTTYKNAGKTRRQAAELAWDQRFAGDFRVKASWTWLDATYRSNVCNEQDCNGNRMPGIARNMGFASIGYVPEDGWYAGTEARYMGDIMADDENTAKAPSYTLVGLFTGYKYNYHNLTVDLFGRVDNLFDKEYVGSVIVNESNGRYYEPAPGRNYGVGMNIAWRFE

SEQ ID NO: 13941 - protein, 169 aa, Escherichia coli; identical to SEQ ID NO: 3373

SEQ ID NO: 13942 - protein, 192 aa, Escherichia coli; identical to SEQ ID NO: 4587

SEQ ID NO: 13943 - protein, 746 aa, Escherichia coli
MNKKIHSLALLVNLGIYGVAQAQEPTDTPVSHDDTIVVTAAEQNLQAPGVSTITADEIRKNPVARDVSEIIRTMPGVNLTGNSTSGQRGNNRQIDIRGMGPENTLILIDGKPVSSRNSVRQGWRGERDTRGDTSWVPPEMIERIEVLRGPAAARYGNGAAGGVVNIITKKGSGEWHGSWDAYFNAPEHKEEGATKRTNFSLTGPLGDEFSFRLYGNLDKTQADAWDINQGHQSARAGTYATTLPAGREGVINKDINGVVRWDFAPLQSLELEAGYSRQGNLYAGDTQNTNSDAYTRSKYGDETNRLYRQNYSLTWNGGWDNGVTTSNWVQYEHTRNSRIPEGLAGGTEGKFNEKAAQDFVDIDLDDVMLHSEVNLPIDFLVNQTLTLGTEWNQQRMKDLSSNTQALTGTNTGGAIDGVSATDRSPYSKAEIFSLFAENNMELTDSTIVTPGLRFDHHSIVGNNWSPALNISQGLGDDFTLKMGIARAYKAPSLYQTNPNYILYSKGQGCYASAGGCYLQGNDDLKAETSINKEIGLEFKRDGWLAGVTWFRNDYRNKIEAGYVAVGQNAVGTDLYQWDNVPKAVVEGLEGSLNVPVSETVMWTNNITYMLKSENKTTGDRLSIIPEYTLNSTLSWQAREDLSMQTTFTWYGKQQPKKYNYKGQPAVGPETKEISPYSIVGLSATWDVTKNVSLTGGVDNLFDKRLWRAGNAQTTGDLAGVNYIAGAGAYTYNEPGRTWYMSINTHF

SEQ ID NO: 13944 - protein, 541 aa, Escherichia coli; identical to SEQ ID NO: 4576

SEQ ID NO: 13945 - protein, 656 aa, Escherichia coli; identical to SEQ ID NO: 9854

SEQ ID NO: 13946 - protein, 241 aa, Escherichia coli; identical to SEQ ID NO: 9893

SEQ ID NO: 13947 - protein, 231 aa, Escherichia coli; identical to SEQ ID NO: 2864

SEQ ID NO: 13948 - protein, 446 aa, Escherichia coli; identical to SEQ ID NO: 2176

SEQ ID NO: 13949 - protein, 784 aa, Escherichia coli; identical to SEQ ID NO: 2241

SEQ ID NO: 13950 - protein, 242 aa, Escherichia coli; identical to SEQ ID NO: 12215

SEQ ID NO: 13951 - protein, 432 aa, Escherichia coli; identical to SEQ ID NO: 2026

SEQ ID NO: 13952 - protein, 213 aa, Escherichia coli; identical to SEQ ID NO: 2232

SEQ ID NO: 13953 - protein, 249 aa, Escherichia coli; identical to SEQ ID NO: 10618

SEQ ID NO: 13954 - protein, 541 aa, Escherichia coli; identical to SEQ ID NO: 3377

SEQ ID NO: 13955 - protein, 446 aa, Escherichia coli; identical to SEQ ID NO: 2177

SEQ ID NO: 13956 - protein, 386 aa, Escherichia coli; identical to SEQ ID NO: 12201

SEQ ID NO: 13957 - protein, 355 aa, Escherichia coli
MKKLTVAISAVAASVLMAMSAQAAEIYNKDSNKLDLYGKVNAKHYFSSNDADDGDTTYVRLGFKGETQINDQLTGFGQWEYEFKGNRAESQGSSKDKTRLAFAGLKFGDYGSIDYGRNYGVAYDIGAWTDVLPEFGGDTWTQTDVFMTGRTTGVATYRNNDFFGLVDGLNFAAQYQGKNDRTDVTEANGDGFGFSTTYEYEGFGVGATYAKSDRTNDQVIYGNNSLNASGQNAEVWAAGLKYDANNIYLATTYSETQNMTVFGNNHIANKAQNFEVVAQYQFDFGLRPSVAYLQSKGKDLGAWGDQDLVEYIDVGATYYFNKNMSTFVDYKINLIDKSDFTKASGVATDDIVAVG

SEQ ID NO: 13958 - protein, 113 aa, Escherichia coli
MEKDQKNENTLQLAIISRIKMFYRPTHLAMAPEEAPAMLRFRRSGSKLTLINPTPYFITVTNMKAGNSNLPNTMVPPKGEVSVDIPHAVTGDISFQTINDYGALTPRIKATMQ

SEQ ID NO: 13959 - protein, 250 aa, Escherichia coli
MFKAIFTVGSLLLPCIVVAKGIGVTASSNDVVDAQLFSVDLNLNRVVYYHGSLGENVAVKNNQAYPMLVQSMVFDEDKKSPAPFITTPPLFRLDGSQTSRIRIVRTGGEFPQDREKLQWLCVKGIPPQSEDKWAEGTITKNSSFTVQFSVNNCIKVFVRPDTIKGHPEDFADKVTWSKKGTTVLEANNPTPFYLNIKELNIGGRSIKSPNYIPPFGKQSFSIPGSSVGKIQWRIVTDYGGDSKIYQSEGK

SEQ ID NO: 13960 - protein, 192 aa, Escherichia coli; identical to SEQ ID NO: 6643

SEQ ID NO: 13961 - protein, 518 aa, Escherichia coli; identical to SEQ ID NO: 2356

SEQ ID NO: 13962 - protein, 274 aa, Escherichia coli; identical to SEQ ID NO: 2301

SEQ ID NO: 13963 - protein, 222 aa, Escherichia coli; identical to SEQ ID NO: 4102

SEQ ID NO: 13964 - protein, 230 aa, Escherichia coli; identical to SEQ ID NO: 4004

SEQ ID NO: 13965 - protein, 614 aa, Escherichia coli; identical to SEQ ID NO: 4016

SEQ ID NO: 13966 - protein, 673 aa, Escherichia coli; identical to SEQ ID NO: 4735

SEQ ID NO: 13967 - protein, 700 aa, Escherichia coli; identical to SEQ ID NO: 12225

SEQ ID NO: 13968 - protein, 1024 aa, Escherichia coli; identical to SEQ ID NO: 12943

SEQ ID NO: 13969 - protein, 243 aa, Escherichia coli; identical to SEQ ID NO: 4044

SEQ ID NO: 13970 - protein, 119 aa, Escherichia coli; identical to SEQ ID NO: 5512

SEQ ID NO: 13971 - protein, 629 aa, Escherichia coli; identical to SEQ ID NO: 10744

SEQ ID NO: 13972 - protein, 204 aa, Escherichia coli; identical to SEQ ID NO: 2957

SEQ ID NO: 13973 - protein, 362 aa, Escherichia coli; identical to SEQ ID NO: 4554

SEQ ID NO: 13974 - protein, 331 aa, Escherichia coli; identical to SEQ ID NO: 2713

SEQ ID NO: 13975 - protein, 222 aa, Escherichia coli
MKGLLALLISSMVLPAHAGIVIYGTRIIYPAEHKEVMVQLMNQGNRSSLMQAWIDDGDTSLPPEKIQVPFMLTPPVAKIGANSGQQVKIMPNKLPTNKESIFYLNVLDIPPNSPEQEGKNALKFAMQNRIKLFYRPAGIAPVNKVTFKKLLVNRSGNGLVIKNDSANWVTISDVKANNVKVNYETIMIAPLESQSVNVKSNNANNWHLTIIDDHGNYINDKI

SEQ ID NO: 13976 - protein, 669 aa, Escherichia coli
MIVSASGYEKKLTNAAASVSVISQEELQSSQYHDLAEALRSVEGVDVESGTGKTGGLEISIRGMPASYTLILIDGVRQGGSSDVTPNGFSAMNTGFMPPLAAIERIEVIRGPMSTLYGSDAMGGVVNIITRKNADKWLSSVNAGLNLQESNKWGNSSQFNFWSSGPLVDDSVSLQVRGSTQQRQGSSVTSLSDTAATRIPYPTESQNYNLGARLDWKASEQDVLWFDMDTTRQRYDNRDGQLGSLTGGYDRTLRYERNKISAGYDHTFTFGTWKSYLNWNETENKGRELVRSVLKRDKWGLAGQPRELKESNLILNSLLLTPLGESHLVTVGGEFQSSSMKDGVVLASTGETFRQKSWSVFAEDEWHLTDALALTAGSRYEHHEQFGGHFSPRAYLVWDVADAWTLKGGVTTGYKAPRMGQLHKGISGVSGQGKTNLLGNPNLKPEESVSYEAGVYYDNPAGLNANVTGFMTDFSNKIVSYSINDNTNSYVNSGKARLHGVEFAGTLPLWSEDVTLSLNYTWTRSEQRDGDNKGAPLSYTPEHMVNAKLNWQITEEVASWLGARYRGKTPRFTQNYSSLSAVQKKVYDEKGEYLKAWTVVDAGLSWKMTDALTLNAAVNNLLNKDYSDVSLYSAGKSTLYAGDYFQTGSSTTGYVIPERNYWMSLNYQF

SEQ ID NO: 13977 - protein, 250 aa, Escherichia coli
MINVLICILICCTNAQAGVVVGGTRFVYPEKQSSISVELKNTASKDMLVKISVTPDDGRQLKGTLESQPLLPDKAFIATPPLLVLKQDKNTKIRINRVGGQLPIDRESLFILNIAVLPAQEQNSQLKNENQLQVAVRNRMKIFYRPETLSGNPLDAYQQLRWSRNNEAVTVFNPTPWYVTLYNLSIDGKSINGGMVAPFSHRQQDWCQRQGYCEINWQTLDLYNNALPVWSVKLNVLQNNAIMGAVAIHG

SEQ ID NO: 13978 - protein, 331 aa, Escherichia coli; identical to SEQ ID NO: 2705

SEQ ID NO: 13979 - protein, 733 aa, Escherichia coli
MAQALAAEGQANADDTLVVEASTPSLYAPQQSADPKFSRPVADTTRTMTVISEQVIKDQGATNLTDALKNVPGVGAFFAGENGNSTTGDAIYMRGADTSNSIYIDGIRDIGSVSRDTFNTEQVEVIKGPSGTDYGRSAPTGSINMISKQPRNDSGIDASASIGSAWFRRGTLDVNQVIGDTTAVRLNVMGEKTHDAGRDKIKNERYGVAPSVAFGLGTANRLYLNYLHVTQHNTPDGGIPTIGLPGYSAPSAGTAALNHSGKVDTHNFYGTDSDYDDSTTDTATMRFEHDINDNTTIRNTTRWSRVKQDYLMTAIMGGASNITQPTSDVNSWTWSRTANTKDVSNKILTNQTNLTSTFYTGSIGHDVSTGVEFTRETQTNYGVNPVTLPAVNIYHPDSSIHPGGLTRNGANANGQTDTFAIYAFDTLQITRDFELNGGIRLDNYHTEYDSATACGGSGRGAITCPAGMAKGSPVTTVDTAKSGNLVNWKAGALYHLTENGNVYINYAVSQQPPGGNNFALAQSGSGNSANRTDFKPQKANTSEIGTKWQVLDKRLLLTAALFRTDIENEVEQNDDGTYSQYGKKRVEGYEISVAGNITPAWQVIGGYTQQKATIKNGKDVAQDGSSSLPYTPEHAFTLWSQYQATDDISVGAGARYIGSMHKGSDGAVGTPAFTEGYWVADAKLGYRVNRNLDFQLNVYNLFDTDYVASINKSGYRYHPGEPRTFLLTANMHF

SEQ ID NO: 13980 - protein, 241 aa, Escherichia coli; identical to SEQ ID NO: 2075

SEQ ID NO: 13981 - protein, 517 aa, Escherichia coli; identical to SEQ ID NO: 2462

SEQ ID NO: 13982 - protein, 752 aa, Escherichia coli; identical to SEQ ID NO: 4012

SEQ ID NO: 13983 - protein, 222 aa, Escherichia coli; identical to SEQ ID NO: 1956

SEQ ID NO: 13984 - protein, 230 aa, Escherichia coli; identical to SEQ ID NO: 4598

SEQ ID NO: 13985 - protein, 478 aa, Escherichia coli; identical to SEQ ID NO: 2421

SEQ ID NO: 13986 - protein, 719 aa, Escherichia coli
MRDEMLYNIPCRIYILSTLSLCISGIVSTATATSSETKISNEETLVVTTNRSASNLWESPATIQVIGQQTLQNSTNASIADNLQDIPGVEITDNSLAGRKQIRIRGEASSRVLILIDGQEVTYQRAGDNYGVGLLIDESALERVEVVKGPYSVLYGSQAIGGIVNFITKKGGDKLASGVVKAVYNSATAGWEESIAVQGSIGGFDYRINGSYSDQGNRDTPDGRLPNTNYRNNSQGVWLGYNSGNHRFGLSLDRYRLATQTYYEDPDGSYEAFSVKIPKLEREKVGVFYDTDVDGDYLKKIHFDAYEQTIQRQFANEVKTTQPVPSPMIQALTVHNKTDTHDKQYTQAVTLQSHFSLPANNELVTGAQYKQDRVSQRSGGMTSSKSLTGFINKETRTRSYYESEQSTVSLFAQNDWRFADHWTWTMGVRQYWLSSKLTRGDGVSYTAGIISDTSLARESASDHEMVTSTSLRYSGFDNLELRAAFAQGYVFPTLSQLFMQTSAGGSVTYGNPDLKAEHSNNFELGARYNGNQWLIDSAVYYSEAKDYIASLICDGSIVCNGNTNSSRSSYYYYDNIDRAKTWGLEISAEYNGWVFSPYISGNLIRRQYKTSTLKTTNTGEPAINGRIGLKHTLVMGQANIISDVFIRAASSAKDDSNGTETNVPGWATLNFAVNTEFGNEDQYRINLALNNLTDKRYRTAHETIPAAGFNAAIGFVWNF

SEQ ID NO: 13987 - protein, 250 aa, Escherichia coli; identical to SEQ ID NO: 3811

SEQ ID NO: 13988 - protein, 111 aa, Escherichia coli; identical to SEQ ID NO: 3996

SEQ ID NO: 13989 - protein, 250 aa, Escherichia coli; identical to SEQ ID NO: 4096

SEQ ID NO: 13990 - protein, 728 aa, Escherichia coli; identical to SEQ ID NO: 4574

SEQ ID NO: 13991 - protein, 729 aa, Escherichia coli; identical to SEQ ID NO: 4015

SEQ ID NO: 13992 - protein, 774 aa, Escherichia coli; identical to SEQ ID NO: 5966

SEQ ID NO: 13993 - protein, 732 aa, Escherichia coli; identical to SEQ ID NO: 4057

SEQ ID NO: 13994 - protein, 228 aa, Escherichia coli
MAFSMPVMADIVISGTRVIYKSDQKSVSVRLENKGNSHLLVQSWLDTGDDNAEPGSINVPFTATPPVSRIDAKRGQTIKLMYTGSTVLPSDKESVFWFNVLEVPPKPDASKVENQSLLQLAFRTRIKLFYRPAGLNGNPSEAPLALKWKWAEGKSGLSVYNPTSYYVSFNSAELIAGGKSNPLNVKMVAPKSEEIFTISGSGGKATSGKVHFSAINDFGGAIEGDVNL

SEQ ID NO: 13995 - protein, 204 aa, Escherichia coli; identical to SEQ ID NO: 2957

SEQ ID NO: 13996 - protein, 478 aa, Escherichia coli; identical to SEQ ID NO: 2405

SEQ ID NO: 13997 - protein, 249 aa, Escherichia coli; identical to SEQ ID NO: 4132

SEQ ID NO: 13998 - protein, 431 aa, Escherichia coli; identical to SEQ ID NO: 3408

SEQ ID NO: 13999 - protein, 241 aa, Escherichia coli; identical to SEQ ID NO: 2922

SEQ ID NO: 14000 - protein, 281 aa, Escherichia coli
MMKKYLALALIAPLLISCSTTKKGDTYNEAWVKDTNGFDILMGQFAHNIENIWGFKEVVIAGPKDYVKYTDQYQTRSHINFDDGTITIETIAGTEPAAHLRRAIIKTLLMGDDPSSVDLYSDVDDITISKEPFLYGQVVDNTGQPIRWEGRASNFADYLLKNRLQSRSNGLRIIYSVTINMVPNHLDKRAHKYLGMVRQASRKYGVDESLILAIMQTESSFNPYAVSRSDALGLMQVVQHTAGKDVFRSQGKSGTPSRSFLFDPASNIDTGTAYLAMLNNV

SEQ ID NO: 14001 - protein, 431 aa, Escherichia coli; identical to SEQ ID NO: 3408

SEQ ID NO: 14002 - protein, 753 aa, Escherichia coli
MNVIKLAIGSGILLLSCGAYSQSISEKTNSDKKGAAEFSPLSVSVGKTTSEQEALEKTGATSSRTTDKNLQSLDATVRSMPGTYTQIDPGQGAISVNIRGMSGFGRVNTMVDGITQSFYGTSTSGTTTHGSTNNMAGVLIDPNLLVAVDVTRGDSSGSEGINALAGSANMRTIGVDDVIFNGNTYGLRSRFSVGSNGLGRSGMIALGGKSDAFTDTGSIGVMAAVSGSSVYSNFSNGSGINSKEFGYDKYMKQNPKSQLYKMDIRPDEFNSFELSARTYENKFTRRDITSDDYYIKYHYTPFSELIDFNVTASTSRGNQKYRDGSLYTFYKTSAQNRSDALDINNTSRFTVADNDLEFMLGSKLMRTRYDRTIHSAAGDPKANQESIENNPFAPSGQQDISALYTGLKVTRGIWEADFNLNYTRNRITGYKPACDSRVICVPQGSYDIDDKEGGFNPSVQLSAQVTPWLQPFIGYSKSMRAPNIQEMFFSNSGGASMNPFLKPERAETWQAGFYIDTRDLLVEQDALRFKALAYRSRIQNYIYSESYLVCSGGRKCSLPEVIGNGWEGISDEYSDNMYIYVNSASDVIAKGFELEMDYDAGFAFGRLSFSQQQTDQPTSIASTHFGAGDITELPRKYMTLDTGVRFFDNALTLGTIIKYTGKARRLSPDFEQDEHTGAIIKQDLPQIPTIIDLYGTYEYNRNLTLKLSVQNLMNRDYSEALNKLNMMPGLGDETHPANSARGRTWIFGGDIRF

SEQ ID NO: 14003 - protein, 656 aa, Escherichia coli; identical to SEQ ID NO: 6715

SEQ ID NO: 14004 - protein, 686 aa, Escherichia coli
MFWRDITLSVWRKKTTGLKTKKRLLPLVLAAALCSSPVWAEEATFTANFKDTDLKSFIETVGANLNKTIIMGPGVQGKVSIRTMTPLNERQYYQLFLNLLEAQGYAVVPMENDVLKVVKSSAAKVEPLPLVGEGSDNYAGDEMVTKVVPVRNVSVRELAPILRQMIDSAGSGNVVNYDPSNVIMLTGRASVVERLTEVIQRVDHAGNRTEEVIPLDNASASEIARVLESLTKNSGENQPATLKSQIVADERTNSVIVSGDPATRDKMRRLIRRLDSEMERSGNSQVFYLKYSKAEDLVDVLKQVSGTLTAAKEEAEGTVGSGREVVSIAASKHSNALIVTAPQDIMQSLQSVIEQLDIRRAQVHVEALIVEVAEGSNINFGVQWASKDAGLMQFANGTQIPIGTLGAAISQAKPQKGSTVISENGATTINPDTNGDLSTLAQLLSGFSGTAVGVVKGDWMALVQAVKNDSSSNVLSTPSITTLDNQEAFFMVGQDVPVLTGSTVGSNNSNPFNTVERKKVGIMLKVTPQINEGNAVQMVIEQEVSKVEGQTSLDVVFGERKLKTTVLANDGELIVLGGLMDDQAGESVAKVPLLGDIPLIGNLFKSTADKKEKRNLMVFIRPTILRDGMAADGVSQRKYNYMRAEQIYRDEQGLSLMPNTAQPVLPAQNQALPPEVRAFLNAGRTR

SEQ ID NO: 14005 - protein, 224 aa, Escherichia coli; identical to SEQ ID NO: 4063

SEQ ID NO: 14006 - protein, 360 aa, Escherichia coli; identical to SEQ ID NO: 3354

SEQ ID NO: 14007 - protein, 119 aa, Escherichia coli; identical to SEQ ID NO: 4060

SEQ ID NO: 14008 - protein, 191 aa, Escherichia coli; identical to SEQ ID NO: 2728

SEQ ID NO: 14009 - protein, 274 aa, Escherichia coli; identical to SEQ ID NO: 2317

SEQ ID NO: 14010 - protein, 244 aa, Escherichia coli; identical to SEQ ID NO: 4064

SEQ ID NO: 14011 - protein, 613 aa, Escherichia coli
MMVSVIDTSAPENQTATSATDLLRHVPGITLDGTGRTNGQDVNMRGYDHRGVLVLVDGVRQGTDTGHLNGTFLDPALIKRVEIVRGPSALLYGSGALGGVISYDTVDAKDLLQEGQSSGFRVFGTGGTGDHSLGLGASAFGRTENLDGIVAWSSRDRGDLRQSNGETAPNDESINNMLAKGTWQIDSAQSLSGLVRYYNNDAREPKNPQTVEASDSSNPMVDRSTIQRDAQLSYKLAPQGNDWLNADAKIYWSEVRINAQNTGSSGEYREQITKGTRLENRSTLFADSFASHLLTYGGEYYRQEQHPGGATTGFPQAKIDFSSGWLQDEITLRDLPITLLGGTRYDSYRGSSDGYKDVDADKWSSRAGMTINPTNWLMLFGSYAQAFRAPTMGEMYNDSKHFSIGRFYTNYWVPNPNLRPETNETQEYGFGLRFDDLMLSNDALEFKASYFDTKAKDYISTTVDFAAATTMSYNVPNAKIWGWDVMTKYTTDLFSLDVAYNRTRGKDTDTGEYISSINPDTVTSTLNIPIAHSGFSVGWVGTFADRSTHISSSYSKQPGYGVNDFYVSYQGQQALKGMTTTLVLGNAFDKEYWSPQGIPQDGRNGKIFVSYQW

SEQ ID NO: 14012 - protein, 567 aa, Escherichia coli; identical to SEQ ID NO: 4028

SEQ ID NO: 14013 - protein, 169 aa, Escherichia coli; identical to SEQ ID NO: 3373

SEQ ID NO: 14014 - protein, 375 aa, Escherichia coli; identical to SEQ ID NO: 2432

SEQ ID NO: 14015 - protein, 726 aa, Escherichia coli; identical to SEQ ID NO: 10726

SEQ ID NO: 14016 - protein, 774 aa, Escherichia coli; identical to SEQ ID NO: 2066

SEQ ID NO: 14017 - protein, 432 aa, Escherichia coli; identical to SEQ ID NO: 2026

SEQ ID NO: 14018 - protein, 208 aa, Escherichia coli; identical to SEQ ID NO: 1948

SEQ ID NO: 14019 - protein, 659 aa, Escherichia coli; identical to SEQ ID NO: 4027

SEQ ID NO: 14020 - protein, 517 aa, Escherichia coli; identical to SEQ ID NO: 2462

SEQ ID NO: 14021 - protein, 681 aa, Escherichia coli; identical to SEQ ID NO: 6654

SEQ ID NO: 14022 - protein, 843 aa, Escherichia coli; identical to SEQ ID NO: 3042

SEQ ID NO: 14023 - protein, 806 aa, Escherichia coli
MLCTTANAEEYYFDPIMLETTKSGMQTTDLSRFSKKYAQLPGTYQVDIWLNKKKVSQKKITFTANAEQLLQPQFTVEQLRELGIKVDEIPALAEKDDDSVINSLEQIIPGTAAEFDFNHQRLNLSIPQIALYRDARGYVSPSRWDDGIPTLFTNYSFTGSDNRYRQGNRSQRQYLNMQNGANFGPWRLRNYSTWTRNDQASSWNTISSYLQRDIKALKSQLLLGESATSGSIFSSYTFTGVQLASDDNMLPNSQRGFAPTVRGIANSSAIVTIRQNGYVIYQSNVPAGAFEINDLYPSSNSGDLEVTIEESDGTQRRFIQPYSSLPMMQRPGHLKYSATAGRYRADANSDSKEPEFAEATAIYGLNNTFTLYGGLLGSEDYYALGIGIGGTLGALGALSMDINRADTQFDNQHSFHGYQWRTQYIKDIPETNTNIAVSYYRYTNDGYFSFDEANTRNWDYNSRQKSEIQFNISQTIFDGVSLYASGSQQDYWGNNEKNRNISVGVSGQQWGIGYSLNYQYSRYTDENNDRALSLNLSIPLERWLPRSRVSYQMTSQKDRPTQHEMRLDGSLLDDGRLSYSLEQSLDDDNNHNSSLNASYRSPYGTFSAGYSYGNDSSQYNYGVTGGVVIHPHGVTLSQYLGNAFALIDANGASGVRIQNYPGIATDPFGYAVVPYLTTYQENRLSVDTTQLPDNVDLEQTTQFVVPNRGAMVAARFNANIGYRVLVTVSDRNGKPLPFGALASNDETGQQSIVDEGGILYLSGISSKSQSWTVRWGNQADQQCQFAFSTPDSEPTTSVLQGTAQCH

SEQ ID NO: 14024 - protein, 243 aa, Escherichia coli; identical to SEQ ID NO: 3483

SEQ ID NO: 14025 - protein, 700 aa, Escherichia coli; identical to SEQ ID NO: 8081

SEQ ID NO: 14026 - protein, 512 aa, Escherichia coli; identical to SEQ ID NO: 2974

SEQ ID NO: 14027 - protein, 213 aa, Escherichia coli; identical to SEQ ID NO: 2232

SEQ ID NO: 14028 - protein, 838 aa, Escherichia coli; identical to SEQ ID NO: 8135

SEQ ID NO: 14029 - protein, 780 aa, Escherichia coli
MKIPTTTDIPQRYTWCLAGICYSSLAILPSFLSYAESYFNPAFLLENGTSVADLSRFERGNHQPARVYRVDLWRNDEFIGSQDIVFESTTENTGDKSGGLMPCFNQVLLERIGLNSSAFPELAQQQNNKCINLLKAVPDATINFDFAAMRLNITIPQIALLSSAHGYIPPEEWDEGIPALLLNYNFTGNRGNGNDSYFFSEFSGINIGPWRLRNNGSWNYFRGNGYHSEQWNNIGTWVQRAIIPLKSELVMGDGNTGSDIFDGVGFRGVRLYSSDNMYPDSQQGFAPTVRGIARTAAQLTIRQNGFIIYQSYVSPGAFEITDLHPTSSNGDLDVTIDERDGNQQNYTIPYSTVPILQREGRFKFDLTAGDFRSGNSQQSSPFFFQGTALGGLPQEFTAYGGTQLSANYTAFLLGLGRNLGNWGAVSLDVTHARSQLADDSRHEGDSIRFLYAKSMNTFGTNFQLMGYRYSTQGFYTLDDVAYRRMEGYEYDYDYDGEHRDEPIIVNYHNLRFSRKDRLQLNISQSLNDFGSLYISGTHQKYWNTSDSDTWYQVGYTSSWVGISYSLSFSWNESVGIPDNERIVGLNVSVPFNVLTKRRYTRENALDRAYASFNANRNSNGQNSWLAGVGGTLLEGHNLSYHVSQGDTSNNGYTGSATANWQAAYATLGVGYNYDRDQHDVNWQLSGGVVGHENGITLSQPFGDTNVLIKAPGAGGVRIENQTGILTDWRGYAVMPYATVYRYNRIALDTNTMGNSIDVEKILAALCRRKARWFVPILIPA

SEQ ID NO: 14030 - protein, 249 aa, Escherichia coli; identical to SEQ ID NO: 3492

SEQ ID NO: 14031 - protein, 170 aa, Escherichia coli [sequence omitted]

SEQ ID NO: 14032 - protein, 230 aa, Escherichia coli; identical to SEQ ID NO: 3019

SEQ ID NO: 14033 - protein, 224 aa, Escherichia coli; identical to SEQ ID NO: 3115

SEQ ID NO: 14034 - protein, 161 aa, Escherichia coli; identical to SEQ ID NO: 2582

SEQ ID NO: 14035 - protein, 703 aa, Escherichia coli; identical to SEQ ID NO: 6514

SEQ ID NO: 14036 - protein, 232 aa, Escherichia coli; identical to SEQ ID NO: 2087

SEQ ID NO: 14037 - protein, 200 aa, Escherichia coli; identical to SEQ ID NO: 1784

SEQ ID NO: 14038 - protein, 119 aa, Escherichia coli; identical to SEQ ID NO: 2526

SEQ ID NO: 14039 - protein, 162 aa, Escherichia coli; identical to SEQ ID NO: 1965

SEQ ID NO: 14040 - protein, 430 aa, Escherichia coli; identical to SEQ ID NO: 2617

SEQ ID NO: 14041 - protein, 359 aa, Escherichia coli; identical to SEQ ID NO: 2328

SEQ ID NO: 14042 - protein, 662 aa, Escherichia coli; identical to SEQ ID NO: 8124

SEQ ID NO: 14043 - protein, 386 aa, Escherichia coli; identical to SEQ ID NO: 6520

SEQ ID NO: 14044 - protein, 446 aa, Escherichia coli; identical to SEQ ID NO: 5547

SEQ ID NO: 14045 - protein, 230 aa, Escherichia coli; identical to SEQ ID NO: 3348

SEQ ID NO: 14046 - protein, 241 aa, Escherichia coli; identical to SEQ ID NO: 2922

SEQ ID NO: 14047 - protein, 208 aa, Escherichia coli; identical to SEQ ID NO: 1949

SEQ ID NO: 14048 - protein, 111 aa, Escherichia coli; identical to SEQ ID NO: 7471

SEQ ID NO: 14049 - protein, 826 aa, Escherichia coli; identical to SEQ ID NO: 7491

SEQ ID NO: 14050 - protein, 231 aa, Escherichia coli; identical to SEQ ID NO: 5923

SEQ ID NO: 14051 - protein, 432 aa, Escherichia coli; identical to SEQ ID NO: 2026

SEQ ID NO: 14052 - protein, 812 aa, Escherichia coli
MKKYVTTKSVQPVAFRLTTLSLVMSAVLGSASVIAGEKLDMSFIQGGGGVNPEVWAALNGSYAPGRYLVDLSLNGKEAGKQILDVTPQDSNELCLTEAWLTKAGVYVSADYFREGYDATRQCYVLTKAPSVKVDFDVSTQSLALSIPQKGLVKMPENVDWDYGTSAFRVNYNANANTGRNNTSAFGSADLKANIGHWVVSSSATASGGDSGDNSTTINMFTATRAIRALSADLAVGKTSTGDSLLGSTGTYGVSLSRNNSMKPGNLGYTPVFSGIANGPSRVTLTQNGRLLHSEMVPAGPFSITDVPLYTSGDVTMKITGEDGREQVQNFPLSVMAGQLSPGQHEFSVAAGLPDDDSDLKGGVFAASYGYGLDGLTLRAGGVFNQDWQGASAGVVAGLGYLGAVSADGAYATAKYRDGSHSGNKVQLSWSKQLETTNTGLRVSWSRQSEEYEGMSSFDPTELWSQSNHGRRTKDEWNAGISQPVGGLFSLSVSGWQRSYYPASMTGSYRYSDDNGKETGITGSLSTQIKGVSLNLGWSGSRNSRGENNWSASASVSVPFTLFDRRYSSSASVSTSKGGGTGFSTGVSGSLNDRFSYGLGGGRDGDGGTSSYLNASYSGDRAYLNGVLNHSQSGGTSGSVSVSGSVLAVPAAKDIMFSRTTGDTVAVVNVKDTPGVKVTSGDGQTDSDGNLVVPLNSYDWNTVTIDAGTLPLSTELTNTSQKVVPTDKAVVWMPFDALKVKRYLLQVKQRDGEFVPGGTWARDSKNTPLGFVANNGVLMINTVDAPGDITLGQCRIPAARLQDTEKLQEITCE

SEQ ID NO: 14053 - protein, 359 aa, Escherichia coli; identical to SEQ ID NO: 2329

SEQ ID NO: 14054 - protein, 119 aa, Escherichia coli; identical to SEQ ID NO: 7441

SEQ ID NO: 14055 - protein, 856 aa, Escherichia coli; identical to SEQ ID NO: 11086

SEQ ID NO: 14056 - protein, 816 aa, Escherichia coli; identical to SEQ ID NO: 6500

SEQ ID NO: 14057 - protein, 760 aa, Escherichia coli; identical to SEQ ID NO: 6506

SEQ ID NO: 14058 - protein, 866 aa, Escherichia coli; identical to SEQ ID NO: 3688

SEQ ID NO: 14059 - protein, 816 aa, Escherichia coli; identical to SEQ ID NO: 2817

SEQ ID NO: 14060 - protein, 161 aa, Escherichia coli; identical to SEQ ID NO: 2582

SEQ ID NO: 14061 - protein, 203 aa, Escherichia coli; identical to SEQ ID NO: 2201

SEQ ID NO: 14062 - protein, 213 aa, Escherichia coli; identical to SEQ ID NO: 2232

SEQ ID NO: 14063 - protein, 208 aa, Escherichia coli; identical to SEQ ID NO: 1949

SEQ ID NO: 14064 - protein, 765 aa, Escherichia coli; identical to SEQ ID NO: 7498

SEQ ID NO: 14065 - protein, 266 aa, Escherichia coli; identical to SEQ ID NO: 1894

SEQ ID NO: 14066 - protein, 686 aa, Escherichia coli; identical to SEQ ID NO: 3129

SEQ ID NO: 14067 - protein, 161 aa, Escherichia coli; identical to SEQ ID NO: 2582

SEQ ID NO: 14068 - protein, 614 aa, Escherichia coli; identical to SEQ ID NO: 11049

SEQ ID NO: 14069 - protein, 591 aa, Escherichia coli; identical to SEQ ID NO: 6507

SEQ ID NO: 14070 - protein, 125 aa, Escherichia coli; identical to SEQ ID NO: 3090

SEQ ID NO: 14071 - protein, 765 aa, Escherichia coli; identical to SEQ ID NO: 7320

SEQ ID NO: 14072 - protein, 565 aa, Escherichia coli; identical to SEQ ID NO: 6494

SEQ ID NO: 14073 - protein, 518 aa, Escherichia coli; identical to SEQ ID NO: 2349

SEQ ID NO: 14074 - protein, 820 aa, Escherichia coli; identical to SEQ ID NO: 8131

SEQ ID NO: 14075 - protein, 118 aa, Escherichia coli [sequence omitted]

SEQ ID NO: 14076 - protein, 45 aa, Escherichia coli; identical to SEQ ID NO: 6471

SEQ ID NO: 14077 - protein, 746 aa, Escherichia coli; identical to SEQ ID NO: 11087

SEQ ID NO: 14078 - protein, 351 aa, Escherichia coli; identical to SEQ ID NO: 2872

SEQ ID NO: 14079 - protein, 224 aa, Escherichia coli; identical to SEQ ID NO: 3165

SEQ ID NO: 14080 - protein, 837 aa, Escherichia coli; identical to SEQ ID NO: 4687

SEQ ID NO: 14081 - protein, 111 aa, Escherichia coli; identical to SEQ ID NO: 3096

SEQ ID NO: 14082 - protein, 784 aa, Escherichia coli; identical to SEQ ID NO: 5933

SEQ ID NO: 14083 - protein, 241 aa, Escherichia coli; identical to SEQ ID NO: 2922

SEQ ID NO: 14084 - protein, 222 aa, Escherichia coli; identical to SEQ ID NO: 8001

SEQ ID NO: 14085 - protein, 120 aa, Escherichia coli; identical to SEQ ID NO: 7429

SEQ ID NO: 14086 - protein, 834 aa, Escherichia coli; identical to SEQ ID NO: 7303

SEQ ID NO: 14087 - protein, 591 aa, Escherichia coli; identical to SEQ ID NO: 4273

SEQ ID NO: 14088 - protein, 386 aa, Escherichia coli; identical to SEQ ID NO: 3094

SEQ ID NO: 14089 - protein, 747 aa, Escherichia coli; identical to SEQ ID NO: 2072

SEQ ID NO: 14090 - protein, 200 aa, Escherichia coli; identical to SEQ ID NO: 1784

SEQ ID NO: 14091 - protein, 368 aa, Escherichia coli; identical to SEQ ID NO: 4616

SEQ ID NO: 14092 - protein, 869 aa, Escherichia coli; identical to SEQ ID NO: 9935

SEQ ID NO: 14093 - protein, 746 aa, Escherichia coli; identical to SEQ ID NO: 4389

SEQ ID NO: 14094 - protein, 266 aa, Escherichia coli; identical to SEQ ID NO: 1894

SEQ ID NO: 14095 - protein, 784 aa, Escherichia coli; identical to SEQ ID NO: 2244

SEQ ID NO: 14096 - protein, 250 aa, Escherichia coli; identical to SEQ ID NO: 3048

SEQ ID NO: 14097 - protein, 224 aa, Escherichia coli; identical to SEQ ID NO: 3035

SEQ ID NO: 14098 - protein, 162 aa, Escherichia coli
MKTILPAVLFAAFTTTSAWAAESVQPLEKIAPYPQAEKGMKRQVIQLTPQEDESTLKVELLIGQTLEVDCNLHRLGGKLENKTLEGWGYDYYVFDKVSSPVSTMMACPDGKKEKKFVTAYLGDAGMLRYNSKLPIVVYTPDNVDVKYRVWKAEEKIDNAVVR

SEQ ID NO: 14099 - protein, 430 aa, Escherichia coli; identical to SEQ ID NO: 2617

SEQ ID NO: 14100 - protein, 478 aa, Escherichia coli; identical to SEQ ID NO: 7448

SEQ ID NO: 14101 - protein, 539 aa, Escherichia coli; identical to SEQ ID NO: 3050

SEQ ID NO: 14102 - protein, 432 aa, Escherichia coli; identical to SEQ ID NO: 2026

SEQ ID NO: 14103 - protein, 565 aa, Escherichia coli; identical to SEQ ID NO: 2678

SEQ ID NO: 14104 - protein, 274 aa, Escherichia coli; identical to SEQ ID NO: 6497

SEQ ID NO: 14105 - protein, 331 aa, Escherichia coli
MKKPVVIGLAVVVLAAVVAGGYWWYQSRQDNGLTLYGNVDIRTVNLSFRVGGRVESLAVDEGDAIKAGQVLGELDHKPYEIALMQAKAGVSVAQAQYDLMLAGYRDEEIAQAAAAVKQAQAAYDYAQNFYNRQQGLWKSRTISANDLENARSSRDQAQATLKSAQDKLRQYRSGNREQDIAQAKASLEQAQAQLAQAELNLQDSTLIAPSDGTLLTRAVEPGTVLNEGGTVFTVSLTRPVWVRAYVDERNLDQAQPGRKVLLYTDGCPDKPYHGQIGFVSPTAEFTPKTVETPDLRTDLVYRLRIVVTDADDALRQGMPVTVQFGNEAGHE

SEQ ID NO: 14106 - protein, 361 aa, Escherichia coli; identical to SEQ ID NO: 3061

SEQ ID NO: 14107 - protein, 274 aa, Escherichia coli; identical to SEQ ID NO: 3471

SEQ ID NO: 14108 - protein, 230 aa, Escherichia coli; identical to SEQ ID NO: 3019

SEQ ID NO: 14109 - protein, 191 aa, Escherichia coli; identical to SEQ ID NO: 2727

SEQ ID NO: 14110 - protein, 370 aa, Escherichia coli; identical to SEQ ID NO: 6529

SEQ ID NO: 14111 - protein, 597 aa, Escherichia coli
MLPPNLRGYAPDISGVAHTTAKVTVSQMGRVIYETQVPAGPFRIQDLGDSVSGTLHIRIEEQNGQVQEYDISTASMPYLTRPGQVRYKIMMGRPQEWGHHVEGEFFSGAEASWGIANGWSLYGGALGDENYQSAALGVGRDLSTFGAVAFDVTHSHTKLDKDTAYGKGSLDGNSFRVSYSKDFDQLNSRVTFAGYRFSEENFMTMSEYLDASDSGMVRTGNDKEMYTATYNQNFRDAGVSVYLNYTRHTYWDREEQTNYNIMLSHYFNMGSIRNVSISMTGYRYEYDNQADKGMYISLSMPWGDNSTVSYNGNYGSGTDSSQVGYFSRVDDATHYQLNVGTSDKHTSVDGYYSHDGSLAQVDLSANYHEGQYTSAGLSLQGGATLTAHGGALHRTQNMGGTRLLIDADGVADVPVEGNGAAVYTNMFGKAVVSDVNNYYRNQAYIDLNKLPENAEATQSVVQATLTEGAIGYRKFAVISGQKAMAVLRLQDGSHPPFGAEVKNDNEQTVGLVDDDGNVYLAGVKPGEHMSVFWSGVAHCDINLPYPLPADLFNGLLLPCQHKGNVAPVVPDDIKPVIQEQTQQVTPTNPPVSVSANQ

SEQ ID NO: 14112 - protein, 518 aa, Escherichia coli; identical to SEQ ID NO: 2349

SEQ ID NO: 14113 - protein, 207 aa, Escherichia coli; identical to SEQ ID NO: 5917

SEQ ID NO: 14114 - protein, 404 aa, Escherichia coli
MKRKVLAMLVPALLVAGAANAAEVYNKDGNKLDLYGKVAGLHYFSDDAGSDGDKSYARIGFKGETQIADQFTGYGQWEYNLQANGTEGDGDNSATRLAFAGLGFGQNGTFDYGRNYGVVYDIEAWTDMLPEFGGDTYAGADNFMNGRTNGVATYRNNGFFGQVDGLNFALQYQSNNESGSDGLFGQEGSGSGDGRSLAKENGDGFGMSTSYDFDFGLSLGAAYSNSDRSNNQAARGYGDGNHFYGNSYAGGGTAEAWTVGAKYDANNVYLAAMYAETRNMTAYGSSDSHSADGKLGGGGIANKTQNFEVVAQYQFDFGLRPSIAYLQSKGKDLGGQEMYNNGNYHYTNKDLVKYVEVGATYYFNKNMSTYVDYKINLLDNDDDFYANNGIATDDIVAVGLVYQF

SEQ ID NO: 14115 - protein, 360 aa, Escherichia coli; identical to SEQ ID NO: 3062

SEQ ID NO: 14116 - protein, 193 aa, Escherichia coli; identical to SEQ ID NO: 2246

SEQ ID NO: 14117 - protein, 237 aa, Escherichia coli; identical to SEQ ID NO: 1814

SEQ ID NO: 14118 - protein, 478 aa, Escherichia coli; identical to SEQ ID NO: 7448

SEQ ID NO: 14119 - protein, 368 aa, Escherichia coli; identical to SEQ ID NO: 2371

SEQ ID NO: 14120 - protein, 241 aa, Escherichia coli; identical to SEQ ID NO: 2884

SEQ ID NO: 14121 - protein, 878 aa, Escherichia coli
MSYLNLRLYQRNTQCLHIRKHRLAGFFVRLVVACAFAAQAPLSSAELYFNPRFLADDPQAVADLSRFENGQELPPGTYRVDIYLNNGYMATRDVTFNTGDSEQGIVPCLTRAQLASMGLNTASVSGMNLLADDACVPLTSMIHDATAHLDVGQQRLNLTIPQAFMSNRARGYIPPELWDPGINAGLLNYNFSGNSVQNRIGGNSHYAYLNLQSGLNIGAWRLRDNTTWSYNSSDSSSGSKNKWQHINTWLERDIIPLRSRLTLGDGYTQGDIFDGINFRGAQLASDDNMLPDSQRGFAPVIHGIARGTAQVTIKQNGYDIYNSTVPPGPFTINDIYAAGNSGDLQVTIKEADGSTQIFTVPYSSVPLLQREGHTRYSITAGEYRSGNAQQEKPRFFQSTLLHGLPAGWTIYGGTQLADRYRAFNFGIGKNMGALGALSVDMTQANSTLPDDSQHDGQSVRFLYNKSLNESGTNIQLVGYRYSTSGYFNFADTTYSRMNGYNIETQDGVIQVKPKFTDYYNLAYNKRGKLQLTVTQQLGRTSTLYLSGSHQTYWGTSNVDEQFQAGLNTAFEDINWTLSYSLTKNAWQKGRDQMLALNVNIPFSHWLRSDSKSQWRHASASYSMSHDLNGRMTNLAGVYGTLLEDNNLSYSVQTGYAGGGDGNSGSTGYATLNYRGGYGNANIGYSHSDDIKQLYYGVSGGVLAHANGVTLGQPLNETVVLVKAPGAKDAKVENQTGVRTDWRGYAVLPYATEYRENRVALDTNTLADNVDLDNAVANVVPTRGAIVRAEFKARVGIKLLMTLTHNNKPLPFGAMVTSESSQSSGIVADNGQVYLSGMPLAGKVQVKWGEEENAHCVANYQLPPESQQQLLTQLSAECR

SEQ ID NO: 14122 - protein, 784 aa, Escherichia coli; identical to SEQ ID NO: 2244

SEQ ID NO: 14123 - protein, 230 aa, Escherichia coli; identical to SEQ ID NO: 3348

SEQ ID NO: 14124 - protein, 332 aa, Escherichia coli; identical to SEQ ID NO: 2703

SEQ ID NO: 14125 - protein, 198 aa, Escherichia coli; identical to SEQ ID NO: 3645

SEQ ID NO: 14126 - protein, 518 aa, Escherichia coli; identical to SEQ ID NO: 2349

SEQ ID NO: 14127 - protein, 880 aa, Escherichia coli; identical to SEQ ID NO: 6424

SEQ ID NO: 14128 - protein, 250 aa, Escherichia coli; identical to SEQ ID NO: 4332

SEQ ID NO: 14129 - protein, 121 aa, Escherichia coli; identical to SEQ ID NO: 5349

SEQ ID NO: 14130 - protein, 367 aa, Escherichia coli; identical to SEQ ID NO: 3016

SEQ ID NO: 14131 - protein, 828 aa, Escherichia coli; identical to SEQ ID NO: 2388

SEQ ID NO: 14132 - protein, 826 aa, Escherichia coli
MLRMTPLASAIVALLLGIEAYAAEETFDTHFMIGGMKDQQVANIRLDDNQPLPGQYDIDIYVNKQWRGKYEIIVKDNPQETCLSREVIKRLGINSDNFASGKQCLTFEQLVQGGSYTWDIGVFRLDFSVPQAWVEELESGYVPPENWERGINAFYTSYYVSQYYSDYKASGNSKSTYVRFNSGLNLLGWQLHSDASFSKTNNNPGVWKSNTLYLERGFAQLLGTLRVGDMYTSSDIFDSVRFRGVRLFRDMQMLPNSKQNFTPRVQGIAQSNALVTIEQNGFVVYQKEVPPGPFAITDLQLAGGGADLDVSVKEADGSVTTYLVPYAAVPNMLQPGVSKYDFAAGRSHIEGASKQSDFVQAGYQYGFNNLLTLYGGSMVANNYYAFTLGTGWNTRIGAISVDATKSHSKQDNGDVFDGQSYQIAYNKFVSQTSTRFGLAAWRYSSRDYRTFNDHVWANNKDNYRRDENDVYDIADYYQNDFGRKNSFSANMSQSLPEGWGSVSLSTLWRDYWGRSGSSKDYQLSYSNNWRRISYILAASQTYDENHHEEKRFNIFISIPFDWGDDVTTPRRQIYMSNSTTFDDQGFASNNTGLSGTVGSRDQFNYGVNLSYQNQGNETTAGANLTWNAPVATVNGSYSQSSTYRQAGASVSGGIVAWSGGVNLANRLSETFAVMNAPGIKDAYVNGQKYRTTNRNGVVVYDGMTPYRENHLMLDVSQSDSEAELRGNRKIAAPYRGAVVLVNFDTDQRKPWFIKALRADGQPLTFGYEVNDIHGHNIGVVGQGSQLFIRTNEIPPSVNVAIDKQQGLSCTITFGKEIDESRNYICQ

SEQ ID NO: 14133 - protein, 614 aa, Escherichia coli; identical to SEQ ID NO: 3301

SEQ ID NO: 14134 - protein, 432 aa, Escherichia coli; identical to SEQ ID NO: 2026

SEQ ID NO: 14135 - protein, 686 aa, Escherichia coli
MFWRDITLSVWRKKTTGLKTKKRLLPLVLAAALCSSPVQAEEATFTANFKDTDLKSFIETVGANLNKTIIMGPGVQGKVSIRTMTPLNERQYYQLFLNLLEAQGYAVVPMENDVLKVVKSSAAKVEPLPLVGEGSDNYAGDEMVTKVVPVRNVSVRELAPILRQMIDSAGSGNVVNYDPSNVIMLTGRASVVERLTEVIQRVDHAGNRTEEVIPLDNASASEIARVLESLTKNSGENQPATLKSQIVADERTNSVIVSGDPATRDKMRRLIRRLDSEMERSGNSQVFYLKYSKAEDLVDVLKQVSGTLTAAKEEAEGTVGSGREIVSIAASKHSNALIVTAPQDIMQSLQSVIEQLDIRRAQVHVEALIVEVAEGSNINFGVQWASKDAGLMQFANGTQIPIGTLGAAISQAKPQKGSTVISENGATTINPDTNGDLSTLAQLLSGFSGTAVGVVKGDWMALVQAVKNDSSSNVLSTPSITTLDNQEAFFMVGQDVPVLTGSTVGSNNSNPFNTVERKKVGIMLKVTPQINEGNAVQMVIEQEVSKVEGQTSLDVVFGERKLKTTVLANDGELIVLGGLMDDQAGESVAKVPLLGDIPLIGNLFKSTADKKEKRNLMVFIRPTILRDGMAADGVSQRKYNYMRAEQIYRDEQGLSLMPHTAQPVLPAQNQALPPEVRAFLNAGRTR

SEQ ID NO: 14136 - protein, 678 aa, Escherichia coli; identical to SEQ ID NO: 4148

SEQ ID NO: 14137 - protein, 207 aa, Escherichia coli; identical to SEQ ID NO: 2211

SEQ ID NO: 14138 - protein, 213 aa, Escherichia coli; identical to SEQ ID NO: 2232

SEQ ID NO: 14139 - protein, 729 aa, Escherichia coli
MLSTQFNRDNQYQAITKPSLLAGCIALALLPSAAFAAPATEETVIVEGSATAPDDGENDYSVTSTSAGTKMQMTQRDIPQSVTIVSQQRMEDQQLQALGEVMENTLGISKSQADSDRALYYSRGFQIDNYMVDGIPTYFESRWNLGDALSDMALFERVEVVRGATGLMTGTGNPSAAINMVRKHATSREFKGDVSAEYGSWNKERYVADLQSPLTEDGKIRARIVGGYQNNDSWLDRYNSEKTFFSGIVDADLGDLTTLSAGYEYQRIDVNSPTWGGLPRWNTDGSSNSYDRARSTAPDWAYNDKEINKVFMTLKQRFADTWQATLNAIHSEVEFDSKMMYVDAYVNKADGMLVGPYSNYGPGFDYVGGTGWNSGKRKVDALDLFADGIYELFGRQHNLMFGGSYSKQNNRYFSSWANIFPDEIGSFYNFNGNFPQTDWSPQSLAQDDTTHMKSLYAATRVTLADPLHLILGARYTNWRVDTLTYSMEKNHTTPYAGLVFDINDNWSTYASYTSIFQPQNDRDSSGKYLAPITGNNYELGLKSDWMNSRLTTTLAIFRIEQDNVAQSTGTPIPGSNGETAYKAVDGTVSKGVEFELNGAITDNWQLTFGATRYIAEDNEGNAVNPNLPRTTVKMFTSYRLPVMPELTVGGGVNWQNRVYTDTVTPYGTFRAEQGSYALVDLFTRYQVTKNFSLQGNVNNLFDKTYDTNVEGSIVYGTPRNFSITGTYQF

SEQ ID NO: 14140 - protein, 232 aa, Escherichia coli; identical to SEQ ID NO: 2087

SEQ ID NO: 14141 - protein, 517 aa, Escherichia coli
MKHKLQMMKMRWLSAAVMLTLYTSSSWAFSIDDVAKQAQSLAGKGYEAPKSNLPSVFRDMKYADYQQIQFNHDKAYWNNLKTPFKLEFYHQGMYFDTPVKINEVTATAVKRIKYSPDYFTFGDVQHDKDTVKDLGFAGFKVLYPINSKDKNDEIVSMLGASYFRVIGAGQVYGLSARGLAIDTALPSGEEFPRFKEFWIERPKPTDKRLTIYALLDSPRATGAYKFVVMPGRDTVVDVQSKIYLRDKVGKLGVAPLTSMFLFGPNQPSPANNYRPELHDSNGLSIHAGNGEWIWRPLNNPKHLAVSSFSMENPQGFGLLQRGRDFSRFEDLDDRYDLRPSAWVTPKGEWGKGSVELVEIPTNDETNDNIVAYWTPDQLPEPGKEMNFKYTITFSRDEDKLHAPDNAWVQQTRRSTGDVKQSNLIRQPDGTIAFVVDFTGAEMKKLPEDTPVTAQTSIGDNGEIVESTVRYNPVTKGWRLVMRVKVKDAKKTTEMRAALVNTDQTLSETWSYQLPANE

SEQ ID NO: 14142 - protein, 871 aa, Escherichia coli
MHQVLILPRFARLTIALGLATAVFPVDAEYYFNPRFLSNDLAESVDLSAFTKGREAPPGTYRVDIYLNDEFMTSRDITFIADDNNADLIPCLSTDLLVSLGIKKSALLDNKEHSAEKHVPDNSACTPLQDRLADASTEFDVGQQHLSLSVPQIYVGRMARGYVSPDLWEEGINAGLLNYSFNGNSINNRSNHNAGKSNYAYLNLQSGINIGSWRLRDNSTWSYNSGSSNSSDSNKWQHINTSAERDIIPLRSRLTVGDSYTDGDIFDSVNFRGLKINSTEAMLPDSQHGFAPVIHGIARGTAQVSVKQNGYDVYQTTVPPGPFTIDDINSATNGGDLQVTIKEADGSIQTLYVPYSSVPVLQRAGYTRYALAMGEYRSGNNLQSSPKFIQGSLMHGLEGNWTPYGGMQIAEDYQAFNLGIGKDLGLFGAFSFDITQANTTLADGTRHSGQSVKSVYSKSFYQTGTNIQVAGYRYSTQGFYNLSDSAYSRMSGYTVKPPTGDTNEQTQFIDYFNLFYSKRGQEQISISQQLGNYGTTFFSASRQSYWNTSRSDQQISFGLNVPFGDITTSLNYSYSNNIWQNDRDHLLAFTLNVPFSHWMRTDSQSAFRNSNASYSMSNDLKGGMTNLSGVYGTLLPDNNLNYSVQVGNTHGGNTSSGTSGYSSLNYRGAYGNTNVGYSRNGDSSQIYYGMSGGIIAHADGITFGQPLGDTMVLVKAPGADNVKIENQTGIHTDWRGYAILPFATEYRENRVALNANSLADNVELDETVVTVIPTHGAIARATFNAQIGGKVLMTLKYGNKSVPFGAIVTHGENKNGSIVAENGQVYLTGLPQSGKLQVSWGKDKNSNCIVEYKLPEVSPGTLLNQQTAICR

SEQ ID NO: 14143 - protein, 111 aa, Escherichia coli; identical to SEQ ID NO: 3096

SEQ ID NO: 14144 - protein, 229 aa, Escherichia coli; identical to SEQ ID NO: 3277

SEQ ID NO: 14145 - protein, 851 aa, Escherichia coli; identical to SEQ ID NO: 3458

SEQ ID NO: 14146 - protein, 233 aa, Escherichia coli; identical to SEQ ID NO: 3649

SEQ ID NO: 14147 - protein, 162 aa, Escherichia coli; identical to SEQ ID NO: 1965

SEQ ID NO: 14148 - protein, 551 aa, Escherichia coli; identical to SEQ ID NO: 2446

SEQ ID NO: 14149 - protein, 360 aa, Escherichia coli; identical to SEQ ID NO: 3062

SEQ ID NO: 14150 - protein, 678 aa, Escherichia coli; identical to SEQ ID NO: 6490

SEQ ID NO: 14151 - protein, 871 aa, Escherichia coli; identical to SEQ ID NO: 6513

SEQ ID NO: 14152 - protein, 236 aa, Escherichia coli; identical to SEQ ID NO: 3286

SEQ ID NO: 14153 - protein, 903 aa, Escherichia coli; identical to SEQ ID NO: 6467

SEQ ID NO: 14154 - protein, 170 aa, Escherichia coli [sequence omitted]

SEQ ID NO: 14155 - protein, 266 aa, Escherichia coli; identical to SEQ ID NO: 1894

SEQ ID NO: 14156 - protein, 650 aa, Escherichia coli; identical to SEQ ID NO: 8603

SEQ ID NO: 14157 - protein, 367 aa, Escherichia coli; identical to SEQ ID NO: 4285

SEQ ID NO: 14158 - protein, 368 aa, Escherichia coli; identical to SEQ ID NO: 3872

SEQ ID NO: 14159 - protein, 353 aa, Escherichia coli; identical to SEQ ID NO: 10905

SEQ ID NO: 14160 - protein, 121 aa, Escherichia coli; identical to SEQ ID NO: 2522

SEQ ID NO: 14161 - protein, 863 aa, Escherichia coli; identical to SEQ ID NO: 8025

SEQ ID NO: 14162 - protein, 673 aa, Escherichia coli; identical to SEQ ID NO: 2919

SEQ ID NO: 14163 - protein, 243 aa, Escherichia coli; identical to SEQ ID NO: 3483

SEQ ID NO: 14164 - protein, 659 aa, Escherichia coli; identical to SEQ ID NO: 8368

SEQ ID NO: 14165 - protein, 614 aa, Escherichia coli; identical to SEQ ID NO: 1884

SEQ ID NO: 14166 - protein, 246 aa, Escherichia coli; identical to SEQ ID NO: 3021

SEQ ID NO: 14167 - protein, 232 aa, Escherichia coli; identical to SEQ ID NO: 10912

SEQ ID NO: 14168 - protein, 729 aa, Escherichia coli; identical to SEQ ID NO: 2948

SEQ ID NO: 14169 - protein, 826 aa, Escherichia coli; identical to SEQ ID NO: 6475

SEQ ID NO: 14170 - protein, 237 aa, Escherichia coli; identical to SEQ ID NO: 6498

SEQ ID NO: 14171 - protein, 760 aa, Escherichia coli; identical to SEQ ID NO: 11104

SEQ ID NO: 14172 - protein, 128 aa, Escherichia coli; identical to SEQ ID NO: 7495

SEQ ID NO: 14173 - protein, 881 aa, Escherichia coli; identical to SEQ ID NO: 6485

SEQ ID NO: 14174 - protein, 203 aa, Escherichia coli; identical to SEQ ID NO: 2009

SEQ ID NO: 14175 - protein, 207 aa, Escherichia coli; identical to SEQ ID NO: 2211

SEQ ID NO: 14176 - protein, 834 aa, Escherichia coli
MYKKLKLTTISELIKNIYCSLSVLIIGCASAYAVEFNKDLIEAEDRENVNLSQFETDGQLPVGKYSLNALINNKRTPIHLDLQWALIDNQTAVCLTPEQLTLLGFTDEIIEVAQQNLIDGCYPIEKEKQITTYLDKGKMQLSISAPQAWLKYKDANWTPPELWDHGIAGAFLDYNLYASHYAPHQGDNSQNISSYGQAGVNLGAWRLRTDYQYDQSFNNGKSQANNLDFPRIYLFRPIPAINAKLTIGQYDTESSIFDSFHFSGVSLKSDENMLPPDLRGYAPQITGVAQTNAKVTVSQNNRIIYQENVPPGPFAITNLFNTLQGQLDVKVEEEDGQVTQWQVASNSIPYLTRKGQIRYTTAMGKPTSVGGDSLQQPFFWTGEFSWGWLNNVSLYGGSVLTNRDYQSLAAGVGFNLNSLGSLSFDVTRSDAQLHNQDKETGYSYRANYSKRFESTGSQLTFAGYRFSDKNFVTMNEYINDTNHYTNYQNEKESYIVTFNQYLESLRLNTYVSLARNTYWDASSNVNYSLSLSRDFDIGPLKNVSTSLTFSRINWEEDNQDQLYLNISIPWGTSRTLSYGMQRNQDNKISHTASWYDSSDRNNSWSVSASGDNDEFKDMKASLRASYQHNTENGRLYLSGTSQRDSYYSLNASWNGSFTATRHGAAFHDYSGSADSRFMIDADGAEDIPLNNKRAVTNRYGIGVIPSVSSYITTSLSVDTRNLPENVDIENSVITTTLTEGAIGYAKLDTRKGYQIMGVIRLADGSHPPLGISVKDKTSHKELGLVADGGFVYLNGIQDDSKLTLRWGDKSCFIQPPNSSNLTTGTVILPCISQN

SEQ ID NO: 14177 - protein, 193 aa, Escherichia coli; identical to SEQ ID NO: 2246

SEQ ID NO: 14178 - protein, 231 aa, Escherichia coli; identical to SEQ ID NO: 3055

SEQ ID NO: 14179 - protein, 331 aa, Escherichia coli; identical to SEQ ID NO: 6460

SEQ ID NO: 14180 - protein, 236 aa, Escherichia coli; identical to SEQ ID NO: 3482

SEQ ID NO: 14181 - protein, 203 aa, Escherichia coli; identical to SEQ ID NO: 2201

SEQ ID NO: 14182 - protein, 361 aa, Escherichia coli; identical to SEQ ID NO: 3061

SEQ ID NO: 14183 - protein, 224 aa, Escherichia coli; identical to SEQ ID NO: 3165

SEQ ID NO: 14184 - protein, 226 aa, Escherichia coli
MIFAVLSLLVAGELQAGVVVGGTRFIFPADRESISILLTNTSQESWLINSKINRPTRWAGGEASTVPAPLLAAPPLILLKPGTTGTLRLLRTESDILPVDRETLFELSIASVPSGKVENQSVKVAIRSVFKLFWRPEGLPGDPLEAYQQLRWTWNSQGVQLTNPTPYYINLIQVSVNGKALSNAGVVPPKSQRQTSWCQAIAPCHVAWRAINDYGGLSAKKEQNLP

SEQ ID NO: 14185 - protein, 258 aa, Escherichia coli; identical to SEQ ID NO: 2060

SEQ ID NO: 14186 - protein, 191 aa, Escherichia coli; identical to SEQ ID NO: 2727

SEQ ID NO: 14187 - protein, 121 aa, Escherichia coli; identical to SEQ ID NO: 8053

SEQ ID NO: 14188 - protein, 729 aa, Escherichia coli; identical to SEQ ID NO: 6527

SEQ ID NO: 14189 - protein, 700 aa, Escherichia coli; identical to SEQ ID NO: 5975

SEQ ID NO: 14190 - protein, 360 aa, Escherichia coli; identical to SEQ ID NO: 3062

SEQ ID NO: 14191 - protein, 118 aa, Escherichia coli [sequence omitted]

SEQ ID NO: 14192 - protein, 203 aa, Escherichia coli; identical to SEQ ID NO: 2009

SEQ ID NO: 14193 - protein, 203 aa, Escherichia coli; identical to SEQ ID NO: 2015

SEQ ID NO: 14194 - protein, 243 aa, Escherichia coli; identical to SEQ ID NO: 6517

SEQ ID NO: 14195 - protein, 539 aa, Escherichia coli; identical to SEQ ID NO: 3050

SEQ ID NO: 14196 - protein, 193 aa, Escherichia coli; identical to SEQ ID NO: 2246

SEQ ID NO: 14197 - protein, 774 aa, Escherichia coli; identical to SEQ ID NO: 6495

SEQ ID NO: 14198 - protein, 367 aa, Escherichia coli; identical to SEQ ID NO: 4285

SEQ ID NO: 14199 - protein, 429 aa, Escherichia coli; identical to SEQ ID NO: 8023

SEQ ID NO: 14200 - protein, 446 aa, Escherichia coli; identical to SEQ ID NO: 2176

SEQ ID NO: 14201 - protein, 351 aa, Escherichia coli; identical to SEQ ID NO: 2872

SEQ ID NO: 14202 - protein, 250 aa, Escherichia coli; identical to SEQ ID NO: 3048

SEQ ID NO: 14203 - protein, 650 aa, Escherichia coli; identical to SEQ ID NO: 8035

SEQ ID NO: 14204 - protein, 274 aa, Escherichia coli; identical to SEQ ID NO: 2300

SEQ ID NO: 14205 - protein, 200 aa, Escherichia coli; identical to SEQ ID NO: 1784

SEQ ID NO: 14206 - protein, 760 aa, Escherichia coli; identical to SEQ ID NO: 3114

SEQ ID NO: 14207 - protein, 231 aa, Escherichia coli; identical to SEQ ID NO: 3055

SEQ ID NO: 14208 - protein, 746 aa, Escherichia coli; identical to SEQ ID NO: 3031

SEQ ID NO: 14209 - protein, 230 aa, Escherichia coli; identical to SEQ ID NO: 4274

SEQ ID NO: 14210 - protein, 663 aa, Escherichia coli; identical to SEQ ID NO: 3453

SEQ ID NO: 14211 - protein, 412 aa, Escherichia coli; identical to SEQ ID NO: 3323

SEQ ID NO: 14212 - protein, 122 aa, Escherichia coli; identical to SEQ ID NO: 2915

SEQ ID NO: 14213 - protein, 191 aa, Escherichia coli; identical to SEQ ID NO: 2727

SEQ ID NO: 14214 - protein, 224 aa, Escherichia coli; identical to SEQ ID NO: 3115

SEQ ID NO: 14215 - protein, 430 aa, Escherichia coli; identical to SEQ ID NO: 2617

SEQ ID NO: 14216 - protein, 249 aa, Escherichia coli; identical to SEQ ID NO: 3492

SEQ ID NO: 14217 - protein, 351 aa, Escherichia coli; identical to SEQ ID NO: 2872

SEQ ID NO: 14218 - protein, 359 aa, Escherichia coli; identical to SEQ ID NO: 2328

SEQ ID NO: 14219 - protein, 362 aa, Escherichia coli; identical to SEQ ID NO: 2434

SEQ ID NO: 14220 - protein, 243 aa, Escherichia coli; identical to SEQ ID NO: 3483

SEQ ID NO: 14221 - protein, 565 aa, Escherichia coli; identical to SEQ ID NO: 2678

SEQ ID NO: 14222 - protein, 747 aa, Escherichia coli; identical to SEQ ID NO: 2072

SEQ ID NO: 14223 - protein, 203 aa, Escherichia coli; identical to SEQ ID NO: 2201

SEQ ID NO: 14224 - protein, 228 aa, Escherichia coli; identical to SEQ ID NO: 3034

SEQ ID NO: 14225 - protein, 446 aa, Escherichia coli; identical to SEQ ID NO: 2176

SEQ ID NO: 14226 - protein, 208 aa, Escherichia coli; identical to SEQ ID NO: 1949

SEQ ID NO: 14227 - protein, 700 aa, Escherichia coli; identical to SEQ ID NO: 3128

SEQ ID NO: 14228 - protein, 224 aa, Escherichia coli; identical to SEQ ID NO: 3431

SEQ ID NO: 14229 - protein, 819 aa, Escherichia coli
MLSLAGVPVYAVDFNTDVLDAADRQNIDFSRFSRAGYIMPGQYQMEIRVNGQDISPSAFQIAFLEPPFSDSDNEKPLPEPCLTPEIVSRMGLTEASQEKVTYWNNGQCADFRQLSGVEIRPNPAEGMLYINMPQAWLEYSDASWLPPSRWDNGIPGLLFDYNINGTVNKPHQGKQSQSLNYNGTAGANFGAWRLRADYQGNLNHTTGSAQGTDSQFTWSRFYMYRAIPRWRANLTLGENYINSEIFSSWRYTGASLESDDRMLPPKLRGYAPQVSGIADTNARVVISQQGRILYDSTVPAGPFTIQDLDSSVRGRLDVEVIEQDGRKKTFQVDTAYVPYLTRPGQVRYKLVSGRSRTYEHTMEGPVFAAGEASWGISNTWSLYGGSIVAGDYNALAVGLGRDLSKFGTVSADVTQSVARIPGYDTKQGKSWRLSYSKRFDEVNTDITFAGYRFSERNYMTMDQYLNARYRNDFTGREKELYTVTLNKNFEDWKASVNLQYSHQTYWDRRTSDYYTLSVNRYFDAFSFKNIALGISASRSKYQNRDNDSAFVRLSVPWGTGTASYSGSMSNDRYTNTVGYSDTLNNGLSSYSLNAGVNSGGGQPSQRQMSAYYNHNGSLTNLSASFSAVENGYSSFGMSASGGATVTMKGAALHAGGMNGGTRLLVDTDGVGGVPVDGGRVSTNRWGIGVVTDVSSYYRNITSVDLNRLPEDMEASRSVVESVLTEGAIGYREFEVLKGSRLFAVLRLADNSHPPFGASVTNAKGRELGMVADSGLAWLSGVNPGETLNVGWDGRTQCVVDIPAHPDPAQQLLLPCRQVK

SEQ ID NO: 14230 - protein, 161 aa, Escherichia coli; identical to SEQ ID NO: 2582

SEQ ID NO: 14231 - protein, 878 aa, Escherichia coli
MSYLNLRLYQRNTQCLHIRKHRLAGFFVRLFVACAFTAQAPLSSAELYFNPRFLADDPQAVADLSRFENGQELPPGTYRVDIYLNNGYMATRDVTFNTGDSEQGIVPCLTRAQLASMGLNTASVSGMNLLADDACVPLTSMIHDATAQLDVGQQRLNLTIPQAFMSNRARGYIPPELWDPGINAGLLNYNFSGNSVQNRIGGNSHYAYLNLQSGLNIGAWRLRDNTTWSYNSSDSSSGSKNKWQHINTWLERDIIPLRSRLTLGDGYTQGDIFDGINFRGAQLASDDNMLPDSQRGFAPVIHGIARGTAQVTIKQNGYDIYNSTVPPGPFTINDIYAAGNSGDLQVTIKEADGSTQIFTVPYSSVPLLQREGHTRYSITAGEYRSGNAQQEKPRFFQSTLLHGLPAGWTIYGGTQLADRYRAFNFGIGKNMGALGALSVDMTQANSTLPDDSQHDGQSVRFLYNKSLNESGTNIQLVGYRYSTSGYFNFADTTYSRMNGYNIETQDGVIQVKPKFTDYYNLAYNKRGKLQLTVTQQLGRTSTLYLSGSHQTYWGTSNVDEQFQAGLNTAFEDINWTLSYSLTKNAWQKGRDQMLALNVNIPFSHWLRSDSKSQWRHASASYSMSHDLNGRMTNLAGVYGTLLEDNNLSYSVQTGYAGGGDGNSGSTGYATLNYRGGYGNANIGYSHSDDIKQLYYGVSGGVLAHANGVTLGQPLNDTVVLVKAPGAKDAKVENQTGVRTDWRGYAVLPYATEYRENRVALDTNTLADNVDLDNAVANVVPTRGAIVRAEFKARVGIKLLMTLTHNNKPLPFGAMVTSESSQSSGIVADNGQVYLSGMPLAGKVQVKWGEEENAHCVANYQLPPESQQQLLTQLSAECR

SEQ ID NO: 14232 - protein, 862 aa, Escherichia coli
MTIKSTNHLTHIATFCALLYSNSALCAELVEYDHTFLMGKDASNIDLSRYTEGNPTLPGIYDVSVYVNDQPIMSQSIAFAVIEGKKNAQACITQKNLLQFHISSPDKNSEKAILLKRDDDLGDCLNLAEMIPQSSIRYDVNDQRLDIDVPQAWIMKNYQNYVDPSLWENGINAAMLSYNLNGYHSESPGRTNDSIYAAFNGGINLGAWRLRASGNYNWMTNVHSDYDFQNRYLQRDLASLRSQLVIGESYTTGETFDSVSIRGIRLYSDSRMLPPVLASFAPIIHGVANTNAKVTVMQNGYKIYETTVPPGAFAIDDLSPSGYGSDLIVTIEEADGTKRTFSQPFSSVVQMLRPGVGRWDISAGQVLKDSIQDEPNLFQASYYYGLNNYLTGYTGIQLTDNNYTAGLLGLGMNTPVGAFSVDVTHSNVSIPDDKTYQGQSYRISWNKLFENTSTSLNIAAYRYSTQHYLGLNDALTLIDEVEHPEQDLEPKSMRNYSRMKNQVTVSINQPLKFEKKDYGSFYLSGSWSDYWASGQNSTNYSIGYSNSASWGSYSISAQRSLNEDGQTDDSIYLSFTIPIENLLGTEHRSSGFQSIDTQLNSDFKGNNQLNISSSGYSDTNRISYSVNTGYMMNKSSDDLSYIGGYASYESPWGTLSGSASASSDNSRQFSLNTDGGFVLHSGGLTFSNDSFSDSDTLAVIQAPGAKGARINYGNSTVDRWGYGVTSALSPYHENRIALDINDLENDVELKSTSTVAVPRQGAVVFADFETVQGQSAIMNIVRSDGKNIPFAADIYDEQNNIIGNVGQGGQAFVRGIGQEGNIRITWIEEGKPVSCFAHYQQNATSEKIAQSIILNGLRCQIQ

SEQ ID NO: 14233 - protein, 669 aa, Escherichia coli
MTPLASAIVALLLGIEAYAAEETFDTHFMIGGMKDQQVANIRLDDNQPLPGQYDIDIYVNKQWRGKYEIIVKDNPQETCLSIEVIKRLGINSDNFASGKQCLTFEQLVQGGSYTWDIGVFRLDFSVPQAWVEELESGYVPPENWERGINAFYTSYYVSQYYSDYKASGNSKSTYVRFNSGLNLLGWQLHSDASFSKTNNNPGVWKSNTLYLERGFAQLLGTLRVGDMYTSSDIFDSVRFSGVRLFRDMQMLPNSKQNFTPRVQGIAQSNALVTIEQNGFVVYQKEVPPGPFAITDLQLAGGGADLDVSVKEADGSVTTYLVPYAAVPNMLQPGVSKYDFAAGRSHIEGASKQSDFVQAGYQYGFNNLLTLYGGSMVANNYYAFTLGTGWNTRIGAISVDATKSHSKQDNGDVFDGQSYQIAYNKFVSQTSTRFGLAAWRYSSRDYRTFNDHVWANNKDNYRRDENDVYDIADYYQNDFGRKNSFSANMSQSLPEGWGSVSLSTLWRDYWGRSGSSKDYQLSYSNNWRRISYILAASQAYDENHHEEKRFNIFISIPFDWGDDVTTPRRQIYMSNSTTFDDQGFASNNTGLSGTVGSRDQFNYGVNLSYQNQGNETTAGANLTWNAPVATVNGSYSQSSTYRQAGASVSGGIVAWSGALIWRTVFPKRLL

SEQ ID NO: 14234 - protein, 207 aa, Escherichia coli; identical to SEQ ID NO: 2223

SEQ ID NO: 14235 - protein, 843 aa, Escherichia coli
MHWMHLPLDHYRAHFSFSLLALTIASALPAYGGKFNPKFLENVQGIDQHVDLSVYDSPVGQQIPGKYRVFVFVNEEKMASRTLDFSTASEAQRKASGESLMPCLSRVQLEEMGVRIDSFPALKILPPEACVAFDEIIPQATSRFDFNTQTLHLTFPQAAMMMTARGTVDPSRWDEGIPALLLDYSFSGSNGRNEGSGSSPDSTSNSYYLNLRSGLNVGPWRLRNNSIWNRTDGKNQWDNVGTSLNRAIIPLKSQITLGDTATPGEIFDSVQMRGALLASDDEMLPDSQRGFAPVVRGIAKSNAEVSIEQNGYVIYRTFVQPGAFEINDLYATSGSGDLTVIIKESDGSEQRFIQPFSAVAIFQREGYLKYSLAAGEYRAGNYDSGKPRFGQFTAMYGLPWGMTAYGGALLSADYNALALGLGKNFGTIGAVSVDVTQAKSQLRNNEKDEGQSYRFLYSKSFEGGTDLRLLGYKYSTSGYYTFQEATDVRSDADSDYRRYHKRSQIQGNITQQLGDYGSVYFNMTQQDYWNVDGKENSLSAGYHGHIGRVNYSIAYTWTRSPEWDEDDRLWSFSLSIPLGGAWGSYRMTTDQNGKTSQQASVSGTLLEDRNLNYNVQQGYTSNGVGNSGSVNMGYMGGSGNIDVGYNYSKDNQQVNYGVRGGVIVHSEGITLSQPLGESLAIVSAPGARGGHVVNSSGVEVDWMGNAVVPYLTPYRETIVELRSDTLGQNVELQEAFQKVVPTRGAIVRSRFDTRVGYRVLMSLKRANGNAVPFGATAALSDESKPASSIVGEEGQLYISGMPEEGELQVSWGHEQAQRCRVPFRLPEKKDNSGIVMVNAVCDK

SEQ ID NO: 14236 - protein, 368 aa, Escherichia coli
MNKTITALAILMASFAANASVLPETPVPFKSGTGVIDNDTVYIGLGSAGTAWYKLDTQAKDKKWTALAAFPGGPRDQATSAFIDGNLYVFGGIGKNSEGLTQVFNDVHKYNPKTNSWVKLMSHAPMGMAGHVTFVHNGKAYVTGGVNQNIFNGYFEDLNEAGKDSTTIDKINAHYFDKKAEDYFFNKFLLSFDPSTQQWSYAGESPWYGTAGAAVVNKGDKTWLINGEAKPGLRTDAVFELDFTGNNLKWNKLAPVASPDGVAGGFAGMSNDSLIFAGGAGFKGSRENYQNGKNYAHEGLKKSYSADIHLWHNGKWDKSGELSQGRAYGVSLPWNNSLLIIGGETAGGKAVTDSVLISVKDNKVTVQN

SEQ ID NO: 14237 - protein, 866 aa, Escherichia coli; identical to SEQ ID NO: 4866

SEQ ID NO: 14238 - protein, 823 aa, Escherichia coli
MTPLASAIVALLIGIEAYAAEETFDTHFMIGGMKDQQVSNIRLEDNQPLPGQYDIDIYVNKQWRGKYEIIVKDNPQETCLSREMIKRLGINTDSFASGKQCLTFKQLIQGGSYTWDIGVFRLDFSVPQAWVEELESGYVPPENWERGINAFYTSYYMSQYYSDYKASGNSKSTYVRFNSGLNLLGWQLHSDASFSKTNNNPGVWKSNTLYLERGFAQLLGTLRVGDMYTSSDIFDSVRFSGVRLFRDMQMLPNSKQNFTPRVQGIAQSNVLVTIEQNGFVVYQKEVPPGPFAITDLQLAGGGADLDVSVKEADGSVTTYLVPYAAVPNMLQPGVSKYDFAAGRSHIEGASKQSDFVQAGHQYGFNNLLTLYGGSMVANNYYAFTLGTGWNTRIGAISVDATKSHSKQDNGDVFDGQSYQIAYNKFVSQTSTRFGLAAWRYSSRDYRTFNDHVWANNKDNYRRDENDIYDIADYYQNDFGRKNSFSANMSQSLPEGWGSVSLSTLWRDYWGRSGSSKDYQLSYSNNLRRISYTLAASHAYDENHHEEKRFNIFISIPFDWGDDVTTPRRQIYMSNSTTFDDQGVASNNTGLSGTVGSRDQFNYGVNLSYQYQGNETTAGANLTWNAPVATVNGSYSQSSAYRQAGASVSGGIVAWSGGVNLANRLSETFAVMNAPGIKDAYVNGQKYRTTNRNGVVVYDGMTPYRENYLMLDVSQSDSEAELRGNRKIAAPYRGAVVLVNFDTDQRKPWFIKALRADGQPLTFGYEVNDIHGHNIGVVGQGSQLFIRTNEVPPSVNVAIDKQQGLSCTITFGKEIDESRNYICQ

SEQ ID NO: 14239 - protein, 645 aa, Escherichia coli
MGAANCPGDAKENDASNPWRYVRAATATEITQYGNPASCSVKPDNNGGAVTPVDPTPETPETPVTPTPDNNEPSTPADSSNDYSLQAWSGQEGSEIYHVIFNGNVYQNAWWVGSEDCPRGTSVENSNNPWRLVRTATAAEMSQYGNPTTCEIDNGGVIIADGFQASKAYSANSIVDYNDAHYKTSVDQDAWGFVPGGDNPWKKYEPAKAWSASTVYVKGDRVVVDGQAYEALFWTQSDNPALIANQNATGSNSRPWKPLGKTQSYSNEELNNAPQFNPETLYASDTLIRFNGENYISQSKVQKVSPSDSNPWRVFVDWTGTKERVGTPKKAWPKHVYAPYVDFTLNTIPDLAALAKNHNVNHFTLAFVVSKDANTCLPTWGTAYGMQNYAQYSKIKALREAGGDVMLSIGGANNAPLAASCKNVDDLMQHYYDIVDNLNLRVLDFDIEGTWVADQASIERRNLAVKKVQDKWKSEGKDIAIWYTLPILPTGLTPEGMNVLSDAKAKGVELAGVNVMTMDYGNAICQSANTEGQNIHGKCATSAIANLHSQLKGLHPNKSDAEIDAMMGTTPMVGVNDVQGEVFYLSDARLVMQDAQKRNLGMVGIWSIARDLPGGTNLSPEFHGLTKEQAPKYAFSEIFAPFTKQ

SEQ ID NO: 14240 - protein, 826 aa, Escherichia coli; identical to SEQ ID NO: 3256

SEQ ID NO: 14241 - protein, 794 aa, Escherichia coli; identical to SEQ ID NO: 4850

SEQ ID NO: 14242 - protein, 882 aa, Escherichia coli
MPNHSNFRLRGIACYIALAISGGSVNAWADDSIQFDPRFLELKGDTKIDLGKFSKKGYVDAGKYNLRVFINKHPLSDEYDINWYVSENDPTKNYACLTPELVAALGLKEGIAKSLQWTHNDECLKPGQLDGMEVENDLSQSALLLTVPQAYLEYTSSDWDPPSRWDDGIPGLIADYSLNAQTRHQEQGGEDSHDISGNGTVGANLGAWRFRADWQSDYQHTRSNDDDDDSSNSTTSKHWDWSRYYAWRALPSLKAKLSLGEDYLNSDIFDGFNYIGSSVSTDDQMLPPNLRGYAPDVSGVAHSSAKVTISQMGRVLYETQVPAGPFRIQDIGDSVSGTLHVRVEEQNGQVQEYDVTTASMPFLTRQGQVRYKVMMGRPEDWNHKTEGGFFSGGEASWGGADGWSLYGGALADKHYQSAAMGVGRDLAQFGALAFDVTHSHVNLDHDSAYGKGKLDGNSFRVSYAKDFDELNSRVTFAGYRFSEKNFMTMSEYLDANQSDMARTGNDKEMYTITYNQNFAAAGVSIYLNYSHRTYWDRPEQTNYNLMFSHYFNMGSIRNMSISVTGYRYEYDDNADKGMYLSMSIPWSDSSTVTYNGSYGSGSDSSQVGYFKRVDDATHYQVNVGTSEQHGSADGYLSHDGSLAKVDLSANYHEGEYRSAGIALQGGATLTAHGGALHRTQNMGGTRLLIDADGIANVPVESNGAPVYTNMFGKAVVADINNYYRNQAYIDLNNLPEDAEATQSVVQATLTEGAIGYRKFKVISGQKAMAVLRLRDGSYPPFGAEVKNDEQQQVGIVDDEGNVYLAGVNAGEHMMVFWEGSAQCEIVLPKPLPADLFSGLLLPCEQKGTAAPDSSAPEIKPVIQDQTRQVTPTEAPTSISATQ

SEQ ID NO: 14243 - protein, 362 aa, Escherichia coli; identical to SEQ ID NO: 4554

SEQ ID NO: 14244 - protein, 193 aa, Escherichia coli; identical to SEQ ID NO: 2246

SEQ ID NO: 14245 - protein, 678 aa, Escherichia coli
MVPSTFSRLKAARCLPVVLAALIFAGCGTHTPDQSTAYMQGTAQADSAFYLQQMQQSSDDTRINWQLLAIRALVKEGKTGQAVELFNQLPQELNDTQRREKTLLAAEIKLAQKDFAGAQNLLAKITPADLEQNQQARYWQAKIDASQGRPSIDLLRALIAQEPLLGAKEKQQNIDATWQALSSMTQEQANTLVINADENILQGWLDLQRVWFDNRNDPDMMKAGIADWQKRYPNNPGAKMLPTQLVNVKAFKPASTNKIALLLPLNGQAAVFGRTIQQGFEAAKNIGTQPVAAQVAAAPAADVAEQSQPQTVDDVASPAQASVSDLTGEQPAAQPVPVSAPATSTAAVSAPANPSAELKIYDTSSQPLSQILSQVQQDGASIVVGPLLKNNVEELLKSNTPLNVLALNQPENIENRVNICYFALSPEDEARDAARHIRDQGKQAPLVLIPRSSLGDRVANAFAQEWQKLGGGPVLQQKFGSTSELRAGVNGGSGIALTGSPITPRETTDSGMTTNNPTLQTTPTDDQFTNNGSRVDAVYIVATPGEIAFIKPMIAMRNGSQSGATLYASSRSAQGTAGPDFRLEMEGLQYSEIPMLAGGNLPLMQQALSAVNNDYSLARMYAMGVDAWSLANHFSQMRQVQGFEINGNTGSLTANPDCVINRKLSWLQYQQGQVVPAS

SEQ ID NO: 14246 - protein, 517 aa, Escherichia coli; identical to SEQ ID NO: 2462

SEQ ID NO: 14247 - protein, 191 aa, Escherichia coli; identical to SEQ ID NO: 5619

SEQ ID NO: 14248 - protein, 232 aa, Escherichia coli; identical to SEQ ID NO: 2087

SEQ ID NO: 14249 - protein, 213 aa, Escherichia coli; identical to SEQ ID NO: 2232

SEQ ID NO: 14250 - protein, 432 aa, Escherichia coli; identical to SEQ ID NO: 2026

SEQ ID NO: 14251 - protein, 565 aa, Escherichia coli
MKSPAPSRPQKMALIPACIFLCFAALSVQAEETSVTPQPPDILLGPLFNDVQNAKLFPDQKTFADAVPNSDPLMILADYRMQQNQSGFDLRHFVNVNFTLPKEGEKYVPPEGQSLREHIDGLWPVLTRSTENTEKWDSLLPLPKPYVVPGGRFREVYYWDSYFTMLGLAESGHWDKVADMVANFAHEIDTYGHIPNGNRSYYLSRSQPPFFALMVELLAQHEGDAALKQYLPQMQKEYAYWMDGVENLQAGQQEKRVVKLQDGTLLNRYWDDRDTPRPESWVEDIATAKSNPNRPATEIYRDLRSAAASGWDFSSRWMDNPQQLNTLRTTSIVPVDLNSLMFKMEKILARASKAAGDNAMANQYETLANARQKGIEKYLWNDQQGWYADYDLKSHKVRNQLTAAALFPLYVNAAAKDRASKMATATKTHLLQPGGLNTTSVKSGQQWDAPNGWAPLQWVATEGLQNYGQKEVAMDISWHFLTNVQHTYDREKKLVEKYDVSTTGTGGGGGEYPLQDGFGWTNGVTLKMLDLICPKEQPCDNVPATRPLSESTTQPLKQKEAEPTP

SEQ ID NO: 14252 - protein, 874 aa, Escherichia coli
MTAFRAAFKAYRMHQVLILTRFARLTFALGLATAVFPVDAEYYFNPRFLSNDLAESVDLSAFTKGREAPPGTYRVDIYLNDEFMASRDITFIADDNNADLIPCLSTDLLVSLGIKKSALLDNKEHSADKHVPDNSACTPLQDRLADASSEFDVGQQHLSLSVPQIYVGRMARGYVSPDLWEEGINAGLLNYSFNGNSINNRSNHNAGKSNYAYLNLQSGINIGSWRLRDNSTWSYNSGSSNSSDSNKWQHINTSAERDIIPLRSRLTVGDSYTDGDIFDSVNFRGLKINSTEAMLPDSQHGFAPVIHGIARGTAQVSVKQNGYDVYQTTVPPGPFTIDDINSAANGGNLQVTIKEADGSIQTLYVPYSSVPVLQRAGYTRYALAMGEYRSGNNLQSTPKFVQASLMHGLKGNWTPYGGMQIAEDYQAFNLGIGKDLGLFGAFSFDITQANTTLADDTRHSGQSVKSVYSKSFYQTGTNIQVAGYRYSTQGFYNLSDSAYSRMSGYTVKPPTGDTSEQTLFIDYFNLFYSKRGQEQISISQQLGNYGTTFFSASRQSYWNTSRSDQQISFGLNVPFGDITTSLNYSYSNNIWQNDRDHLLAFTLNVPFSHWMRTDSQSAFHNSNASYSMSNDLKGGMTNLSGVYGTLLPDNNLNYSVQVGNTHGGNTSSGTSGYSSLNYRGAYGNTNVGYSRSGDSSQIYYGMSGGIIAHADGITFGQPLGDTMVLVKAPGADNVKIENQTGIHTDWRGYAILPFATEYRENRVALNANSLADNVELDETVVTVIPTHGAIARATFNVQIGGKVLMTLKYGNKSVPFGAIVTHGENKNGSIVAENGQVYLTGLPQSGKLQVSWGKDKTQTVLSSTSFLKFLLVPY

SEQ ID NO: 14253 - protein, 785 aa, Escherichia coli; identical to SEQ ID NO: 10556

SEQ ID NO: 14254 - protein, 236 aa, Escherichia coli; identical to SEQ ID NO: 3438

SEQ ID NO: 14255 - protein, 302 aa, Escherichia coli
MPEYRSSCQSWYKKSELLDNKEHSAEKHVPDNSACTPLQDRLADASTEFDVGQQHLSLSVPQIYVGRMARGYVSPELWEEGINAGLLNYSFNGNSINNRSNHNAGKSNYAYLNLQSGINIGSWRLRDNSTWSYNSGSSNSSNSNKWQHINTSAERDIIPLRSRLTVGDSYTDGDIFDSVNFRGLKINSTEAMLPDSQHGFAPVIHGIARGTAQVSVKQNGYDVYQTTVPPGPFTIDDINSAANGGDLQVTIKEADGSIQTLYVPYSSVPVLQRAGYTRYALAMGEYRSGNNLQSSPSSYKVA

SEQ ID NO: 14256 - protein, 351 aa, Escherichia coli
MKKSTLALVVMGIVASVSVQAAEIYNKDGNKLDVYGKVKAMHYMSDNDSKDGDQSYIRFGFKGETQINDQLTGYGRWEAEFAGNKAESDTAQQKTRLAFAGLKYKDLGSFDYGRNLGALYDVEAWTDMFPEFGGDSSAQTDNFMTKRASGLATYRNTDFFGVIDGLNLTLQYQGKNENRDVKKQNGDGFGTSLTYDFGGSDFAISGAYTNSDRTNEQNLQSRGTGKRAEAWATGLKYDANNIYLATFYSETRKMTPISGGFANKTQNFEAVAQYQFDFGLRPSLGYVLSKGKDIEGIGDEDLVNYVDVGATYYFNKNMSAFVDYKINQLESDNKLNINNDDIVAVGMTYQF

SEQ ID NO: 14257 - protein, 376 aa, Escherichia coli; identical to SEQ ID NO: 10621

SEQ ID NO: 14258 - protein, 614 aa, Escherichia coli; identical to SEQ ID NO: 10703

SEQ ID NO: 14259 - protein, 250 aa, Escherichia coli; identical to SEQ ID NO: 9904

SEQ ID NO: 14260 - protein, 260 aa, Escherichia coli; identical to SEQ ID NO: 4546

SEQ ID NO: 14261 - protein, 130 aa, Escherichia coli
MLSPESLCYGEKHEKKRAFLGLLLVSACASVFAANNETSKSVTFPKCEGLDAAGIAASVKRDYQQNRVARWADDQKIVGQADPVAWVSLQDIQGKDDKWSVPLTVRGKSADIHYQVSVDCKAGMAEYQRR

SEQ ID NO: 14262 - protein, 359 aa, Escherichia coli
MKKYLALALIAPLLISCSTTKKGNTYNEAWVKDTNGFDILMGQFAHNIENIWGFKEVVIAGPKDYVKYTDQYQTRSHINFDDGTITIETIAGTEPAAHLRRAIIKTLLMGDDPSSVDLYSDVDDITISKEPFLYGQVVDNTGQPIRWEGRANNFADYLLKNRLKSRSNGLRIIYSVTINMVPNHLDKRAHKYLGMVRQASRKYGVDESLILAIMQTESSFNPYAVSRSDALGLMQVVQHTAGKDVFRSQGKSGTPSRSFLFDPASNIDTGTAYLAMLNNVYLGGIDNPTSRRYAVITAYNGGAGSVLRVFSNDKIQAANIINTMTPGDVYQTLTTRHPSAESRRYLYKVNTAQKSYRRR

SEQ ID NO: 14263 - protein, 655 aa, Escherichia coli
MHVIKVVIGILVVLSPALQVATAHPSSPDKDTITVVATGNQNTVFETPAMVSVVTRETPWSQNAVTSAGMMRGVAGLSQTGAGRTNGQTFNLRGYDKSGVLVLVDGVRQLSDMAKSSGTWLDPALVKRVEVVRGPNSSLYGSGGLGGVVDFRTADATDFLVPGEASGFRLWGNTASGDHSTGSGLTWFGKTEKTDALLSVIMRKRGSLYQSDGGHAPNEERPASVFAKGSVRLTDASKAGASLRLYRNVTTEPGNPTLTRGDSGLRDRKTVQNDVQLWHQYAPADRSLINLKSTIYLSDTTIRTEGESKTAEWRNNRTSGVNIVNRSHTLIFPGAHQLSYGAEYYRQQQSPEGSATLYPEGDISFSSLYFQDEMTMEDYPVNVIVGTRYDRYRSHNPRAGELKAGRWSPRAAISVSPTDWLMMYGAVSSAFRAPTMAEMYRDDVHFYRRGKPNYWIPNPDLKPENNITREVGVGFQMDSLFTANDHFQVKGGYFGTDARNYIATRVDMKRMRSYSYNVSRARIWGWDVQGNYQSDYADWTLSYNRTESIDADSREWLGTGNPDTLISDISLPVGHEGIYAGWRAELSAPVSHVKKGDSHQAGYAIHSFSLSYKPAMVKGFEASVTLDNAFNKLAMNGKGVPLSGRSISLYTSYQW

SEQ ID NO: 14264 - protein, 233 aa, Escherichia coli
MKCTAFFLCAIFSFAASASNIIVNGTRFIYPGNEKEITVQLSNTADRPALAQVWLDNGNPDATPDTITTPFIITPPISRVDAKSGQTLRIKLGSNVGLAKDKETLWWLNILEIPPVETGGKNEGQSVLQLAIRSRFKFIYRPSGLGNRDTAPEKLVLSASGNRLSISNPTPFWITVSRIARGDGKNLNDKVVMLAPQSGQTILLSSAVGRGEALIVNNINDYGADVAVKVTVK

SEQ ID NO: 14265 - protein, 246 aa, Escherichia coli; identical to SEQ ID NO: 3838

SEQ ID NO: 14266 - protein, 266 aa, Escherichia coli; identical to SEQ ID NO: 1894

SEQ ID NO: 14267 - protein, 732 aa, Escherichia coli; identical to SEQ ID NO: 4926

SEQ ID NO: 14268 - protein, 331 aa, Escherichia coli; identical to SEQ ID NO: 2700

SEQ ID NO: 14269 - protein, 102 aa, Escherichia coli; identical to SEQ ID NO: 1824

SEQ ID NO: 14270 - protein, 614 aa, Escherichia coli; identical to SEQ ID NO: 3301

SEQ ID NO: 14271 - protein, 565 aa, Escherichia coli; identical to SEQ ID NO: 2669

SEQ ID NO: 14272 - protein, 828 aa, Escherichia coli
MKLSRRSFMKANAVAAAAAAAGLSVPGVARAVVGQQEAIKWDKAPCRFCGTGCGVLVGTQQGRVVACQGDPDAPVNRGLNCIKGYFLPKIMYGKDRLTQPLLRMKNGKYDKEGEFTPITWDQAFDVMEEKFKTALKEKGPESIGMFGSGQWTIWEGYAASKLFKAGFRSNNIDPNARHCMASAVVGFMRTFGMDEPMGCYDDIEQADAFVLWGANMAEMHPILWSRITNRRLSNQNVTVAVLSTYQHRSFELADNGIIFTPQSDLVILNYIANYIIQNNAINQDFFSKHVNLRKGATDIGYGLRPTHPLEKAAKNPGSDASEPMSFEDYKAFVAEYTLEKTAEMTGVPKDQLEQLAQLYADPNKKVISYWTMGFNQHTRGVWANNLVYNLHLLTGKISQPGCGPFSLTGQPSACGTAREVGTFAHRLPADMVVTNEKHRDICEKKWNIPSGTIPAKIGLHAVAQDRALKDGKLNVYWTMCTNNMQAGPNINEERMPGWRDPRNFIIVSDPYPTVSALAADLILPTAMWVEKEGAYGNAERRTQFWRQQVQAPGEAKSDLWQLVQFSRRFKTEEVWPEELLAKKPELRGKTLYDVLYATPEVSKFPVSELAEDQLNDESRELGFYLQKGLFEEYAWFGRGHGHDLAPFDDYHKARGLRWPVVNGKETQWRYSEGNDPYVKAGEGYKFYGKPDGKAVIFALPFEPAAEAPDEEYDLWLSTGRVLEHWHTGSMTRRVPELHRAFPEAVLFIHPLDAKARDLRRGDKVKVVSRRGEVISIVETRGRNRPPQGLVYMPFFDAAQLVNKLTLDATDPLSKETDFKKCAVKLEKV

SEQ ID NO: 14273 - protein, 721 aa, Escherichia coli; identical to SEQ ID NO: 9824

SEQ ID NO: 14274 - protein, 446 aa, Escherichia coli; identical to SEQ ID NO: 2177

SEQ ID NO: 14275 - protein, 224 aa, Escherichia coli; identical to SEQ ID NO: 10619

SEQ ID NO: 14276 - protein, 430 aa, Escherichia coli; identical to SEQ ID NO: 2617

SEQ ID NO: 14277 - protein, 752 aa, Escherichia coli
MAPSKTAQPKHSLRKIAVVVATAVSGMSVYAQAAVEPKEDTITVTAAPAPQESAWGPAATIAARQSATGTKTDTPIQKVPQSISVVTAEEMALHQPKSVKEALSYTPGVAVGTRGASNTYDYLIIRGFAADGQSQNNYLNGLKMQGNFYNDAVIDPYMLERAEIMRGPVSVLYGKSSPGGLLNMVSKRPTTEPLKEVQFKAGTDSLFQTGFDFSDALDDDGVYSYRLTGLARSANAQQKGSEEQRYAIAPAFTWRPDDKTNFTFLSYFQNEPETGYYGWLPKEGTVEPLPNGKRLPTDFNEGAKNNTYSRNEKMIGYSFDHEFNDTFTVRQNLRFAQNKVSQKSVYGYGMCSDPLYTKDQEALKASPCLSIPQSQWGHTLTRQYVIDNEKLENFSVDTQLQSKFATGSVGHTLLTGVDFMRMRNDIDSWFGYAGSVAPSDIYNLDRSDFDFGAHPNPSGPYRVLLKQKQTGLYVQDQAQWDKVLVTLGGRYDWADQSSFNRDYGNKSERDDKEFTWRGGVNYLFDNGVTPYFSYSESFEPASQTDANGDLFAPSKGKQYEVGVKYVPEDRPIVVTGALYQLTKTNNLMADPNGSLFSVEGGEIRARGVELEAKAALSASVNVVGSYTYTDAEYTTDTTYKGNTPAQVPKHMASLWADYTFFDGPLSGLTLGTGGRYTGSSYGDPANSFKVGSYTVVDALVRYDLARVGMAGSNVALHVNNLFDREYVASCFNTYGCFWGAERQVVATATFRF

SEQ ID NO: 14278 - protein, 518 aa, Escherichia coli
MKKLKINYLFIGILALLLAVALWPSIPWFGKADNRIAAIQARGELRVSTIHTPLTYNEINGKPFGLDYELAKQFADYLGVKLKVTVRQNISQLFDDLDNGNADLLAAGLVYNSERVKNYQPGPTYYSVSQQLVYKVGQYRPRTLGNLTAEQLTVAPGHVVVNDLQTLKDTKFPELSWKVDDKKGSAELMEDVIEGKLDYTIADSVAISLFQRVHPELAVALDITDEQPVTWFSPLDGDNTLSAALLDFFNEMNEDGTLARIEEKYLGHGDDFDYVDTRTFLRAVDAVLPQLKPLFEKYAEEIDWRLLAAIAYQESHWDAQATSPTGVRGMMMLTKNTAQSLGITDRTDAEQSISGGVRYLQDMMSKVPESVPENERIWFALAAYNMGYAHMLDARALTAKTKGNPDSWADVKQRLPLLSQKPYYSKLTYGYARGHEAYAYVENIRKYQISLVGYLQEKEKQATEVAMQLAQDYPAVSPTELGKEKFPFLSFLSQSSSNYLTHTPSLLFSRKGSEEKQN

SEQ ID NO: 14279 - protein, 228 aa, Escherichia coli; identical to SEQ ID NO: 6714

SEQ ID NO: 14280 - protein, 234 aa, Escherichia coli
MCNFYSAFVLVSALFCSCAGAASFGPRESMLIFDGRQSSTSYRMDNSDVRLPWLVQAWVEDINEKRTDVFTTVPLVFRVEPSSTFTVRIVKKGTVPEDRETLYWAVSNSLPGGERSEQKTDGDKISAQLSLAYRFKIPLIYRPALLASKPQQPEALRWHVGKSGKITVHNPTRYVVQLNYVNAGGKRYQGRGVSWFISPETSVTVDVSVGTGSRIKYGVVNDYGAVREYEGVVR

SEQ ID NO: 14281 - protein, 837 aa, Escherichia coli; identical to SEQ ID NO: 4687

SEQ ID NO: 14282 - protein, 250 aa, Escherichia coli; identical to SEQ ID NO: 3811

SEQ ID NO: 14283 - protein, 835 aa, Escherichia coli
MRLRKKLLLLSLLVFISNRAMGGDYFDTSLLAAGIDGENIDLSVFSHPGGGIEGEQEVSVQVNDNFYTRKTLHFRNSGDKGLLPDFPAGFFDDLLAPEYRPVQKDALLSSADFMSQTPYSSVTFNQGEGRVDIRVPQAFLGRAAQLRSSPDTWENGVPALLMDYSLTGNRNDSDDYSSRSLYASARLGLNVGPWRLRTSGNYSQYQSESRWWHSRTENTSFYSTWLERDISALRASLRIGKVSTGGMILDSVSFRGVRLYSNDDMLSSRLRNYSPTVKGFARTQAVVVITQNGRQVYQTNVPAGPFELNDFYISGYSGDLVVTVRESDGSEHSFIQPFSTLPEMKREGVSGFELSAGRYDNYGSEDYYNDPLFVYGAWSRGFGGGVTVFGETLQAGKYQSAGIGSTLSLGRVGAVSADISVSRAEKYDDIHTGQSYGLKYSKSQVETGTTVTLATYRYSTKDFYTFGDFVSRTEQARYVWENRLKNRMTLSLNQSLGSLGSVSLSASQQDYWTSGEVNRAFSLSHSFSWQDIYFSTTFSMDQMSGNRYGYDNNRQIDFYMSVPLSRLLGREEPTSSSVSWSATRTERQLRQTATLSGSVPDTRMRYRVAGNWGNGGAAEGQSASLTWNGDFTTASLGYTRSGGYRTTDFSLSGAAVAWAGGVAFGSNSVTDNGAIVVNTSGVSGIGTSAGGRTTWPGTALISSPQLYTENRIDLRTDGLPDDIVLAETSARTVPSRGAVVVLDYTVYRGGQVVFTLKRPDGSALPFGSVVSLDGMPAGKENTGIVGDEGRVYLAGVPEKGRLTVNSGGKQCHADFVLSKNRKQAGPVAEAVAVCR

SEQ ID NO: 14284 - protein, 431 aa, Escherichia coli; identical to SEQ ID NO: 3408

SEQ ID NO: 14285 - protein, 641 aa, Escherichia coli; identical to SEQ ID NO: 3794

SEQ ID NO: 14286 - protein, 784 aa, Escherichia coli; identical to SEQ ID NO: 10652

SEQ ID NO: 14287 - protein, 883 aa, Escherichia coli; identical to SEQ ID NO: 4713

SEQ ID NO: 14288 - protein, 654 aa, Escherichia coli; identical to SEQ ID NO: 5571

SEQ ID NO: 14289 - protein, 660 aa, Escherichia coli; identical to SEQ ID NO: 5588

SEQ ID NO: 14290 - protein, 656 aa, Escherichia coli
MRLKKRYLCTVLSLAFTQQAVAAQESDTLTVWSSPVSSTTTTVLDQPTMKALDKQNVAQALSVVPGVVLQKSGSRNEEQVKVRGFDSRQVPVYFDGVPIYVPYDGNLDLARILTNNLGAVEVSKGYSSLLQGPNQMGGAINITTQKPTKPLEANLGYRQGWSRSHDNAYDMHASFAASSDLGYLQVSGSQLKQDFLGLPHGVNNDIAGKHGKMINSSADDKHGIVKLGFTPRENDEYTLTYIKQDGEKDNPPYSGNSGQKSRYWQWPEYDKESFYYQGTTQLNDRFTLKSRLYRDTFENTLMMYNSLADLKNKKGSYSHYSDYSDGAGLQLAADVRENDLLSFAVNWKDDVHREKGAPHAAYDRYEDRTWSLASEYQWAAADNVDVVAGISYDWRDSVEAKKHEKDGSITHYDDNNQSAFNWQVMGKYHFANEDTLALSYYDRTRFPTLKERYTTSKPAYNQIAIVNPQLKPERARGVDLTWNGAFTHDWGFEVSIYYNRVSDAILSHNIDADTIQNQNSGTVDYSGLDAGIKGKISNILDVGLSYALIHADAKRKDIGKITDLPTQTMTAWMTLKPWEPLSVTLSEEARSSSYSNSDGSQKAAGFAVTHIRADYTLGHGFSVNASVNNLFDTKYAYSEGFIEEGRNFWAGIEYTF

SEQ ID NO: 14291 - protein, 236 aa, Escherichia coli; identical to SEQ ID NO: 3821

SEQ ID NO: 14292 - protein, 830 aa, Escherichia coli
MKHHDFISGKVSRALAIVLCAFPPFSGGAENTETVYQFNDGFIVGSRERVDLSRFSTSAIDEGVYSLDVYTNGEWKGRYDLNVRRRQDGQSGVCYTREMLVQYGIAAEKLNRRLSGQAGYCGPLKAWRSEDNVHDTLIPSSLRLEISVPQIYEDQRLKDYVSPAFWDKGITALSLGWTANAWNNHESGQGEDNNSVYLGLNGGLSWNGWLLKHIGNLNWQEQQGGAHWSSNQTYLQRPLPAMNAILSGGQFFTSGEFFDTTGMRGVNLATDDNMFPDGMRSYAPEIRGVARSNALVTVRQGNNIIYQTTVPPGPFILQDVYPSGYGSDLDVSVKEADGTVNVFSVPYASVTQLLRPGMTRYAFSAGKADDDFLRHKPVLWQATWQHGLSNMFTGYTGVTGFNDYQAFLLGTGMNTGIGALSFDVTHSRLKSDMLDESGQSWRATFNRMFTETQTSIVLAAYRYSTRGYYNLNDALYAVDQTRNKRNNYVLWREKNGMTFTVNQNLPEGWGGFWLSGRVSSYWDRSGTEKQYQMSYNNSAGRLSWSVSAQRVYTHDSSGHRRDDRVSLNFSLPLWFGENRTANLTSNTVFSNSHFSSSQTGINGSLDSENNLSYGISTTTTTGGRHDVALNGSWRMPWTTLNGSYSQGSGWRQSGIGGSGTLIVHSGGVTLSPETGSTMALIEARDAKGAMLPGSPGTRVDGNGYAVLPYLRPYRINSVEIDPKGSEDDVKFDRTVARVVPWEDSVVKITFATEVQNTLTLPVHRADGRPLPFAATIYDPAGREIGVVGQGSMMFINRAGATRAVVRWAGGQCSTALDPVSALKTKELVCR

SEQ ID NO: 14293 - protein, 222 aa, Escherichia coli; identical to SEQ ID NO: 1956

SEQ ID NO: 14294 - protein, 241 aa, Escherichia coli; identical to SEQ ID NO: 2890

SEQ ID NO: 14295 - protein, 700 aa, Escherichia coli; identical to SEQ ID NO: 10607

SEQ ID NO: 14296 - protein, 834 aa, Escherichia coli; identical to SEQ ID NO: 3207

SEQ ID NO: 14297 - protein, 203 aa, Escherichia coli; identical to SEQ ID NO: 2201

SEQ ID NO: 14298 - protein, 274 aa, Escherichia coli
MNKTAIALLALLASSASLAATPWQKITQPVPGSAQSIGSFSNGCIVGADTLPIQSEHYQVMRTDQRRYFGHPDLVMFIQRLSRQVSNLGMGTVLIGDMGMPAGGRFNGGHASHQTGLDVDIFLQLPKTRWTSAQLLRPQALDLVSRDGKHVVPTLWKPEIFSLIKLAAQDKDVTRIFVNSAIKQQLCLDAGTDRDWLRKVRPWFQHRAHMHVRLRCPADSLECEDQPLPPPGDGCGAELQSWFEPPKPGTTKPEKKTPPPLPPSCQALLDEHVI

SEQ ID NO: 14299 - protein, 686 aa, Escherichia coli
MFWRDMTLSVWRKKTTGLKTKKRLLPLVLAAALCSSPVWAEEATFTANFKDTDLKSFIETVGANLNKTIIMGPGVQGKVSIRTMTPLNERQYYQLFLNLLEAQGYAVVPMENDVLKVVKSSAAKVEPLPLVGEGSDNYAGDEMVTKVVPVRNVSVRELAPILRQMIDSAGSGNVVNYDPSNVIMLTGRASVVERLTEVIQRVDHAGNRTEEVIPLDNASASEIARVLESLTKNSGENQPATLKSQIVADERTNSVIVSGDPATRDKMRRLIRRLDSEMERSGNSQVFYLKYSKAEDLVDVLKQVSGTLTAAKEEAEGTVGSGREVVSIAASKHSNALIVTAPQDIMQSLQSVIEQLDIRRAQVHVEALIVEVAEGSNINFGVQWGSKDAGLMQFANGTQIPIGTLGAAISAAKPQKGSTVISENGATTINPDTNGDLSTLAQLLSGFSGTAVGVVKGDWMALVQAVKNDSSSNVLSTPSITTLDNQEAFFMVGQDVPVLTGSTVGSNNSNPFNTVERKKVGIMLKVTPQINEGNAVQMVIEQEVSKVEGQTSLDVVFGERKLKTTVLANDGELIVLGGLMDDQAGESVAKVPLLGDIPLIGNLFKSTADKKEKRNLMVFIRPTILRDGMAADGVSQRKYNYMRAEQIYRDEQGLSLMPHTAQPILPAQNQALPPEVRAFLNAGRTR

SEQ ID NO: 14300 - protein, 369 aa, Escherichia coli
MKKLTVTISAVATAVLMAVSAQAAEIYNKDGNKLDLYGKVDGLHYFSSNKDENGDKSYMRMGIKGETQINDDLTGYGHWEYQIQANTPENENHAWTRLAFAGLKLSDYGSLDYGRNYGVVYDVTSWTDVLPEFGGDTYSADNFMQGRGNGFATYRNTDFFGLVDGLNFAVQYQGENGGVSGENTTNNGRGALRQNGNGVGGSITYEYDGFSIGGAVSSSQRTWDQNHTGLMGTGNRAETYTGGLKYDANNVYLAAQYTQTYNATLAGNLGWANKAQNLELVAQYQFDFGLRPSLAFLQSKGKKLGSINGRNYDNQDILKYVDVGATYYFNKNMSTYVDYKINLLKDNQFTRDAGINTDDIVAVGLVYQF

SEQ ID NO: 14301 - protein, 691 aa, Escherichia coli
MPSFIGGLVVFVSAAFNAQAETWFDPAFFKDDPSMVADLSRFEKGQKITPGVYRVDIVLNQTIVDTRNVNFVEITPEKGIAACLTTESLDAMGVNTDAFPAFKQLDKQACVPLAEIIPDASVTFNVNKLRLEISVPQIAIKSNARGYVPPERWDEGINALLLGYSFSGANSIHSSADSDSGDSYFLNLNSGVNLGPWRLRNNSTWSRSSGQTAEWKNLSSYLQRAVIPLKGELTVGDDYTAGDFFDSVSFRGVQLASDDNMLPDSLKGFAPVVRGIAKSNAQITIKQNGYTIYQTYVSPGAFEISDLYSTSSSGDLLVEIKEADGSVNSYSVPFSSVPLLQRQGRIKYAVTLAKYRTNSNEQQESKFAQATLQWGGPWGTTWYGGGQYAEYYRAAMFGLGFNLGDFGAISFDATQAKSTLADQSEHKGQSYRFLYAKTLNQLGTNFQLMGYRYSTSGFYTLSDTMYKHMDGYEFNDGDDEDTPMWSRYYNLFYTKRGKLQVNISQQLGEYGSFYLSGSQQTYWHTDQQDRLLQFGYNTQIKDLSLGVSWNYSKSRGQPDADQVFALNFSLPLNLLLPRSNDSYTRKKNYAWMTSNTSIDNEGHITQNLGLTETLLDDGNLSYSVQQGYNSEGKTANGSASMDYKGAFADARVGYNYSDNGSQQQLNYALSGSLVAHSQGITLGQSLGKLTC

SEQ ID NO: 14302 - protein, 159 aa, Escherichia coli
MTDGSGAAVQEGQGDLWVKRPNLFNWHMTQPDESILVSDGKTLWFYNPFVEQATATWLKDATGNTPFMLIARNQSSDWQQYNIKQNGDDFVLTPKASNGNLKQFTINVGRDGTIHQFSAVEQDDQRSSYQLKSQQNGAVDAAKFTFTPPQGVTVDDQRK

SEQ ID NO: 14303 - protein, 876 aa, Escherichia coli
MFSGDGGQLLSDKSLTGSAGGGNNRMKFNILPLAFFIGIIVSPARAELYFNPRFLSDDPDAVADLSAFTQGQELPPGVYRVDIYLNDTYISTRDVQFQMSQDGKQLAPCLSPEHMSAMGVNRYAVPGMERLPADTCTSLNSMIQGATFRFDVGQQRLYLTVPQLYMSNQARGYIAPEYWDNGITAALLNYDFSGNRVRDSYGGTSDYAYLNLKTGLNIGSWRLRDNTSWSYSAGKGYSQNNWQHINTWLERDIVPLRSRLTMGDSYTRGDIFDGVNFRGIQLASDDNMVPDSQRGYAPTIHGISRGTSRINIRQNGYEIYQSTLPPGPFEINDIYPAGSGGDLQVTLQEADGSVQRFNVPWSSVPVLQREGHLKYALSAGEFRSGGHQQDNPRFAEGTLKYGLPAGWTVYGGAWIAERYRAFNLGVGKNMGWLGAVSLDATRANARLPDESRHDGQSYRFLYNKSLTETGTNIQLIGYRYSTRGYFSFADTAWKKMSGYSVLTQDGVIQIQPKYTDYYNLAYNKRGRVQVSISQQTGESSTLYLSGSHQSYWGTDRTDRQLNAGFNSSVNDISWSLNYSLSRNAWQHETDRILSFDVSIPFSHWMRSDSTSAWRNASARYSQTLEAHGQAASTAGLYGTLLGDNNLGYSIQSGYTRGGYEGSSKTGYASLNYRGGYGNASAGYSHSGGYRQLYYGLSGGILAHANGLTLSQPLGDTLILVRAPGASDTRIENQTGVSTDWRGYAVLPYATDYRENRVALDTNTLADNVDIENTVVSVVPTHGAVVRADYKTRVGVKVLMTLMRNGKAVPFGSVVTARNGGSSIAGENGQVYLSGMPLSGQVSVKWGSQTTDQCTADYKLPKESAGQILSHVTASCR

SEQ ID NO: 14304 - protein, 208 aa, Escherichia coli; identical to SEQ ID NO: 1948

SEQ ID NO: 14305 - protein, 332 aa, Escherichia coli; identical to SEQ ID NO: 2703

SEQ ID NO: 14306 - protein, 696 aa, Escherichia coli; identical to SEQ ID NO: 3314

SEQ ID NO: 14307 - protein, 111 aa, Escherichia coli; identical to SEQ ID NO: 3096

SEQ ID NO: 14308 - protein, 317 aa, Escherichia coli
MLGSDENMVPYNQREFAPVVRGIARTQARIEVRQNGYLIQSRIVSPGAFALTDLPVTGNGGDLQVWVLESDGTIQTFNVPFTTPAIALREGYLKYNVTVGEYRPSDDSIEGAYLGQLTAMYGLPWSLTAFGGIQVSEHYQGNALGLGLSLGGFGSISLDTIYSRGQQKGYSNEIGKTWRVRYDKSFELTGTSFAAGYQDSSAGYHSLADVLDTYRNGTAYRSYDNRIRRTTINISQALGEWGSVALNGGRDEYRDKVKQDYIGASYSNSWKGITFAVNWSRNNNIGDYYSNSLRTENNLNLWMSIPMKRWLGGMIKG

SEQ ID NO: 14309 - protein, 243 aa, Escherichia coli
MQKMKPALKKTLMAVACLSAVPAAQAAISLDRTRAIFNGDEKSMTLNIANDNKQLPYLAQAWVENEKKEKITTGPIIATPPVQRLEPGSKSMVRLTSTPDISRLPQDRESLFYFNLREIPPKSDKANVLQIALQTKIKLFYRPESIKAKPNAVWQDQLVLNKTGGGYQIDNPTPYYVTVIGIGGSEKQAREGEFDAVMLAPKSTQMVKSGTYSTPYLSYINDYGGRPVLQFSCAGSRCTAVKK

SEQ ID NO: 14310 - protein, 236 aa, Escherichia coli; identical to SEQ ID NO: 3303

SEQ ID NO: 14311 - protein, 130 aa, Escherichia coli; identical to SEQ ID NO: 3184

SEQ ID NO: 14312 - protein, 412 aa, Escherichia coli; identical to SEQ ID NO: 3323

SEQ ID NO: 14313 - protein, 426 aa, Escherichia coli
MGDYAHTHGYDVVAYGNTGTQAQTDNDGFLSKTLYGALEHNFTDAWSGFVRGYGYDNRTNYDAYYSPGSPLLDTRKLYSQSWDAGLRYNGELIKSQLITSYSHSKDYNYDPHYGRYDSSATLDEMKQYTVQWANNVIVGHGSIGAGVDWQKQTTTPGTGYVENGYDQRNTGIYLTGLQQVGDFTFEGAARSDDNSQFGRHGTWQTSAGWEFIEGYRFIASYGTSYKAPNLGQLYGFYGNPNLDPEKSKQWEGAFEGLTAGVNWRISGYRNDVSDLIDYDDHTLKYYNEGKARIKGVEATANFDTGPLTHTVSYDYVDARNAITDTPLLRRAKQQVKYQLDWQLYDFDWGITYQYLGTRYDKDYSSYPYQTVKMGGVSLWDLAVAYPVTSHLTVRGKIANLFDKDYETVYGYQTAGREYTLSGSYTF

SEQ ID NO: 14314 - protein, 229 aa, Escherichia coli; identical to SEQ ID NO: 3277

SEQ ID NO: 14315 - protein, 204 aa, Escherichia coli; identical to SEQ ID NO: 2957

SEQ ID NO: 14316 - protein, 511 aa, Escherichia coli; identical to SEQ ID NO: 2457

SEQ ID NO: 14317 - protein, 239 aa, Escherichia coli; identical to SEQ ID NO: 11531

SEQ ID NO: 14318 - protein, 209 aa, Escherichia coli; identical to SEQ ID NO: 4977

SEQ ID NO: 14319 - protein, 200 aa, Escherichia coli; identical to SEQ ID NO: 1785

SEQ ID NO: 14320 - protein, 431 aa, Escherichia coli; identical to SEQ ID NO: 3408

SEQ ID NO: 14321 - protein, 331 aa, Escherichia coli
MKKTVVIGLAVVVLAAVVAGGYWWYQSRQDNGLTLYGNVDIRTVSLSFRVGGRVESLAVDEGDAIKAGQVLGELDHKPYEIALMQAKAGVSVAQAQYDLMLAGYRDEEIAQAAAAVKQAQAAYDYAQNFYNRQQGLWKSRTISANDLENARSSRDQAQATLKSAQDKLRQYRSGNREQDIAQAKASLEQAQAQLAQAELNLQDSTLVAPSDGTLLTRAVEPGTVLNEGGTVFTVSLTRPVWVRAYVDERNLDQAQPGRKVLLYTDGRPNKPYHGQIGFVSPTAEFTPKTVETPDLRTDLVYRLRIVVTDADDALRQGMPVTVQFGDEAGHE

SEQ ID NO: 14322 - protein, 233 aa, Escherichia coli; identical to SEQ ID NO: 3276

SEQ ID NO: 14323 - protein, 673 aa, Escherichia coli
MKMTRLYPLALGGLLLPAIANAQTSQQDESTLVVTASKQSSRSASANNVSSTVVSAPELSDAGVTASDKLPRVLPGLNIENSGNMLFSTISLRGVSSAQDFYNPAVTLYVDGVPQLSTNTIQALTDVQSVELLRGPQGTLYGKSAQGGIINIVTQQPDSTPRGYIEGGVSSRDSYRSKFNLSGPIQDGLLYGSVTLLRQVDDGDMINPATGSDDLGGTRASIGNVKLRLAPDDQPWEMGFAASRECTHATQDAYVGWNDIKGRKLSISDGSPDPYMRRCTDSQTLSGKYTTDDWVFNLISAWQQQHYSRTFPSGSLIVNMPQRWNQDVQELRAATLGDARTVDMVFGLYRQNTREKLNSAYDMPTMPYLSSTGYTTAETLAAYSDLTWHLTDRFDIGGGVRFSHDKSSTQYHGSMLGNPFGDQGKSNDDQVLGQLSAGYMLTDDWRVYTRVAQGYKPSGYNIVPTAGLDAKPFVAEKSINYELGTRYETADVTLQAATFYTHTKDMQLYSGPVGMQTLSNAGKADATGVELEAKWRFAPGWSWDINGNVIRSEFTNDSELYHGNRVPFVPRYGAGSSVNGVIDTRYGALMPRLAVNLVGPHYFDGDNQLRQGTYATLDSSLGWQATERMNISVYVDNLFDRRYRTYGYMNGSSAVAQVNMGRTVGINTRIDFF

SEQ ID NO: 14324 - protein, 118 aa, Escherichia coli [sequence omitted]

SEQ ID NO: 14325 - protein, 224 aa, Escherichia coli; identical to SEQ ID NO: 3165

SEQ ID NO: 14326 - protein, 729 aa, Escherichia coli; identical to SEQ ID NO: 11950

SEQ ID NO: 14327 - protein, 162 aa, Escherichia coli; identical to SEQ ID NO: 1965

SEQ ID NO: 14328 - protein, 231 aa, Escherichia coli; identical to SEQ ID NO: 4774

SEQ ID NO: 14329 - protein, 478 aa, Escherichia coli; identical to SEQ ID NO: 2405

SEQ ID NO: 14330 - protein, 258 aa, Escherichia coli
MRQYRLLSPMIKVVIVLFSLLFSTAQAGLVIGGTRFAYPENQSSISVELKNTSDRDMLVKVAVSPDDARQLTGTVESLPSYSETVFIATPPLFVLKPDKNTKIRINRVGGSLPADRESLFILNVAALPTLENSHSVKTDNQLQIAVRNRMKIFYRPSNLSEDPNMSYQKLRWARKNEIVTVYNPGPRYVTLYNLHVDGKVIDGGMVAPFSHRQQSWCKSQGVCEIAWQTLDIYNNVLPILKVKLNPSQLDVTGFAFSQ

SEQ ID NO: 14331 - protein, 236 aa, Escherichia coli; identical to SEQ ID NO: 3286

SEQ ID NO: 14332 - protein, 402 aa, Escherichia coli; identical to SEQ ID NO: 4768

SEQ ID NO: 14333 - protein, 203 aa, Escherichia coli; identical to SEQ ID NO: 2008

SEQ ID NO: 14334 - protein, 732 aa, Escherichia coli
MMRKKYMPRALGPLLLVVLSPVAAQQNDDNEIIVSASRSNRTVAEMAQTTWVIENAELEQQIQGGKELKDALAQLIPGLDVSSQSRTNYGMNMRGRPLVVLIDGVRLNSSRSDSRQLDSVDPFNIDHIEVISGATALYGGGSTGGLINIVTKKGQPETMMEFEAGTKSGFNSSKDHDERIAGAVSGGNDHISGRLSVAYQKFGGWFDGNGDATLLDNTQTGLQHSNRLDIMGTGTLNIDESRQLQLITQYYKSQGDDNYGLNLGKGFSAISGSSTPYVSKGLNSDRIPGTERHLISLQYSDSDFLGQELVGQVYYRDESLRFYPFPTVNANKQATAFSSSQQDTDQYGMKLTLNSQLMDGWQITWGLDAEHERFTSNQMFFDLAQASASGGMNNHKIYTTGRYPSYDITNLAAFLQSSYDINDIFTVSGGVRYQYTENRVDDFIGYTQQQKIAAGKAISADAIPGGSVDYDNFLFNAGLLMHITERQQAWFNFSQGVALPDPGKYYGRGIYGAAVNGHLPLTKSVNVSDSKLEGVKVDSYELGWRFTGDNLRTQIAAYYSLSNKSVERNKDLTISVKDDRRRIYGVEGAVDYLIPDTDWSTGANFNVLKTESKVNGQWQKYNVKESSPSKATAYISWAPDPWSLRVQSTTSFDVSDAEGNDINGYTTVDFISSWQLPVGTLSFSVENLFDRDYTTVWGQRAPLYYSPGYGPASLYDYKGRGRTFGLNYSVLF

SEQ ID NO: 14335 - protein, 673 aa, Escherichia coli; identical to SEQ ID NO: 3295

SEQ ID NO: 14336 - protein, 713 aa, Escherichia coli; identical to SEQ ID NO: 11959

SEQ ID NO: 14337 - protein, 659 aa, Escherichia coli
MLPAIANAQTSQQDESTLVVTASKQSSRSASANNVSSTVVSAPELSDAGVTASDKLPRVLPGLNIENSGNMLFSTISLRGVSSAQDFYNPAVTLYVDGVPQLSTNTIQALTDVQSVELLRGPQGTLYGKSAQGGIINIVTQQPDSTPRGYIEGGVSSSDSYRSKFNLSGPIEDGLLYGSVTLLRQVDDGDMINPATGSDDLGGTRASIGNVKLRLAPDDQPWEMGFAASRECTRATQDAYVGWNDIKGRKLSISDGSPDPYMRRCTDSQTLSGKYTTDDWVFNLISAWQQQHYSRTFPSGSLIVNMPQRWNQDVQELRAATLGDARTVDMVFGLYRQNTREKLNSAYDMPTMPYLSSTGYTTAETLAAYSDLTWHLTDRFDIGGGVRFSHDKSSTQYHGSMLGNPFGDQGKSNDDQVLGQLSAGYMLTDDWRVYTRVAQGYKPSGYNIVPTAGLDAKPFVAEKSINYELGTRYETADVTLQAATFYTHTKDMQLYSGPVGMQTLSNAGKADATGVELEAKWRFAPGWSWDINGNVIRSEFTNDSELYHGNRVPFVPRYGAGSSVNGVIDTRYGALMPRLAVNLVGPHYFDGDNQLRQGTYATLDSSLGWQATERMNISVYVDNLFDRRYRTYGYMNGSSAVAQVNMGRTVGINTRIDFF

SEQ ID NO: 14338 - protein, 731 aa, Escherichia coli; identical to SEQ ID NO: 3290

SEQ ID NO: 14339 - protein, 412 aa, Escherichia coli
MKQWIAALLLMLIPGVQAAKPQKVTLMVDDVPVAQVLQALAEQEKLNLVVSPDVSGTVSLHLTDVPWKQALQTVVKSAGLITRQEGNILSVHSVAWQNDNVARQEVEQTRAQANLPLENRNITLQYADAGELAKAGEKLLSAKGSMTVDKRTNRLLLRDNKTALSTLEQWVSQMDLPVGQVELSAHIVTINEKSLRELGVKWTLADAQQAGGVGQVTTLGSDLSVATATTHIGFNIGRINGRLLDLELSALEQKQQLDIIASPRLLASHLQPASIKQGSEIPYQVSSGESGATSVEFKEAVLGMEVTPTVLQKGRIRLKLHISQNVPGQVLQQADGEVLAIDKQEIETQVEVKSGETLALGGIFTRKNKSGQDSVPLLGDIPWFGQLFRHDGKEDERRELVVFITPRLVSSE

SEQ ID NO: 14340 - protein, 746 aa, Escherichia coli; identical to SEQ ID NO: 4597

SEQ ID NO: 14341 - protein, 231 aa, Escherichia coli
MMKHMRIWAVLASFLVFFYIPQSYAGVALGATRVIYPEGQKQVQLAVTNNDDKSSYLIQSWIENAEGKKDARFVITPPLFSMQGKKENTLRIIDATNGQMPEDRESLFWVNVKAIPAMDKAKTGENYLQFAIVSRIKLLYRPQGLVIPPEQAPGKLEFTRENGGLTLLNPTPYYLTVTDLKAGNKSLENTMVPPQGKVTVNIPGGYTGGDITYKTINDYGALTEQVRGGVK

SEQ ID NO: 14342 - protein, 816 aa, Escherichia coli; identical to SEQ ID NO: 4456

SEQ ID NO: 14343 - protein, 828 aa, Escherichia coli; identical to SEQ ID NO: 2381

SEQ ID NO: 14344 - protein, 838 aa, Escherichia coli; identical to SEQ ID NO: 2916

SEQ ID NO: 14345 - protein, 678 aa, Escherichia coli; identical to SEQ ID NO: 9215

SEQ ID NO: 14346 - protein, 729 aa, Escherichia coli; identical to SEQ ID NO: 2948

SEQ ID NO: 14347 - protein, 213 aa, Escherichia coli; identical to SEQ ID NO: 2232

SEQ ID NO: 14348 - protein, 200 aa, Escherichia coli; identical to SEQ ID NO: 1788

SEQ ID NO: 14349 - protein, 274 aa, Escherichia coli; identical to SEQ ID NO: 2891

SEQ ID NO: 14350 - protein, 879 aa, Escherichia coli; identical to SEQ ID NO: 4479

SEQ ID NO: 14351 - protein, 656 aa, Escherichia coli; identical to SEQ ID NO: 6440

SEQ ID NO: 14352 - protein, 397 aa, Escherichia coli; identical to SEQ ID NO: 9207

SEQ ID NO: 14353 - protein, 271 aa, Escherichia coli
DPEVLKQAVNDAVANIPVPADGKSITPDDVRPMLEQMVKEAVSHIPVPRDGRDYDPEVLQKAVNDAVANIPQPADGKSLTPDDVRPMLEQMVKEAVSHIPVPRDGRDYDPDVLQKAVLDAVRALPAPQDGRDATALEIIPAIDDQKSFPRGTYATHQGGLWRAYEKTHGMRGWECLVDGVADIDVSMTGERSFTVVVRQSSGQRTEKTFSLPVMLYRGVFRAGETYHPGDTVTWGGSLWHCNSMTGDKPGEAHSSGWTLAAKRGRDAGGGK

SEQ ID NO: 14354 - protein, 715 aa, Escherichia coli; identical to SEQ ID NO: 3971

SEQ ID NO: 14355 - protein, 108 aa, Escherichia coli; identical to SEQ ID NO: 3602

SEQ ID NO: 14356 - protein, 236 aa, Escherichia coli; identical to SEQ ID NO: 3970

SEQ ID NO: 14357 - protein, 747 aa, Escherichia coli; identical to SEQ ID NO: 9180

SEQ ID NO: 14358 - protein, 241 aa, Escherichia coli; identical to SEQ ID NO: 2887

SEQ ID NO: 14359 - protein, 351 aa, Escherichia coli; identical to SEQ ID NO: 2872

SEQ ID NO: 14360 - protein, 760 aa, Escherichia coli; identical to SEQ ID NO: 2078

SEQ ID NO: 14361 - protein, 203 aa, Escherichia coli; identical to SEQ ID NO: 2201

SEQ ID NO: 14362 - protein, 229 aa, Escherichia coli; identical to SEQ ID NO: 9220

SEQ ID NO: 14363 - protein, 229 aa, Escherichia coli; identical to SEQ ID NO: 4047

SEQ ID NO: 14364 - protein, 840 aa, Escherichia coli; identical to SEQ ID NO: 9107

SEQ ID NO: 14365 - protein, 230 aa, Escherichia coli; identical to SEQ ID NO: 2995

SEQ ID NO: 14366 - protein, 432 aa, Escherichia coli; identical to SEQ ID NO: 2026

SEQ ID NO: 14367 - protein, 233 aa, Escherichia coli; identical to SEQ ID NO: 3548

SEQ ID NO: 14368 - protein, 111 aa, Escherichia coli; identical to SEQ ID NO: 2911

SEQ ID NO: 14369 - protein, 660 aa, Escherichia coli; identical to SEQ ID NO: 4092

SEQ ID NO: 14370 - protein, 232 aa, Escherichia coli; identical to SEQ ID NO: 9194

SEQ ID NO: 14371 - protein, 203 aa, Escherichia coli; identical to SEQ ID NO: 2009

SEQ ID NO: 14372 - protein, 518 aa, Escherichia coli; identical to SEQ ID NO: 2351

SEQ ID NO: 14373 - protein, 869 aa, Escherichia coli; identical to SEQ ID NO: 9160

SEQ ID NO: 14374 - protein, 539 aa, Escherichia coli; identical to SEQ ID NO: 3050

SEQ ID NO: 14375 - protein, 118 aa, Escherichia coli [sequence omitted]

SEQ ID NO: 14376 - protein, 883 aa, Escherichia coli; identical to SEQ ID NO: 2822

SEQ ID NO: 14377 - protein, 266 aa, Escherichia coli; identical to SEQ ID NO: 9192

SEQ ID NO: 14378 - protein, 193 aa, Escherichia coli; identical to SEQ ID NO: 2250

SEQ ID NO: 14379 - protein, 784 aa, Escherichia coli; identical to SEQ ID NO: 4454

SEQ ID NO: 14380 - protein, 207 aa, Escherichia coli; identical to SEQ ID NO: 2211

SEQ ID NO: 14381 - protein, 243 aa, Escherichia coli; identical to SEQ ID NO: 4409

SEQ ID NO: 14382 - protein, 700 aa, Escherichia coli; identical to SEQ ID NO: 2926

SEQ ID NO: 14383 - protein, 614 aa, Escherichia coli; identical to SEQ ID NO: 4469

SEQ ID NO: 14384 - protein, 368 aa, Escherichia coli; identical to SEQ ID NO: 2370

SEQ ID NO: 14385 - protein, 170 aa, Escherichia coli; identical to SEQ ID NO: 2565

SEQ ID NO: 14386 - protein, 445 aa, Escherichia coli; identical to SEQ ID NO: 4474

SEQ ID NO: 14387 - protein, 412 aa, Escherichia coli; identical to SEQ ID NO: 9102

SEQ ID NO: 14388 - protein, 512 aa, Escherichia coli; identical to SEQ ID NO: 2813

SEQ ID NO: 14389 - protein, 478 aa, Escherichia coli; identical to SEQ ID NO: 2404

SEQ ID NO: 14390 - protein, 362 aa, Escherichia coli; identical to SEQ ID NO: 2998

SEQ ID NO: 14391 - protein, 430 aa, Escherichia coli; identical to SEQ ID NO: 2617

SEQ ID NO: 14392 - protein, 878 aa, Escherichia coli; identical to SEQ ID NO: 4404

SEQ ID NO: 14393 - protein, 331 aa, Escherichia coli; identical to SEQ ID NO: 2705

SEQ ID NO: 14394 - protein, 241 aa, Escherichia coli; identical to SEQ ID NO: 3582

SEQ ID NO: 14395 - protein, 162 aa, Escherichia coli; identical to SEQ ID NO: 1969

SEQ ID NO: 14396 - protein, 231 aa, Escherichia coli; identical to SEQ ID NO: 2868

SEQ ID NO: 14397 - protein, 366 aa, Escherichia coli; identical to SEQ ID NO: 3520

SEQ ID NO: 14398 - protein, 227 aa, Escherichia coli; identical to SEQ ID NO: 3570

SEQ ID NO: 14399 - protein, 713 aa, Escherichia coli; identical to SEQ ID NO: 3523

SEQ ID NO: 14400 - protein, 191 aa, Escherichia coli; identical to SEQ ID NO: 2727

SEQ ID NO: 14401 - protein, 208 aa, Escherichia coli; identical to SEQ ID NO: 1949

SEQ ID NO: 14402 - protein, 367 aa, Escherichia coli; identical to SEQ ID NO: 2431

SEQ ID NO: 14403 - protein, 746 aa, Escherichia coli; identical to SEQ ID NO: 2949

SEQ ID NO: 14404 - protein, 75 aa, Escherichia coli; identical to SEQ ID NO: 4451

SEQ ID NO: 14405 - protein, 359 aa, Escherichia coli; identical to SEQ ID NO: 2332

SEQ ID NO: 14406 - protein, 819 aa, Escherichia coli; identical to SEQ ID NO: 9125

SEQ ID NO: 14407 - protein, 517 aa, Escherichia coli; identical to SEQ ID NO: 2462

SEQ ID NO: 14408 - protein, 659 aa, Escherichia coli; identical to SEQ ID NO: 2942

SEQ ID NO: 14409 - protein, 161 aa, Escherichia coli; identical to SEQ ID NO: 2582

SEQ ID NO: 14410 - protein, 567 aa, Escherichia coli; identical to SEQ ID NO: 3518

SEQ ID NO: 14411 - protein, 233 aa, Escherichia coli; identical to SEQ ID NO: 2005

SEQ ID NO: 14412 - protein, 252 aa, Escherichia coli; identical to SEQ ID NO: 3543

SEQ ID NO: 14413 - protein, 228 aa, Escherichia coli; identical to SEQ ID NO: 5492

SEQ ID NO: 14414 - protein, 237 aa, Escherichia coli; identical to SEQ ID NO: 2816

SEQ ID NO: 14415 - protein, 161 aa, Escherichia coli; identical to SEQ ID NO: 2582

SEQ ID NO: 14416 - protein, 816 aa, Escherichia coli
MLRTTRWVAAIIFLYSFPGYAEETFDTHFMIGGMRGEKVSEYRFDNKQPLPGNYELDFYVNHQWRGKKDITIPESPAKPCLPKVLLTTLGVKTDNLNTEDNCILLDEAVHGGQYQWDISEHRLNLTVPQAYINELERGYVPPESWDRGIDVFYTSYNLSQYRSYDSNNNSNTASYGRFNSGLNLFSWQLHSDASYSKPDDMKGKWQSNTLYLERGWSQILSTVQIGENYTSSLIFDSLRFSGIRLFRDMQMLPDSMQSFTPLVQGVAQSNALITVSQNGYTIYQKEVPPGPFTIADLQLSGSGSDLDVSIKEADGSVRSFLVPYSSVPNMLQPGVSNFDFIAGRSQIYGVKNQEDFLEANYIYGLNNLLTLYGGTILSDNYNAITLGNGWNTPLGAISFDATRSSSKLNNDTRHEGTSYQVAYNKYLLQTATHFSVAAWRYASQDYRTFSDHLYENDKINHQSDYDDFYDIGRKNSLSANIMQPLSNNLGNVSLSALWRNYWGRSGNAKDYQFSYSNSWQRISYTFSASQSYDENDKEEERFNLFISIPFYWGDDIAKTRHQINLSNSTSFSKDGYSSNNTGITGIAGEHDQLNYGIYVNQQQQNNDTSLGTNLSWRTPVATIDGSYSHSKNAWQSGGSISSGLVVWPGGINITNQLSDTFAILDAPGLEGAHINGQKYNRTNSKGQVVYDLMIPHRENHLVLDIANSESETELQGNRQIIAPYRGAVSYVQFTTDQRKPRYIQALRPDGSPLTFGYDVLDLQENNIGVVGQGSRLFIRVDEIPTGIKVALNDEQNLFCTITFQHVIDENKTYICQ

SEQ ID NO: 14417 - protein, 266 aa, Escherichia coli; identical to SEQ ID NO: 1894

SEQ ID NO: 14418 - protein, 852 aa, Escherichia coli
MKTGVTGLALAVMVACVMFRAESGIARTYSFDAAMLKGGGKGVDLTLFEEGGQLPGIYPVDIILNGSRVDSQEMAFHAERDAEGRPYLKTCLTREMLARYGVRIEEYPALFRASGEGRGASVAEEACADLTAIPQATESYQFAAQQLVLGIPQVALRPQLRGIAPEALWDDGIPAFLLNWQADAGRSEYRGYGKRVTDSYWVSLQPGINIGPWRVRNLTTWNRSSGQSGKWESSYIRAERGLNGIKSRLTLGEDYTPSDIFDSVPFRGAMMSSDESMVPYNLREFAPVVRGIARTQARIEVRQNGYLIQSQTVAPGAFALTDLPVTGSGSDLQVTVLESDGTAQVFTVPFTTPAIALREGYLKYNVTAGQYRSSDDAVEHTSLGQVTAMYGLPWGLTVYGGLQGAEHYQSAALGLGWSLGRLGAVSLDTTHSRGQQKGHDYETGDTWRIRYNKSFELTGTSFTAASYQYSSDGYHTLPDVLDTWRDDRYAYRHTENRSRRTTLSLSQSLGQWGYVGLNGSRDEYRDRPHRDYFGASYSTSWNNISLSVNWSRNRNSGGYYGGWSRTEDSVSMWMSVPLGRWFGGTDNDISATAQMQRSTGQDTRYEAGLNGRAFDRRLYWDVREQMVPGSESHADTSRLNLTWYGTYGELTGMYSYSSTMRQLNAGMSGSMVAHSEGVTFGQRTGDTVALIAAPGVSGASVGGWPGVRTDFRGYTLAGYASPYQENVLTLDPTTFPEDAEVPQTDSRVVPTKGAVVRAGFRTRVGGRALVSLARQDGTPLPFGAVVTVEGEAGQAAGSAGVVGDRGEVYLSGLKESGKLKAQWGENSLCHADYRLPEEKGPAGIFLTRTVCM

SEQ ID NO: 14419 - protein, 883 aa, Escherichia coli
MLNHSNFRLRGIACYIALAISGGSVNAWADDSIQFDPRFLELKGDTKIDLGKFSKKGYVDAGKYNLRVFINKQPLSDEYDINWYVSENDPTKTYACLTPELVAALGLKEGIAKSLQWTHNDECLKPGQLDGMEVENDLSQSALLLTVPQAYLEYTSSDWDPPSRWDDGIPGLIADYSLNAQTRHQEQGGEDSHDISGNGTVGANLGAWRFRADWQSDYQHTRSNDDEDDDSSNSTTSKNWDWSRYYAWRALPSLKAKLSLGEDYLNSDIFDGFNYIGSSVSTDDQMLPPNLRGYAPDVSGVAHSSAKVTISQMGRVLYETQVPAGPFRIQDIGDSVSGTLHVRVEEQNGQVQEYDVTTASMPFLTRQGQVRYKVMMGRPEDWNHRTEGGFFSGGEASWGVADGWSLYGGALADEHYQSAAMGVGRDLAQFGALAFDVTHSHVNLDHDSAYGKGKLDGNSFRVSYAKDFDELNSRVTFAGYRFSEKNFMTMSEYLDANQSDMARTGNDKEMYTITYNQNFAAAGVSIYLNYSHRTYWDRPEQTNYNLMFSHYFNMGSIRNMSISVTGYRYEYDDNADKGMYLSMSIPWSDSSTVTYNGSYGSGSDSSQVGYFKRVDDATHYQVNVGTSEQHGSVDGYLSHDGSLAKVDLSANYHEGEYRSAGIALQGGATLTAHGGALHRTQSMGGTRLLIDADGIANVPVESNGAPVYTNMFGKAVVADINNYYRNQAYIDLNNLPEDAEATQSVVQATLTEGAIGYRKFKVISGQKAMAVLRLRDGSYPPFGAEVKNDEQQQVGIVDDEGNVYLAGVNAGEHMTVFWEGSAQCEIVLPKPLPADLFSGLLLPCEQKGTAAPDSSAPEIKPVIQDQTRQVTPTEAPTSISTTQ

SEQ ID NO: 14420 - protein, 229 aa, Escherichia coli
MANGNASIKGYNCNVSQGLVIIMPLPDFRLIRLLPLAALVLTACSVTTPKGPGKSPDSPQWRQHQQDVRNLNQYQTRGAFAYISDQQKVYARFFWQQTGQDRYRLLLTNPLGSTELELNAQPGNVQLVDNKGQRYTSDDAEKMIGKLTGMPIPLNSLRQWILGLPGDATDYKLDDQYRLSEITYSQNGKNWKVVYGGYDTKTQPAMPANMELTDGGQRIKLKMDNWIVK

SEQ ID NO: 14421 - protein, 891 aa, Escherichia coli
MILVDLLKATPTFNLARIYHSRKQNVTITSTKKYHNHLTRIATFCALLYSNSALCAELVEYDHTFLMGKDASNIDLSRYTEGNPTLPGIYDVSVYVNDQPIMSQSIAFTVIEGKKNAQACITQKNLLQFHISSSDKNSEKAILLKRDEDLGDCLNLAEMIPQSSIRYDVNDQRLDIDVPQAWIMKNYQNYVDPSLWENGINAAMLSYNLNGYHSESPGRTNDSIYAAFNGGINLGAWRLRASGNYNWMTNVHSDYDFQNRYLQRDLASLRSQLVIGESYTTGETFDSVSIRGIRLYSDSRMLPPVLASFAPIIHGVANTNAKVTVMQNGYKIYETTVPPGAFAIDDLSPSGYGSDLIVTIEEADGTKRTFSQPFSSVVQMLRPGVGRWDISAGQVLKDSIQDEPNLFQASYYYGLNNYLTGYTGIQLTDNNYTAGLLGLGMNTPVGAFSVDVTHSNVSIPDDKTYQGQSYRISWNKLFENTSTSLNIAAYRYSTQHYLGLNDALTLIDEVEHPEQELEPKSMRNYSRMKNQVTVSINQPLKFEKKDYGSFYLSGSWSDYWASGQNSTNYSIGYSNSASWGSYSISAQRSLNEDGQTDDSIYLSFTIPIENLLGTEHRSSGFQSIDTQLNSDFKGNNQLNISSSGYSDTNRISYSVNTGYMMNKSSDDLSYIGGYASYESPWGTLSGSASASSDNSRQFSLNTDGGFVLHSGGLTFSNDSFSDSDTLAVIQAPGAKGARINYGNSTVDRWGYGVTSALSPYHENRIALDINDLENDVELKSTSTVAVPRQGAVVFADFETVQGQSAILNIVRSDGKNIPFAADIYDEQNNIIGNVGQGGQAFVRGIEQEGNIRITWIEEGKPVSCFAHYQQNTTSEKIAQSIILNGLRCQIQ

SEQ ID NO: 14422 - protein, 878 aa, Escherichia coli
MSYLNLRLYQRNTQCLHIRKHRLAGFFVRLFVACAFSAQAPLSSAELYFNPRFLADDPQAVADLSRFENGQELPPGTYRVDIYLNNGYMATRDVTFNTGDSEQGIVPCLTRAQLASMGLNTASVSGMNLLADDACVPLTSMIHDATAHLDVGQQRLNLTIPQAFMSNRARGYIPPELWDPGINAGLLNYNFSGNSVQNRIGGNSHYAYLNLQSGLNIGAWRLRDNTTWSYNSSDRSSGSKNKWQYINTWLERDIIPLRSRLTLGDGYTQGDIFDGINFRGAQLASDDNMLPDSQRGFAPVIHGIARGTAQVTIKQNGYDIYNSTVPPGPFTINDIYAAGNSGDLQVTIKEADGSTQIFTVPYSSVPLLQREGHTRYSITAGEYRSGNAQQEKPRFFQSTLLHGLPAGWTIYGGTQLADRYRAFNFGIGKNMGALGALSVDMTQANSTLPDDSQHDGQSVRFLYNKSLNESGTNIQLVGYRYSTSGYFNFADTTYSRMNGYNIETQDGVIQVKPKFTDYYNLAYNKRGKLQLTVTQQLGRTSTLYLSGSHQTYWGTSNVDEQFQAGLNTAFEDINWTLSYSLTKNAWQKGRDQMLALNVNIPFSHWLRSDSKSQWRHASASYSMSHDLNGRMTNLAGVYGTLLEDNNLSYSVQTGYAGGGDGNSGSTGYATLNYRGGYGNANIGYSHSDDIKQLYYGVSGGVLAHANGVTLGQPLNDTVVLVKAPGAKDAKVENQTGVRTDWRGYAVLPYATEYRENRVALDTNTLADNVDLDNAVANVVPTRGAIVRAEFKARVGIKLLMTLTHNNKPLPFGAMVTSESSQSSGIVADNGQVYLSGMPLAGKVQVKWGEEENAHCVANYQLPPESQQQLLTQLSAECR

SEQ ID NO: 14423 - protein, 266 aa, Escherichia coli; identical to SEQ ID NO: 1894

SEQ ID NO: 14424 - protein, 881 aa, Escherichia coli; identical to SEQ ID NO: 2762

SEQ ID NO: 14425 - protein, 434 aa, Escherichia coli
MNVIQNNKRIEMNTTLRALSVALAAALIAPSAFAASAAIPTIDFHGYMRAGVGVSSDGSEVEWQKNKLGRLGNESDTYGELELGSEVYKKDDVSFYLDSMVSMVSDGSNDNETTLNDDAQFGLRQLNLQIKGLIPGDPNAVIWGGKRYYQRHDLHIIDTKYWNISGSGAGVENYTLGPGAVSLAWIRGDANDVDYRVDGDSNVNINYIDLRYAGWKPWAGSWTEFGIDYAMPNTTKKQDSYGGLYDADNGVMLTGEISQDMLGGYNKTVLQYANKGLAQNMVSQGGGWYDMWNYVNDATGYRVINTGLIPITEKFSINHVLTWGSADDITDYTDKTRMLSLVARGQYQFTDYVRLIGEVGGFYQKDSYNNGTSYKQAGEKYTIALGLADGPDFMSRPELRIFASYLNDSEDGKPFEDQTANNTWNFGVQVEAWW

SEQ ID NO: 14426 - protein, 869 aa, Escherichia coli; identical to SEQ ID NO: 3173

SEQ ID NO: 14427 - protein, 826 aa, Escherichia coli
MLRMTPLASAIVALLLGIEAYAAEETFDTHFMIGGMKDQQVANIRLDDNQPLPGQYDIDIYVNKQWRGKYEIIVKDNPQETCLSREVIKRLGINSDNFASGKQCLTFEQLVQGGSYSWDIGVFRLDFSVPQAWVEELESGYVPPENWERGINAFYTSYYVSQYYSDYKASGNNKSTYVRFNSGLNLLGWQLHSDASFSKTNNNPGVWKSNTLYLERGFAQLLGTLRVGDMYTSSDIFDSVRFSGVRLFRDMQMLPNSKQNFTPRVQGIAQSNALVTIEQNGFVVYQKEVPPGPFAITDLQLAGGGADLDVSVKEADGSVTTYLVPYAAVPNMLQPGVSKYDFAAGRSHIEGASKQSDFVQAGYQYGFNNLLTLYGGSMVANNYYAFTLGTGWNTRIGAISVDATKSHSKQDNGDVFDGQSYQIAYNKFVSQTSTRFGLAAWRYLSRDYRTFNDHVWANNKDNYRRDKNDIYDIADYYQNDFGRKNSFSANMSQSLPEGWGSVSLSTLWRDYWGRSGSSKDYQLSYSNNWRRISYTLAASQAYDENHHEEKRFNIFISIPFDWGDDVTTPRRQIYMSNSTTFDDQGVASNNTGLSGTVGSRDQFNYGVNLSYQHQENETTAGANLTWNAPVATVNGSYSQSSTYRQAGASVSGGIVAWSGGVNLANRLSETFAVMNAPGIKDAYVNGQKYRTTNRNGVVIYDGMTPYRENHLMLDVSQSDSEAELRGNRKIAAPYRGAVVLVNFDTDQRKPWFIKALRADGQPLMFGYEVNDIHGHNIGVVGQGSQLFIRTNEVPPSVNVAIDKQQGLSCTITFGKEIDESRNYICQ

SEQ ID NO: 14428 - protein, 863 aa, Escherichia coli
MIMAAVPGQKLVHCNKKYKNTGHQGMPQRHHQGHKRTPKQLALIIKRCLPMVLTGSGMLCTTANAEEYYFDPIMLETTKSGMQTTDLSRFSKKYAQLPGTYQVDIWLNKKKVSQKKITFTANAEQLLQPQFTVEQLRELGIKVDEIPALAEKDDDSVINSLEQIIPGTAAEFDFNHQQLNLSIPQIALYRDARGYVSPSRWDDGIPTLFTNYSFTGSDNRYRQGNRSQRQYLNMQNGANFGPWRLRNYSTWTRNDQTSSWNTISSYLQRDIKALKSQLLLGESATSGSIFSSYTFTGVQLASDDNMLPNSQRGFAPTVRGIANSSAIVTIRQNGYVIYQSNVSAGAFEINDLYPSSNSGDLEVTIEESDGTQRRFIQPYSSLPMMQRPGHLKYSATAGRYRADANSDSKEPEFAEATAIYGLNNTFTLYGGLLGSEDYYALGIGIGGTLGALGALSMDINRADTQFDNQHSFHGYQWRTQYIKDIPETNTNIAVSYYRYTNDGYFSFNEANTRNWDYNSRQKSEIQFNISQTIFDGVSLYASGSQQDYWGNNDKNRNISVGVSGQQWGVGYSLNYQYSRYTDQNNDRALSLNLSIPLERWLPRSRVSYQMTSQKDRPTQHEMRLDGSLLDDGRLSYSLEQSLDDDNNHNSSLNASYRSPYGTFSAGYSYGNDSSQYNYGVTGSVVIHPHGVTLSQYLGNAFALIDANGASGVRIQNYPGIATDPFGYAVVPYLTTYQENRLSVDTTQLPDNVDLEQTTQFVVPNRGAMVAARFNANIGYRVLVTVSDRNGKPLPFGALASNDDTGQQSIVDEGGILYLSGISSKSQSWTVRWGNQADQQCQFAFSTPDSEPTTSVLQGTAQCH

SEQ ID NO: 14429 - protein, 793 aa, Escherichia coli; identical to SEQ ID NO: 2768

SEQ ID NO: 14430 - protein, 219 aa, Escherichia coli
MSLNFTVIVWLRLSIGGVYVLAFCRSSLKSKKYFIILLALAAIAGLGTHAAWSSNGLPRIDNKTLARLAQQHPVVVLFRHAERCDRSTNQCLSDKTGITVKGTQDARELGNAFSADIPDFDLYSSNTVRTIQSATWFSAGKKLTVDKRLLQCGNEIYSAIKNLQSKAPDKNIVIFTHNHCLTYIAKDKRDATFKPDYLDGLVMHVEKGKVYLDGEFVNH

SEQ ID NO: 14431 - protein, 266 aa, Escherichia coli; identical to SEQ ID NO: 3745

SEQ ID NO: 14432 - protein, 207 aa, Escherichia coli; identical to SEQ ID NO: 2211

SEQ ID NO: 14433 - protein, 161 aa, Escherichia coli; identical to SEQ ID NO: 2582

SEQ ID NO: 14434 - protein, 882 aa, Escherichia coli
MPNHSNFRLRGIACYIALAISGGSVNAWADDSIQFDPRFLELKGDTKIDLGKFSKKGYVDAGKYNLRVFINKQPLSDEYDINWYVSENDPTKNYACLTPELVAALGLKEGIAKSLQWTHNDECLKPGQLDGMEVENDLSQSALLLTVPQAYLEYTSSDWDPPSRWDDGIPGLIADYSLNAQTRHQEQGGEDSHDISGNGTVGANLGAWRFRADWQSDYQHTRSNDDDDDSSNSTTSKHWDWSRYYAWRALPSLKAKLSLGEDYLNSDIFDGFNYIGSSVSTDDQMLPPNLRGYAPDVSGVAHSSAKVTISQMGRVLYETQVPAGPFRIQDIGDSVSGTLHVRVEEQNGQVQEYDVTTASMPFLTRQGQVRYKVMMGRPEDWNHKTEGGFFSGGEASWGVADGWSLYGGALADKHYQSAAMGGGRDLAQFGALAFDVTHSHVNLDHDSAYGKGKLDGNSFRVSYAKDFDELNSRVTFAGYRFSEKNFMTMSEYLDANQSDMARTGNDKEMYTITYNQNFAAAGVSIYLNYSHRTYWDRPEQTNYNLMFSHYFNMGSIRNMSISVTGYRYEYDDNADKGMYLSMSIPWSDSSTVTYNGSYGSGSDSSQVGYFKRVDDATHYQVNVGTSEQHGSVDGYLSHDGSLAKVDLSANYHEGEYRSAGIALQGGATLTAHGGALHRTQNMGGTRLLIDADGIANVPVESNGAPVYTNMFGKAVVADINNYYRNQAYIDLNNLPEDAEATQSVVQATLTEGAIGYRKFKVISGQKAMAVLRLRDGSYPPFGAEVKNDEQQQVGIVDDEGNVYLAGVNAGEHMMVFWEGSAQCEIVLPKPLPADLFSGLLLPCEQKGTAAPDSSAPEIKPVIQDQTRQVTPTEAPTSISATQ

SEQ ID NO: 14435 - protein, 790 aa, Escherichia coli
MSQSIAFAVIEGKKNAQACITQKNLLQFHISSPDKNSEKAILLKRDEDLGDCLNLAEMIPQSSIRYDVNDQRLDIDVPQAWIMKNYQNYVDPSLWENGINAAMLSYNLNGYHSESPGRTNDSIYAAFNGGINLGAWRLRASGNYNWMTNVHSDYDFQNRYLQRDLASLRSQLVIGESYTTGETFDSVSIRGIRLYSDSRMLPPVLASFAPIIHGVANTNAKVTVMQNGYKIYETTVPPGAFAIDDLSPSGYGSDLIVTIEEADGTKRTFSQPFSSVVQMLRPGVGRWDISAGQVLKDSIQDEPNLFQASYYYGLNNYLTGYTGIQLTDNNYTAGLLGLGMNTPVGAFSVDVTHSNVSIPDDKTYQGQSYRISWNKLFENTSTSLNIAAYRYSTQHYLGLNDALTLIDEVEHPEQELEPKSMRNYSRMKNQVTVSINQPLKFEKKDYGSFYLSGSWSDYWASGQNSTNYSIGYSNSASWGSYSISAQRSLNEDGQTDDSIYLSFTIPIENLLGTEHRSSGFQSIDTQLNSDFKGNNQLNISSSGYSDTNRISYSVNTGYMMNKSSDDLSYIGGYASYESPWGTLSGSASASSDNSRQFSLNTDGGFVLHSGGLTFSNDSFSDSDTLAVIQAPGAKGARINYGNSTVDRWGYGVTSALSPYHENRIALDINDLENDVELKSTSTVAVPRQGAVVFADFETVQGQSAIMNIVRSDGKNIPFAADIYDEQNNIIGNVGQGGQAFVRGIGQEGNIRITWIEEGKPVSCFAHYQQNTTSEKIAQSIILNGLRCQIQ

SEQ ID NO: 14436 - protein, 836 aa, Escherichia coli; identical to SEQ ID NO: 7852

SEQ ID NO: 14437 - protein, 237 aa, Escherichia coli; identical to SEQ ID NO: 1814

SEQ ID NO: 14438 - protein, 871 aa, Escherichia coli
MHQVLILPRFARLTFALGLATAVFPVDAEYYFNPRFLSNDLAESVDLSAFTKGREAPPGTYRVDIYLNDEFMASRDITFIADDNNADLIPCLSTDLLVSLGIKKSALLDNKEHSADKHVPDNSACTPLQDRLADASSEFDVGQQHLSLSVPQIYVGRMARGYVSPDLWEEGINAGLLNYSFNGNSINNRSNHNAGKSNYAYLNLQSGINIGSWRLRDNSTWSYNSGSSNSSDSNKWQHINTSAERDIIPLRSRLTVGDSYTDGDIFDSVNFRGLKINSTEAMLPDSQHGFAPVIHGIARGTAQVSVKQNGYDVYQTTVPPGPFTIDDINSAANGGDLQVTIKEADGSIQTLYVPYSSVPVLQRAGYTRYALAMGEYRSGNNLQSSPKFVQASLMHGLKGNWTPYGGMQIAEDYQAFNLGIGKDLGLFGAFSFDITQANTTLADDTRHSGQSVKSVYSKSFYQTGTNIQVAGYRYSTQGFYNLSDSAYSRMSGYTVKPPTGDTSEQTLFIDYFNLFYSKRGQEQISISQQLGNYGTTFFSASRQSYWNTSRSDQQISFGLNVPFGDITTSLNYSYSNNIWQNDRDHLLAFTLNVPFSHWMRTDSQSAFRNSNASYSMSNDLKGGMTNLSGVYGTLLPDNNLNYSVQVGNTQGGNTSSGTSGYSSLNYRGAYGNTNVGYSRSGDSSQIYYGMSGGIIAHADGITFGQPLGDTIVLVKAPGADNVKIENQTGIHTDWRGYAILPFATEYRENRVALNANSLADNVELDETVVTVIPTHGAIARATFNAQIGGKVLMTLKYGNKSVPFGAIVTHGENKNGSIVAENGQVYLTGLPQSGKLQVSWGNDKNSNCIVDYKLPAVSPGTLLNQQTAICR

SEQ ID NO: 14439 - protein, 818 aa, Escherichia coli; identical to SEQ ID NO: 8238

SEQ ID NO: 14440 - protein, 831 aa, Escherichia coli
MQELPMLRMPPLASAIVALLLGIEAYAAEETFDTHFMIGGMKDQQVANIRLDDNQPLPGQYDIDIYVNKQWRGKYEIIVKDNPQETCLSREIIKRLGINTDNFASGKQCLTFEQLVQGGSYTWDIGVFRLDFSVPQAWVEELESGYVPPENWERGINAFYTSYYVSQYYSDYKASGNSKSTYVRFNSGLNLLGWQLHSDASFSKTNSNPGGWKSNTLYLERGFAQLLGTLRVGDMYTSSDIFDSVRFSGVRLFRDMQMLPNSKQNFTPRVQGIAQSNALVTIEQNGFVVYQKEVPPGPFAITDLQLAGGGADLDVSVKEADGSVTTYLVPYAAVPNMLQPGVSKYDFAAGRSHIEGASKQSDFVQAGYQYGFNNLLTLYGGSMVANNYYAFTLGTGWNTRIGAISVDATKSHSKQDNGDVFDGQSYQIAYNKFVSQTSTRFGLAAWRYSSRDYRTFNDHVWANNKDNYRRDENDIYDIADYYQNDFGRKNSFSANMSQSLPEGWGSVSLSTLWRDYWGRSGSSKDYQLSYSNNLRRISYTLAASHAYDENHHEEKRFNIFISIPFDWGDDVTTPRRQIYMSNSTTFDDQGVASNNTGLSGTVGSRDQFNYGVNLSYQYQGNETTAGANLTWNAPVATVNGSYSQSSAYRQAGASVSGGIVAWSGGVNLANRLSETFAVMNAPGIKDAYVNGQKYRTTNRNGVVVYDGMTPYRENYLMLDVSQSDSEAELRGNRKIAAPYRGAVVLVNFDTDQRKPWFIKALRADGQPLTFGYEVNDIHGHNIGVVGQGSQLFIRTNEVPPSVNVAIDKQQGLSCTITFGKEIDESKNYICQ

SEQ ID NO: 14441 - protein, 637 aa, Escherichia coli
MKIPTTTDIPQRYTWCLAGICYSSLAILPSFLSYAESYFNPAFLLENGTSVADLSRFERGNHQPAGVYRVDLWRNDEFIGSQDIVFESTTVNTGDKSGGLMPCFNQALLERIGLNSSAFPELAQQQNNKCINLLKAVPDATINFDFAAMRLNITIPQIALLSSAHGYIPPEEWDEGIPALLLNYNFTGNRGNGNDSYFFSELSGINIGPWRLRNNGSWNYFRGNGYHSEQWNNIGTWVQRAIIPLKSELVMGDGNTGSDIFDGVGFRGVRLYSSDNMYPDSQQGFAPTVRGIARTAAQLTIRQNGFIIYQSYVSPGAFEITDLHPTSSNGDLDVTIDERDGNQQNYTIPYSTVPILQREGRFKFDLTAGDFRSGNSQQSSPFFFQGTALGGLPQEFTAYGGTQLSANYTAFLLGLGRNLGNWGAVSLDVTHARSQLADDSRHEGDSIRFLYAKSMNTFGTNFQLMGYRYSTQGFYTLDDVAYRRMEGYEYDYDYDGEHRDEPIIVNYHNLRFSRKDRLQLNISQSLNDFGSLYISGTHQKYWNTSDSDTWYQVGYTSSWVGISYSLSFSWNESVGIPDNERIVGLNVSVPFNVLTKRRYTRENALDRAYASFNANRNSNGKIAGWQALVGPYWKATT

SEQ ID NO: 14442 - protein, 836 aa, Escherichia coli; identical to SEQ ID NO: 10553

SEQ ID NO: 14443 - protein, 878 aa, Escherichia coli; identical to SEQ ID NO: 10560

SEQ ID NO: 14444 - protein, 826 aa, Escherichia coli
MLRMTPLASAIVALLIGIEAYAAEETFDTHFMIGGMKDQQVSNIRLEDNQPLPGQYDIDIYVNKQWRGKYEIIVKDNPQETCLSREMIKRLGINTDNFASGKQCLTFKQLIQGGSYTWDIGVFRLDFSVPQAWVEELESGYVPPENWERGINAFYTSYYVSQYYSDYKASGNSKSTYVRFNSGLNLLGWQLHSDASFSKTNNNPGGWKSNTLYLERGFAQLLGTLRVGDMYTSSDIFDSVRFSGVRLFRDMQMLPNSKQNFTPRVQGIAQSNALVTIEQNGFVVYQKEVPPGPFAITDLQLAGGGADLDVSVKEADGSVTTYLVPYAAVPNMLQPGVSKYDFAAGRSHIEGASKQSDFVQAGHQYGFNNLLTLYGGSMVANNYYAFTLGTGWNTRIGAISVDATKSHSKQDNGDVFDGQSYQIAYNKFVSQTSTRFGLAAWRYSSRDYRTFNDHVWANNKDNYRRDENDIYDIADYYQNDFGRKNSFSANMSQSLPEGWGSVSLSTLWRDYWGRSGSSKDYQLSYSNNLRRISYTLAASHAYDENHHEEKRFNIFISIPFDWGDDVTTPRRQIYMSNSTTFDDQGVASNNTGLSGTVGSRDQFNYGVNLSYQYQGNETTAGANLTWNAPVATVNGSYSQSSAYRQAGASVSGGIVAWSGGVNLANRLSETFAVMNAPGIKDAYVNGQKYRTTNRNGVVVYDGMTPYRENYLMLDVSQSDSEAELRGNRKIAAPYRGAVVLVNFDTDQRKPWFIKALRADGQPLTFGYEVNDIHGHNIGVVGQGSQLFIRTNEVPPSVNVAIDKQQGLSCTITFGKEIDESKNYICQ

SEQ ID NO: 14445 - protein, 161 aa, Escherichia coli; identical to SEQ ID NO: 2582

SEQ ID NO: 14446 - protein, 836 aa, Escherichia coli
MKDRIPFAVNNITCVILLSLFCNAASAVEFNTDVLDAADKKNIDFTRFSEAGYVLPGQYLLDVIVNGQSISPASLQISFVEPQSSGDKAEKKLPQACLTSDMVRLMGLTAESLDKVVYWHDGQCADFHGLPGVDIRPDTGAGVLRINMPQAWLEYSDATWLPPSRWDDGIPGLMLDYNLNGTVSRNYQGGDSHQFSYNGTVGGNLGPWRLRADYQGSQEQSRYNGEKTTNRNFTWSRFYLFRAIPRWRANLTLGENNINSDIFRSWSYTGASLESDDRMLPPRLRGYAPQITGIAETNARVVVSQQGRVLYDSMVPAGPFSIQDLDSSVRGRLDVEVIEQNGRKKTFQVDTASVPYLTRPGQVRYKLVSGRSRGYGHETEGPVFATGEASWGLSNQWSLYGGAVLAGDYNALAAGAGWDLGVPGTLSADITQSVARIEGERTFQGKSWRLSYSKRFDNADADITFAGYRFSERNYMTMEQYLNARYRNDYSSREKEMYTVTLNKNVADWNTSFNLQYSRQTYWDIRKTDYYTVSVNRYFNVFGLQGVAVGLSASRSKYLGRDNDSAYLRISVPLGTGTASYSGSMSNDRYVNMAGYTDTFNDGLDSYSLNAGLNSGGGLTSQRQINAYYSHRSPLANLSANIASLQKGYTSFGVSASGGATITGKDAALHAGGMSGGTRLLVDTDGVGGVPVDGGQVVTNRWGTGVVTDISSYYRNTTSVDLKRLPDDVEATRSVVESALTEGAIGYRKFSVLKGKRLFAILRLADGSQPPFGASVTSEKGRELGMVADEGLAWLSGVTPGETLSVNWDGKIQCQVNVPETAISDQQLLLPCTPQK

SEQ ID NO: 14447 - protein, 837 aa, Escherichia coli; identical to SEQ ID NO: 8414

SEQ ID NO: 14448 - protein, 866 aa, Escherichia coli
MYRTHRQHSLLSSGGVPSFIGGLVVFVSAAFNAQAETWFDPAFFKDDPSMVADLSRFEKGQKITPGVYRVDIVLNQTIVDTRNVNFVEITPEKGIAACLTTESLDAMGVNTDAFPAFKQLDKQACVPLAEIIPDASVTFNVNKLRLEISVPQIAIKSNARGYVPPERWDEGINALLLGYSFSGANSIHSSADSDSGDSYFLNLNSGVNLGPWRLRNNSTWSRSSGQTAEWKNLSSYLQRAVIPLKGELTVGDDYTAGDFFDSVSFRGVQLASDDNMLPDSLKGFAPVVRGIAKSNAQITIKQNGYTIYQTYVSPGAFEISDLYSTSSSGDLLVEIKEADGSVNSYSVPFSSVPLLQRQGRIKYAVTLAKYRTNSNEQQESKFAQATLQWGGPWGTTWYGGGQYAEYYRAAMFGLGFNLGDFGAISFDATQAKSTLADQSEHKGQSYRFLYAKTLNHLGTNFQLMGYRYSTSGFYTLSDTMYKHMDGYEFNDGDDEDTPMWSRYYNLFYTKRGKLQVNISQQLGEYGSFYLSGSQQTYWHTDQQDRLLQFGYNTQIKDLSLGISWNYSKSRGQPDADQVFALNFSLPLNLLLPRSNDSYTRKKNYAWMTSNTSIDNEGHTTQNLGLTETLLDDGNLSYSVQQGYNSEGKTANGSASMDYKGAFADARVGYNYSDNGSQQQLNYALSGSLVAHSQGITLGQSLGETNVLIAAPGAENTRVANSTGLKTDWRGYTVVPYAISYRENRIALDAASLKRNVDLENAVVNVVPTKGALVLAEFNAHAGARVLMKTSKQGIPLRFGAIATLDGVQANSGIIDDDGSLYMAGLPAKGTISVRWGEAPDQICHINYELTEQQINSAITRMDAICR

SEQ ID NO: 14449 - protein, 783 aa, Escherichia coli
MKLNIFTKSMIGMGLVCSALPALAMEAWNNQQGGNKYQVIFDGKIYENAWWVSSTNCPGKAKANDATNPWRLKRTATAAEISQFGNTLSCEKSGSSSSSNSNTPASNTPANGGSATPAQGTVPSNSSVVAWNKQQGGQTWYVVFNGAVYKNAWWVASSNCPGDAKGNDASNPWRYVRAATATEISETSNPQSCTSAPQPAPDVKPAPDVKPAPDVQPAPADKSNDNYAVVAWKGQEGSSTWYVIYNGGIYKNAWWVGAANCPGDAKENDASNPWRYVRAATATEITQYGNPGSCSVKPDNNGGAVTPVDPTPETPETPVTPTPDNNEPSTPADSSNDYSLQAWSGQEGSEIYHVIFNGNVYQNAWWVGSEDCPRGTSVENSNNPWRLVRTATAAEMSQYGNPTTCEIDNGGVIIANGFQASKAYSANSIVDYNDAHYKTSVDQDAWGFVPGGDNPWKKYEPAKAWSASTVYVKGDRVVVDGQAYEALFWTQSDNPALVANQNATGSNSRPWKPLGKTQSYSNEELNNAPQFNPETLYASDTLIRFNGENYISQSKVQKVSPSDSNPWRVFVDWTGTKERVGTPKKAWPKHVYAPYVDFTLNTIPDLAALAKNHNVNHFTLAFVVSKDANTCLPTWGTAYGMQNYAQYSKIKALREAGGDVMLSIGGANNAPLAASCKNVDDLMQHYYDIVDNLNLRVLDFDIEGTWVADQASIERRNLAVKKVQDKWKSEGKDIAIWYTLPILPTGLTPEGMNVLSDAKAKGVELAGVNVMTMDYGNAIVNDG

SEQ ID NO: 14450 - protein, 897 aa, Escherichia coli; identical to SEQ ID NO: 5302

SEQ ID NO: 14451 - protein, 368 aa, Escherichia coli; identical to SEQ ID NO: 2372

SEQ ID NO: 14452 - protein, 404 aa, Escherichia coli
MYRTQRQHSLLSSGGVPSFIGGLVVFVSAAFNAQAETWFDPAFFKDDPSMVADLSRFEKGQKITPGVYRVDIVLNQTIVDTRNVNFVEITPEKGIAACLTTESLDAMGVNTDAFPAFKQLDKQACAPLAEIIPDASVTFNVNKLRLEISVPQIAIKSNARGYVPPERWDEGINALLLGYSFSGANSIHSSAGSDSGDSYFLNLNSGVNLGPWRLRNNSTWSRSSGQTAEWKNLSSYLQRAVIPLKGELTVGDDYTAGDFFDSVSFRGVQLASDDNMLPDSLKGFAPVVRGIAKSNAQVTIKQNGYTIYQTYVSPGAFEISDLYSTSSSGDLLVEIKEADGSVNSYSVPFSSVPLLQRQGRIKYAVTLAKYRTNSNDQQESKFAQATLQWGGAVGNDLVWRRAIC

SEQ ID NO: 14453 - protein, 368 aa, Escherichia coli
MNKTITALAIIMASFAANASVLPETPVPFKSGTGAIDNDTVYIGLGSAGTAWYKLDTQAKDKKWTALAAFPGGPRDQATSAFIDGNLYVFGGIGKNSEGLTQVFNDVHKYNPKTNSWVKLMSHAPMGMAGHVTFVHNGKAYVTGGVNQNIFNGYFEDLNEAGKDSTAVDKINAYYFDKKAEDYFFNKFLLSFDPSTQQWSYAGESPWYGTAGAAVVNKGDKTWLINGEAKPGLRTDAVFELDFTGNNLKWNKLAPVSSPDGVAGGFAGISNDSLIFAGGAGFKGSRENYQNGKNYAHEGLKKSYSTDIHLWHNGKWDKSGELSQGRAYGVSLPWNNSLLIIGGETAGGKAVTDSVLISVKDNKVTVQN

SEQ ID NO: 14454 - protein, 865 aa, Escherichia coli; identical to SEQ ID NO: 2167

SEQ ID NO: 14455 - protein, 844 aa, Escherichia coli
MNANNLSCLIYCRCSLLLFAALGLTVTNHSFAAEEAEFDSEFLHLDKGINAIDIRRFSHGNPVPEGRYYSDIYVNNVWKGKADLQYLRTANTGAPTLCLTPELLSLIDLVKDTMSGNTSCFPASTGLSSARINFDLSTLRLNIEIPQALLNTRPRGYISPAQWQSGVPAAFINYDANYYQYSSSGTSNEQTYLGLKAGFNLWGWALRHRGSESWNNSYPAGYQNIETSIMHDLAPLRAQFTLGDFYTNGELMDSLSLRGVRLASDERMLPGSLRGYAPAVRGIANSNAKVTIYQNAHILYETTVPAGPFVINDLYPSGYAGDLLVKITESNGQTRMFTVPFAAVAQLIRPGFSRWQMSVGKYRYANKTYNDLIAQGTYQYGLTNDITLNSGLTTASGYTAGLAGLAFNTPLGAIASDITLSRTAFRYSGVTRKGYSLHSSYSINIPASNTNITLAAYRYSSKDFYHLKDALSANHNAFIDDVSVKSTAFYRPRNQFQISINQELGEKWGGMYLTGTTYNYWGHKGSRNEYQMGYSNFWKQLGYQIGLSQSRDNEQQRRDDRFYINFTLPLGGSVQSPVFSTVLNYSKEEKNSIQTSISGTGGEDNQFSYGISGNSQENGPSGYAMNGGYRSPYVNITTTVGHDTQNNNQRSFGASGAVVAHPYGVTLSNDLSDTFAIIHAEGAQGAVINNASGSRLDFWGNGVVPYVTPYEKNQISIDPSNLDLNVELSATEQEIIPRANSATLVKFDTKTGRSLLFDIRMSTGNPPPMASEVLDEHGQLAGYVAQAGKVFTRGLPEKGHLSVVWGPDNKDRCSFVYHVAHNKDDMQSQLVPVLCIQHPNQEKT

SEQ ID NO: 14456 - protein, 89 aa, Escherichia coli; identical to SEQ ID NO: 2812

SEQ ID NO: 14457 - protein, 686 aa, Escherichia coli; identical to SEQ ID NO: 9611

SEQ ID NO: 14458 - protein, 243 aa, Escherichia coli; identical to SEQ ID NO: 2913

SEQ ID NO: 14459 - protein, 362 aa, Escherichia coli; identical to SEQ ID NO: 4554

SEQ ID NO: 14460 - protein, 678 aa, Escherichia coli
MVPSTFSRLKAARCLPVVLAALIFAGCGTHTPDQSTAYMQGTAQADSAFYLQQMQQSSDDTRINWQLLAIRALVKEGKTGQAVELFNQLPQELNDSQRREKTLLAAEIKLAQKDFAGAQNLLAKITPADLEQNQQARYWQAKIDASQGRPSIDLLRALIAQEPLLGAKEKQQNIDATWQALSSMTQEQANTLVINADENILQGWLDLQRVWFDNRNDPDMMKAGIADWQKRYPNNPGAKMLPTQLVNVKAFKPASTNKIALLLPLNGQAAVFGRTIQQGFEAAKNIGTQPVAAQVAAAPAADVAEQPQPQTVDGVASPAQASVSDLTGEQPAAQSVPVSAPATSTAAVSAPANPSAELKIYDTSSQPLSQILSQVQQDGASIVVGPLLKNNVEELLKSNTPLNVLALNQPENIENRVNICYFALSPEDEARDAARHIRDQGKQAPLVLIPRSSLGDRVANAFAQEWQKLGGGPVLQQKFGSTSELRAGVNGGSGIALTGSPITPRETTDSGMTTNNPTLQTTPTDDQFTNNGGRVDAVYIVATPGEIAFIKPMIAMRNGSQSGATLYASSRSAQGTAGPDFRLEMEGLQYSEIPMLAGGNLPLMQQALSAVNNDYSLARMYAMGVDAWSLANHFSQMRQVQGFEINGNTGSLTANPDCVINRKLSWLQYQQGQVVPAS

SEQ ID NO: 14461 - protein, 162 aa, Escherichia coli; identical to SEQ ID NO: 1965

SEQ ID NO: 14462 - protein, 367 aa, Escherichia coli; identical to SEQ ID NO: 10627

SEQ ID NO: 14463 - protein, 111 aa, Escherichia coli; identical to SEQ ID NO: 3419

SEQ ID NO: 14464 - protein, 539 aa, Escherichia coli; identical to SEQ ID NO: 3845

SEQ ID NO: 14465 - protein, 246 aa, Escherichia coli
MFFNTKHTAALCLASCMAFSSSAIADIVISGTRVVYKSEQKNVNVRLENKGNNPLLVQSWLDTGDDNAEPGSITVPFTATPPVSRIDAKRGQTIKLMYTASSALPKDRESVFWFNVLEVPPKPDAAKAANQSLLQLAFRTRIKLFYRPEGLSGISSDAPLALKWSWATSEGKAALRVDNPTPYYVSFSSGDLEANGKRYPLDMTMIAPFSNDVIKVNGMSGRTSSAKVHFFAINDFGGSIEGNANL

SEQ ID NO: 14466 - protein, 565 aa, Escherichia coli; identical to SEQ ID NO: 2673

SEQ ID NO: 14467 - protein, 660 aa, Escherichia coli
MSRPQFTSLRLSLLALAVSATLPTFAFATETMTVTATGNARSSFEAPMMVSVIDTSAPENQTATSATDLLRYVPGITLDGTGRTNGQDVNMRGYDHRGVLVLVDGVRQGTDTGHLNGTFLDPALIKRVEIVRGPSALLYGSGALGGVISYDTVDAKDLLQEGQSSGFRVFGTGGTGDHSLGLGASAFGRTENLDGIVAWSSRDRGDLRQSNGETAPNDESINNMLAKGTWQIDSAQSLSGLVRYYNNDAREPKNPQTVEASDSSNPMVDRSTIQRDAQLSYKLAPQGNDWLNADAKIYWSEVRINAQNTGSSGEYREQITKGARLENRSTLFADSFASHLLTYGGEYYRQEQHPGGATTGFPQAKIDFSSGWLQDEITLRDLPITLLGGTRYDSYRGSSDGYKDVDADKWSSRAGMTINPTNWLMLFGSYAQAFRAPTMGEMYNDSKHFSIGRFYTNYWVPNPNLRPETNETQEYGFGLRFDDLMLSNDALEFKASYFDTKAKDYISTTVDFAAATTMSYNVPNAKIWGWDVMTKYTTDLFSLDVAYNRTRGKDTDTGEYISSINPDTVTSTLNIPIAHSGFSVGWVGTFADRSTHISSSYSKQPGYGVNDFYVSYQGQQALKGMTTTLVLGNAFDKEYWSPQGIPQDGRNGKIFVSYQW

SEQ ID NO: 14468 - protein, 771 aa, Escherichia coli; identical to SEQ ID NO: 10700

SEQ ID NO: 14469 - protein, 721 aa, Escherichia coli; identical to SEQ ID NO: 9824

SEQ ID NO: 14470 - protein, 614 aa, Escherichia coli
MIKKASLLTACSVTAFSAWAQDTSPDTLVVTANRFEQPRSTVLAPTTVVTRQDIDRWQSTSVNDVLRRLPGVDITQNGGSGQLSSIFIRGTNASHVLVLIDGVRLNLAGVSGSADLSQFPIALVQRVEYIRGPRSAVYGSDAIGGVVNIITTRDHPGTEISAGWGSNSYQNYDVSTQQQLGDNTRVTLLGDYAHTHGYDVVAYGNTGTQAQPDNDGFLSKTLYGALEHNFTDVWSGFVRGYGYDNRTNYDAYYSPGLPLVDTRKLYSQSWDAGLRYNGELIKSQLITSYSHSKDYNYDPHYGRYDSSATLDEMKQYTVQWANNIIIGHGNIGAGVDWQKQSTAPGTAYVEDGYDQRNTGIYLTGLQQVGDFTFEGAGRSDDNSQFGRHGTWQTSAGWEFIEGYRFIASYGTSYKAPNLGQLYGSYGNPNLNPEKSKQWEGAFEGLTAGVNWRISGYRNDVSDLIDYDDHTLKYYNEGKARIKGVEATANFDTGPLTHTVSYDYVDARNAITDTPLLRRAKQQVKYQLDWQLYDFDWGITYQYLGTRYDKDYSSYPYQTVKMGGVSLWDLAVAYPVTSHLTVRGKIANLFDKDYETVYGYQTAGREYTLSGSYTF

SEQ ID NO: 14471 - protein, 231 aa, Escherichia coli; identical to SEQ ID NO: 10692

SEQ ID NO: 14472 - protein, 259 aa, Escherichia coli
MRQYRLLSPMIKVVIVLFSLLFSTAQAGLVIGGTRFAYPENQSSISVELKNTSDRDMLVKVAVSPDDARQLTGTVESLPSYSETVFIATPPLFVLKPDKNTKIRINRVGGSLPADRESLFILNVAALPTLENSHSVKTDNQLQIAVRNRMKIFYRPSNLSEDPNMSYQKLRWARKNEIVTVYNPGPRYVTLYNLHVDGKVIDGGMVAPFSHRQQSWCKSQGVCEIAWQTLDIYNNVLPAWKVNMNLLQMDVSGSQVKTD

SEQ ID NO: 14473 - protein, 700 aa, Escherichia coli; identical to SEQ ID NO: 10597

SEQ ID NO: 14474 - protein, 216 aa, Escherichia coli
MAMMVAGRAEAGVALGATRVIYPAGQKQVQLAVTNNDENSTYLIQSWVENADGVKDGRFIVTPPLFAMKGKKENTLRILDATNNQLPQDRESLFWMNVKAIPSMDKSKLTENTLQLAIISRIKLYYRPAKLALSPDQAAEKLRFRRSANSLTLINPTPYYLTVTELNAGTRVLENALVPPMGESAVKLPSDAGSNITYRTINDYGALTPKMTGVME

SEQ ID NO: 14475 - protein, 360 aa, Escherichia coli; identical to SEQ ID NO: 3862

SEQ ID NO: 14476 - protein, 193 aa, Escherichia coli; identical to SEQ ID NO: 2246

SEQ ID NO: 14477 - protein, 241 aa, Escherichia coli; identical to SEQ ID NO: 12195

SEQ ID NO: 14478 - protein, 244 aa, Escherichia coli; identical to SEQ ID NO: 10740

SEQ ID NO: 14479 - protein, 118 aa, Escherichia coli [sequence omitted]

SEQ ID NO: 14480 - protein, 208 aa, Escherichia coli; identical to SEQ ID NO: 10749

SEQ ID NO: 14481 - protein, 725 aa, Escherichia coli; identical to SEQ ID NO: 10741

SEQ ID NO: 14482 - protein, 208 aa, Escherichia coli; identical to SEQ ID NO: 1948

SEQ ID NO: 14483 - protein, 256 aa, Escherichia coli
MCVRNQSNHFFILLIFAVRNTQGVLTMMTKIKLLMLIIFYLIISTSAHAAGGIALGATRIIYPADAKQTAVWIRNSHTNERFLVNSWIENSSGVKEKSFIITPPLFVSEPKSENTLRIIYTGPPLAADRESLFWMNVKTIPSVDKNALNGRNVLQLAILSRMKLFLRPIQLQELPAEAPDTLKFSRSGNYINVHNPSPFYVTLVNLQVGSQKLGNAMAAPRVNSQIPLPSGVQGKLKFQTVNDYGSVTPVREVNLN

SEQ ID NO: 14484 - protein, 304 aa, Escherichia coli
MMKKYLALALIAPLLISCSTTKKGDTYNEAWVKDTNGFDILMGQFAHNIENIWGFKEVVIAGPKDYVKYTDQYQTRSHINFDDGTITIETIAGTEPAAHLRRAIIKTLLMGDDPSSVDLYSDVDDITISKEPFLYGQVVDNTGQPIRWEGRASNFADYLLKNRLKSRSNGLRIIYSVTINMVPNHLDKRAHKYLGMVRQASRKYGVDESLILAIMQTESSFNPYAVSRSDALGLMQVVQHTAGKDVFRSQGKSGTPSRSFLFDPASNIDTGTAYLAMLNNVYLGGIDNPTSRRYAVITAYNGGA

SEQ ID NO: 14485 - protein, 233 aa, Escherichia coli; identical to SEQ ID NO: 4744

SEQ ID NO: 14486 - protein, 204 aa, Escherichia coli; identical to SEQ ID NO: 2957

SEQ ID NO: 14487 - protein, 784 aa, Escherichia coli; identical to SEQ ID NO: 2244

SEQ ID NO: 14488 - protein, 244 aa, Escherichia coli; identical to SEQ ID NO: 4064

SEQ ID NO: 14489 - protein, 554 aa, Escherichia coli
MALIPACIFLCFAALSVQAEETSVTPQPPDILLGPLFNDVQNAKLFPDQKTFADAVPNSDPLMILADYRMQQNQSGFDLRHFVNVNFTLPKEGEKYVPPEGQSLREHIDGLWPVLTRSTENTEKWDSLLPLPEPYVVPGGRFREVYYWDSYFTMLGLAESGHWDKVADMVANFAHEIDTYGHIPNGNRSYYLSRSQPPFFALMVELLAQHEGDAALKQYLPQMQKEYAYWMDGVENLQAGQQEKRVVKLQDGTLLNRYWDDRDTPRPESWVEDIATAKSNPNRPATEIYRDLRSAAASGWDFSSRWMDNPQQLNTLRTTSIVPVDLNSLMFKMEKILARASKAAGDNAMANQYETLANARQKGIEKYLWNDQQGWYADYDLKSHKVRNQLTAAALFPLYVNAAAKDRASKMATATKTHLLQPGGLNTTSVKSGQQWDAPNGWAPLQWVATEGLQNYGQKEVAMDISWHFLTNVQHTYDREKKLVEKYDVSATGTGGGGGEYPLQDGFGWTNGVTLKMLDLICPKEQPCDNVPATRPLSESTTQPLKQKEAEPTP

SEQ ID NO: 14490 - protein, 222 aa, Escherichia coli
MSKLGISSLFKSILLTAALAVSFTASAFTEGTDYMVLEKPIPNADKTLIKVFSYACPFCYKYDKAVTGPVSEKVKDIVAFTPFHLETKGEYGKQASEVFAVLINKDKAAGISLFDANSQFKKAKFAYYVAYHDKKERWSDGKDPAAFIKTGLDAAGMSQADFEAALKEPAVQETLEKWKASYDVAKIQGVPAYVVNGKYLIYTKSIKSIDAMADLIRELASK

SEQ ID NO: 14491 - protein, 719 aa, Escherichia coli
MRNEMLYNIPCRIYILSTLSLCISGIVSTATATSSETKISNEETLVVTTNRSASNLWESPATIQVIDQQTLQNSTNASIADNLQDIPGVEITDNSLAGRKQIRIRGEASSRVLILIDGQEVTYQRAGDNYGVGLLIDESALERVEVVKGPYSVLYGSQAIGGIVNFITKKGGDKLASGVVKAVYNSATAGWEESIAVQGSIGGFDYRINGSYSDQGNRDTPDGRLPNTNYRNNSQGVWLGYNSGNHRFGLSLDRYRLATQTYYEDPDGSYEAFSVKIPKLEREKVGVFYDTDVDGDYLKKIHFDAYEQTIQRQFANEVKTTQPVPSPMIQALTVHNKTDTHDKQYTQAVTLQSHFSLPANNELVTGAQYKQDRVSQRSGGMTSSKSLTGFINKETRTRSYYESEQSTVSLFAQNDWRFADHWTWTMGVRQYWLSSKLTRGDGVSYTAGIISDTSLARESASDHEMVTSTSLRYSGFDNLELRAAFAQGYVFPTLSQLFMQTSAGGSVTYGNPDLKAEHSNNFELGARYNGNQWLIDSAVYYSEAKDYIASLICDGSIVCNGNTNSSRSSYYYYDNIDRAKTWGLEISAEYNGWVFSPYISGNLIRRQYETSTLKTTNTGEPAINGRIGLKHTLVMGQANIISDVFIRAASSAKDDSNGTETNVPGWATLNFAVNTEFGNEDQYRINLALNNLTDKRYRTAHETIPAAGFNAAIGFVWNF

SEQ ID NO: 14492 - protein, 746 aa, Escherichia coli
MNKKIHSLALLVNLGIYGVAQAQEPTDTPVSHDDTIVVTAAEQNLQAPGVSTITADEIRKNPVARDVSEIIRTMPGVNLTGNSTSGQRGNNRQIDIRGMGPENTLILIDGKPVSSRNSVRQGWRGERDTRGDTSWVPPEMIERIEVLRGPAAARYGNGAAGGVVNIITKKGSGEWHGSWDAYFNAPEHKEEGATKRTNFSLTGPLGDEFSFRLYGNLDKTQADAWDINQGHQSARAGTYATTLPAGREGVINKDINGVVRWDFAPLQSLELEAGYSRQGNLYAGDTQNTNSDSYTRSKYGDETNRLYRQNYSLTWNGGWDNGVTTSNWVQYEHTRNSRIPEGLAGGTEGKFNEKATQDFVDIDLDDVMLHSEVNLPIDFLVNQTLTLGTEWNQQRMKDLSSNTQALTGTNTGGAIDGVSATDRSPYSKAEIFSLFAENNMELTDSTIVTPGLRFDHHSIVGNNWSPALNISQGLGDDFTLKMGIARAYKAPSLYQTNPNYILYSKGQGCYASAGGCYLQGNDDLKAETSINKEIGLEFKRDGWLAGVTWFRNDYRNKIEAGYVAVGQNAVGTDLYQWDNVPKAVVEGLEGSLNVPVSETVMWTNNITYMLKSENKTTGDRLSIIPEYTLNSTLSWQAREDLSMQTTFTWYGKQQPKKYNYKGQPAVGPETKEISPYSIVGLSATWDVTKNVSLTGGVDNLFDKRLWRAGNAQTTGDLAGANYIAGAGAYTYNEPGRTWYMSVNTHF

SEQ ID NO: 14493 - protein, 432 aa, Escherichia coli; identical to SEQ ID NO: 2026

SEQ ID NO: 14494 - protein, 446 aa, Escherichia coli; identical to SEQ ID NO: 2182

SEQ ID NO: 14495 - protein, 478 aa, Escherichia coli
MTRIKINARRIFSLLIPFFFFTSVHAEQTAAPAKPVTVEAKNETFAPQHPDQYLSWKATSEQSGRVDALAEDPRLVILWAGYPFSRDYNKPRGHAFAVTDVRETLRTGAPKNAEDGPLPMACWSCKSPDVARLIQKDGEDGYFHGKWARGGPEIVNNLGCADCHNTASPEFAKGKPELTLSRPYAARAMEAIGKPFEKAGRFDQQSMVCGQCHVEYYFDGKNKAVKFPWDDGMKVENMEQYYDKIAFSDWTNSLSKTPMLKAQHPEYETWTAGIHGKNNVTCIDCHMPKVQNAEGKLYTDHKIGNPFDNFAQTCANCHTQDKAALQKVVAERKQSINDLKIKVEDQLVHAHFEAKAALDAGATEAEMKPIQDDIRHAQWRWDLAIASHGIHMHAPEEGLRMLGTAMDKAADARTKLARLLATKGITHEIQIPDISTKEKAQQAIGLNMEQIKAEKQDFIKTVIPQWEEQARKNGLLSQ

SEQ ID NO: 14496 - protein, 431 aa, Escherichia coli; identical to SEQ ID NO: 3408

SEQ ID NO: 14497 - protein, 518 aa, Escherichia coli
MKKLKINYLFIGILALLLAVALWPSIPWFGKADNRIAAIQARGELRVSTIHTPLTYNEINGKPFGLDYELAKQFADYLGVKLKVTVRQNISQLFDDLDNGNADLLAAGLVYNSERVKNYQPGPTYYSVSQQLVYKVGQYRPRTLGNLTAEQLTVAPGHVVVNDLQTLKETKFPELSWKVDDKKGSAELMEDVIEGKLDYTIADSVAISLFQRVHPELAVALDITDEQPVTWFSPLDGDNTLSAALLDFFNEMNEDGTLARIEEKYLGHGDDFDYVDTRTFLRAVDAVLPQLKPLFEKYAEEIDWRLLAAIAYQESHWDAQATSPTGVRGMMMLTKNTAQSLGITDRTDAEQSISGGVRYLQDMMSKVPESVPENERIWFALAAYNMGYAHMLDARALTAKTKGNPDSWADVKQRLPLLSQKPYYSKLTYGYARGHEAYAYVENIRKYQISLVGYLQEKEKQATEAAMQLAQAYPAVSPTELGKEKFPFLSFLSQSSSNYLTHSPSLLFSRKGSEEKQN

SEQ ID NO: 14498 - protein, 246 aa, Escherichia coli; identical to SEQ ID NO: 1985

SEQ ID NO: 14499 - protein, 208 aa, Escherichia coli; identical to SEQ ID NO: 1949

SEQ ID NO: 14500 - protein, 203 aa, Escherichia coli; identical to SEQ ID NO: 2201

SEQ ID NO: 14501 - protein, 747 aa, Escherichia coli; identical to SEQ ID NO: 3857

SEQ ID NO: 14502 - protein, 213 aa, Escherichia coli; identical to SEQ ID NO: 2232

SEQ ID NO: 14503 - protein, 678 aa, Escherichia coli; identical to SEQ ID NO: 2231

SEQ ID NO: 14504 - protein, 747 aa, Escherichia coli
MARSKTAQPKHSLRKIAVVVATAVSGMSVYAQAAVEPKEDTITVTAAPAPQESAWGPAATIAARQSATGTKTDTPIQKVPQSISVVTAEEMALHQPKSVKEALSYTPGVSVGTRGASNTYDHLIIRGFAAEGQSQNNYLNGLKLQGNFYNDAVIDPYMLERAEIMRGPVSVLYGKSSPGGLLNMVSKRPTTEPLKEVQFKAGTDSLFQTGFDFSDSLDDDGVYSYRLTGLARSANAQQKGSEEQRYAIAPAFTWRPDDKTNFTFLSYFQNEPETGYYGWLPKEGTVEPLPNGKRLPTDFNEGAKNNTYSRNEKMVGYSFDHEFNDTFTVRQNLRFAENKTSQNSVYGYGVCSDPANAYSKQCAALAPADKGHYLARKYVVDDEKLQNFSVDTQLQSKFATGDIDHTLLIGVDFMRMRNDINAWFGYDDSVPLLNLYNPVNTDFDFNAKDPANSGPYRILNKQKQTGVYVQDQAQWDKVLVTLGGRYDWADQESLNRVAGTTDKRDDKQFTWRGGVNYLFDNGVTPYFSYSESFEPSSQVGKDGNIFAPSKGKQYEVGVKYVPEDRPIVVTGAVYNLTKTNNLMADPEGSFFSVEGGEIRARGVEIEAKAALSASVNVVGSYTYTDAEYTTDTTYKGNTPAQVPKHMASLWADYTFFDGPLSGLTLGTGGRYTGSSYGDPANSFKVGSYTVVDALVRYDLARVGMAGSNVALHVNNLFDREYVASCFNTYGCFWGAERQVVATATFRF

SEQ ID NO: 14505 - protein, 250 aa, Escherichia coli; identical to SEQ ID NO: 2761

SEQ ID NO: 14506 - protein, 774 aa, Escherichia coli; identical to SEQ ID NO: 3648

SEQ ID NO: 14507 - protein, 517 aa, Escherichia coli; identical to SEQ ID NO: 3116

SEQ ID NO: 14508 - protein, 204 aa, Escherichia coli; identical to SEQ ID NO: 2957

SEQ ID NO: 14509 - protein, 169 aa, Escherichia coli; identical to SEQ ID NO: 4636

SEQ ID NO: 14510 - protein, 367 aa, Escherichia coli; identical to SEQ ID NO: 2433

SEQ ID NO: 14511 - protein, 111 aa, Escherichia coli; identical to SEQ ID NO: 3153

SEQ ID NO: 14512 - protein, 230 aa, Escherichia coli; identical to SEQ ID NO: 2580

SEQ ID NO: 14513 - protein, 122 aa, Escherichia coli; identical to SEQ ID NO: 2915

SEQ ID NO: 14514 - protein, 252 aa, Escherichia coli
MKLMRYLNTKNIIAAGVLLSCMSSIAWGAIIPDRTRIIMNESDKGEALKLTNQSKNLPYLAQTWIEDTKGNKSRDFIVTVPPMVRLNPSEQIQIRMITQEKIAQLPKDRETLFYFNVREIPPKTDKKNVMQVTMQHALKLFWRPKAIELEDDGVMTYEKVEIIRRNDGSIRFNNKMPYHVTLGYIGTNGVTMLPQTQSLMVTPFSYANTQFKNVPSTFQVGYINDFGGLSFYEINCPVVNNICNISVANRDQ

SEQ ID NO: 14515 - protein, 729 aa, Escherichia coli; identical to SEQ ID NO: 2074

SEQ ID NO: 14516 - protein, 213 aa, Escherichia coli; identical to SEQ ID NO: 2232

SEQ ID NO: 14517 - protein, 766 aa, Escherichia coli
MLMTTMPDSCNSWQKCRNKTMNKKIHSLALLVNLGIYGVAQAQEPTDTPVSHDDTIVVTAAEQNLQAPGVSTITADEIRKNPVARDVSEIIRTMPGVNLTGNSTSGQRGNNRQIDIRGMGPENTLILIDGKPVSSRNSVRQGWRGERDTRGDTSWVPPEMIERIEVLRGPAAARYGNGAAGGVVNIITKKGSGEWHGSWDAYFNAPEHKEEGATKRTNFSLTGPLGDEFSFRLYGNLDKTQADAWDINQGHQSARAGTYATTLPAGREGVINKDINGVVRWDFAPLQSLELEAGYSRQGNLYAGDTQNTNSDSYTRSKYGDETNRLYRQNYALTWNGGWDNGVTTSNWVQYEHTRNSRIPEGLAGGTEGKFNEKATQDFVDIDLDDVMLHSEVNLPIDFLVNQTLTLGTEWNQQRMKDLSSNTQALTGTNTGGAIDGVSTTDRSPYSKAEIFSLFAENNMELTDSTIVTPGLRFDHHSIVGNNWSPALNISQGLGDDFTLKMGIARAYKAPSLYQTNPNYILYSKGQGCYASAGGCYLQGNDDLKAETSINKEIGLEFKRDGWLAGVTWFRNDYRNKIEAGYVAVGQNAVGTDLYQWDNVPKAVVEGLEGSLNVPVSETVMWTNNITYMLKSENKTTGDRLSIIPEYTLNSTLSWQAREDLSMQTTFTWYGKQQPKKYNYKGQPAVGPETKEISPYSIVGLSATWDVTKNVSLTGGVDNLFDKRLWRAGNAQTTGDLAGANYIAGAGAYTYNEPGRTWYMSVNTHF

SEQ ID NO: 14518 - protein, 360 aa, Escherichia coli; identical to SEQ ID NO: 3032

SEQ ID NO: 14519 - protein, 412 aa, Escherichia coli; identical to SEQ ID NO: 2161

SEQ ID NO: 14520 - protein, 417 aa, Escherichia coli
MLFWITALIDIFMKIIITREYIMKRKVLAMLVPALLVAGAANAAEVYNKDGNKLDLYGKVAGLHYFSDDAGSDGDMSYARIGFKGETQIADQFTGYGQWEFNIGANGPESDKGNTATRLAFAGLGFGQNGTFDYGRNYGVVYDIEAWTDMLPEFGGDTYAGADNFMNGRANSVATYRNNGFFGQVDGLNFALQYQGNNEKSGLFDQEGSGNGNGRKLAKENGDGYGMSTSYDFDFGLSLGAAYSNSDRTDNQVHKGLHNTRYGDRFDATAGGETAEAWTVGAKYDANNVYLAAMYAETRNMTGYGDADAIANKTQNFEVVAQYQFDFGLRPSIAYLQSKGKDLGGLNGDNFDSQGNHHYANKDLVKYVEVGATYYFNKNMSTYVDYKINLLDNDDDFYKENGIATDDIVAVGLVYQF

SEQ ID NO: 14521 - protein, 700 aa, Escherichia coli; identical to SEQ ID NO: 2784

SEQ ID NO: 14522 - protein, 230 aa, Escherichia coli; identical to SEQ ID NO: 4598

SEQ ID NO: 14523 - protein, 120 aa, Escherichia coli
MNTVLSVQGASAPVEKKSFFSKFTRLNMLRLVRAVIPVAVLMMLFPELAMAAGKGTDLMAKGQETVKATFGKDSSIVKWVVLAEVLVGAVMYMMTKNVKFLVGFAILSVFIAVGMSVAGF

SEQ ID NO: 14524 - protein, 224 aa, Escherichia coli; identical to SEQ ID NO: 4745

SEQ ID NO: 14525 - protein, 367 aa, Escherichia coli
MKVKVLSLLVPALLVAGAANAAEVYNKDGNKLDLYGKVDGLHYFSDNKSEDGDQTYMRLGFKGETQVTDQLTGYGQWEYQIQGNSAENENNSWTRVAFAGLKFQDVGSFDYGRNYGVVYDVTSWTDVLPEFGGDTYGSDNFMQQRGNGFATYRNTDFFGLVDGLNFAVQYQGTNGSVSGEDQTNNGRGALRQNGDGVGGSITYDYEGFGVGAAVSSSKRTWDQNNTGLIGTGDRAETYTGGLKYDANNIYLAAQYTQTYNATRVGSLGWANKAQNFEAVAQYQFDFGLRPSVAYLQSKGKNLGTIGTRNYDDEDILKYVDVGATYYFNKNMSTYVDYKINLLDDNQFTRAAGINTDDIVALGLVYQF

SEQ ID NO: 14526 - protein, 656 aa, Escherichia coli; identical to SEQ ID NO: 10750

SEQ ID NO: 14527 - protein, 517 aa, Escherichia coli; identical to SEQ ID NO: 2462

SEQ ID NO: 14528 - protein, 360 aa, Escherichia coli; identical to SEQ ID NO: 3862

SEQ ID NO: 14529 - protein, 200 aa, Escherichia coli; identical to SEQ ID NO: 1797

SEQ ID NO: 14530 - protein, 191 aa, Escherichia coli; identical to SEQ ID NO: 2727

SEQ ID NO: 14531 - protein, 629 aa, Escherichia coli; identical to SEQ ID NO: 10744

SEQ ID NO: 14532 - protein, 250 aa, Escherichia coli; identical to SEQ ID NO: 9497

SEQ ID NO: 14533 - protein, 193 aa, Escherichia coli; identical to SEQ ID NO: 2246

SEQ ID NO: 14534 - protein, 243 aa, Escherichia coli
MSRKSCLIRLFKTTVSCKLFTAIILSVFLVQPALTYAGVVIGGTRVVYLSNNPDKSISVFSKEEKIPYLIQAWVDPFNKEDKSKAPFTVIPPVSRLEPAQEKVLRIIHTKGVSLPDDRESVFWLNIKNIPPSASNKAANSLEIAVKTRIKLFWRPASIRLIPEDAAPKVKWHREGRNLIAENPNPIHISVMDVIVDGHDVPLNMLRPFETLTLPLPANSAGGQMIWRFINDYGAVSDPIKMTL

SEQ ID NO: 14535 - protein, 478 aa, Escherichia coli; identical to SEQ ID NO: 2404

SEQ ID NO: 14536 - protein, 386 aa, Escherichia coli
MVDDVPVAQVLQALAEQEKLNLVVSPDVSGTVSLHLTDVPWKQALQTVVKSAGLITRQEGNILSVHSVAWQNDNIARQEAEQTRAQANLPLENRNITLQYADAGELAKAGEKLLSAKGSMTVDKRTNRLLLRDNKTALSTLEQWVAQMDLPVGQVELSAHIVTINEKSLRELGVKWTLADAQQAGGVGQVTTLGSDLSVATATTHVGFNIGRINGRLLDLELSALEQKQQLDIIASPRLLASHLQPASIKQGSEIPYQVSSGESGATSVEFKEAVLGMEVTPTVLQKGRIRLKLHISQNVPGQVLQQADGEVLAIDKQEIETQVEVKSGETLALGGIFTRKNKSGQDSVPLLGDIPWFGQLFRHDGKEDERRELVVFITPRLVSSE

SEQ ID NO: 14537 - protein, 233 aa, Escherichia coli; identical to SEQ ID NO: 2006

SEQ ID NO: 14538 - protein, 446 aa, Escherichia coli [sequence omitted]

SEQ ID NO: 14539 - protein, 242 aa, Escherichia coli; identical to SEQ ID NO: 2697

SEQ ID NO: 14540 - protein, 331 aa, Escherichia coli
MKKPVVIGLAVVVLAAVVAGGYWWYQSRQDNGLTLYGNVDIRTVNLSFRVGGRVESLAVDEGDAIKAGQVLGELDHKPYEIALMQAKAGVSVAQAQYDLMLAGYRDEEIAQAAAAVKQAQAAYDYAQNFYNRQQGLWKSRTISANDLENARSSRDQAQATLKSAQDKLRQYRSGNREQDIAQAKASLEQAQAQLAQAELNLQDSTLIAPSDGTLLTRAVEPGTVLNEGGTVFTVSLTHPVWVRAYVDERNLDQAQPGRKVLLYTDGRPDKPYHGQIGFVSPTAEFTPKTVETPDLRTDLVYRLRIVVTDADDALRQGMPVTVQFGDEAGHE

SEQ ID NO: 14541 - protein, 656 aa, Escherichia coli; identical to SEQ ID NO: 6715

SEQ ID NO: 14542 - protein, 331 aa, Escherichia coli; identical to SEQ ID NO: 2713

SEQ ID NO: 14543 - protein, 654 aa, Escherichia coli; identical to SEQ ID NO: 4042

SEQ ID NO: 14544 - protein, 362 aa, Escherichia coli; identical to SEQ ID NO: 2434

SEQ ID NO: 14545 - protein, 744 aa, Escherichia coli
MWSISCRYDYNFLNYLTYRAVSFSINLQFYYYDGVFPILNLAFFMKIFSVRQTVLPALLVLSPVVFAADEQTMIVSAAPQVVSELDTPAAVSVVDGEEMRLATPRINLSESLTGVPGLQVQNRQNYAQDLQLSIRGFGSRSTYGIRGIRLYVDGIPATMPDGQGQTSNIDLSSVQNVEVLRGPFSALYGNASGGVMNVITQTGQQPPTIEASSYYGSFGSWRYGLKATGATGDGTQPGDVDYTVSTTRFTTHGYRDHSGAQKNLANAKLGVRIDEASKLSLIFNSVDIKADDPGGLTKAEWKANPQQAPRAEQYDTRKTIKQTQAGLRYERSLSAQDDMSVMMYAGERETTQYQSIPMAPQLNPSHAGGVITLQRHYQGIDSRWTHRGELGVPLTFTTGLNYENMSENRKGYNNFRLNSGVPEYGQKGELRRDERNLMWNVDPYLQTQWQLSEKLSLDAGVRYSSVWFDSNDHYVTPGNGDDSGDASYHKWLPAGSLKYAMTDAWNIYLAAGRGFETPTINELSYRADGQSGMNFGLKPSTNDTIEIGSKTRIGDGLLSLALFQTDTDDEIVVDSSSGGRTTYKNAGKTRRQGAELAWDQRFAGDFRVKASWTWLDATYRSNVCNEQDCNGNRMPGIARNMGFASIGYVPEDGWYAGTEARYMGDIMADDENTAKAPSYTLVGLFTGYKYNYHNLTVDLFGRVDNLFDKEYVGSVIVNESNGRYYEPAPGRNYGVGMNIAWRFE

SEQ ID NO: 14546 - protein, 567 aa, Escherichia coli
MKIKLRITIILISALCIFNGLLTPGAYAATANGYVANKENLRSFFETVSSYAGKPTIVSKLAMKKQISGNFDLTEPYALIERLSAQMGLIWYDDGKAIYIYDSSEMRNALINLRKVSVNEFNNFLKKSGLYNSRYEIKGGGNGTFYVSGPPVYVDLVVNAAKLMEQNSDGIEIGRNKVGIIHLVNTFVNDRTYELRGEKIVIPGMAKVLSTLLNNNIKQSTGVNVLSEISSRQQLKNVSRMPPFPGAEEDDDLQVEKIISTAGVPETDDIQIIAYPDTNSLLVKGTVSQVDFIEKLVATLDIPKRHIELSLWIIDIDKTDLEQLGADWSGTIKIGSSLSASFNNSGSISTLDGTQFIATIQALAQKRRAAVVARPVVLTQENIPAIFDNNRTFYTKLVGERTAELDEVTYGTMISVLPRFAARNQIELLLNIEDGNEINSDKTNVDDLPQVGRTLISTIARVPQGKSLLIGGYTRDTNTYESRKIPILGSIPFIGILFGYEGTNANNIVRVFLIEPREIDERMMNNANEAAVDARAITQQMAKNKEINDELLQKWIKTYLNREVVGG

SEQ ID NO: 14547 - protein, 551 aa, Escherichia coli; identical to SEQ ID NO: 2449

SEQ ID NO: 14548 - protein, 663 aa, Escherichia coli; identical to SEQ ID NO: 4678

SEQ ID NO: 14549 - protein, 715 aa, Escherichia coli; identical to SEQ ID NO: 5610

SEQ ID NO: 14550 - protein, 760 aa, Escherichia coli; identical to SEQ ID NO: 2080

SEQ ID NO: 14551 - protein, 432 aa, Escherichia coli; identical to SEQ ID NO: 2026

SEQ ID NO: 14552 - protein, 360 aa, Escherichia coli; identical to SEQ ID NO: 3354

SEQ ID NO: 14553 - protein, 753 aa, Escherichia coli; identical to SEQ ID NO: 6655

SEQ ID NO: 14554 - protein, 221 aa, Escherichia coli; identical to SEQ ID NO: 3141

SEQ ID NO: 14555 - protein, 628 aa, Escherichia coli
MKPAASFFYCGCFTMIKKASLLTACSVTAFSAWAQDTSPDTLVVTANRFEQPRSTVLAPTTVVTRQDIDRWQSTSVNDVLRRLPGVDITQNGGSGQLSSIFIRGTNASHVLVLIDGVRLNLAGVSGSADLSQFPIALVQRVEYIRGPRSAVYGSDAIGGVVNIITTRDEPGTEISAGWGSNSYQNYDVSTQQQLGDKTRVTLLGDYAHTHGYDVVAYGNTGTQAQTDNDGFLSKTLYGALEHNFTDAWSGFVRGYGYDNRTNYDAYYSPGSPLLDTRKLYSQSWDAGLRYNGELIKSQLITSYSHSKDYNYDPHYGRYDSSATLDEMKQYTVQWANNVIVGHGSIGAGVDWQKQTTTPGTGYVEDGYDQRNTGIYLTGLQQVGDFTFEGAARSDDNSQFGRHGTWQTSAGWEFIEGYRFIASYGTSYKAPNLGQLYGFYGNPNLDPEKSKQWEGAFEGLTAGVNWRISGYRNDVSDLIDYDDHTLKYYNEGKARIKGVEATANFDTGPLTHTVSYDYVDARNAITDTPLLRRAKQQVKYQLDWQLYDFDWGITYQYLGTRYDKDYSSYPYQTVKMGGVSLWDLAVAYPVTSHLTVRGKIANLFDKDYETVYGYQTAGREYTLSGSYTF

SEQ ID NO: 14556 - protein, 412 aa, Escherichia coli; identical to SEQ ID NO: 13668

SEQ ID NO: 14557 - protein, 446 aa, Escherichia coli; identical to SEQ ID NO: 2189

SEQ ID NO: 14558 - protein, 752 aa, Escherichia coli; identical to SEQ ID NO: 4012

SEQ ID NO: 14559 - protein, 518 aa, Escherichia coli; identical to SEQ ID NO: 2349

SEQ ID NO: 14560 - protein, 332 aa, Escherichia coli; identical to SEQ ID NO: 2701

SEQ ID NO: 14561 - protein, 380 aa, Escherichia coli; identical to SEQ ID NO: 7247

SEQ ID NO: 14562 - protein, 191 aa, Escherichia coli; identical to SEQ ID NO: 2727

SEQ ID NO: 14563 - protein, 656 aa, Escherichia coli
MRLKKRYLCTALSLAFTQQAVAAQESDTLTVWSSPVSSTTTTVLDQPTMKALDKQNVAQALSVVPGVVLQKSGSRNEEQVKVRGFDSRQVPVYFDGVPIYVPYDGNLDLARILTNNLGAVEVSKGYSSLLQGPNQMGGAINITTQKPTKPLEANLGYRQGWSRSQDNAYDMHASFAASSDLGYLQVSGSQLKQDFLGLPHGVNNDIAGKHGKMINSSADDKRGIVKLGFTPRENDEYTVTYIKQDGEKDNPPYSGNSGQKSRYWQWPEYDKESFYYQGTTQLNDRFTLKSRLYRDTFENTLMMYNSLADLKNKKGSYSHYSDYSDGAGLQLAADVRENDLLSFAVNWKDDVHREKGAPHAAYDRYEDRTWSLASEYQWAAADNVDVVAGISYDWRDSVEAKKHEKDGSITHYDDNNQSAFNWQVMGKYHFANEDTLALSYYDRTRFPTLKERYTTSKPAYNQIAIVNPQLKPERARGVDLTWNGAFTHDWGFEVSVYYNRVSDAILSHNIDADTIQNQNSGTVDYSGLDAGIKGKISNILDVGLSYALIHADAKRKDIGKITDLPTQTMTAWMTLKPWEPLSVTLSEEARSSSYSNSDGSQKAAGFAVTHIRADYTLGHGFSVNASVNNLFDTKYAYSEGFIEEGRNFWAGIEYTF

SEQ ID NO: 14564 - protein, 784 aa, Escherichia coli; identical to SEQ ID NO: 2244

SEQ ID NO: 14565 - protein, 231 aa, Escherichia coli; identical to SEQ ID NO: 2794

SEQ ID NO: 14566 - protein, 119 aa, Escherichia coli; identical to SEQ ID NO: 5512

SEQ ID NO: 14567 - protein, 415 aa, Escherichia coli
MHGAIISHVTVNANKQATAFSSSQQDTDQYGMKLTLNSQLMDGWQITWGLDAEHERFTSNQMFFDLAQASASGGLNNHKIYTTGRYPSYDITNLAAFLQSSYDINDIFTVSGGVRYQYTENRVDDFIDYTQQQKIAAGKAISADAIPGGSVDYDNFLFNAGLLMHITERQQAWFNFSQGVALPDPGKYYGRGIYGAAVNGHLPLTKSVNVSDSKLEGVKVDSYELGWRFIGDNLRTQIAAYYSLSNKSVERNKDLTISVKDDRRRIYGVEGAVDYLIPDTDWSTGVNFNVLKTESKVNGQWQKYDVKESSPSKATAYINWAPEPWSLRVQSTTSFDVSDAEGNDINGYTTVDFISSWQLPVGTLSFSVENLFDRDYTTVWGQRAPLYYSPGYGPASLYDYKGRGRTFGLNYSVLF

SEQ ID NO: 14568 - protein, 517 aa, Escherichia coli; identical to SEQ ID NO: 2462

SEQ ID NO: 14569 - protein, 274 aa, Escherichia coli; identical to SEQ ID NO: 2301

SEQ ID NO: 14570 - protein, 654 aa, Escherichia coli; identical to SEQ ID NO: 5571

SEQ ID NO: 14571 - protein, 359 aa, Escherichia coli
MKKYLALALIAPLLISCSTTKKGDTYNEAWVKDTNGFDILMGQFAHNIENIWGFKKVVIAGPKDYVKYTDQYQTRSHINFDDGTITIETIAGTEPAAHLRRAIIKTLLMGDDPSSVDLYSDVDDITISKEPFLYGQVVDNTGQPIRWEGRASNFADYLLKNRLKSRSNGLRIIYSVTINMVPNHLDKRAHKYLGMVRQASRKYGVDESLILAIMQTESSFNPYAVSRSDALGLMQVVQHTAGKDVFRSQGKSGTPSRSFLFDPASNIDTGTAYLAMLNNVYLGGIDNPTSRRYAVITAYNGGAGSVLRVFSNDKIQAANIINTMTPGDVYQTLTTRHPSAESRRYLYKVNTAQKSYRRR

SEQ ID NO: 14572 - protein, 713 aa, Escherichia coli
MAKFTPSFSGIKGRALFSLLFAAPMIHATDTATTKDGETITVTADANTATEATDGYQPLSTSTATLTDMPMLDIPQVVNTVSDQVLENQNATTLDEALYNVSNVVQTNTLGGTQDAFVRRGFGANRDGSIMTNGLRTVLPRSFNAATERVEVLKGPASTLYGILDPGGLINVVTKRPEKTFHGSVSATSSSFGGGTGQLDITGPIEGTQLAYRLTGEVQDEDYWRNFGKERSTFIAPSLTWFGDNATVTMLYSHRDYKTPFDRGTIFDLTTKQPVNVDRKIRFDEPFNITDGQSDLAQLNAEYHLNSQWTARFDYSYSQDKYSDNQARVTAYDATTGTLTRRVDATQGSTQRMHSTRADLQGNADIAGFYNEILGGVSYEYYDLLRTDMIRCKNAKDFNIYNPVYGNTSKCTTVSASDSDQTIKQESYSAYAQDALYLTDNWIAVAGIRYQYYTQYAGKGRPFNVNTDSRDEQWTPKLGLVYKLTPSVSLFANYSQTFMPQSSIASYIGDLPPESSNAYEVGAKFELFDGITADIALFDIHKRNVLYTESIGDETIAKTAGRVRSRGVEVDLAGALTENINIIASYGYTDAKVLEDPDYAGKPLPNVPRHTGSLFLTYDIHNMPGNNTLTFGGGGHGVSRRSATNGADYYLPSYFVADAFAAYKMKLQYPVTLQLNVKNLFDKTYYTSSIATNNLGNQIGDPREVQFTVKMEF

SEQ ID NO: 14573 - protein, 432 aa, Escherichia coli; identical to SEQ ID NO: 2026

SEQ ID NO: 14574 - protein, 353 aa, Escherichia coli; identical to SEQ ID NO: 4626

SEQ ID NO: 14575 - protein, 224 aa, Escherichia coli; identical to SEQ ID NO: 3792

SEQ ID NO: 14576 - protein, 360 aa, Escherichia coli; identical to SEQ ID NO: 4018

SEQ ID NO: 14577 - protein, 663 aa, Escherichia coli; identical to SEQ ID NO: 1910

SEQ ID NO: 14578 - protein, 274 aa, Escherichia coli; identical to SEQ ID NO: 2313

SEQ ID NO: 14579 - protein, 236 aa, Escherichia coli
MQTTRTPYSVSFMATVLLLLLFACHSTIANAAVALGATRVIYPANQKQVLLPVTNNDPASVYLIQSWIENAGDQKDTQFVITPPLFSMQGKKENTLRIINATNHQLPGDRESLFWVNVKAIPAMEKDQKNENTLQLAIISRIKMFYRPTHLAMAPEEAPAMLRFRRSGSKFTLINPTPYFITVTNMKAGNSNLPNTMVPPKGEVSVDIPHAVTGDISFQTINDYGALTPRIKATMQ

SEQ ID NO: 14580 - protein, 353 aa, Escherichia coli; identical to SEQ ID NO: 3376

SEQ ID NO: 14581 - protein, 357 aa, Escherichia coli; identical to SEQ ID NO: 2888

SEQ ID NO: 14582 - protein, 265 aa, Escherichia coli
MKMRAVAVFTGMLTGVLSVTGLLSAGAYAAGGEGNMSASATETNARVFSLHLGATRVVYNPASSGETLTVINDQDYPMLVQSEVLSEDQKSPAPFVVTPPLFRLDGQQSSRLRIVRTGGEFPSDRESLQWICVKGIPPKEDDRWAEGKDGEKKADKVSLNVQLSVSSCIKLFVRPPAVKGRPDDVAGKVEWQRAGNRLKGVNPTPFYINLSTLTVGGKEVKEREYIAPFSSREYPLPAGASGKVQWKVITDYGGTSKQFEAELKG

SEQ ID NO: 14583 - protein, 1024 aa, Escherichia coli; identical to SEQ ID NO: 10694

SEQ ID NO: 14584 - protein, 260 aa, Escherichia coli; identical to SEQ ID NO: 4546

SEQ ID NO: 14585 - protein, 235 aa, Escherichia coli
MAASINIRGIKMKGLLSLLISSMIFPVHAGMVIFGTRIIYPAEQKEVMVQLMNQGNRSSLMQAWIDDGDTSLPPEKIQVPFMLTPPVVKVAANSGQQIKIKIMPNKLPSNKESIFYLNVLDIPPNSPEQEGKNALKFAMQNRIKLFYRPAGIAPVNKATFKKLLINRSGNGLVIKNDSANWVTISDVKANNVKVNYETIMIAPLESQSVNVKSNNANNWYLTIIDDHGNYISDKI

SEQ ID NO: 14586 - protein, 351 aa, Escherichia coli; identical to SEQ ID NO: 14256

SEQ ID NO: 14587 - protein, 760 aa, Escherichia coli; identical to SEQ ID NO: 10632

SEQ ID NO: 14588 - protein, 760 aa, Escherichia coli
MENNRNFPARQFHSLTFFAGLCIGITPVAQALAAEGQTNVDDTLVVEASTPSLYAPQQSADPKFSRPVADTTRTMTVISEQVIKDQGATNLTDALKNVPGVGAFFAGENGNSTTGDAIYMRGADTSNSIYIDGIRDIGSVSRDTFNTEQVEVIKGPSGTDYGRSAPTGSINMISKQPRNDSGIDASASIGSAWFRRGTLDVNQVIGDTTAVRLNVMGEKTHDAGRDKVKNERYGVAPSVAFGLGTANRLYLNYLHVTQHNTPDGGIPTIGLPGYSAPSAGTAALNHSGKVDTHNFYGTDSDYDDSTTDTATMRFEHDINDNTTIRNTTRWSRVKQDYLMTAIMGGASNITQPTSDVNSWTWSRTANTKDVSNKILTNQTNLTSTFYTGSIGHDVSTGVEFTRETQTNYGVNPVTLPAVNIYHPDSSIHPGGLTRNGANANGQTDTFAIYAFDTLQITRDFELNGGIRLDNYHTEYDSATACGGSGRGAITCPAGVAKGSPVTTVDTAKSGNLVNWKAGALYHLTENGNIYINYAVSQQPPGGNNFALAQSGSGNSANRTDFKPQKANTSEIGTKWQVLDKRLLLTAALFRTDIENEVEQNDDGTYSQYGKKRVEGYEISVAGNITPAWQVIGGYTQQKATIKNGKDVAQDGSSSLPYTPEHAFTLWSQYQATDDISVGAGARYIGSMHKGSDGAVGTPAFTEGYWVADAKLGYRVNRNLDFQLNVYNLFDTDYVASINKSGYRYHPGEPRTFLLTANMHF

SEQ ID NO: 14589 - protein, 541 aa, Escherichia coli; identical to SEQ ID NO: 3377

SEQ ID NO: 14590 - protein, 641 aa, Escherichia coli
MLAVDDDGETMVVTASSVEQNLKDAPASISVITQEDLQRKPVQNLKDVLKEVPGVQLTNEGDNRKGVSIRGLDSSYTLILVDGKRVNSRNAVFRHNDFDLNWIPVDSIERIEVVRGPMSSLYGSDALGGVVNIITKKIGQKWSGTVTVDTTVQEHRDRGDTYNGQFFTSGPLIDGVLGMKAYGSLAKREKDDPQNSTTTDTGETPRIEGFSSRDGNVEFAWTPNQNHDFTAGYGFDRQERDSDSLDKNRLERQNYSVSHNGRWDYGTSELKYYGEKVENKNPGNSSPITSESNTVDGKYTLPLTAINQFLTVGGEWRHDKLSDAVNLTGGTSSKTSASQYALFVEDEWRIFEPLALTTGVRMDDHETYGEHWSPRAYLVYNATDTVTVKGGWATAFKAPSLLQLSPDWTSNSCRGACKIVGSPELKPETSESWELGLYYMGEEGWLEGVESSVTVFRNDVKDRISISRTSDVNAAPGYQNFVGFETGANGRRIPVFSYYNVNKARIQGVETELKIPFNDEWKLSINYTYNDGRDVSNGENKPLSDLPFHTANGTLDWKPLALEDWSFYVSGHYTGQKRADSATAKTPGGYTIWNTGAAWQVTKDVKLRAGVLNLGDKDLSRDDYSYNEDGRRYFMAVDYRF

SEQ ID NO: 14591 - protein, 828 aa, Escherichia coli; identical to SEQ ID NO: 2390

SEQ ID NO: 14592 - protein, 673 aa, Escherichia coli; identical to SEQ ID NO: 2919

SEQ ID NO: 14593 - protein, 235 aa, Escherichia coli
MIAMQKNAAHTYAISSLLVLSLTGCAWIPSTPLVQGATSAQPVPGPTPVANGSIFQSAQPINYGYQPLFEDRRPRNIGDTLTIVLQENVSASKSSSANASRDGKSNFGFDTVPRYLQGLFGNARADVEASGGNTFNGKGGANASNTFSGTLTVTVDQVLVNGNLHVVGEKQIAINQGTEFIRFSGVVNPRTISGSNTVPSTQVADARIEYVGNGYINEAQNMGWLQRFFLNLSPM

SEQ ID NO: 14594 - protein, 232 aa, Escherichia coli; identical to SEQ ID NO: 2087

SEQ ID NO: 14595 - protein, 213 aa, Escherichia coli; identical to SEQ ID NO: 2232

SEQ ID NO: 14596 - protein, 122 aa, Escherichia coli
MEKNMKKRGAFLGLLLVSACASVFAANNETSKSVTFPKCEGLDAAGIAASVKRDYQQNRVARWADDQIIVGQADPVAWVSLQDIQGKDDKWSVPLTVRGKSADIHYQVSVDCKAGMAEYQRR

SEQ ID NO: 14597 - protein, 274 aa, Escherichia coli; identical to SEQ ID NO: 2309

SEQ ID NO: 14598 - protein, 518 aa, Escherichia coli; identical to SEQ ID NO: 2350

SEQ ID NO: 14599 - protein, 242 aa, Escherichia coli
MLVSTALAALLTTASLTAHASVTPDRTRLVFNESDKSISVTLRNNNEKLPYLAQSWLEDEKGNKITSPLAVLPPVQRIDAMMNGQVKIQALPDIHSLPSDRESLFYYNVREIPPKTGKANTLQIALQTRIKLFWRPKALEKIDMRKPWQFKVTLTRSGQDYTVNNPTPYHVIISDASTQKKGLTAAGFKPLVMPPKTSQPLKAKMASAPVLTYINDYGARMPLIFRCEGNTCKVDEDQSSKG

SEQ ID NO: 14600 - protein, 686 aa, Escherichia coli
MIVEGSATAPDNGENDYNVTSTSAGTKMQMTQRDIPQSVTIVSQQRMEDQQLQTLGEVMENTLGISKSQADSDRALYYSRGFQIDNYMVDGIPTYFESRWNLGDALSDMALFERVEVVRGATGLMTGTGNPSAAINMIRKHATSREFKGDVSAEYGSWNKERYVADLQSPLTEDGKIRARIVGGYQNNDSWLDRYNSEKTFFSGIVDADLGDLTTLSAGYEYQRIDVNSPTWGGLPRWNTDGSSNSYDRARSTAPDWAYNDKEINKVFMTLKQRFADTWQATLNATHSEVEFDSKMMYVDAYVNKADGMLVGPYSNYGPGFDYVGGTGWNSGKRKVDALDLFADGSYELFGRQHNLMFGGSYSKQNNRYISSWANIFPDEIGSFYNFNGNFPQTDWSPQSLAQDDTTHMKSLYAATRVTLADPLHLILGARYTNWRVDTLTYSMEKNHTTPYAGLVFDINDNWSTYASYTSIFQPQNDRDSSGKYLAPITGNNYELGLKSDWMNSRLTTTLAIFRIEQDNVAQSTGTPIPGSNGETAYKAVDGTVSKGVEFELNGAITDNWQLTFGATRYIAEDNEGNAVNPNLPRTTVKMFTSYRLPVMPELTVGGGVNWQNRVYTDTVTPYGTFRAEQGSYALVDLFTRYQVTKNFSLQGNVNNLFDKTYDTNVEGSIVYGAPRNFSITGTYQF

SEQ ID NO: 14601 - protein, 673 aa, Escherichia coli; identical to SEQ ID NO: 2919

SEQ ID NO: 14602 - protein, 236 aa, Escherichia coli
MTNTWNRLALLIFAVLSLLVASELQAGVVVGGTRFIFPADRDSISISLTNTSQESWLINSKINRPTRWAGGEASTVPAPLLAAPPLILLKPGTTGTLRLLRTESDILPVDRETLFELSIASVPSGKVENQSVKVAMRSVFKLFWRPEGLPGDPLEAYQQLRWTRNSQGVQLTNPTPYYINLIQVSVNGKALSNAGVVPPKSQRQTSWCQAITPCHVAWRTINDYGGLSAKKEQNLP

SEQ ID NO: 14603 - protein, 111 aa, Escherichia coli
MKKQIEGMTMKKVLALVVAAAMGLSSAAFAAETVTTPAPTATTTKAAPAKTTHHKKQHKAAPAQKAQAAKKHHKNAKAEQKAPEQKAQAAKKHAKKHSHQQPAKPAAQPAA

SEQ ID NO: 14604 - protein, 219 aa, Escherichia coli
MSFFILPVHAGVVIYGTRIIYPEKNREVLVQLMNQSKNASLIQAWIDDGNTTIAPEKIQVPFILTPPVSRVAGGSGQQLKIRKMPNNLPHNKESLFYLNVLDIPPNNPQNAGKNKIKLALQNRIKLLWRPSGIAPVDKKSFSQLNIKKKNNAISINNETANWITITTIKAQNVKVNNESILLPPFSNNDITLKNNHASEYELTVVDDYRNNIHSKIAAR

SEQ ID NO: 14605 - protein, 711 aa, Escherichia coli
MFTPSFSGLKGRALFSLLFAAPMIHATDSVTTKDGETITVTADANTATEATDGYQPLSTSTATLTDMPMLDIPQVVNTVSDQVLENQNATTLDEALYNVSNVVQTNTLGGTQDAFVRRGFGANRDGSIMTNGLRTVLPRSFNAATERVEVLKGPASTLYGILDPGGLINVVTKRPEKTFHGSVSATSSSFGGGTGQLDITGPIEGTQLAYRLTGEVQDEDYWRNFGKERSTFIAPSLTWFGDNATVTMLYSHRDYKTPFDRGTIFDLTTKQPVNVDRKIRFDEPFNITDGQSDLAQLNAEYHLNSQWTARFDYSYSQDKYSDNQARVTAYDATTGTLTRRVDATQGSTQRMHATRADLQGNVDIAGFYNEILGGVSYEYYDLLRTDMIRCKKAKDFNIYNPVYGNTSKCTTVSASDSDQTIKQESYSAYAQDALYLTDNWIAVAGIRYQYYTQYAGKGRPFNVNTDSRDEQWTPKLGLVYKLTPSVSLFANYSQTFMPQSSIASYIGDLPPESSNAYEVGAKFELFDGITADIALFDIHKRNVLYTESVGDETIAKTAGRVRSRGVEVDLAGALTENINIIASYGYTDAKVLEDPDYAGKPLPNIPRHTGSLFLTYDIHNMPGNNTLTFGGGGHGVSRRSATNGADYYLPGYFVADAFAAYKMKLQYPVTLQLNVKNLFDKTYYTSSIATNNLGNQIGDPREVQFTVKMEF

SEQ ID NO: 14606 - protein, 103 aa, Escherichia coli; identical to SEQ ID NO: 10639

SEQ ID NO: 14607 - protein, 235 aa, Escherichia coli; identical to SEQ ID NO: 4365

SEQ ID NO: 14608 - protein, 430 aa, Escherichia coli; identical to SEQ ID NO: 2617

SEQ ID NO: 14609 - protein, 245 aa, Escherichia coli; identical to SEQ ID NO: 5820

SEQ ID NO: 14610 - protein, 203 aa, Escherichia coli; identical to SEQ ID NO: 2008

SEQ ID NO: 14611 - protein, 241 aa, Escherichia coli; identical to SEQ ID NO: 2922

SEQ ID NO: 14612 - protein, 366 aa, Escherichia coli
MKLKIVAVVVTGLLAANVAHAAEVYNKDGNKLDLYGKVTALRYFTDDKRDDGDKTYARLGFKGETQINDQMIGFGHWEYDFKGYNDEANGSRGNKTRLAYAGLKISEFGSLDYGRNYGVGYDIGSWTDMLPEFGGDTWSQKDVFMTYRTTGVATYRNYDFFGLIEGLNFAAQYQGKNERTDNGHLYGADYTRANGDGFGISSTYVYDGFGIGAVYTKSDRTNAQERAAANPLNASGKNAELWATGIKYDANNIYFAANYAETLNMTTYGDGYISNKAQSFEVVTQYQFDFGLRPSLAYLKSKGRDLGRYGDQDMIEYIDVGATYFFNKNMSTYVDYKINLIDESDFTRAVDIRTDNIVATGITYQF

SEQ ID NO: 14613 - protein, 565 aa, Escherichia coli; identical to SEQ ID NO: 3088

SEQ ID NO: 14614 - protein, 828 aa, Escherichia coli; identical to SEQ ID NO: 2386

SEQ ID NO: 14615 - protein, 169 aa, Escherichia coli; identical to SEQ ID NO: 4593

SEQ ID NO: 14616 - protein, 478 aa, Escherichia coli; identical to SEQ ID NO: 2405

SEQ ID NO: 14617 - protein, 191 aa, Escherichia coli; identical to SEQ ID NO: 6650

SEQ ID NO: 14618 - protein, 505 aa, Escherichia coli; identical to SEQ ID NO: 10600

SEQ ID NO: 14619 - protein, 207 aa, Escherichia coli; identical to SEQ ID NO: 2211

SEQ ID NO: 14620 - protein, 840 aa, Escherichia coli
MHLPLYHYRAHFSFSLLALTIASSLPAYGGKFNPKFLENVQGIDQHIDLSVYDSPVGQQIPGKYRVSVFVNEEKMASRTLDFSTASEAKRKASGESLMPCLSRVQLEEMGVRVDSFPALKMSPPEACVAFDEIIPQATSRFDFNTQTLHLSFPQAAMMMTARGTVDPSRWDEGIPALLLDYSFSGSNGRNEGTGSSSDSTSDSYYLNLRSGLNVGPWRLRNNSIWNRTDGKNQWDNVGTSLNRAIIPLKSQITLGDTATPGEIFDSVQMRGALLASDDEMLPDSQRGFAPVVRGIAKSNAEVSIEQNGYVIYRTFVQPGAFEINDLYVTSGSGDLTVIIKEADGSEQRFIQPFSAVAIFQREGYLKYSLAAGEYRAGNYDSDKPHFGQFTAMYGLPWGMTAYGGALLSADYNALALGLGKNFGTIGAVSVDVTQAKSQLRNNEKEEGQSYRFLYSKSFEGGTDLRLLGYKYSTSGYYTFQEATDVRSDADSDYRRYHKRSQIQGNITQQLGDYGSVYFNMTQQDYWNVDGKENSLSAGYHGHIGRVNYSVAYTWTRSPEWEEDDRLWSFSVSIPLGGAWSSYRMTTDQNGKTSQQASVSGTLLEDRNLSYNVQQGYTSNGVGYSGSVNMGYMGGSGNIDVGYNYSKDNQQVNYGVRGGVIVHSEGITLSQPLGESLAIVSAPGARGGHVVNSSGVEVDWMGNAVVPYLTPYRETIVELRSDTLGQNVELQEAFQKVVPTRGAVVRSRFDTRVGYRVLMSLKQANGNAVPFGATAALIDESKPASSIVGEEGQLYISGMPEEGELQVSWGNEQAQRCRVPFRLPENKDNAAIVMVNAVCEK

SEQ ID NO: 14621 - protein, 591 aa, Escherichia coli; identical to SEQ ID NO: 3668

SEQ ID NO: 14622 - protein, 834 aa, Escherichia coli
MYKKLKLTTISELIKNIYCSLSVLIIGCASAYAVEFNKDLIEAEDRENVNLSQFETDGQLPVGKYSLNALINNKRTPIHLDLQWVLIDNQTAVCLTPEQLTLLGFTDEIIEEAQQNLIDGCYPIEKEKQITTYLDKGKMQLSISAPQAWLKYKDANWTPPELWDHGIAGAFLDYNLYASHYAPHQGDNSQNISSYGQAGVNLGAWRLRTDYQYDQSFNNGKSQANNLDFPRIYLFRPIPAINAKLTIGQYDTESSIFDSFHFSGVSLKSDENMLPPDLRGYAPQITGVAQTNAKVTVSQNNRIIYQENVPPGPFAITNLFNTLQGQLDVKVEEEDGQVTQWQVASNSIPYLTRKGQIRYTTAMGKPTSVGGDSLQQPFFWTGEFSWGWLNNVSLYGGSVLTNRDYQSLAAGVGFNLNSLGSLSFDVTRSDAQLHNQDKETGYSYRANYSKRFESTGSQLTFAGYRFSDKNFVTMNEYINDTNHYTNYQNEKESYIVTFNQYLESLRLNTYVSLARNTYWDASSNVNYSLSLSRDFDIGPLENVSTSLTFSRINWEEDNQDQLYLNISIPWGTSRTLSYGMQRNQDNKISHTASWYDSSDRNNSWSVSASGDNDEFKDMKASLRASYQHNTENGRLYLSGTSQRDSYYSLNASWNGSFTATRHGAAFHDYSGSADSRFMIDADGAEDIPLNNKRAVTNRYGIGVIPSVSSYITTSLSVDTRNLPENVDIENSVITTTLTEGAIGYAKLDTRKGYQIMGVIRLADGSHPPLGISVKDKTSHKELGLVADGGFVYLNGIQDDSKLTLRWGDKSCFIQPPNSSNLTTGTVILPCISQN

SEQ ID NO: 14623 - protein, 826 aa, Escherichia coli; identical to SEQ ID NO: 3700

SEQ ID NO: 14624 - protein, 816 aa, Escherichia coli; identical to SEQ ID NO: 12597

SEQ ID NO: 14625 - protein, 863 aa, Escherichia coli
MHIRKHRLAGFFVRLFVACAFAAQAPLSSAELYFNPRFLADDPQAVADLSRFENGQELPPGTYRVDIYLNNGYMATRDVTFNTGDSEQGIVPCLTRAQLASMGLNTASVAGMNLLADDACVPLTTMVQDATAHLDVGQQRLNLTIPQAFMSNRARGYIPPELWDPGINAGLLNYNFSGNSVQNRIGGNSHYAYLNLQSGLNIGAWRLRDNTTWSYNSSDRSSGSKNKWQHINTWLERDIIPLRSRLTLGDGYTQGDIFDGINFRGAQLASDDNMLPDSQRGFAPVIHGIARGTAQVTIKQNGYDIYNSTVPPGPFTINDIYAAGNSGDLQVTIKEADGSTQIFTVPYSSVPLLRREGHTRYSITAGEYRSGNAQQEKPRFFQSTLLHGLPAGWTIYGGTQLADRYRAFNFGIGKNMGALGALSVDMTQANSTLPDDSQHDGQSVRFLYNKSLNESGTNIQLVGYRYSTSGYFNFADTTYSRMNGYNIETQDGVIQVKPKFTDYYNLAYNKRGKLQLTVTQQLGRTSTLYLSGSHQTYWGTSNVDEQFQAGLNTAFEDINWTLSYSLTKNAWQKGRDQMLALNVNIPFSHWLRSDSKSQWRHASASYSMSHDLNGRMTNLAGVYGTLLEDNNLSYSVQTGYAGGGDGNSGSTGYATLNYRGGYGNANIGYSHSDDIKQLYYGVSGGVLAHANGVTLGQPLNDTVVLVKAPGAKDAKVENQTGVRTDWRGYAVLPYATEYRENRVALDTNTLADNVDLDNAVANVVPTRGAIVRAEFKARVGIKLLMTLTHNNKPLPFGAMVTSESSQSSGIVADNGQVYLSGMPLAGKVQVKWGEEENAHCVANYQLPPESQQQLLTQLSAECR

SEQ ID NO: 14626 - protein, 869 aa, Escherichia coli; identical to SEQ ID NO: 8419

SEQ ID NO: 14627 - protein, 460 aa, Escherichia coli
MPDHSLFRLRILPWCIALAMSGSYSSVWAEDDIQFDSRFLELKGDTKIDLKRFSSQGYVEPGKYNLQVQLNKQPLAEEYDIYWYAGEDDASKSYACLTPELVAQFGLKEDVAKNLQWSHDAKCLKSGQLEGMEIKADLSQSALVISLPQAYLEYTYPDWDPPSRWDDGISGIVADYSINAQTRHEENGGDDSNEISGNGTVGVNLGPWRMRADWQTNYQHTRSNDDDDEFSGDETQKKWEWSRYYAWRALPSLKAKLALGEDYLRSDIFDGFNYVGGSVSTDDQMLPPNLRGYAPDISGVAHTTAKVTVSQMGRVIYETQVPAGPFRIQDLGDSVSGTLHIRIEEQNGQVQEYDISTASMPYLTRPGQVRYKIMMGRPQEWGHHIEGEFFLVLKLPGGSLTAGRYMAAHWEMKTISLRRLASVAICLHSARSRLMLLTRTPNWIKTPLMAKVRWTVTPSV

SEQ ID NO: 14628 - protein, 539 aa, Escherichia coli; identical to SEQ ID NO: 3050

SEQ ID NO: 14629 - protein, 518 aa, Escherichia coli; identical to SEQ ID NO: 2349

SEQ ID NO: 14630 - protein, 360 aa, Escherichia coli; identical to SEQ ID NO: 3354

SEQ ID NO: 14631 - protein, 200 aa, Escherichia coli; identical to SEQ ID NO: 1784

SEQ ID NO: 14632 - protein, 838 aa, Escherichia coli; identical to SEQ ID NO: 7717

SEQ ID NO: 14633 - protein, 355 aa, Escherichia coli
MAISAVAASVLMAMSAQAAEIYNKDSNKLDLYGKVNAKHYFSSNDADDGDTTYARLGFKGETQINDQLTGFGQWEYEFKGNRAESQGSSKDKTRLAFAGLKFGDYGSIDYGRNYGVAYDIGAWTDVLPEFGGDTWTQTDVFMTGRTTGVATYRNNDFFGLVDGLNFAAQYQGKNDRTDVTQANGDGFGFSTTYEYEGFGVGATYAKSDRTNNQVIYGNNSLNASGQNAEVWAAGLKYDANNIYLATTYSETQNMTVFGKNHIANKAQNFEVVAQYQFDFGLRPSVAYLQSKGKDLGAWGDQDLVEYIDVGATYYFNKNMSTFVDYKINLIDKSDFTKASGVATDDIVAVGMVYQF

SEQ ID NO: 14634 - protein, 250 aa, Escherichia coli; identical to SEQ ID NO: 3707

SEQ ID NO: 14635 - protein, 224 aa, Escherichia coli; identical to SEQ ID NO: 3115

SEQ ID NO: 14636 - protein, 733 aa, Escherichia coli
MAQALAAEGQTNADDTLVVEASTPSLYAPQQSADPKFSRPVADTTRTMTVISEQVIKDQGATNLTDALKNVPGVGAFFAGENGNSTTGDAIYMRGADTSNSIYIDGIRDIGSVSRDTFNTEQVEVIKGPSGTDYGRSAPTGSINMISKQPRNDSGIDASASIGSAWFRRGTLDVNQVIGDTTAVRLNVMGEKTHDAGRDKVKNERYGVAPSIAFGLGTANRLYLNYLHVTQHNTPDGGIPTIGLPGYSAPSAGTAALNHSGKVDTHNFYGTDSDYDDSTTDTATMRFEHDINDNTTIRNTTRWSRVKQDYLMTAIMGGASNITQPTSDVNSWTWSRTANTKDVSNKILTNQTNLTSTFYTGSIGHDVSTGVEFTRETQTNYGVNPVTLPAVNIYHPDSSIHPGGLTRNGANANGQTDTFAIYAFDTLQITRDFELNGGIRLDNYHTEYDSATACGGSGRGAITCPTGVAKGSPVTTVDTAKSGNLVNWKAGALYHLTENGNVYINYAVSQQPPGGNNFALAQSGSGNSANRTDFKPQKANTSEIGTKWQVLDKRLLLTAALFRTDIENEVEQNDDGTYSQYGKKRVEGYEISVAGNITPAWQVIGGYTQQKATIKNGKDVAQDGSSSLPYTPEHAFTLWSQYQATDDISVGAGARYIGSMHKGSDGAVGTPAFTEGYWVADAKLGYRVNRNLDFQLNVYNLFDTDYVASINKSGYRYHPGEPRTFLLTANMHF

SEQ ID NO: 14637 - protein, 331 aa, Escherichia coli; identical to SEQ ID NO: 2700

SEQ ID NO: 14638 - protein, 828 aa, Escherichia coli; identical to SEQ ID NO: 5894

SEQ ID NO: 14639 - protein, 436 aa, Escherichia coli
MKVLEKLSRLYHLTWYYDENILYIYKTNEISRSIITPTYLDIDSLLKYLRDTISVNKNSCNVRKITTFNSIEVRGVPECIKYITSLSESLDKEAQSKAKNKDVVRVFKLNYASATDITYKYRDQNVVVPGVVSILKTMASNGSLPSTGKGAVERNGNLFDNSVKISADPRLNAVVVKDREITMDIYRQLISELDIEQRQIEISVSIIDVDANDLQQLGVNWSGTLNAGQGSIAFNSSTAQANLSSSVISNANNFMIRVNALQQNSKAKILSQPSIITLNNMQAILDKNVTFYTKVSGEKVASLESITSGTLLRVTPRILDDNSNSLTGKRRERVRLLLDIQDGNQSTNQSNAQDASSILPEVQNSEMTTEATLSAGESLLLGGFIQDKESSSKDGIPLLSDIPVIGNLFSSTTKQKHSVVRLFLIKATPIKSASSE

SEQ ID NO: 14640 - protein, 266 aa, Escherichia coli; identical to SEQ ID NO: 1894

SEQ ID NO: 14641 - protein, 765 aa, Escherichia coli; identical to SEQ ID NO: 4323

SEQ ID NO: 14642 - protein, 170 aa, Escherichia coli [sequence omitted]

SEQ ID NO: 14643 - protein, 213 aa, Escherichia coli; identical to SEQ ID NO: 2232

SEQ ID NO: 14644 - protein, 224 aa, Escherichia coli; identical to SEQ ID NO: 3165

SEQ ID NO: 14645 - protein, 565 aa, Escherichia coli; identical to SEQ ID NO: 2678

SEQ ID NO: 14646 - protein, 236 aa, Escherichia coli; identical to SEQ ID NO: 3286

SEQ ID NO: 14647 - protein, 226 aa, Escherichia coli; identical to SEQ ID NO: 3085

SEQ ID NO: 14648 - protein, 774 aa, Escherichia coli; identical to SEQ ID NO: 3122

SEQ ID NO: 14649 - protein, 208 aa, Escherichia coli; identical to SEQ ID NO: 1949

SEQ ID NO: 14650 - protein, 746 aa, Escherichia coli; identical to SEQ ID NO: 3695

SEQ ID NO: 14651 - protein, 243 aa, Escherichia coli; identical to SEQ ID NO: 12586

SEQ ID NO: 14652 - protein, 118 aa, Escherichia coli [sequence omitted]

SEQ ID NO: 14653 - protein, 161 aa, Escherichia coli; identical to SEQ ID NO: 2582

SEQ ID NO: 14654 - protein, 673 aa, Escherichia coli; identical to SEQ ID NO: 3719

SEQ ID NO: 14655 - protein, 368 aa, Escherichia coli; identical to SEQ ID NO: 3171

SEQ ID NO: 14656 - protein, 230 aa, Escherichia coli; identical to SEQ ID NO: 3348

SEQ ID NO: 14657 - protein, 732 aa, Escherichia coli; identical to SEQ ID NO: 3068

SEQ ID NO: 14658 - protein, 614 aa, Escherichia coli; identical to SEQ ID NO: 3301

SEQ ID NO: 14659 - protein, 231 aa, Escherichia coli; identical to SEQ ID NO: 3055

SEQ ID NO: 14660 - protein, 432 aa, Escherichia coli; identical to SEQ ID NO: 2026

SEQ ID NO: 14661 - protein, 784 aa, Escherichia coli; identical to SEQ ID NO: 2244

SEQ ID NO: 14662 - protein, 678 aa, Escherichia coli; identical to SEQ ID NO: 3014

SEQ ID NO: 14663 - protein, 193 aa, Escherichia coli; identical to SEQ ID NO: 2246

SEQ ID NO: 14664 - protein, 102 aa, Escherichia coli; identical to SEQ ID NO: 1824

SEQ ID NO: 14665 - protein, 243 aa, Escherichia coli; identical to SEQ ID NO: 2910

SEQ ID NO: 14666 - protein, 222 aa, Escherichia coli; identical to SEQ ID NO: 13594

SEQ ID NO: 14667 - protein, 430 aa, Escherichia coli; identical to SEQ ID NO: 2617

SEQ ID NO: 14668 - protein, 363 aa, Escherichia coli; identical to SEQ ID NO: 3347

SEQ ID NO: 14669 - protein, 717 aa, Escherichia coli
MAQGLSTTAASAGLITSAVMLAISPLSFLAAADKFERAKQLESYSERFKKLNYEGDALLAAFHKETGAIDAALTTINTVLSSVSAGVSAASSASLIGAPISMLVSALTGTISGILEASKQAMFEHVAEKFAARINEWEKEHGKNYFENGYDARHAAFLEDSLSLLADFSRQHAVERAVAITQQHWDEKIGELAGITRNADRSQSGKAYINYLENGGLLEAQPKEFTQQVFDPQKGTIDLSTGNVSSVLTFITPTFTPGEEVRERKQSGKYEYMTSLIVNGKDTWSVKGIKNHKGVYDYSKLIQFVEKNNKHYQARMISELGDKDDVVYSGAGSSEVFAGEGHDTVSYNKTDVGKLTIDATGASKPGEYIVSKNMYGDVKVLQEVVKEQEVSVGKRTEKIQYRDFEFRTGGIPYDVIDNLHSVEELIGGKHDDEFKGGKFNDIFHGADGNDYIEGNYGNDRLYGDDGDDYISGGQGDDQLFGGSGNDKLSGGDGNNYLTGGSGNDELQAHGAYNILSGGTGDDKLYGGGGIDLLDGGEGNDYLNGGFGNDIYVYRQNYGHHTIADEGGKGDRLHLSDISFDDIAFKRVGNDLIMNKAINGVLSFNESNDVNGITFKNWFAKDASGADNHLVEVITDKDGREIKVDKIPHNNNERSGYIKASNIASEKNMVNITSVANDINKIISSVSGFDSGDERLASLYNLSLHQNNTHSTTLTTTV

SEQ ID NO: 14670 - protein, 191 aa, Escherichia coli; identical to SEQ ID NO: 2727

SEQ ID NO: 14671 - protein, 274 aa, Escherichia coli; identical to SEQ ID NO: 3721

SEQ ID NO: 14672 - protein, 386 aa, Escherichia coli; identical to SEQ ID NO: 3094

SEQ ID NO: 14673 - protein, 232 aa, Escherichia coli; identical to SEQ ID NO: 2087

SEQ ID NO: 14674 - protein, 351 aa, Escherichia coli; identical to SEQ ID NO: 3691

SEQ ID NO: 14675 - protein, 747 aa, Escherichia coli
MARSKTAQPKHSLRKIAVVVATAVSGMSVYAQAAVEPKEDTITVTVAPAPQESAWGPAATIAARQSATGTKTDTPIQKVPQSISVVTAEEMALHQPKSVKEALSYTPGVSVGTRGASNTYDHLIIRGFAAEGQSQNNYLNGLKLQGNFYNDAVIDPYMLERAEIMRGPVSVLYGKSSPGGLLNMVSKRPTTEPLKEVQFKAGTDSLFQTGFDFSDSLDDDGVYSYRLTGLARSANAQQKGSEEQRYAIAPAFTWRPDDKTNFTFLSYFQNEPETGYYGWLPKEGTVEPLPNGKRLPTDFNEGAKNNTYSRNEKMVGYSFDHEFNDTFTVRQNLRFAENKTSQNSVYGYGVCSDPANAYSKQCAALAPADKGHYLARKYVVDDEKLQNFSVDTQLQSKFATGDIDHTLLSGVDFMRMRNDINAWFGYDDSVPLLNLYNPVNTDFDFNAKDPANSGPYRILNKQKQTGVYVQDQAQWDKVLVTLGGRYDWADQESLNRVAGTTDKRDDKQFTWRGGVNYLFDNGVTPYFSYSESFEPSSQVGKDGNIFAPSKGKQYEVGVKYVPEDRPIVVTGAVYNLTKTNNLMADPEGSFFSVEGGEIRARGVEIEAKAALSASVNVVGSYTYTDAEYTTDTTYKGNTPAQVPKHMASLWADYTFFDGPLSGLTLGTGGRYTGSSYGDPANSFKVGSYTVVDALVRYDLARVGMAGSNVALHVNNLFDREYVASCFNTYGCFWGAERQVVATATFRF

SEQ ID NO: 14676 - protein, 249 aa, Escherichia coli; identical to SEQ ID NO: 3492

SEQ ID NO: 14677 - protein, 162 aa, Escherichia coli; identical to SEQ ID NO: 1965

SEQ ID NO: 14678 - protein, 204 aa, Escherichia coli; identical to SEQ ID NO: 2957

SEQ ID NO: 14679 - protein, 89 aa, Escherichia coli; identical to SEQ ID NO: 2833

SEQ ID NO: 14680 - protein, 203 aa, Escherichia coli; identical to SEQ ID NO: 2009

SEQ ID NO: 14681 - protein, 241 aa, Escherichia coli; identical to SEQ ID NO: 2922

SEQ ID NO: 14682 - protein, 400 aa, Escherichia coli
MMITLRKLPLAVAVAAGVMSAQAMAVDFHGYARSGIGWTGSGGEQQCFQTTGAQSKYRLGNECETYAELKLGQEVWKEGDKSFYFDTNVAYSVAQQNDWEATDPAFREANVQGKNLIEWLPGSTIWAGKRFYQRHDVHMIDFYYWDISGPGAGLENIDVGFGKLSLAATRSSEAGGSSSFASNNIYDYTNETANDVFDVRLAQMEINPGGTLELGVDYGRANLRDNYRLVDGASKDGWLFTAEHTQSVLKGFNKFVVQYATDSMTSQGKGLSQGSGVAFDNEKFAYNINNNGHMLRILDHGAISMGDNWDMMYVGMYQDINWDNDNGTKWWTVGIRPMYKWTPIMSTVMEIGYDNVESQRTGDKNNQYKITLAQQWQAGDSIWSRPAIRVFATYAKWDEK

SEQ ID NO: 14683 - protein, 641 aa, Escherichia coli; identical to SEQ ID NO: 3774

SEQ ID NO: 14684 - protein, 669 aa, Escherichia coli; identical to SEQ ID NO: 13681

SEQ ID NO: 14685 - protein, 646 aa, Escherichia coli
MRLATPRINLSESLTGVPGLQVQNRQNYAQDLQLSIRGFGSRSTYGIRGIRLYVDGIPATMPDGQGQTSNIDLSSVQNVEVLRGPFSALYGNASGGVMNVTTQTGQQPPTIEASSYYGSFGSWRYGLKATGATGDGTQPGDVDYTVSTTRFTTHGYRDHSGAQKNLANAKLGVRIDEASKLSLIFNSVDIKADDPGGLTKAEWKANPQQAPRAEQYDTRKTIKQTQAGLRYERSLSAQDDMSVMMYAGERETTQYQSIPMAPQLNPSHAGGVITLQRHYQGIDSRWTHRGELGVPVTFTTGLNYENMSENRKGYNNFRQNSGMPEYGQKGELRRDERNLMWNIDPYLQTQWQLSEKLSLDAGVRYSSVWFDSNDHYVTPGNGDDSGDASYHKWLPAGSLKYAMTDAWNIYLAAGRGFETPTINELSYRADGQSGMNFGLKPSTNDTIEIGSKTRIGDGLLSLALFQTDTDDEIVVDSSSGGRTTYKNAGKTRRQGAELAWDQRFAGDFRVNASWTWLDATYRSNVCNEQDCNGNRMPGIARNMGFASIGYVPEDGWYAGTEARYMGDIMADDENTAKAPSYTLVGLFTGYKYNYHNLTVDLFGRVDNLFDKEYVGSVIVNESNGRYYEPSPGRNYGVGMNIAWRFE

SEQ ID NO: 14686 - protein, 729 aa, Escherichia coli; identical to SEQ ID NO: 3720

SEQ ID NO: 14687 - protein, 361 aa, Escherichia coli; identical to SEQ ID NO: 3061

SEQ ID NO: 14688 - protein, 221 aa, Escherichia coli; identical to SEQ ID NO: 3672

SEQ ID NO: 14689 - protein, 805 aa, Escherichia coli
MKLKTFPKISLLALSIWYSHSSLADELNLDFIQNVSVIPSILKSDAIYPEGQYIVDVTVNKERMGRLGLNISKEDEQNNMLCLSPEWLEKAGVMLNMDAYQDVFDEGKGCYVLAKKPHTLVDFDYGAQTLNLNIPQVYLLGKTDPTRWDYGVNGGRLKYYGNFNKTVHNDFNAFGNIDATINLGRWVLSSNMNVSHSDDKTKFTSSDLTLSTAISQVQGDLLLGKSQTRTELFSDFNFYGAALRSNSNMRPWEFRGYAPDISGVALTPSRVTVKQNGYMVYSKMVPAGPYRLDDLRPMGNGDLVVTVEDENGNKTEQVYPVTTLPTLLRPGEFQYNLAIGKKNNSNELDKAFDSDTGLFWLGSLDYGFTNTTLNSAVLLNENYQSGGLGVTHMLGGLGALSLSANVSKASYNNGEEKSGQSFSAKYAKSFTDKTDLQLLTYRYQSKGYVEFADFNPKDIWQYARYGGQRTRYEARLSHRFDGTYLSGSYWWQDYWMREGQDTGGTMSISTSVFDSVSLFLNGTYSKYAWSDKPDYSVSLNVSVPFNLKGTRHYSSNSVGYTYNGGTTFNSSVSATPTDRFNYSLSTNAGSKGDRGASVSASYAFDAIQTNFGVSRSYSKQGYSQSSLSGSVSGSVLGTSETGPLFTKESSDTVGIVSIPGVEGVSVNGSMPTDRNGNTVVWLSEYSENNININMDNVPDNMEFEITSYNVVPTEKAIVYRKFGFENVLRYILRVKDAQGNYLTGGDAKTEQGLNAGFISNNGVLLMNMLAEPKSVSVATGDGKQCRFSIAGLKANTNKVQEVRCE

SEQ ID NO: 14690 - protein, 856 aa, Escherichia coli
MWQIKTSLTAVAYSVMMTCTLLHVEDVIARTYSFNSSLLSGGVKGVDLTVFEEGGQLPGIYQTDIILNGSRVDSLEMPFHTEKDENGRPYLKTCLTQEMLARYGVKTEEYPALFRSLGGGSDTSGERGVCADLSAIPQATENYQFAAQQLVLGIPQVALRPLLRGIAPEVLWDDGIPAFLLNWQANAGRSEYRGYIKDVEDYFWSSLEPGINIGSWRIRNLTTWNKSSGQSGKWESLYIRAERGLNSLKSRLTLGENYTPSDIFDSVPFRGGMLSSDESMVPYNQREFAPVVRGIARTQARIEVRQNGYLIQSQTVAPGAFALTDLPVTGSGSDLQVTVRESDGTVQVFTVPFTTPAIALREGYLKYNVMAGQYRSSDDAVEDSTLGQVMGMYGLPWGLTVFGGLQGAEHYQSAALGLGWSLGKLGAVSLDTIHSRGQQKGYNYETGNTWRIRYNKSFELTGTSFTAASYQYSSSGYHTLSDVLETYRDDGRFAYRSTDSRTSRTTVNLSQSLGRWGYLGLNGSRDEYRDRPHQDYIGASYGASWNRMSLSVNWSRNHSTRGYYGSKSRTEDSISIWMSIPLESWLGRSDNNISATAQMQRSTEQNTRYELGLNGRAFDRRLFWEVHEQMVSGSEYNTGTSRLNLRWSGTYGELAGMYSYSSNMRQINAGMSGSMVAHGEGVTFGQRAGDTVTLIAAPGVSGASVGDWPGVRTDFRGYALAGYASPYQENVITLDPTTFPEDAEVPQTDSRVVPTKGAVVRAGFRTRVGGRALVSLTRQDGSSLPFGAIVTLEGKPGETSGSAGVVDDKGRVYLSGLSETGKLKAQWGENSLCHADYRLPEEKGPAGIFLTRTVCM

SEQ ID NO: 14691 - protein, 838 aa, Escherichia coli
MRILTCVPKYTKTRVALAVILACAFIYSSTGEARRYSFDASQLNGGGKGVDLSLFEEGAQLPGVYPVDIILNGSRVDSREMAFYGVKVEDYPGLFRQGDGDSGKDADACADLSVIPGATETHQFAAQQLLLGIPQVALRPQFTGIAPEALWDDGIPAFLLNWQANAYRSEYRGYGKSVSDSFQATLEPGINVGPWRVRNLTTWNKSSGQPGEWESSYTRAERGLNGIKSRLTLGESYTPSDIFDSVPFRGVMLGSDENMVPYSQREFAPVVRGIARTQARIEVRQNGYLIRSLTVAPGAFALTDLPVTGSGGDLQVTVLESDGTTQVFTVPFTTPAIALREGYMKYNVTGGQYRSYDDAVEHTSLGQATLMYGLPWGLTVFGGVQGAKHYQSAALGLGWALGSLGAVSVDGIHSRGQKKGRVQESGDTWRVRYNKSFETTGTSFTAASYQYSSDGYYTLSDVLDTYRHHGSGYSYKSSEHRSRRTTLNLSQSMGSLGYVSLWGSRDEYRDGRENRDSMGASYSTTWKDISLSVNWSRNRNAGGYYGWRQGKTEDSVSVWMSVPLGRWLGNTDNDIRATARVQRSTGQDTRYEAGMNGRAFDRRLSWDIRKQVTPGSETNSDSSRLNLTWYGTYGEATGMYSYSSHSRQMSAGLSGGLVAHRHGVTLGQKTGETVALVEAPGVSGASVSGWPGVRTDFRGYTLLGWISPYQENVVTLDPTTFPADAEVPQTDSRVVPTKGAVVSAGFVTRVGGRALVTLTRGDGTPLPFGAVVTVDGEAGRISGAAGVVGDNGEVYMSGLSETGKLKAQWGQNSQCHADYRLPEEKGPAGIFLTRSVCM

SEQ ID NO: 14692 - protein, 859 aa, Escherichia coli
MRDTSSGRMRTGVTGLALAVMVACVMFRAESGIARTYSFDAAMLKGGGKGVDLTLFEEGGQLPGIYPVDIILNGSRVDSQEMAFHAERDAEGRPYLKTCLTREMLARYGVRIEEYPALFRASGEGRGASVAEEACADLTAIPQATESYQFAAQQLVLGIPQVAPSAAEGDWPEALWDDGIPAFLLNWQANAGRSEYRGYGKRVTDSYWVSLQPGINIGPWRVRNLTTWNRSSGQSGKWESSYIRAERGLNGIKSRLTLGEDYTPSDIFDSVPFRGAMMSSDESMVPYNLREFAPVVRGIARTQARIEVRQNGYLIQSQTVAPGAFALTDLPVTGSGSDLQVTVLESDGTAQVFTVPFTTPAIALREGYLKYNVTAGQYRSSDDAVEHTSLGQVTAMYGLPWGLTVYGGLQGADDYQSAALGLGWSLGRLGAVSLDTTHSRGQQKGHDYETGDTWRIRYNKSFELTGTSFTAASYQYSSDGYHTLPDVLDTWRDDRYAYRHTENRSRRTTLSLSQSLGQWGYVGLNGSRDEYRDRPHRDYFGASYSTSWNNISLSVNWSRNRNSGGYYGGWSRTEDSVSMWMSVPLGRWFGGADNDISTTAQMQRSTGQDTRYEAGLNGRAFDRRLYWDVREQMVPGSESHADTSRLNLTWYGTYGELTGMYSYSSTMRQLNAGMSGSMVAHSEGVTFGQRTGDTVALIAAPGVSGASVGGWPGVRTDFRGYTLAGYASPYQENVLTLDPTTFPEDAEVPQTDSRVVPTKGAVVRAGFRTRVGGRALVSLARQDGTPLPFGAVVTVEGEAGQAAGSAGVVGDRGEVYLSGLKESGKLKAQWGENSLCHADYRLPEEKGPAGIFLTRTVCM

SEQ ID NO: 14693 - protein, 856 aa, Escherichia coli
MLKRVGCALQSVFVLNRLHIMKKNKSTFTINFITYSLMLSLAGVPVYAVDFNTDVLDAADRQNIDFSRFSRAGYIMPGQYQMEIRVNGQDISPSAFQIAFLEPPFSDSDNEKPLPEPCLTPEIVSRMGLTEASQEKVTYWNNGQCADFRQLSGVEIRPNPAEGMLYINMPQAWLEYSDASWLPPSRWDNGIPGLLFDYNINGTVNKPHQGKQSQSLNYNGTAGANFGAWRLRADYQGNLNHTTGSAQGTDSQFTWSRFYMYRAIPRWRANLTLGENYINSEIFSSWRYTGASLESDDRMLPPKLRGYAPQVSGIADTNARVVISQQGRILYDSTVPAGPFTIQDLDSSVRGRLDVEVIEQDGRKKTFQVDTAYVPYLTRPGQVRYKLVSGRSRTYEHTMEGPVFAAGEASWGISNTWSLYGGSIVAGDYNALAVGLGRDLSKFGTVSADVTQSVARIPGYDTKQGKSWRLSYSKRFDEVNTDITFAGYRFSERNYMTMDQYLNARYRNDFTGREKELYTVTLNKNFEDWKASVNLQYSHQTYWDRRTSDYYTLSVNRYFDAFSFKNIALGISASRSKYLNRDNDSAFVRLSVPWGTGTASYSGSMSNDRYTNTVGYSDTLNNGLSSYSLNAGVNSGGGQPSQRQMSAYYNHNGSLTNLSASFSAVENGYSSFGMSASGGATVTMKGAALHAGGMNGGTRLLVDTDGVGGVPVDGGRVYTNRWGIGVVTDVSSYYRNTTSVDLNKLPEDMEATRSVVESVLTEGAIGYREFEVLKGSRLFAVLRMSDNSYPPFGASVTNAKGRELGMVADSGLAWLSGVNPGETLNVGWDGRTQCVVDIPAHPDPAQQLLLPCRQVK

SEQ ID NO: 14694 - protein, 836 aa, Escherichia coli; identical to SEQ ID NO: 9726

SEQ ID NO: 14695 - protein, 859 aa, Escherichia coli
MRDTSSGRMRTGVTGLALAVMVACVMFRAESGIARTYSFDAAMLKGGGKGVDLTLFEEGGQLPGIYPVDIILNGSRVDSQEMAFHAERDAEGRPYLKTCLTREMLARYGVRIEEYPALFRASGEGRGASVAEEACADLTAIPQATESYQFAAQQLVLGIPQVAPSAAEGDWPEALWDDGIPAFLLNWQANAGRSEYRGYGKRVTDSYWVSLQPGINIGPWRVRNLTTWNRSSGQSGKWESSYIRAERGLNGIKSRLTLGEDYTPSDIFDSVPFRGAMMSSDESMVPYNLREFAPVVRGIARTQARIEVRQNGYLIQSQTVAPGAFALTDLPVTGSGSDLQVTVLESDGTAQVFTVPFTTPAIALREGYLKYNVTAGQYRSSDDAVEHTSLGQVTAMYGLPWGLTVYGGLQGADDYQSAALGLGWSLGRLGAVSLDTTHSRGQQKGHDYETGDTWRIRYNKSFELTGTSFTAASYQYSSDGYHTLPDVLDTWRDDRYAYRHTENRSRRTTLSLSQSLGQWGYVGLNGSRDEYRDRPHRDYFGASYSTSWNNISLSVNWSRNRNSGGYYGGWSRTEDSVSMWMSVPLGRWFGGTDNDISATAQMQRSTGQDTRYEAGLNGRAFDRRLYWDVREQMVPGSESHADTSRLNLTWYGTYGELTGMYSYSSTMRQLNAGMSGSMVAHSEGVTFGQRTGDTVALIAAPGVSGASVGGWPGVRTDFRGYTLAGYASPYQENVLTLDPTTFPEDAEVPQTDSRVVPTKGAVVRAGFRTRVGGRALVSLARQHGTPLPFGAVVTVEGEAGQAAGSAGVVGDRGEVYLSGLKESGKLKAQWGENSLCHADYRLPEEKGPAGIFLTRTVCM

SEQ ID NO: 14696 - protein, 856 aa, Escherichia coli
MLKRVSCAPQSVFVLNRLHIMKKNKSTFTINFITYSLMLSLAGVPVYAVDFNTDVLDAADRQNIDFSRFSRAGYIMPGQYQMEIRVNGQDISPSAFQIAFLEPPFSDSDNEKPLPEPCLTPEIVSRMGLTEASQEKVTYWNNGQCADFRQLSGVEIRPNPAEGMLYINMPQAWLEYSDASWLPPSRWDNGIPGLLFDYNINGTVNKPHQGKQSQSLNYNGTAGANFGAWRLRADYQGNLNHTTGSAQGTDSQFTWSRFYMYRAIPRWRANLTLGENYINSEIFSSWRYTGASLESDDRMLPPKLRGYAPQVSGIADTNARVVISQQGRILYDSTVPAGPFTIQDLDSSVRGRLDVEVIEQDGRKKTFQVDTAYVPYLTRPGQVRYKLVSGRSRNYEHSMEGPVFAAGEASWGISNTWSLYGGSIVAGDYNALAVGLGRDLSEFGTVSADVTQSVARIPGYDTKQGKSWRLSYSKRFDEVNTDITFAGYRFSERNYMTMDQYLNARYRNDFTGREKELYTVTLNKNFEDWKASVNLQYSHQTYWDRRTSDYYTLSVNRYFDAFSFKNIALGISASRSKYQNRDNDSAFVRLSVPWGTGTASYSGSMSNDRYTNTVGYSDTLNNGLSSYSLNAGVNSGGGQPSQRQMSAYYNHNGSLTNLSASFSAVENGYSSFGMSASGGATVTMKGAALHAGGMNGGTRLLVDTDGVGGVPVDGGRVYTNRWGIGVVTDVSSYYRNTTSVDLNKLPEDMEATRSVVESVLTEGAIGYREFEVLKGSRLFAVLRMSDNSYPPFGASVTNAKGRELGMVADSGLAWLSGVNPGETLNVGWDGRTQCVVDIPAHPDPAQQLLLPCRQVK

SEQ ID NO: 14697 - protein, 876 aa, Escherichia coli
MFFGDGGQLLSDKSLTGSAGGGNNRMKFNILPLAFFIGIIVSPARAELYFNPRFLSDDPDAVADLSAFTQGQELPPGVYRVDIYLNDTYISTRDVQFQMSQDGKQLAPCLSPEHMSAMGVNRYAVPGMERLPADTCTSLNSMIQGATFRFDVGQQRLYLTVPQLYMSNQARGYIAPEYWDNGITAALLNYDFSGNRVRDSYGGTSDYAYLNLKTGLNIGSWRLRDNTSWSYSAGKGYSQNNWQHINTWLERDIVSLRSRLTMGDSYTRGDIFDGVNFRGIQLASDDNMVPDSQRGYAPTIHGISRGTSRISIRQNGYEIYQSTLPPGPFEINDIYPAGSGGDLQVTLQEADGSVQRFNVPWSSVPVLQREGHLKYALSAGEFRSGGHQQDNPRFAEGTLKYGLPAGWTVYGGAWIAERYRAFNLGVGKNMGWLGAVSLDATRANARLPDESRHDGQSYRFLYNKSLTETGTNIQLIGYRYSTRGYFSFADTAWKKMSGYSVLTQDGVIQIQPKYTDYYNLAYNKRGRVQVSISQQTGESSTLYLSGSHQSYWGTDRTDRQLNAGFNSSVNDISWSLNYSLSRNAWQHETDRILSFDVSIPFSHWMRSDSTSAWRNASARYSQTLEAHGQAASTAGLYGTLLGDNNLGYSIQSGYTRGGYEGSSKTGYASLNYRGGYGNASAGYSHSGGYRQLYYGLSGGILAHANGLTLSQPLGDTLILVRAPGASDTRIENQTGVSTDWRGYAVLPYATDYRENRVALDTNTLADNVDIENTVVSVVPTHGAVVRADYKTRVGVKVLMTLMRNGKAVPFGSVVTARNGGSSIAGENGQVYLSGMPLSGQVSVKWGSQTTDQCTADYKLPKESAGQILSHVTVSCR

SEQ ID NO: 14698 - protein, 828 aa, Escherichia coli
MKQRSFCPGRLSTAIAIALCCFPPFSSGQENPGTVYQFNDGFIVGSREKVDLSRFSTSAITEGTYSLDVYTNDEWKGRYDLRIARDKDGRLGVCYTKAMLAQYGIAAEKLNPQLSEQEGYCGSLKSWRNEENVKDNLVQSSLRLNISVPQIYEDQRLKNYVSPEFWDKGITALNLGWMANAWNSHTSSVGGSDNSSAYLGVNAGLSWDGWLLKHIGNLNWQQQQGKAHWNSNQTYLQRPIPQLNSIVSGGQIFTNGEFFDTIGLRGVNLSTDDNMFPDGMRSYAPEIRGVAQSNALVTVRQGSNIIYQTTVPPGPFTLQDVYPSGYGSDLEVSVKEADGSVEVFSVPYASVAQLLRPGMTRYALSAGKVDDSALRNKPMLYQATWQHGINNLLTGYTGVTGFDDYQAFLVGTGMNTGIGALSFDVTHSRLKSDAHDDSGQSYRATFNRMFTDTQTSIVLAAYRYSTKGYYNLNDALYAVDQEKNSRSNYTLWRQKNGMTFTVNQNLPDGWGGFYLSGRISDYWNRSGTEKQYQVSYNNSFGRLSWSASAQRVYTPDSSGHRRDDRISLNFSYPLWFGDNRTANLTSNTSFNNSRFASSQIGINGSLDSENNLNYGVSTTTATGGQHDVALNGSYRTPWTTLNGSYSQGEGYRQSGIGASGTMIAHSGGVVLSPESGSTMALIEAKDAAGAMLPGSPGTRVDSNGYAILPYLRPYRINAVEIDPKGSHDDVAFDRTVAQVVPWEGSVVKVAFGTKVQNNLTLQARQANHEPLPFAASIFSPDGKEIGVVGQGSMMFISDANAKRAIVKWSGGQCSVDLGQQTTKDSVCR

SEQ ID NO: 14699 - protein, 860 aa, Escherichia coli
MRDTSSGRMRTGVTGLALAVMVACVMFRAESGIARTYSFDAAMLKGGGKGVDLTLFEEGGQLPGIYPVDIILNGSRVDSQEMTFHAERDAEGRPYLKTCLTREMLARYGVRIEEYPALFRVSGEGRGASVAEEACADLTAIPQATESYQFAAQQLVLGIPQVALRPQLRGIAPEALWDDGIPAFLLNWQANAGRSEYRGYGKRVTDSYWVSLQPGINIGPWRVRNLTTWNRSSGQSGKWESSYIRAERGLNGIKSRLTLGEDYTPSDIFDSVPFRGAMMSSDESMVPYNLREFAPVVRGIARTQARIEVRQNGYLIQSQTVAPGAFALTDLPVTGSGSDLQVTVLESDGTAQVFTVPFTTPAIALREGYLKYNVTAGQYRSPDDAVEQTSLGQVTAMYGLPWGLTVYGGVQGAEHYQAAALGLGWSLGRLGAVSLDTTHSRGQQKGHDYETGDTWRIRYNKSFELTGTSFTAASYQYSSDGYHTLPDVLDTWRDDRYTYRHTENRSRRTTLSLSQSLGQWGYVGLNGSRDEYRDRPHRDYFGASYSTSWNNISLSVNWSRNRNSGGYYGGWSRTEDSVSMWMSVPLGRWFGGTDNDISATAQMQRSTGQDTRYEAGLNGRAFDRRLYWDVREQMVPGSESHADTSRLNLTWYGTYGELTGMYSYSSTMRQLNAGMSGSMVAHSEGVTFGQRSGDTVALIAAPGVSGASVGGWPGVRTDFRGYTLAGYASPYQENVLTLDPTTFPEDAEVPQTDSRVVPTKGAVVRAGFRTRVGGRALVSLARQDGTPLPFGAVVTVEGEAGQAAGSAGVVGDRGEVYLSGLKESGKLKAQWGENSLCHADYRLPEEKGPAGIFLTRTVCM

SEQ ID NO: 14700 - protein, 843 aa, Escherichia coli
MHWMHLPLDHYRAHFSFSLLALTIASALPAYGGKFNPKFLENVQGIDQHVDLSVYDSPVGQQIPGKYRVFVFVNEEKMASRTLDFSTASEAQRKASGESLMPCLSRVQLEEMGVRIDSFPALKILPPEACVAFDEIIPQATSRFDFNTQTLHLTFPQAAMMMTARGTVDPSRWDEGIPALLLDYSFSGSNGRNEGSGSSPDSTSDSYYLNLRSGLNVGPWRLRNNSIWNRTDGKNQWDNVGTSLNRAIIPLKSQITLGDTATPGEIFDSVQMRGTLLASDDEMLPDSQRGFAPVVRGIAKSNAEVSIEQNGYVIYRTFVQPGAFEINDLYATSGSGDLTVIIKESDGSEQRFIQPFSAVAIFQREGYLKYSLAAGEYRAGNYDSGKPRFGQFTAMYGLPWGMTAYGGALLSADYNALALGLGKNFGTIGAVSVDVTQAKSQLRNNEKDEGQSYRFLYSKSFEGGTDLRLLGYKYSTSGYYTFQEATDVRSDADSDYRRYHKRSQIQGNITQQLGDYGSVYFNMTQQDYWNVDGKENSLSAGYHGHIGRVNYSIAYTWTRSPEWDEDDRLWSFSLSIPLGGAWGSYRMTTDQNGKTSQQASVSGTLLEDRNLNYNVQQGYTSNGVGNSGSVNMGYMGGSGNIDVGYNYSKDNQQVNYGVRGGVIVHSEGITLSQPLGESLAIVSAPGARGGHVVNSSGVEVDWMGNAVVPYLTPYRETIVELRSDTLGQNVELQEAFQKVVPTRGAIVRSRFDTRVGYRVLMSLKRANGNAVPFGATAALSDESKPASSIVGEEGQLYISGMPEEGELQVSWGHEQAQRCRVPFRLPEKKDNSGIVMVNAVCDK

SEQ ID NO: 14701 - protein, 884 aa, Escherichia coli
MCMPNHSNFRLRGIACYIALAISGGSVNAWADDSIQFDPRFLELKGDTKIDLGKFSKKGYVDAGKYNLRVFINKQPLSDEYDINWYVSENDPTKNYACLTPELVAALGLKEGIAKSLQWTHNDECLKPGQLDGMEVENDLSQSALLLTVPQAYLEYTSSDWDPPSRWDDGIPGLIADYSLNAQTRHQEQGGEDSHDISGNGTVGANLGAWRFRADWQSDYQHTRSNDDDDDSSNSTTSKHWDWSRYYAWRALPSLKAKLSLGEDYLNSDIFDGFNYIGSSVSTDDQMLPPNLRGYAPDVSGVAHSSAKVTISQMGRVLYETQVPAGPFRIQDIGDSVSGTLHVRVEEQNGQVQEYDVTTASVPFLTRQGQVRYKVMMGRPEDWNHKTEGGFFSGGEASWGVADGWSLYGGALADKHYQSAAMGVGRDLAQFGALAFDVTHSHVNLDHDSAYGKGKLDGNSFRVSYAKDFDELNSRVTFAGYRFSEKNFMTMSEYLDANQSDMARTGNDKEMYTITYNQNFAAAGVSIYLNYSHRTYWDRPEQTNYNLMFSHYFNMGSIRNMSISVTGYRYEYDDNADKGMYLSMSIPWSDSSTVTYNGSYGSGSDSSQVGYFKRVDDATHYQVNVGTSEQHGSVDGYLSHDGSLAKVDLSANYHEGEYRSAGIALQGGATLTAHGGALHRTQNMGGTRLLIDADGIANVPVESNGAPVYTNMFGKAVVADINNYYRNQAYIDLNNLPEDAEATQSVVQATLTEGAIGYRKFKVISGQKAMAVLRLRDGSYPPFGAEVKNDEQQQVGIVDDEGNVYLAGVNAGEHMMVFWEGSAQCEIVLPKPLPADLFSGLLLPCEQKGTAAPDSSAPEIKPVIQDQTRQVTPTEAPTSISATQ

SEQ ID NO: 14702 - protein, 878 aa, Escherichia coli; identical to SEQ ID NO: 4404

SEQ ID NO: 14703 - protein, 266 aa, Escherichia coli; identical to SEQ ID NO: 9192

SEQ ID NO: 14704 - protein, 860 aa, Escherichia coli
MRDTSSGRMRTGVTGLALAVMVACVMFRAESGIARTYSFDAAMLKGGGKGVDLTLFEEGGQLPGIYPVDIILNGSRVDSQEMAFHAERDAEGRPYLKTCLTREMLARYGVRIEEYPALFRASGEGRGASVAEEACADLTAIPQATESYQFAAQQLVLGIPQVALRPQLRGIAPEALWDDGIPAFLLNWQANAGRSEYRGYGKRVTDSYWVSLQPGINIGPWRVRNLTTWNRSSGQSGKWESSYIRAERGLNGIKSRLTLGEDYTPSDIFDSVPFRGAMMSSDESMVPYNLREFAPVVRGIARTQARIEVRQNGYLIQSQTVAPGAFALTDLPVTGSGSDLQVTVLESDGTAQVFTVPFTTPAIALREGYLKYNVTAGQYRSSDDAVEHTSLGQVTAMYGLPWGLTVYGGLQGAEHYQSAALGLGWSLGRLGAVSLDTTHSRGQQKGHDYETGDTWRIRYNKSFELTGTSFTAASYQYSSDGYHTLPDVLDTWRDDRYAYRHTENRSRRTTLSLSQSLGQWGYVGLNGSRDEYRDRPHRDYFGASYSTSWNNISLSVNWSRNRNSGGYYGGWSRTEDSVSMWMSVPLGRWFGGADNDISTTAQMQRSTGQDTRYEAGLNGRAFDRRLYWDVREQMVPGSESHADTSRLNLTWYGTYGELTGMYSYSSTMRQLNAGMSGSMVAHSEGVTFGQRTGDTVALIAAPGVSGASVGGWPGVRTDFRGYTLAGYASPYQENVLTLDPTTFPEDAEVPQTDSRVVPTKGAVVRAGFRTRVGGRALVSLARQDGTPLPFGAVVTVEGEAGQAAGSAGVVGDRGEVYLSGLKESGKLKAQWGENSLCHADYRLPEEKGPAGIFLTRTVCM

SEQ ID NO: 14705 - protein, 878 aa, Escherichia coli
MSYLNLRLYQRNTQCLHIRKHRLAGFFVRLFVACAFAAQAPLSSAELYFNPRFLADDPQAVADLSRFENGQELPPGTYRVDIYLNNGYMATRDVTFNTGDSEQGIVPCLTRAQLASMGLNTASVSGMNLLADDACVPLTSMIHDATAQLDVGQQRLNLTIPQAFMSNRARGYIPPELWDPGINAGLLNYNFSGNSVQNRIGGNSHYAYLNLQSGLNIGAWRLRDNTTWSYNSSDSSSGRKNKWQHINTWLERDIIPLRSRLTLGDGYTQGDIFDGINFRGAQLASDDNMLPDSQRGFAPVIHGIARGTAQVTIKQNGYDIYNSTVPPGPFTINDIYAAGNSGDLQVTIKEADGSTQIFTVPYSSVPLLQREGHTRYSITAGEYRSGNAQQEKPRFFQSTLLHGLPAGWTIYGGTQLADRYRAFNFGIGKNMGALGALSVDMTQANSTLPDDSQHDGQSVRFLYNKSLNESGTNIQLVGYRYSTSGYFNFADTTYSRMNGYNIETQDGVIQVKPKFTDYYNLAYNKRGKLQLTVTQQLGRTSTLYLSGSHQTYWGTSNVDEQFQAGLNTAFEDINWTLSYSLTKNAWQKGRDQMLALNVNIPFSHWLRSDSKSQWRHASASYSMSHDLNGRMTNLAGVYGTLLEDNNLSYSVQTGYAGGGDGNSGSTGYATLNYRGGYGNANIGYSHSDDIKQLYYGVSGGVLAHANGVTLGQPLNDTVVLVKAPGAKDAKVENQTGVRTDWRGYAVLPYATEYRENRVALDTNTLADNVDLDNAVANVVPTRGAIVRAEFKARVGIKLLMTLTHNNKPLPFGAMVTSESSQSSGIVADNGQVYLSGMPLAGKVQVKWGEEENAHCVANYQLPPESQQQLLTQLSAECR

SEQ ID NO: 14706 - protein, 883 aa, Escherichia coli
MTAFRAAFKAYRMHQVLILPRFARLTFALGLATAVFPVDAEYYFNPRFLSNDLAESVDLSAFTKGREAPPGTYRVDIYLNDEFMASRDITFIADDNNADLIPCLSTDLLVSLGIKKSALLDNKEHSAEKHVPDNSACTPLQDRLADASSEFNVGQQHLSLSVPQIYVGRMARGYVSPDLWEEGINAGLLNYSFNSNSINNRSNHNAGKSNYAYLNLQSGINIGSWRLRDNSTWSYNSGSSNSSDSNKWQHINTSAERDIIPLRSRLTVGDSYTDGDIFDSVNFRGLKINSTEAMLPDSQHGFAPVIHGIARGTAQVSVKQNGYDVYQTTVPPGPFTIDDINSAANGGDLQVTIKEADGSIQTLYVPYSSVPVLQRAGYTRYALAMGEYRSGNNLQSSPKFVQASLMHGLKGNWTPYGGMQIAEDYQAFNLGIGKDLGLFGAFSFDITQANTTLADDTRHSGQSVKSVYSKSFYQTGTNIQVAGYRYSTQGFYNLSDSAYSRMSGYTVKPPTGDTSEQTLFIDYFNLFYSKRGQEQISISQQLGNYGTTFFSASRQSYWNTSRSDQQISFGLNVPFGDITTSLNYSYSNNIWQNDRDHLLAFTLNVPFSHWMRTDSQSAFHNSNASYSMSNDLKGGMTNLSGVYGTLLPDNNLNYSVQVGNTHGGNTSSGTSGYSSLNYRGAYGNTNVGYSRSGDSSQIYYGMSGGIIAHADGITFGQPLGDTMVLVKAPGADNVKIENQTGIHTDWRGYAILPFATEYRENRVALNANSLADNVELDETVVTVIPTHGAIARATFNAQIGGKVLMTLKYGNKSVPFGAIVTHGENKNGSIVAENGQVYLTGLPQSGKLQVSWGNDKNSNCIVDFKLPVVSPGTLLNQQTAICR

SEQ ID NO: 14707 - protein, 900 aa, Escherichia coli
MKLNIFTKSMIGMGLVCSALPALAMEAWNNQQGGNKYQVIFDGKIYENAWWVSSTNCPGKAKANDATNPWRLKRTATAAEISQFGNTLSCEKSGSSSSSNSNTPASNTPANGGSATPAQGTVPSNSSVVAWNKQQGGQTWYVVFNGAVYKNAWWVASSNCPGDAKGNDASNPWRYVRAATATEISETSNPQSCTSAPQPAPDVKPAPDVKPAPDVQPAPADKSNDNYAVVAWKGQEGSSTWYVIYNGGIYKNAWWVGAANCPGDAKENDASNPWRYVRAATATEITQYGNPGSCSVKPDNNGGAVTPVDPTPETPETPVTPTPDNNEPSTPADSSNDYSLQAWSGQEGSEIYHVIFNGNVYQNAWWVGSEDCPRGTSVENSNNPWRLVRTATAAEMSQYGNPTTCEIDNGGVIIANGFQASKAYSANSIVDYNDAHYKTSVDQDAWGFVPGGDNPWKKYEPAKAWSASTVYVKGDRVVVDGQAYEALFWTQSDNPALVANQNATGSNSRPWKPLGKTQSYSNEELNNAPQFNPETLYASDTLIRFNGENYISQSKVQKVSPSDSNPWRVFVDWTGTKERVGTPKKAWPKHVYAPYVDFTLNTIPDLAALAKNHNVNHFTLAFVVSKDANTCLPTWGTAYGMQNYAQYSKIKALREAGGDVMLSIGGANNAPLAASCKNVDDLMQHYYDIVDNLNLRVLDFDIEGTWVADQASIERRNLAVKKVQDKWKSEGKDIAIWYTLPILPTGLTPEGMNVLSDAKAKGVELAGVNVMTMDYGNAICQSANTEGQNIHGKCATSAIANLHAQLKGLYGNKSDAEIDAMMGTTPMVGVNDVQGEVFYLSDARLVMQDAQKRNLGMVGIWSIARDLPGGTNLSPEFHGLTKEQAPKYAFSEIFAPFTKQ

SEQ ID NO: 14708 - protein, 207 aa, Escherichia coli; identical to SEQ ID NO: 2223

SEQ ID NO: 14709 - protein, 265 aa, Escherichia coli; identical to SEQ ID NO: 14582

SEQ ID NO: 14710 - protein, 259 aa, Escherichia coli
MIKHVLLFFVFISFSVSANDFFRADSRTPDEIRRAGGLLPRGQQEAYERGTPININLYDHARGTVTGNTRYNDGYVSTTTTLRQAHLIGQNLLGSYNEYYIYVVAPAPNLFDVNGVLGRYSPYPSENEFAALGGIPLSQIIGWYRVSFGVIEGGMQRNRHYRRDLFQGLSVAPNHDGYHLAGFPDGFAAWRELPWSAFAPEQCEQDYMVRNLDACDSYTNILSQNDLVAFKRFMRIRSSLMILQSIEDDLQDNENKDEL

SEQ ID NO: 14711 - protein, 259 aa, Escherichia coli
MIKHLLLFFVFISFSVSANDFFRADTRTPSEIRQAGGLLPRGQQEAYERGTPININLYDHARGTVTGNTRYNDGYVSTTTTLRQAHLIGQNLLGSYNEYYIYVVAPAPNLFDVNGVLGRYSPYPSENEFAALGGIPLSQIIGWYRVSFGVIEGGMQRNRHYRRDLFQGLSVAPNHDGYHLAGFPDGFAAWRELPWSAFAPAACEHDYMVRILDACDSYTNRISKNDLFAFKRFMRIRSSLMILQSIEDDLQYNENKNEL

SEQ ID NO: 14712 - protein, 122 aa, Escherichia coli
MNFKKSIALLFVVLNITSLPTYADVSKNFKDNCGSTTAKIVQSVRLVKLASDTNKDSKGIYITDSTGKTRFIPGGQYYPENYLSNEMRKIAMAAVLSNVRVNICASEAYTPNHVWAIELAAE

SEQ ID NO: 14713 - protein, 121 aa, Escherichia coli
MNFKKLIALLFIVLNIASLPTYAGVSKTFKDNCASTTAKLVQSVQLVNISSDVNKDSKGIYISSSAGKTWFIPGGQYYPDNYLSNEMRKIAMAAVLSNVRVNLCASEAYTPNHVWAIELAP

SEQ ID NO: 14714 - protein, 884 aa, Escherichia coli
MCMPNHSNFRLRGIACYIALAISGGSVNAWADDSIQFDPRFLELKGDTKIDLGKFSKKGYVDAGKYNLRVFINKQPLSDEYDINWYVSENDPTKNYACLTPELVAALGLKEGIAKSLQWTHNDECLKPGQLDGMEVENDLSQSALLLTVPQAYLEYTSSDWDPPSRWDDGIPGLIADYSLNAQTRHQEQGGEDSHDISGNGTVGANLGAWRFRADWQSDYQHTRSNDDDDDSSNSTTSKNWDWSRYYAWRALPSLKAKLSLGEDYLNSDIFDGFNYIGSSVSTDDQMLPPNLRGYAPDVSGVAHSSAKVTISQMGRVLYETQVPAGPFRIQDIGDSVSGTLHVRVEEQNGQVQEYDVTTASMPFLTRQGQVRYKVMMGRPEDWNHKTEGGFFSGGEASWGVADGWSLYGGALADKHYQSAAMGVGRDLAQFGALAFDVTHSHVNLDHDSAYGKGKLDGNSFRVSYAKDFDELNSRVTFAGYRFSEKNFMTMSEYLDANQSDMARTGNDKEMYTITYNQNFAAAGVSIYLNYSHRTYWDRPEQTNYNLMFSHYFNMGSIRNMSISVTGYRYEYDDNADKGMYLSMSIPWSDSSTVTYNGSYGSGSDSSQVGYFKRVDDATHYQVNVGTSEQHGSADGYLSHDGSLAKVDLSANYHEGEYRSAGIALQGGATLTAHGGALHRTQNMGGTRLLIDADGIANVPVESNGAPVYTNMFGKAVVADINNYYRNQAYIDLNNLPEDAEATQSVVQATLTEGAIGYRKFKVISGQKAMAVLRLRDGSYPPFGAEVKNDEQQQVGIVDDEGNVYLAGVNADEHMMVFWEGSAQCEIVLPKPLPADLFSGLLLPCEQKGTAAPDSSAPEIKPVIQDQTRQVTPTEAPTSISATQ

SEQ ID NO: 14715 - protein, 876 aa, Escherichia coli; identical to SEQ ID NO: 10563

SEQ ID NO: 14716 - protein, 861 aa, Escherichia coli
MITEDISKENLFWSKVIMNANNLSCLIYCRCSLLLFAALGLTVTNHSFAAEEAEFDSEFLHLDKGINAIDIRRFSHGNPVPEGRYYSDIYVNNVWKGKADLQYLRTANTGAPTLCLTPELLSLIDLVKDTMSGNTSCFPASTGLSSASINFDLSTLRLNIEIPQALLNTRPRGYISPSQWQSGVPAAFINYDANYYQYSSSGTSNEQTYLGLKAGFNLWGWALRHRGSESWNNSYPAGYQNIETSIMHDLAPLRAQFTLGDFYTNGELMDSLSLRGVRLASDERMLPGSLRGYAPAVRGIANSNAKVTIYQNAHILYETTVPAGPFVINDLYPSGYAGDLIVKITESNGQTRMFTVPFAAVAQLIRPGFSRWQMSVGKYRYANKTYNDLIAQGTYQYGLTNDITLNSGLTTASGYTAGLAGLAFNTPLGAIASDITLSRTAFRYSGVTRKGYSLHSSYSINIPASNTNITLAAYRYSSKDFYHLKDALSANHNAFIDDVSVKSTAFYRPRNQFQISINQELGEKWGGMYLTGTTYNYWGHKGSRNEYQMGYSNFWKQLGYQIGLSQSRDNEQQRRDDRFYINFTLPLGESVQSPVFSTVLNYSKEEKNSIQTSISGTGGEDNQFSYGLSGNSQENGPSGYAMNGGYRSPYVNITTTVGHDTQNNNQRSFGASGAVVAHPYGVTLSNDLSDTFAIIHAEGAQGAAINNASGSRLDFWGNGIVPYVTPYEKNQISIDPSNLDLNVELSATEQEIIPRANSATLVKFDTKTGRSLLFDIRMSTGNPPPMASEVLDEHGQLAGYVAQAGKVFTRGLPEKGHLSVVWGPDNKDRCSFVYHVAHNKDDMQSQLVPVLCIQHPNQEKT

SEQ ID NO: 14717 - protein, 835 aa, Escherichia coli
MNKYYLLIILFFVRSTKVFAEDYFDPSLLATDIIGEGNIDLSAFSRPGGGMEGEQEVAIYVNDEFYSRNTLFFKNTLDKGLLPEFTPGFFDELLSGDFLVSEEDKTISSSDFLKKVPYSDINFNQGMSRVNVSIPQAYLGDGAKLISSPDTWEYGGPAFLLDYNISGNRNDSGNYDSRSLYISSQMGVNLMKWRLRTSSSYSNYKTNSVWGGARSEQNSFYNTYAERDISSLRAILRLGEVSTAGLILDSVPFRGMKLSSSDDMLGMRLRNYTPTVRGMASSQAVVTITQNGRQVYQTNVPAGPFELNDFYLSGYSGDMLVTVREADGSEHSFLQPYSTLPEMKREGVSGFEVSVGRYDNNGAEHYYDAESFVYGNWSRGFARGVTFFAETLQAEKYQSLGGGSTLSLGRLGAASADISLSRADKYGDIRIGQSYGFKYSKSQIETGTTVTLATYRYSTENFYTFRDFVSKTDTARYIWENKLKSRMTFSLSQSLGEYGYLSANASQQDYWNSREVSRNYSLTHSFSWNDIYFSTTLSMDDQRGRETGHLSNKQAGIYASVPLSKLLPRTDPTSSSLTWSTSHADHKVRNSVTLDGKVPESDVRYRVGGSWGNGTTEGSRMASVSWTGDHASTSLGYTRVGKYRTLDYSMSGAAVMYPWGIAVGNSSVTGDGAIVVETPGAKGVRTSTGYKTSWLGTALISSPQKYTENRINLYPDGLPSDTVLGETSKTAVPAKGAVVVLDYTVFRGSQVVFTLRQTDGNPLPFGTVITLDGVSRGKENSGIVGEEGRVYMAGIPEKGTLTASWGLNKTCSIPFRINQHKAEAVIREVQGVCRV

SEQ ID NO: 14718 - protein, 660 aa, Escherichia coli; identical to SEQ ID NO: 6740

SEQ ID NO: 14719 - protein, 821 aa, Escherichia coli
MLSVPLWAAEDAEFDPSFLSRTPGSSVIDVRRFMHGNPVSSGNYYSDIYLNGEWKGNAELSFRDMSSSQEESVLCVTPELLSILDVSPEAVAREPDTGNGRCMPFSAVVPDAKIRFDLSLLRLNVEIPQAMLVSRPRGYISPSQWQTGVPAAFVSYDVNHWRYRTPDMENNQSYLGLRAGFNAGGWAFRHRGTESWSDSHAEGYRSIETNLQHDIAMLRAQLTLGDFTTTGELMDSNSLRGIRLASDDRMLPGSLRGYAPVVRGMAGSNARVTVRQNGNIIYETTVPAGPFSISDLYPSGYGGDLTVTVTESDGQTRSFIVPFASVAQLVRPGFSRWQVAAGRYRYGNRTFSDTVFQGTLQYGLTNDITLNTGMSTAPHYLSGLGGVAFNTPLGLLPRILRWPERLSRVLTRHIAYSLHAGYSARIPETSTNVTLAAYRYSSRDFWSLRDAILTRNRDVINDSSVRSATGYRPRNQLQLTVNQSLGEGWGNLYLTGATYHYWGHTGTFNEYQAGYNNVWKKMSYQIGFSQTRRSGDYHHDNRFFFSFSLPLSDTGRTLLSTTVNVSDKNSNSIQSSISGVSGDDNQLSYGVSLNTQENGPTGYAVNGSYRSPVATLQATAGNDSRHNRQISAGISGAIVAHPFGVTASNDLGDTFTVIHADGAGGAVINNAPGNRLDPWGNGIVPYVTPYEKNYISIDPTALAADVELSATEREIIPRANSTTMVTFTTKTGKAMLFDVKMPDGTPPPMAAEALTADGKSAGYIAQGGRLFVRDLDAEKGMLRIVWGSGQNDSCVIHYSASGENARGNAVPENHHVVCMRQ

SEQ ID NO: 14720 - protein, 869 aa, Escherichia coli; identical to SEQ ID NO: 9160

SEQ ID NO: 14721 - protein, 878 aa, Escherichia coli
MSYLNLRLYQRNTQCLHIRKHRLAGFFVRLFVACAFTAQAPLSSAELYFNPRFLADDPQAVADLSRFENGQELPPGTYRVDIYLNNGYMATRDVTFNTGDSEQGIVPCLTRAQLASMGLNTASVSGMNLLADDACVPLTSMIHDATAQLDVGQQRLNLTIPQAFMSNRARGYIPPELWDPGINAGLLNYNFSGNSVQNRIGGNSHYAYLNLQSGLNIGAWRLRDNTSWSYNSSDSSSGSKNKWQHINTWLERDIIPLRSRLTLGDGYTQGDIFDGINFRGAQLASDDNMLPDSQRGFAPVIHGIARGTAQVTIKQNGYDIYNSTVPPGPFTINDIYAAGNSGDLQVTIKEADGSTQIFTVPYSSVPLLQREGHTRYSITAGEYRSGNAQQEKPRFFQSTLLHGLPAGWTIYGGTQLADRYRAFNFGIGKNMGALGALSVDMTQANSTLPDDSQHDGQSVRFLYNKSLNESGTNIQLVGYRYSTSGYFNFADTTYSRMNGYNIETQDGVIQVKPKFTDYYNLAYNKRGKLQLTVTQQLGRTSTLYLSGSHQTYWGTSNVDEQFQAGLNTAFEDINWTLSYSLTKNAWQKGRDQMLALNVNIPFSHWLRSDSKSQWRHASASYSMSHDLNGRMTNLAGVYGTLLEDNNLSYSVQTGYAGGGDGNSGSTGYATLNYRGGYGNANIGYSHSDDIKQLYYGVSGGVLAHANGVTLGQPLNDTVVLVKAPGAKDAKVENQTGVRTDWRGYALLPYATEYRENRVALDTNTLADNVDLDNAVANVVPTRGAIVRAEFKARVGIKLLMTLTHNNKPLPFGAMVTSESSQSSGIVADNGQVYLSGMPLAGKVQVKWGEEENAHCVANYQLPPESQQQLLTQLSAECR

SEQ ID NO: 14722 - protein, 860 aa, Escherichia coli
MRDTSSGRMKTGVTGLALAVMVACVMFRAESGIARTYSFDAAMLKGGGKGVDLTLFEEGGQLPGIYPVDIILNGSRVDSQEMAFHAERDAEGRPYLKTCLTREMLARYGVRIEEYPALFRVSGEGRGASVAEEACADLTAIPQATESYQFAAQQLVLGIPQVALRPQLRGIAPEALWDDGIPAFLLNWQANAGRSEYRGYGKRVTDSYWVSLQPGINIGPWRVRNLTTWNRSSGQSGKWESSYIRAERGLNGIKSRLTLGEDYTPSDIFDSVPFRGAMMSSDESMVPYNLREFAPVVRGIARTQARIEVRQNGYLIQSQTVAPGAFALTDLPVTGSGSDLQVTVLESDGTAQVFTVPFTTPAIALREGYLKYNVTAGQYRSPDDAVEQTSLGQVTVMYGLPWGLTVYGGVQGAEHYQAAALGLGWSLGRLGAVSLDTTHSRGQQKGHDYETGDTWRIRYNKSFELTGTSFTAASYQYSSDGYHTLPDVLDTWRDDRYTYRHTENRSRRTTLSLSQSLGQWGYVGLNGSRDEYRDRPHRDYFGASYSTSWNNISLSVNWSRNRNSGGYYGGWSRTEDSVSMWMSVPLGRWFGGTDNDISATAQMQRSTGQDTRYEAGLNGRAFDRRLYWDVREQMVPGSESHADTSRLNLTWYGTYGELTGMYSYSSTMRQLNAGMSGSMVAHSEGVTFGQRTGDTVALIAAPGVSGASVGGWPGVRTDFRGYTLAGYASPYQENVLTLDPTTFPEDAEVPQTDSRVVPTKGAVVRAGFRTRVGGRALVSLARQDGTPLPFGAVVTVEGEAGQAAGSAGVVGDRGEVYLSGLKESGKLKAQWGENSLCHADYRLPEEKGPAGIFLTRTVCM

SEQ ID NO: 14723 - protein, 843 aa, Escherichia coli
MVKVCFFVIIAFSLFHTRNSDGKTYSFDASLLKRRGEGVDLTLFENGGQLPGIYPVDIFLNGTIVGSEDIFFHAEHSNGKPYLKACLSEELLMRYGVKTEKYPKLFLSHYGKKDERQCADLSVIPQATEEFLFEAQKLVLSIPQVAIRSPLRGVASDLIWEDGISTFLLNWQVEAGHSEFQHYEKTTSDNFWVSLEPGINIGPWRIRNLTTLNKSSGQVGKWESSYIRAERGLNNIKSRLTLGEDYTPADIFASVPFRGVMLGTDENMIPYDQRGFAPVIRGIARTQARIEIRQNGYLIQSQTVAAGPFALTDLPITGSGGEFQVTIFESDGAIQSFNVPFTTPAIALREGYLKYNISAGQYRSSDESVEKAYLWQATAMYGLPRALTVFGGVQTAEHYQAAALGVGLSLGNMGAASLDTIYSRGQQKGYDFDTGNSWRIRYDKSFELTDTSFSAASYQYSNEGYHELSDILDTYRSGANFVFNDTDRKRRRITININQSLGPWGFIGLSGGRDEYKGGDRQDYIGASYSMSWKDISFSVNWTRNRNVGDYFSNRTFNEDTVGMWMSIPLKHWLGKNDNDVNATAQIQHSTRQNTRYEMGLNGRAFDQKLYWDIREQIVPGSKYDADTSRLNMRWSGSYGELVGMYSYNSHTRQMNAGMSGSIAMHSEGITFGQRFGDTMALIAAPGVRGASVGGWPGVSTDSRGYALVSYITPYQENIITLDPTTFPENAEVLQTDTRVVPTKGAVVRAKFKTRVGNRAVVRLARADGTPLPFGTVVTLEGKTEVSNSTGVVDDKGMVYLSGLSEAGKLKAQWGMNSHCYANYRLPVKKGPAGLYLTSAVCI

SEQ ID NO: 14724 - protein, 876 aa, Escherichia coli
MFFGDGGQLLSDKSLTGSAGGGNNRMKFNILPLAFFIGIIVSPARAELYFNPRFLSDDPDAVADLSAFTQGQELPPGVYRVDIYLNDTYISTRDVQFQMSQDGKQLAPCLSPEHMSAMGVNRYAVPGMERLPADTCTSLNSMIQGATFRFDVGQQRLYLTVPQLYMSNQARGYIAPEYWDNGITAALLNYDFSGNRVRDSYGGTSDYAYLNLKTGLNIGSWRLRDNTSWSYSAGKGYSQNNWQHINTWLERDIVSLRSRLTMGDSYTRGDIFDGVNFRGIQLASDDNMVPDSQRGYAPTIHGISRGTSRISIRQNGYEIYQSTLPPGPFEINDIYPAGSGGDLQVTLQEADGSVQRFNVPWSSVPVLQREGHLKYALSAGEFRSGGHQQDNPRFAEGTLKYGLPAGWTVYGGAWIAERYRAFNLGVGKNMGWLGAVSLDATRANARLPDESRHDGQSYRFLYNKSLTETGTNIQLIGYRYSTRGYFSFADTAWKKMSGYSVLTQDGVIQIQPKYTDYYNLAYNKRGRVQVSISQQTGESSTLYLSGSHQSYWGTDRTDRQLNAGFNSSVNDISWSLNYSLSRNAWQHETDRILSFDVSIPFSHWMRSDSTSAWRNASARYSQTLEAHGQAASTAGLYGTLLGDNNLGYSIQSGYTRGGYEGSSKTGYASLNYRGGYGNASAGYSHSGGYRQLYYGLSGGILAHANGLTLSQPLGDTLILVRAPGASDTRIENQTGVSTDWRGYAVLPYATDYRENRVALDTNTLADNVDIENTVVSVVPTHGAVVRADYKTRVGVKVLMTLMRNGKAVPFGSVVTARNGGSSIAGENGQVYLSGMPLSGQVSVKWGSQTTDQCTADYKLPKESAGQILSHVTASCR

SEQ ID NO: 14725 - protein, 855 aa, Escherichia coli
MLKRVSCAPQSVFVLNRLHIMKKNKSTFTINFITNYLMLSLAGVPVYAVDFNTDVLDAADRQNIDFSRFSRAGYIMPGQYQMEIRVNGQDISPSAFQIAFLEPPFSDSDNEKPLPEPCLTPEIVSRMGLTEASQEKLRTWNNGQCAIRQLSGVEIRPESGRRMLYINMPQAWLEYSDASRRAAVRWDNGIPGLLFDYNINGTVNKPHQGKQSQSLNYNGTAGANFGAWRLRADYQGNLNHTTGSAQGTDSQFTWSRFYMYRAIRWRANLTLGENYINSEIFSSWRYTGASLESNDRMLPPKLRGYAPQVSGIADTNARVVISQQGRILYDSTVPAGPFTIQDLDSSVRGRLDVEVIEQDGRKKTFQVDTAYVPYLTRPGQVRYKLVSGRSRNYEHSMEGPVFAAGEASWGISNTWSLYGGSIVAGDYNALAVGLGRDLSEFGTVSADVTQSVARIPGYDTKQGKSWRLSYSKRFDEVNTDITFAGYLSPERNYMTMDQYLNARYRNSNFTGREKELYTVTLNKNFEDWKASVNLQYSHQTYWDRRTSDYYTLSVNRYFDAFSFKNIALGISASRSKYQNRDNDSAFVRLSVPWGTGTASYSGSMSNDRYTNTVGYSDTLNNGLSSYSLNAGVNSGGGQPSQRQMSAYYNHNGSLTNLSASFSAVENGYSSFGMSASGGATVTMKGAALHAGGMNGGTRLLVDTDGVGGVPVDGGRVYTNRWGIGVVTDVSSYYRNTTSVDLNKLPEDMEATRSVVESVLTEGAIGYREFEVLKGSRLFAVLRMSDNSYPPFGASVTNAKGRELGMVADSGLAWLSGVNPGETLNVGWDGRTQCVVDIPAHPDPAQQLLLPCRQVK

SEQ ID NO: 14726 - protein, 368 aa, Escherichia coli
MNKTITALAILMASFAANASVLPETPVPFKSGTGVIDNDTVYIGLGSAGTAWYKLDTQAKDKRWTALAAFPGGPRDQATSAFIDGNLYVFGGIGKNSEGLTQVFNDVHKYNPKTNSWVKLMSHAPMGMAGHVTFVHNGKAYVTGGVNQNIFNGYFEDLNEAGKDSTAIDKINAYYFDKKAEDYFFNKFLLSFDPSTQQWSYAGESPWYGTAGAAVVNKGDKTWLINGEAKPGLRTDAVFELDFTGNNLKWNKLAPVASPDGVAGGFAGMSNDSLIFAGGAGFKGSRENYQNGKNYAHEGLKKSYSADIHLWHNGKWDKSGELSQGRAYGVSLPWNNSLLIIGGEAAGGKAVTDSVLISVKDNKVTVQN

SEQ ID NO: 14727 - protein, 862 aa, Escherichia coli
MHRNKSSSGLSLYCVKTKITAVALSVMAACTLLYTGNTEARTYSFDASMLKGGGKGVDLTLFEEGAQLPGIYPVDIILNGSRVDSRDMAFRTEKDAEGKTYLKTCRTREMLARYGVMTEEYPELFHGDDGKEAEACAELSVIPQATETYQFASQQLLLSIPQVALRPPLRGIAPEALWDDGIPAFLLNWQANTSRSEYRGYGKSVTDNYWVTLEPGINLGPWRVRNLTTWNRSSGQPGQWESAYIRAERGINSLRSRLTLGEDYTPSDIFDSVPFRGVMLGADESMVPYNQREFAPVVRGIARTQARIEVRQNGYLIDSRTVAPGAFALTDLPLTGSGGDLQVTVQESDGTAQVFTVPYTTPAIALREGYMKYSIAGGEYRSSDDAVEHSPLGQMSVMYGLPWGLTAFGGAQMSSHYQSAALGLGWSMGRLGAVSVDGIHSRGQQKGRDTETGETWRLRYNKSFELTNTDLTAARYQYTSSGFHTLSDVLSTFRNDNFRAYSYSGDRSRRTTLRLNQSLGSLGYMSFYGSRDEFRHNRQKQDSFGMSYGTSWKNISWYVNWSRNYSTNAYYQRGHIEDSINLWMNIPLGQWIGGRDNDINVTTQTQRTTGQNTWYETGLNGRAFDRRLYWDVSERIAPGSENNVDSSRLNLRWFGTYGELAGMYSYSSYIRQMSAGISEGMVLHNEGITLGQKGEDTVALVVAPGVNGASVGSLPGVRTDTRGYTLVNHVSPYQENLITLDPTTFPENMEVSQTDTRVVPTKGAVVRAKFITRVGGRALITLSRSDGSRLPFGAVVTEEGKKGQMPGGAGVVGDNGEVYLSGLDETGQLKVQWGRNSSCRANYRLPEEKEATGIFLVRTVCM

SEQ ID NO: 14728 - protein, 259 aa, Escherichia coli
MIKHVLLFFVFISFSVSANDFFRADSRTPDEIRRAGGLLPRGQQEAYERGTPININLYDHARGTVTGNTRYNDGYVSTTTTLRQAHLIGQNLLGSYNEYYIYVVAPAPNLFDVNGVLGRYSPYPSENEFAALGGIPLSQIIGWYRVSFGVIEGGMQRNRHYRRDLFQGLSVAPNHDGYHLAGFPDGFAAWRELPWSAFAPAACEHDYMVRILDACDSYTNRISQNDLVAFKRFMRIRSSLMILQSIEDDLQDNENKDEL

SEQ ID NO: 14729 - protein, 790 aa, Escherichia coli
MAVMAALESGASYAGEKLDMSFIQGGAGTNPDVWAALNSNYAPGRYLVELSLNGKILGKHILDVTPEDSNELCLTEEWLTKAGVYISTDYFREGYDATRKCYALSKAQAVKVDFDVSTQSLVLTIPQKGLVKVPENVDWDYGTSAFRVNYSANANMGRHNTSAFGSADLKANIGHWVVSSSATASTGDSGDNNASINMFTATRAIRSLSADLAVGKTSTGDSLLGSTGTYGISLSRNNSMKPGNLGYSPVFSGIANGPSRVTLIQNGRILHSEMVPAGPFSITDVQLYTSGDVTMKITGEDGREQTQVFPLSVVNGQLNPGQHEFNIAAGLPDDDSHLKGGVFAASYGYGLDNLTLRAGGVFNHDWLGGSAGVVAGLSYLGAVSVDGAYATAKYRDGNHAGNKVQVAWNKQLEITNTGLRVSWAHQSEEYEDMSSFDPSKLWGEENHGRHTKDEWNMGISQPVGGLFNLSVSGWQRSYYPISGAGYSSLYSDGKDTGLTGTLSTQIKGVSLNFGVSGSRNSQGNDNWSASASVSVPFTLFDRRYSSSTSVSTSKSGGVAFSTGVSGSLNDRFSYGLGGGRDGDGGASGYFNASYSGDRAYLSGALNYSQSGGTSGSVSASGSVLAVPAARDIMFSRTSADTVAVVNVKNTPGVKVMSGNGETDKDGNLVVPLNSYDWNTVTVDAGTLPLDTELGNTSQKVVPTDKAVVWMPFDALKVHRYLLQVKQRNGEFVPGGTWARDSKKTPLGFVANNGVLMINAVDAPGDITLGQCRIPATKLRDTEKLQEITCE

SEQ ID NO: 14730 - protein, 862 aa, Escherichia coli
MHRNKSSSGLSLYCVKTKITAVALSVMAACTLLYTGNTEARTYSFDASMLKGGGKGVDLTLFEEGAQLPGIYPVDIILNGSRVDSRDMAFRTEKDAEGKTYLKTCLTREMLARYGVMTEEYPELFHGDDGKEAEACAELSVIPQATETYQFASQQLLLSIPQVALRPPLRGIAPEALWDDGIPAFLLNWQANTSRSEYRGYGKSVTDNYWVTLEPGINLGPWRVRNLTTWNRSSGQPGQWESAYIRAERGINSLRSRLTLGEDYTPSDIFDSVPFRGVMLGADESMVPYNQREFAPVVRGIARTQARIEVRQNGYLIDSRTVAPGAFALTDLPLTGSGGDLQVTVQESDGTAQVFTVPYTTPAIALREGYMKYSIAGGEYRSSDDAVEHSPLGQMSVMYGLPWGLTAFGGAQMSSHYQSAALGLGWSMGRLGAVSVDGIHSRGQQKGRDTETGETWRLRYNKSFELTNTDLTAARYQYTSSGFHTLSDVLSTFRNDNFRAYSYSGDRSRRTTLRLNQSLGSLGYMSFYGSRDEFRHNRQKQDSFGMSYGTSWKNISWYVNWSRNYSTNAYYQRGHIEDSINLWMNIPLGQWIGGRDNDINVTTQTQRTTGQNTWYETGLNGRAFDRRLYWDVSERIAPGSENNVDSSRLNLRWFGTYGELAGMYSYSSYIRQMSAGISGGMVLHNEGITLGQKGEDTVALVVAPGVNGASVGSLPGVRTDTRGYTLVNHVSPYQENLITLDPTTFPENVEVSQTDTRVVPTKGAVVRAKFITRVGGRALITLSRSDGSRLPFGAVVTEEGKKGQMPGGAGVVGDNGEVYLSGLDETGQLKVQWGRNSSCRANYRLPEEKEATGIFLVRTVCM

SEQ ID NO: 14731 - protein, 835 aa, Escherichia coli
MSKHHLILAPLILGIGTNVDARDYFDPSLLASDVAGGGDIDLSAFAIPGGGMEGEQEVGIYINNDFYSRATLNFKNTDERGLLPDFPADFFDDILYEEYLVFDKTQVIPSSDFLAKVPFSEVTFDQALSRVNVSIPQAYIDEGAKLVSSPDTWDYGVPALLFDYNISGNRNKYNDSNSESFYASSLVGVNLWGWRLRTSANYNQYTTESVWGKTRSETNSFFNTYIERDISSLRAGLRIGEASTGGIILDSIPFRGIKLYSDDDMLGYRLRNYSPTVRGIARSQAVVTISQNGRQVYQTNVPPGPFQLNDFYISGYSGDMVVTVREADGSEHSFVQPYSTLPEMKREGVSGFELSVGKYDNYGSDDYYDQPSFVYGNWSRGFSYGITTFGETLQAEKYQSLGLGSTVSLGALGAASADVSVSRAEKYGDVKTGQSYGFKYSKSQLETGTTLTLATYRYSTKNFYTFSDFASNSEEARFVWENKLKNRMTLSVSQALGAYGHLSLSANQQSYWTSSEVTRNYSLSHSFSWEDIFFSTTFSLDQSHNRYNDYAENKQIDFYVSVPLSKFLGDKDITSSSLTYNVTNSDHRVRNSAALNGNIPETDFRYRVGGSWGNNNLNSTKTASLSWTGSYTSASLGYTYSHNNNTLDYSLSGAAVAYPWGLALGNNNVTNSGAIVVETSGAPGVRTSAGYSTSFLGTALIGSPQKYTENRIDLYPDGLPDDTVLAETSKVAVPAKGAVVVLDYKVFKGSQVVFSLKQESGKPLPFGTIVSLDGMPKGKENTGIVGEDGQVYMAGVPSKGSLKAVWGGNTCGIKFHLDDKKTVGPIRETTEVCKA

SEQ ID NO: 14732 - protein, 237 aa, Escherichia coli
MRKITQALSAVCLLFALNSSAVALASSPSPLNPGTNVARLAEQAPIHWVSVAQIENSLAGRPPMAVGFDIDDTVLFSSPGFWRGKKTFSPESEDYLKNPVFWEKMNNGWDEFSIPKEVARQLIDMHVRRGDAIFFVTGRSPTKTETVSKTLADNFHIPATNMNPVIFAGDKPGQNTKSQWLQDKNIRIFYGDSDNDITAARDVGARGVRILRASNSTYKPLPQAGAFGEEVIVNSEY

SEQ ID NO: 14733 - protein, 822 aa, Escherichia coli
MLSVPLWAAEDAEFDPSFLSRTPGSSVIDVRRFTHGNPVPSGNYYSDIYLNGEWKGNAELSFRDMSSSQEESVLCVTPELLSILDVSPEAVAREPDTGNGRCMPFSAVVPDAKIRFDLSLLRLNVEIPQAMLVSRPRGYISPSQWQTGVPAAFVSYDVNHWRYRTPDMENNQSYLGLRAGFNAGGWAFRHRGTESWSDGHAEGYRSIETNLQHDIAMLRAQLTLGDFTTTGELMDSNSLRGIRLASDDRMLPGSLRGYAPVVRGMAGSNARVTVRQNGNIIYETTVPAGPFSISDLYPSGYGGDLTVTVTESDGQTRSFIVPFASVAQLVRPGFSRWQVAAGRYRYGNRTFSDTVFQGTLQYGLTNDITLNTGMSTAPHYLSGLGGVAFNTPLGAVATDITLARTTFPGSDTTHRGYSLHAGYSARIPETSTNVTLAAYRYSSRDFWSLRDAILTRNRDVINDSSVRSATGYRPRNQLQLTVNQSLGEGWGNLYLTGATYHYWGHTGTFNEYQAGYNNVWKKMSYQIGFSQTRRSGDYHHDNRFFFSFSLPLSDTGRTLLSTTVNVSDKNSNSIQSSISGVSGDDNQLSYGVSLNTQENGPTGYAVNGSYRSPVATLQATAGNDSRHNRQISAGISGAIVAHPFGVTASNDLGDTFTVIHADGAGGAVINNAPGNRLDPWGNGIVPYVTPYEKNYISIDPTALAADVELSATEREIIPRANSTTMVTFTTKTGKAMLFDVKMPDGTPPPMAAEALTADGKSAGYIAQGGRLFVRDLDAEKGMLRIVWGSGQNDSCVIHYSASGENARGNAVPENHHVVCMRQ

SEQ ID NO: 14734 - protein, 848 aa, Escherichia coli
MLHINSMVKVCFFVIIAFSLFHTRNSDGKTYSFDASLLKRRGEGVDLTLFENGGQLPGIYPVDIFLNGTIVGSEDIFFHAEHSNGKPYLKACLSEELLMRYGVKTEKYPKLFLSHYGKKDERQCADLSVIPQATEEFLFEAQKLVLSIPQVAIRSPLRGVASDLIWEDGISTFLLNWQVEAGHSEFQHYEKTTSDNFWVSLEPGINIGPWRIRNLTTLNKSSGQVGKWESSYIRAERGLNNIKSRLTLGEDYTPADIFASVPFRGVMLGTDENMIPYDQRGFAPVIRGIARTQARIEIRQNGYLIQSQTVAAGPFALTDLPITGSGGEFQVTIFESDGAIQSFNVPFTTPAIALREGYLKYNISAGQYRSSDESVEKAYLWQATAMYGLPRALTVFGGVQTAEHYQAAALGVGLSLGNMGAASLDTIYSRGQQKGYDFDTGNSWRIRYDKSFELTDTSFSAASYQYSNEGYHELSDILDTYRSGANFVFNDTDRKRRRITININQSLGPWGFIGLSGGRDEYKGGDRQDYIGASYSMSWKDISFSVNWTRNRNVGDYFSNRTFNEDTVGMWMSIPLKHWLGKNDNDVNATAQIQHSTRQNTRYEMGLNGRAFDQKLYWDIREQIVPGSLLMQISRLNMRWSGSYGELVGMYSYNSHTRQMNAGMSGSIAMHSEGITFGQRFGDTMALIAAPGVRGASVGGWPGVSTDSRGYALVSYITPYQENIITLDPTTFPENAEVLQTDTRVVPTKGAVVRAKFKTRVGNRAVVRLARADGTPLPFGTVVTLEGKTEVSNSTGVVDDKGMVYLSGLSEAGKLKAQWGMNSHCYANYRLPVKKGPAGLYLTSAVCI

SEQ ID NO: 14735 - protein, 804 aa, Escherichia coli
MKKRYIFKLSLLALSICSQFSVATELNLDFIHGISAIPSILKTDTTLPAGQYVVDVLVNNERTGRANLVITEEDEKNNHLCLSHEWLDSAGVMMKKDAYDYAFDREKQCYVLTRNSHTKVDFDYGAQTLKFNIPQAYLLSKTDPARWDYGLNGGRLKYYTNFNKNVHDDVNVFGNLDATINLGRWVLSSNMNMSHDRDKTEITSSDLTLSTAISQVQGDLLLGKSQTRTELFSDFNFYGVALRSNSNMRPWESRGYAPGITGIASTPSRITVKQNGYTVYSKMVPAGPYRLDDLRPMGNGELVVTVEDESGNKTEQVYPVTTLPTLLRPGEFQYNVAVGKKNNNNELDKAFHSDTGLFWLGSLDYGFSTTTLNSAFILNDDYQAAGLGGTQMLGGLGALSLSANMSKASYDNGEVKTGESFSAKYAKSFTDRTDLQLLTYRYQSKGYVEFADFNPKDIWSYARYGGQRSRYEARLSHRFDGTYLSGSYWRQDYWMREGTDTGSTLSFSTSVFDSVSVFLNGAYSKYAWSDKADYAVSLSLSVPFDLKGTRHYSSNSVGYTRTGGTTFNTSVSAMPTERLNYSLSANAGSTGDRGASASASYAFDAIQTNLGVSRSYNKHGNSHTSFSGSVSGSVLGTSESGPLFTKESSDTVGIVSIPGVEGVSVNGSMPTNRDGNTVVWLSEYSENNININMDNVPDDMEFETTSFNVVPTEKAMVYRKFGFENVLRYILRVKNAQGNYLTGGDAKTEQGLNAGFISNNGVLLMNMLAEPKAVSVNIGNGKQCRFSTAGLKANTNKVQEVRCE

SEQ ID NO: 14736 - protein, 836 aa, Escherichia coli; identical to SEQ ID NO: 13888

SEQ ID NO: 14737 - protein, 835 aa, Escherichia coli
MHKYQILMISFFVLCAETFAEDYFNPSLLATDIIGEGNIDLSAFSRHGGGMEGEREVAIYVNNNFYSRRTLVFKNTSDKGLLPEFTPGFFDNLVSGDILVSEKNKIISSSDFLKKVPYSDINFDQGMSRVNVSIPQAYLGDGAKLISSPDTWEYGVPAFLLDYNISGNRNASGNNDSRSLYISSQMGVNLMKWHLRTSSSYSNYKTNSVWGGARSERNSFYNTYAERDISSLRAVLRLGEISTRGLILDSVPFRGVKLSSSDDMLDARLRNYTPTVRGMARSQAVVTITQNGRQVYQTNVPAGPFELNDFYLSGYSGDMQVTVREADGSEHSFLQPYSTLPEMKREGISGFEISVGRYDNNGAEHYYDAESFVYGNWSRGFARGVTFFGETLQAEKYQSLGVGSTLSLGRLGASSADISLSRVDKYGAIRGGQSYGFKYSKSQIETGTTLTLATYRYSTEHFYTFRDFVSKTDTARYVWENKLKNRMTLSLSQSLGEYGYLSASASKQDYWTSREVSRNYALTHSFNWNDIYLSTTLSMDDQRGREAGDLSNKQAGLYVTVPLNKFLLGIDSTGSSLTWSTSHADHNVRNSVTLNGKMPESDVRYRVGGSWGNGNTEGSRTVSVSWSGDYVSTSLGYARTGKYRTLDYNMSGAAVMYPWGIAMGNNSVTGDGAIVVETPGAKGVRTSTGYRTSWLGTSLVSSPRKYTENRIDLYPDGLPDDTVLGETSRTTVPVKGAVVVLDYTVFRGKQVVFTLRQSNGKPLPFGTVVTLDGVSRGKENSGIVGEEGRVYMAGMPEKGTLTATWGQDKSCSVPFRINQHKTEAVISEIHGVCRV

SEQ ID NO: 14738 - protein, 862 aa, Escherichia coli
MTIKSTNHLTHIATFCALLYSNSALCAELVEYDHTFLMGKDASNIDLSRYTEGNPTLPGIYDVSVYVNDQPIMSQSIAFAVIEGKKNAQACITQKNLLQFHISSPDKNSEKAILLKRDEDLGDCLNLAEMIPQSSIRYDVNDQRLDIDVPQAWIMKNYQNYVDPSLWENGINAAMLSYNLNGYHSESPGRTNDSIYAAFNGGINLGAWRLRASGNYNWMTNVHSDYDFQNRYLQRDLASLRSQLVIGESYTTGETFDSVSIRGIRLYSDSRMLPPVLASFAPIIHGVANTNAKVTVMQNGYKIYETTVPPGAFAIDDLSPSGYGSDLIVTIEEADGTKRTFSQPFSSVVQMLRPGVGRWDISAGQVLKDSIQDEPNLFQASYYYGLNNYLTGYTGIQLTDNNYTAGLLGLGMNTPVGAFSVDVTHSNVSIPDDKTYQGQSYRISWNKLFENTSTSLNIAAYRYSTQHYLGLNDALTLIDEVEHPEQELEPKSMRNYSRMKNQVTVSINQPLKFEKKDYGSFYLSGSWSDYWASGQNSTNYSIGYSNSASWGSYSISAQRSLNEDGQTDDSIYLSFTIPIENLLGTEHRSSGFQSIDTQLNSDFKGNNQLNISSSGYSDTNRISYSVNTGYMMNKSSDDLSYIGGYASYESPWGTLSGSASASSDNSRQFSLNTDGGFVLHSGGLTFSNDSFSDSDTLAVIQAPGAKGARINYGNSTVDRWGYGVTSALSPYHENRIALDINDLENDVELKSTSTVAVPRQGAVVFADFETVQGQSAIMNIVRSDGKNIPFAADIYDEQNNIIGNVGQGGQAFVRGIGQEGNIRITWIEEGKPVSCFAHYQQNTTSEKIAQSIILNGLRCQIQ

SEQ ID NO: 14739 - protein, 869 aa, Escherichia coli
MKIPTTTDIPQRYTWCLAGICYSSLAILPSFLSYAESYFNPAFLLENGTSVADLSRFERGNHQPAGVYRVDLWRNDEFIGSQDIVFESTTENTGDKSGGLMPCFNQVLLERIGLNSSAFPELAQQQNNKCINLLKAVPDATINFDFAAMRLNITIPQIALLSSAHGYIPPEEWDEGVPALLLNYNFTGNRGNGNDSYFFSELSGINIGPWRLRNNGSWNYFRGNGYHSEQWNNIGTWVQRAIIPLKSELVMGDGNTGSDIFDGVGFRGVRLYSSDNMYPDSQQGFAPTVRGIARTAAQLTIRQNGFIIYQSYVSPGAFEITDLHPTSSNGDLDVTIDERDGNQQNYTIPYSTVPILQREGRFKFDLTAGDFRSSNSQQSSPFFFQGTALGGLPQEFTAYGGTQLSANYTAFLLGLGRNLGNWGAVSLDVTHARSQLADDSRHEGDSIRFLYAKSMNTFGTNFQLMGYRYSTQGFYTLDDVAYRRMEGYEYDYDYDGEHRDEPIIVNYHNLRFSRKDRLQLNISQSLNDFGSLYISGTHQKYWNTSDSDTWYQVGYTSSWVGISYSLSFSWNESVGIPDNERIVGLNVSVPFNVLTKRRYTRENALDRAYASFNANRNSNGQNSWLAGVGGTLLEGHNLSYHVSQGDTSNNGYTGSATANWQAAYGTLGVGYNYDRDQHDVNWQLSGGVVGHENGITLSQPLGDTNVLIKAPGAGGVRIENQTGILTDWRGYAVMPYATVYRYNRIALDTNTMGNSIDVEKNISSVVPTQGALVRANFDTRIGVRALITVTQGGKPVPFGSLVRENSTGITSMVGDDGQVYLSGAPLSGELLVQWGDGANSRCIAHYVLPKQSLQQVVTVISAVCTHPGS

SEQ ID NO: 14740 - protein, 878 aa, Escherichia coli; identical to SEQ ID NO: 6997

SEQ ID NO: 14741 - protein, 754 aa, Escherichia coli
QYVVDVLVNNERTGRANLVITEEDEKNNHLCLSHEWLDSAGVMMKKDAYDYAFDREKQCYVLTRNSHTKVDFDYGAQTLKFNIPQAYLLSKTDPARWDYGLNGGRLKYYTNFNKNVHDDVNVFGNLDATINLGRWVLSSNMNMSHDRDKTEITSSDLTLSTAISQVQGDLLLGKSQTRTELFSDFNFYGVALRSNSNMRPWESRGYAPGITGIASTPSRITVKQNGYTVYSKMVPAGPYRLDDLRPMGNGELVVTVEDESGNKTEQVYPVTTLPTLLRPGEFQYNVAVGKKNNNNELDKAFHSDTGLFWLGSLDYGFSTTTLNSAFILNDDYQAAGLGGTQMLGGLGALSLSANMSKASYDNGEVKTGESFSAKYAKSFTDRTDLQLLTYRYQSKGYVEFADFNPKDIWSYARYGGQRSRYEARLSHRFDGTYLSGSYWRQDYWMREGTDTGSTLSFSTSVFDSVSVFLNGAYSKYAWSDKADYAVSLSLSVPFDLKGTRHYSSNSVGYTRTGGTTFNTSVSAMPTERLNYSLSANAGSTGDRGASASASYAFDAIQTNLGVSRSYNKHGNSHTSFSGSVSGSVLGTSESGPLFTKESSDTVGIVSIPGVEGVSVNGSMPTNRDGNTVVWLSEYSENNININMDNVPDDMEFETTSFNVVPTEKAMVYRKFGFENVLRYILRVKNAQGNYLTGGDAKTEQGLNAGFISNNGVLLMNMLAEPKAVSVNIGNGKQCRFSTAGLKANTNKVQEVRCE

SEQ ID NO: 14742 - protein, 867 aa, Escherichia coli
MFSGDGGQLLSDKSLTGSAGGGNNRMKFNILPLAFFIGIIVSPARAELYFNPRFLSDDPDAVADLSAFTQGQELPPGVYRVDIYLNDTYISTRDVQFQMSQDGKQLAPCLSPEHMSAMGVNRYAVPGMERLPADTCTSLNSMIQGATFRFDVGQQRLYLTVPQLYMINQARGYIAPEYWDNGITAALLNYDFSGNRVRDSYGGTSDYAYLNLKTGLNIGSWRLRDNTSWSYSAGKGYSQNNWQHINTWLERDIVPLRSRLTMGDSYTRGGYFCRCKFQGIQLASDDNMVPDSQRGYAPTIHGISRGTSRISIRQNGYEIYQSTVPPGPFEINDIYPAGSGGELQVTLQEADGSVQRFNVPWFSVPVLQREGHLKYAFSAGEFRSGGHQQDNPRFAEGTLNYGLPAGWTVYGGPWIAERYRAFNLGMGKNMGWLGAVSLDATRANARLPDESRHDGHSYRFLYNKSLTETGTNIHLIGYRYSTRGYFSFADTAWKKMSGYSVLTQDGVIQIQPKYTDYYNLAYNKRGRVQVSITQQKGESSTLYLSGSHQSYWGTDRTDRQLNAGFNSSVNDISWSLNYSLSRNAWQHETDRILSFDVSIPFSHWMRSDSTSAWRNASAPYSQTLEAYGQAASTAGLYGTSLGDNNLGYTIQSGYTRGGYEGSSKTGYASLNYRGGYGNASAGYSHSGGYRQLYYGLSGGILAHANGLTLSQPLGDTLILVRAPGASDTRIENQTGVSTDWRGYAVLPYATDYRENRVALDTNTLADNVDIENTVVSVVPTHGAVVRADYKTRVGVKVLMTLMRNGKAVPFGSVVTARNGGSSIAGENGQVYLSGMPLSGQVSVKWGSQTTDQCTADYKLPKKAPDRY

SEQ ID NO: 14743 - protein, 828 aa, Escherichia coli
MKQRSICPGRLSTAIAVALCCFPPFSSGQENPGTIYQFNDGFIVGSREKVDLSRFSTSAISEGVYSLDVYTNGEWKGRYDLKITAGKDGKMGVCYTKAMLMQYGISPDKLNPQLSEKEGFCGRLQEWRHEDNVKDTLIQSSLRLDIAVPQIYEDQRLKNFVSPQFWDKGVAALNLGWMANAWNSHISSANGSDNSSAYLGVNAGLSWDGWLLKHIGNLNWQQQQGKAHWNSNQTYLQRPIPQINSIVSGGQIFTNGEFFDTIGLRGVNLATDDNMFPDGMRSYAPEIRGVAQSNALVTVRQGSNIIYQTTVPPGPFTLQDVYPSGYGSDLEVSVKEGDGSVEVFSVPYASVAQLLRPGMTRYALSAGKVDDSSLRNKPMLYQGTWQHGLNNLFTGYTGVTGFDDYQAFLLGTGMNTGIGALSFDVTHSRLKSDTLDEHGQSYRATFNRMFTETQTSIVLAAYRYSTNGYYNLNDALYAVDQEKNYNSNYTVWRQKNGMTFTVNQNLPDGWGGFYLSGRVADYWNRSGTEKQYQFSYNNMYGRLSWSVSAQRVYTPDSSGHRRDDRVSLNFSYPLWFGENRTANLTSNTAFNNSRFASSQIGVNGSLDSENNLNYGVSTTTATGGQHDVALNGSYRTPWTTLNGSYSQGEGYRQSGVGASGTLIAHQHGVVFSPETGTTMALIEAKDAAGAMLPGSPGTRIDSNGYAILPYLRPYRINSVEIDPKGSNDDVAFGSTVAQVVPWEGSVVKVSFDTTLQNNITLRARQANGLPLPFAATIFGPSGKEIGVVGQGSMMFISDASAPKATVKWSGGQCSVELSQEKTKETLCR

SEQ ID NO: 14744 - protein, 826 aa, Escherichia coli
MLRMTPLASAIVALLIGIEAYAAEETFDTHFMIGGMKDQQVSNIRLEDNQPLPGQYDIDIYVNKQWRGKYEIIVKDNPQETCLSREMIKRLGINTDSFASGKQCLTFKQLIQGGSYTWDIGVFRLDFSVPQAWEEELESGYVPPENWERGINAFYTSYYVSQYYSDYKASGNSKSTYVRFNSGLNLLGWQLHSDASFSKTNNNPGVWKSNTLYLERGFAQLLGTLRVGDMYTSSDIFDSVRFSGVRLFRDMQMLPNSKQNFTPRVQGIAQSNALVTIEQNGFVVYQKEVPPGPFAITDLQLAGGGADLDVSVKEADGSVTTYLVPYAAVPNMLQPGVSKYDFAAGRSHIEGASKQSDFVQAGHQYGFNNLLTLYGGSMVANNYYAFTLGTGWNTRIGAISVDATKSHSKQDNGDVFDGQSYQIAYNKFVSQTSTRFGLAAWRYSSRDYRTFNDHVWANNKDNYRHDENDIYDIADYYQNDFGRKNSFSANMSQSLPEGWGSVSLSTLWRDYWGRSGSSKDYQLSYSNNLRRISYTLAASHAYDENHHEEKRFNIFISIPFDWGDDVTTPRRQIYMSNSTTFDDQGVASNNTGLSGTVGSRDQFNYGVNLSYQYQGNETTAGANLTWNAPVATVNGSYSQSSAYRQAGASVSGGIVAWSGGVNLANRLSETFAVMNAPGIKDAYVNGQKYRTTNRNGVVVYDGMTPYRENYLMLDVSQSDSEAELRGNRKIAAPYRGAVVLVNFDTDQRKPWFIKALRADGQPLTFGYEVNDIHGHNIGVVGQGSQLFIRTNEVPPSVNVAIDKQQGLSCTITFGKEIDESRNYICQ

SEQ ID NO: 14745 - protein, 843 aa, Escherichia coli
MHWMHLPLYHYRAHFSFSLLALTIASSLPAYGGKFNPKFLENVQGIDQHIDLSVYDSPVGQQIPGKYRVSVFVNEEKMASRTLDFSTASEAKRKASGESLMPCLSRVQLEEMGVRVDSFPALKMSPPEACVAFDEIIPQATSRFDFNTQTLHLSFPQAAMMMTARGTVDPSRWDEGIPALLLDYSFSGSNGRNEGTGSSSDSTSDSYYPNLRSGLNVGPWRLRNNSIWNRTDGKNQWDNVGTSLNRAIIPLKSQITLGDTATPGEIFDSVQMRGALLASDDEMLPDSQRGFAPVVRGIAKSNAEVSIEQNGYVIYRTFVQPGAFEINDLYATSGSGDLTVIIKEADGSEQRFIQPFSAVAIFQREGYLKYSLAAGEYRAGNYDSDKPHFGQFTAMYGLPWGMTAYGGALLSADYNALALGLGKNFGTIGAVSVDVTQAKSQLRNNEKEEGQSYRFLYSKSFEGGTDLRLLGYKYSTSGYYTFQEATDVRSDADSDYRRYHKRSQIQGNITQQLGDYGSVYFNMTQQDYWNVDGKENSLSAGYHGHIGRVNYSVAYTWTRSPEWEEDDRLWSFSVSIPLGGAWSSYRMTTDQNGKTSQQASVSGTLLEDRNLSYNVQQGYTSNGVGYSGSVNMGYMGGSGNIDVGYNYSKDNQQVNYGVRGGVIVHSEGITLSQPLGESLAIVSAPGARGGHVVNSSGVEVDWMGNAVVPYLTPYRETIVELRSDTLGQNVELQEAFQKVVPTRGAVVRSRFDTRVGYRVLMSLKQANGNAVPFGATAALIDESKPASSIVGEEGQLYISGMPEEGELQVSWGNEQAQRCRVPFRLPENKDNAAIVMVNAVCEK

SEQ ID NO: 14746 - protein, 121 aa, Escherichia coli
MNFKKSIALLFIALNIASLPTYAGVSKTFKDKCASTTAKLVQSVQLVNISSDVNKDSKGIYISSSAGKTWFIPGGQYYPDNYLSNEMRKIAMAAVLSNVRVNLCASEAYTPNHVWAIELAP

SEQ ID NO: 14747 - protein, 259 aa, Escherichia coli
MIKHLLLFFVFISFSVSANDFFRADTRTPSEIRQAGGLLPRGQQEAYERGTPININLYDHARGTVTGNTRYNDGYVSTTTTLRQAHLIGQNLLGSYNEYYIYVVAPAPNLFDVNGVLGRYSPYPSENEFAALGGIPLSQIIGWYRVSFGVIEGGMQRNRHYRRDLFQGLSVAPNHDGYHLAGFPDGFAAWRELPWSAFAPAACEHDYMVRILDACDSYTNRISKNDLFAFKRFMRIRSSLMILQSIEDDLQYNENKDEL

SEQ ID NO: 14748 - protein, 587 aa, Escherichia coli
MRGMKDRIPFAVNNITCVILLSLFCNAASAVEFNTDVLDAADKKNIDFTRFSEAGYVLPGQYLLDVIVNGQSISPASLQISFVEPQSSGDKAEKKLPQACLTSDMVRLMGLTAESLDKVVYWHDGQCADFHGLPGVDIRPDTGAGVLRINMPQAWLEYSDATWLPPSRWDDGIPGLMLDYNLNGTVSRNYQGGDSHQFSYNGTVGGNLGPWRLRADYQGSQEQSRYNGEKTTNRNFTWSRFYLFRAIPRWRANLTLGENNINSDIFRSWSYTGASLESDDRMLPPRLRGYAPQITGIAETNARVVVSQQGRVLYDSMVPAGPFSIQDLDSSVRGRLDVEVIEQNGRKKTFQVDTASVPYLTRPGQVRYKLVSGRSRGYGHETEGPVFATGEASWGLSNQWSLYGGAVLAGDYNALAAGAGWDLGVPGTLSADITQSVARIEGERTFQGKSWRLSYSKRFDNADADITFAGYRFSERNYMTMEQYLNARYRNDYSSREKEMYTVTLNKNVADWNTSFNLQYSRQTYWDIRKTDYYTVSVNRYFNVFGLQGVRLDCQPQGLNIWGVITILLTCVYPCRWGRGQRATVAV

SEQ ID NO: 14749 - protein, 861 aa, Escherichia coli
MHRNKSSSGLSLYCVKTKITAVALSVMAACTLLYTGNTEARTYSFDASMLKGGGKGVDLTLFEEGAQLPGIYPVDIILNGSRVDSRDMAFRTEKDAEGKTYLKTCLTREMLARYGVMTEEYPELFHGDDGKEAEACAELSVIPQATETYQFASQQLLLSIPQVALRPPLRGIAPEALWDDGIPAFLLNWQANTSRSEYRGYGKSVTDNYWVTLEPGINLGPWRVRNLTTWNRSSGQPGQWESAYIRAERGINSLRSRLTLGEDYTPSDIFDSVPFRGVMLGADESMVPYNQREFAPVVRGIARTQARIEVRQNGYLIDSRTVAPGAFALTDLPLTGSGGDLQVTVQESDGTAQVFTVPYTTPAIALREGYMKYSIAGGEYRSSDDAVEHSPLGQMSVMYGLPWGLTAFGGAQMSSHYQSAALGLGWSMGRLGAVSVDGIHSRGQQKGRDTETGETWRLRYNKSFELTNTDLTAARYQYTSSGFHTLSDVLSTFRNDNFRAYSYSGDRSRRTTLRLNQSVGSLGYMSFYGSRDEFRHNRQKQDSFGMSYGTSWKNISWYVNWSGNYSTNAYYQRGHIEDSINLWMNIPLGQWIGGRDNDINVTTQTQRTTGQNTWYETGLNGRAFDRRLYWDVSERIAPGSENNVDSSRLNLRWFGTYGELAGMYSYSSYIRQMSAGISGGMVLHNEGITLGQKGEDTVALVVAPGVNGASVGSLPGVRTDTRGYTLVNHVSPYQENLITLDPTTFPENVEVSQTDTRVVPTKGAVVRAKFITRVGGRALITLSRSGSRLPFGAVVTEEGKKGQMPGGAGVVGDNGEVYLSGLDETGQLKVQWGRNSSCRANYRLPEEKEATGIFLVRTVCM

SEQ ID NO: 14750 - protein, 840 aa, Escherichia coli; identical to SEQ ID NO: 9665

SEQ ID NO: 14751 - protein, 656 aa, Escherichia coli
MRLKKRYLCTVLSIAFTQQSVAVQESDTLTVWSSPVSSTTTTVFDQPTMKALDKQNVAQALSVVPGVVLQKSGSRNEEQVKVRGFDSRQVPVYFDGVPIYVPYDGNLDLARILTNNLGAVEVSKGYSSLLQGPNQMGGAINITTQKPTKPLEASLGYRQGWSRSQNNAYDMHASFAASSDLGYLQVSGSQLKQDFLGLPHGVNNDIAGKHGKMTNSSADDKRGIVKLGFTPRENDEYTLTYIKQDGEKDNPPYSGNSGQKSRYWQWPEYDKESFYYQGTTQLNDRFTLKSRLYHDTFENTLMMYNSLADLKNKKGSYSHYSDYSDGAGLQLAADVRENDLLSFAVNWKDDVHREKGAPHAAYDRYEDRTWSLASEYQWAAADNVDVVAGISYDWRDSVEAKKHEKDGSITHYDDNNQSAFNWQVMGKYHFANEDTLALSYYDRTRFPTLKERYTTSKPAYNQIAIVNPQLKPERARGVDLTWNGAFTHDWGFEVSVYYNRVSDAILSHNIDADTIQNQNSGTVDYSGLDAGIKGKISNILDVGLSYALIHADAKRKDIGKITDLPTQTMTAWMTLKPWEPLSVTLSEEARSSSYSNSDGSQKAAGFAVTHIRADYTLGHGFSVNASVNNLFDTKYAYSEGFIEEGRNFWAGIEYTF

SEQ ID NO: 14752 - protein, 240 aa, Escherichia coli
MKHILLFIFTVLLSLPSYGSVVIMGTRVIYPAEQKSINVRLNNGDSTPSLIQAWLDTGDPSSPPDSVRVPFIITPPVFRMEPLSGQTMRIMYTGEKLPADRESLFWLNVLDIPAKPSFAGKSEKAQGYNYLQFAVRSRIKFFFRPDGLPFSPDDAYKKVTWQLTGGDTLQASNPTPYFITFSTVSVGQGAQKVSSTQGGMAAPFSSVTFRLKQKVSPSGKVEWTVVNDNGGYQKGESVLK

SEQ ID NO: 14753 - protein, 306 aa, Escherichia coli
MRNVSATTTGLPLAKILASTELGDNTIQAANDAANKLFSLTIADLTANKNINTTNAHSTSNILIPELKAPKSLNASSQLTLLIGNLIQILGEKSLTALTNKITAWKSQQQARQQKNLEFSDKINTLLSETEGLTRDYEKQINKLKNADSKIKDLENKINQIQTRLSELDPDSPENKKLRREEIQLTIKKDAAVKDRTLIEQKTLSIHSKLTDKSMQLEKEIDSFSAFSNTASAEQLSTQQKSLTGLASVTQLMATFIQLVGKNNEESLKNDLALFQSLQESRKTEMERKSDEYAAEVRKAEELNRV

SEQ ID NO: 14754 - protein, 306 aa, Escherichia coli
MRNVSTTTTGLPLAKILASTELGDNTIQAANDAANKLFSLTIADLTANKNINTTNAHSTSNILIPELKAPKSLNASSQLTLLIGNLIQILGEKSLTALTNKITAWKSQQQARQQKNLEFSDKINTLLSETEGLTRDYEKQINKLKNADSKIKDLENKINQIQTRLSELDPDSPENKKLRREEIQLTIKKDAAVKDRTLIEQKTLSIHSKLTDKSMQLEKEIDSFSAFSNTASAEQLSTQQKSLTGLASVTQLMATFIQLVGKNNEESLKNDLALFQSLQESRKTEMERKSDEYAAEVRKAEELNRV

SEQ ID NO: 14755 - protein, 673 aa, Escherichia coli
MKMTRLYPLALGGLLLPAIANAQTSQQDESTLVVTASKQSSRSASANNVSSTVVSAPELSDAGVTASDKLPRVLPGLNIENSGNMLFSTISLRGVSSAQDFYNPAVTLYVDGVPQLSTNTIQALTDVQSVELLRGPQGTLYGKSAQGGIINIVTQQPDSTPRGYIEGGVSSRDSYRSKFNLSGPIQDGLLYGSVTLLRQVDDGDMINPATGSDDLGGTRASIGNVKLRLAPDDQPWEMGFAASRECTRATQDAYVGWNDIKGRKLSISDGSPDPYMRRCTDSQTLSGKYTTDDWVFNLISAWQQQHYSRTFPSGSLIVNIPQRWNQDVQELRAATLGDARTVDMVFGLYRQNTREKLNSAYDMPTMPYLSSTGYTTAETLAAYSDLTWHLTDRFDIGGGVRFSHDKSSTQYHGSMLGNPFGDQGKSNDDQVLGQLSAGYMLTDDWRVYTRVAQGYKPSGYNIVPTAGLDAKPFVAEKSINYELGTRYETADVTLQAATFYTHTKDMQLYSGPVGMQTLSNAGKADATGVELEAKWRFAPGWSWDINGNVIRSEFTNDSELYHGNRVPFVPRYGAGSSVNGVIDTRYGALMPRLAVNLVGPHYFDGDNQLRQGTYATLDSSLGWQATERMNISVYVDNLFDRRYRTYGYMNGSSAVAQVNMGRTVGINTRIDFF

SEQ ID NO: 14756 - protein, 580 aa, Escherichia coli
MHIGSTTTTGLPLAKILASTELLDNTIQAANDAANKLFSLTIADLTANKNINTTNAHSTSNILIPELKAPKSLNASSQLTLLIGNLIQILGEKSLTALTNKITAWKSQQQARQQKNLEFSDKINTLLSETEGLTRDYEKQINKLKNADSKIKDLENKINQIQTRLSELDPDSPENKKLRREEIQLTIKKDAAVKDRTLIEQKTLSIHSKLTDKSMQLEKEIDSFSAFSNTASAEQLSTQQKSLTGLASVTQLMATFIQLVGKNNEESLKNDLALFQSLQESRKTEMERKSDEYAAEVRKAEELNRVMGCVGKILGALLTIVSVVAAAFSGGASLALAAVGLALMVTDAIVQAATGNSFMEQALNPIMKAVIEPLIKLLSDAFTKMLEGLGVDSKKAKMIGSILGAIAGALVLVAAVVLVATVGKQAAAKLAENIGKIIGKTLTDLIPKFLKNFSSQLDDLITNAVARLNKFLGAAGDEVISKQIISTHLNQAVLLGESVNSATQAGGNVASAVFQNNASKNLADLTLSKYQVEQLSKYIGDAIEKFGQLQGVIAELLASMSNSQANRTDVAKAILQQTTA

SEQ ID NO: 14757 - protein, 84 aa, Escherichia coli
MKKMFMAVLFALVSVNAMAADCAKGKIEFSKYNENDTFTVKVAGKEYWTSRWNLQPLLQSAQLTGMTVTIKSSTCESGSGFAEC

SEQ ID NO: 14758 - protein, 83 aa, Escherichia coli; identical to SEQ ID NO: 4668

SEQ ID NO: 14759 - protein, 660 aa, Escherichia coli; identical to SEQ ID NO: 14467

SEQ ID NO: 14760 - protein, 89 aa, Escherichia coli
  MOD_RES (84)..(84): Any amino acid
MKKMFMAVLFALASVNAMAADCAKGKIEFSKYNEDDTFTVKVDGKEYWTSRWNLQPLLQSAQLTGMTVTIKSSTLESGSGFAEXLFNND

SEQ ID NO: 14761 - protein, 79 aa, Escherichia coli
ALVSVNAMAADCAKGKIEFSKYNENDTFTVKVAGKEYWTSRWNLQPLLQSAQLTGMTVTIKSSTCESGSGFAEVQFNND

SEQ ID NO: 14762 - protein, 998 aa, Escherichia coli
MTVNKIKNIFNNATLTTKSAFNTASSSVRSAGKKLILLIPDNYEAQGVGINELVKAADELGIEIHRTERDDTAIANQFFGAAEKVVGLTERGVAIFAPQLDKLLQKYQKVGSKIGGTAENVGNNLGKAGTVLSALQNFTGIALSGMALDELLRKQREGEDISQNDIAKSSIELINQLVDTVSSINSTVDSFSEQLNQLGSFLSSKPRLSSVGGKLQNLPDLGPLGDGLDVVSGILSAVSASFILGNSDAHTGTKAAAGIELTTQVLGNVGKAVSQYILAQRMAQGLSTTAASAGLITSAVMLAISPLSFLAAADKFERAKQLESYSERFKKLNYEGDALLAGFHKETGAIDAGLTTINTVLSSVSAGVSAASSASLIGAPISMLVSALTGTISGILEASKQAMFEHVAEKFAARINEWEKEHGKNYFENGYDARHAAFLEDSLSLLADFSRQHAVERAVAITHQHWDEKIGELAGITRNADRSQSGKPYINYLENGGLLEAQPKEFTQQVFDPQKGTIDLSTGNVSSVLTFITPTFTPGEEVRERKQSGKYEYMTSLIVNGKDTWSVKGIKNHKGVYDYSKLIQFVEKNTKHYQARIISELGDKDDVVYSGAGSSEVFAGEGYDPVSYNKTDVGKLTIDATGAPKPGEYIVPKNMYGDVEVLQEVVKEQEVSVGKRTEKIQYRDFEFRTGGIPYDVIDNLHSVEELIGGKHDDEFKGGKFNDIFHGADGNDYIEGNYGNDRLYGDDGDDYISGGQGDDQLFGGSGNDKLSGGDGNNYLTGGSGNDELQAHGAYNILSGGTGDDKLYGGGGIDLLDGGEGNDYLNGGFGNDIYVYGQNYGHHTIADEGGKGDRLHLSDISFDDIAFKRVGNDLIMNKAINGVLSFNESNDVNGITFKNWFAKDASGADNHLVEVITDKDGREIKVDKIPHNNNERSGYIKASNIASEKNMVNITSVANDINKIISSVSGFDSGDERLASLYNLSLHQNNTHSTTLTTTV

SEQ ID NO: 14763 - protein, 306 aa, Escherichia coli
MREVSTTTTGLPLAKILASTELGDNTIQAANDAANKLFSLTIADLTANKNINTTNAHSTSNILIPELKAPKSLNASSQLTLLIGNLIQILGEKSLTALTNKITAWKSQQQARQQKNLEFSDKINTLLSETEGLTRDYEKQINKLKNADSKIKDLENKINQIQTRLSELDPDSPENKKLRREEIQLTIKKDAAVKDRTLIEQKTLSIHSKLTDKSMQLEKEIDSFSAFSNTASAEQLSTQQKSLTGLASVTQLMATFIQLVGKNNEESLKNDLALFQSLQESRKTEMERKSDEYAAEVRKAEELNRV

SEQ ID NO: 14764 - protein, 147 aa, Escherichia coli
LQNFTGIALSGMALDELLRKQREGEDISQNDIAKSSIELINQLVDTVSSINSTVDSFSEQLNQLGSFLSSKPRLSSVGGKLQNLPDLGPLGDGLDVVSGILSAVSASFILGNSDAHTGTKAAAGIELTTQVLGNVGKAVSQYILAQR

SEQ ID NO: 14765 - protein, 185 aa, Escherichia coli
MNLGAALFRLERPFAYLDTDNVYKEQGNQVNNGLELTAAGNVWQGLNIYSGVTFLDPKLKDTANASTSNKQVVGVPKVQANLLAEYSLPSIPEWVYSANVHYTGKRAANDTNTSYASSYTTWDLGTRYTTKVSNVPTTFRVVVNNVFDKHYWASIFPSGTDGDNGSPSAFIGGGREVRASVTFDF

SEQ ID NO: 14766 - protein, 89 aa, Escherichia coli
MKKIFVAALFAFVSVNAMAADCAKGKIEFSKYNENDTFTVKVAGKEYWTNRWNLQPILQSAQLTGMTVTIKSNTCASGSGFAEVQFNND

SEQ ID NO: 14767 - protein, 673 aa, Escherichia coli
MKMTRLYPLALGGLLLPAIANAQTSQQDESTLVVTASKQSSRSASANNVSSTVVSAPELSDAGVTASDKLPRVLPGLNIENSGNMLFSTISLRGVSSAQDFYNPAVTLYVDGVPQLSTNTIQALTDVQSVELLRGPQGTLYGKSAQGGIINIVTQQPDSTPRGYIEGGVSSRDSYRSKFNLSGPIQDGLLYGSVTLLRQVDDGDMINPATGSDDLGGTRASIGNVKLRLAPDDQPWEMGFAASRECTRATQDAYVGWNDIKGRKLSISDGSPDPYMRRCTDSQTLSGKYTTDDWVFNLISAWQQQHYSRTFPSGSLIVNMPQRWNQDVQELRAATLGDARTVDMVFGLYRQNTREKLNSAYDMPTMPYLSSTGYTTAETLAAYSDLTWHLTDRFDIGGGVRFSHDKSSTQYHGSMLGNPFGDQGKSNDDQVLGQLSAGYMLTDDWRVYTRVAQGYKPSGYNIVPTAGLDAKPFVAEKSINYELGTRYETADVTLQAATFYTHTKDMQLYSGPVGMQTLSNAGKADATGVELEAKWRFAPGWSWDINGNVIRSEFTNDSELYHGNRVPFVPRYGAGSSVNGVIDTRYGALMPRLALNLVGPHYFDGDNQLRQGTYATLDSSLGWQATERMNISVYVDNLFDRRYRTYGYMNGSSAVAQVNMGRTVGINTRIDFF

SEQ ID NO: 14768 - protein, 244 aa, Escherichia coli; identical to SEQ ID NO: 4064

SEQ ID NO: 14769 - protein, 245 aa, Escherichia coli
MGGESPPIPGEVMCYQYSILFAFLFSGIVQAAEAFGPRENRLFFDEKKGNTFYRIDNSDKKLPWLVQAWIEDASENKTTALTSIPMVFRVEPSSVFTVRVVKTGVLPEDRETLFWAVSNSLPGVVPTKLDNKEGKITAKLSLAYRFKVPLIYRPTALNNFRQEPEKLEWTYNGNEGLKLYNPTRYIVQLYNITVNGHEFKGEGVSSIITPMSGKNVSATVKKGTRIKYSVINDNGAIKEYEGIVN

SEQ ID NO: 14770 - protein, 87 aa, Escherichia coli
MKKIFVAALFAFVSVNAMAADCPKGKIEFSKYNENDTFTVKVAGKEYWTNRWNLQPLLQSAQLTGMTVTIKSNTCASGSGFAEVQFN

SEQ ID NO: 14771 - protein, 125 aa, Escherichia coli
MINKFYRTVLYSLFVFPLYAKATPQNITDLCNEYQNTMIYSLNKEIATYTESLAGKREMVIISFSNGATFQVEVPGSQHLESQKRPLERMKDTLRAAYFTGIKISKLCAWTNKSPNSIAAIELSN

SEQ ID NO: 14772 - protein, 306 aa, Escherichia coli
MHNVSTTTTGLPLAKILASTELGDNTIQAANDAANKLFSLTIADLTANKNINTTNAHSTSNILIPELKAPKSLNASSQLTLLIGNLIQILGEKSLTALTNKITAWKSQQQARQQKNLEFSDKINTLLSETEGLTRDYEKQINKLKNADSKIKDLENKINQIQTRLSELDPDSPENKKLRREEIQLTIKKDAAVKDRTLIEQKTLSIHSKLTDKSMQLEKEIDSFSAFSNTASAEQLSTQQKSLTGLASVTQLMATFIQLVGKNNEESLKNDLALFQSLQESRKTEMERKSDEYAAEVRKAEELNRV

SEQ ID NO: 14773 - protein, 243 aa, Escherichia coli
MSRKSCLIRLFKTTVSCKLFTAIILSVFLGQPALTYAGVVIGGTRVVYLSNNADKSISVFSKEEKIPYLIQAWVDPFNKEDKSKAPFTVIPPVSRLEPAQEKILRIIHTKGVSLPDDRESVFWLNIKNIPPSASNKATNSLEIAVKTRIKLFWRPANIRLIPEDVAPKVKWRREGRNLIAEDPNPIHISVMDVIVDGHDVPLNMIRPFETLTLPLPANSAGGQMTWRFINDYGAVSDPIKMTL

SEQ ID NO: 14774 - protein, 89 aa, Escherichia coli
  MOD_RES (75)..(75): Any amino acid
  MOD_RES (78)..(78): Any amino acid
  MOD_RES (84)..(85): Any amino acid
MKKMFMAVLFALASVNAMAADCAKGKIEFSKYNEDDTFTVKVDGKEYWTSRWNLQPLLQSAQLTGMTVTIKSSTXESXSGFAEXXFNND

SEQ ID NO: 14775 - protein, 505 aa, Escherichia coli
MYRKSTLAMLIALLTSAASAHAQTDISTIEARLNALEKRLQEAENRAQTAENRAGAAEKKVQQLTAQQQKNQNSTQEVAQRTARLEKKADDKSGFEFHGYARSGVIMNDSGASTKSGAYITPAGETGGAIGRLGNQADTYVEMNLEHKQTLDNGATTRFKVMVADGQTSYNDWTASTSDLNVRQAFVELGNLPTFAGPFKGSTLWAGKRFDRDNFDIHWIDSDVVFLAGTGGGIYDVKWNDGLRSNFSLYGRNFGDIDDSSNSVQNYILTMNHFAGPLQMMVSGLRAKDNDERKDSNGNLVKGDAANTGVHALLGLHNDSFYGLRDGSSKTALLYGHGLGAEVKGIGSDGALRPGADTWRIASYGTTPLSENWSVAPAMLAQRSKDRYADGDSYQWATFNLRLIQAINQNFALAYEGSYQYMDLKPEGYNDRQAVNGSFYKLTFAPTFKVGSIGDFFSRPEIRFYTSWMDWSKKLNNYASDDALGSDGFNSGGEWSFGVQMETWF

SEQ ID NO: 14776 - protein, 241 aa, Escherichia coli
MLRFVLFFFTLSVSAVVQGSVVIMGTRVVYPATQKSISIRLNNDNESPALVQSWLDDGDAAAPPESVHVPFIITPPIFRMDSKSGQTVRIVYTGESLPKDRESLFYLNVLDIPAKPGAKKDSDNSEQRNNNYLQLAIRSRIKFFFRPAHLKLTPNDAYLKVTWHQEEGRIKAVNPTPYYITYNKIAVDQNKHLMPVEHGGMIPPFSSTVFALKGRTAPASKVSWVIVNDYGGYQQGESVLE

SEQ ID NO: 14777 - protein, 240 aa, Escherichia coli
MKHILLFIFTVLLSLPSYGSVVIMGTRVIYPAEQKSINVRLNNGDSTPSLIQAWLDTGDPSSPPDSVRVPFIITPPVFRMEPLSGQTMRIMYTGEKLPADRESLFWLNVLDIPAKPSFAGKSEKAQGYNYLQFAVRSRIKFFFRPDGLPFSPDDAYKKVTWQLTGGDTLQASNPTPYFITFSTVSVGQGAQKVSSTQGGMAAPFSSVTFRLKQKVSPSGKVEWTVVNDNGGYQKGESVVK

SEQ ID NO: 14778 - protein, 89 aa, Escherichia coli
  MOD_RES (75)..(75): Any amino acid
  MOD_RES (84)..(84): Any amino acid
MKKMFMAVLFALASVNAMAADCAKGKIEFSKYNEDDTFTVKVDGKEYWTSRWSLQPLLQSAQLTGMTVTIKSSTXESGSGFAEXQFNND

SEQ ID NO: 14779 - protein, 230 aa, Escherichia coli
MNKLTKGALVTLLSLSFCGQSMAAFVLNGTRFIFEEGKKNLSFEVTNNADKTYGGQVWIDNTNRGNGVYMVPQPPFFKVGAKQKQVIRIMNTDSNLPKDRESLFWLNVQEVPPKPKVKDGEGSVLAIAMNTRVKLIYRPASLKGGRKDAEKQLRLEQRGNETWLKNPTPYYMAIVNIKRDGKDIPLGDSVMKGIAQLRPFSNVSLGKNVSGKISVDAVNDWGGVQSYEIH

SEQ ID NO: 14780 - protein, 89 aa, Escherichia coli
  MOD_RES (24)..(24): Any amino acid
  MOD_RES (30)..(30): Any amino acid
  MOD_RES (72)..(72): Any amino acid
  MOD_RES (81)..(81): Any amino acid
MKKMFMAVLFALVSVNAMAADCAXGKIEFXKYNEDDTFTVKVDGKEYWTSRWNLQPLLQSAQLTGMTVTIKXSTCESGSGXAEVQFNND

SEQ ID NO: 14781 - protein, 89 aa, Escherichia coli
  MOD_RES (25)..(25): Any amino acid
MKKMFMAVLFALVSVNAMAADCAKXKIEFSKYNEDDTFTVKVDGKEYWTSRWNLQPLLQSAQLTGMTVTIKSSTCESGSGFAEVQFNND

SEQ ID NO: 14782 - protein, 89 aa, Escherichia coli
  MOD_RES (24)..(24): Any amino acid
MKKMFMAVLFALVSVNAMAADCAXGKIEFSKYNEDDTFTVKVDGKEYWTSRWNLQPLLQSAQLTGMTVTIKSSTCESGSGFAEVQFNND

SEQ ID NO: 14783 - protein, 89 aa, Escherichia coli
  MOD_RES (72)..(72): Any amino acid
MKKMFMAVLFALVSVNAMAADCAKGKIEFSKYNENDTFTVKVAGKEYWTSRWNLQPLLQSAQLTGMTVTIKXSTCESGSGFAEVQFNND

SEQ ID NO: 14784 - protein, 241 aa, Escherichia coli; identical to SEQ ID NO: 3365

SEQ ID NO: 14785 - protein, 89 aa, Escherichia coli
MKKTLLIAASLSFFSASALATPDCVTGKVEYTKYNDDDTFTVKVGDKELFTNRWNLQSLLLSAQITGMTVTIKTNACHNGRGFSEIIFR

SEQ ID NO: 14786 - protein, 998 aa, Escherichia coli
MTVNKIKNIFNNATLTTKSAFNTASSSVRSAGKKLILLIPDNYEAQGVGINELVKAADELGIEIHRTERDDTAIANQFFGAAEKVVGLTERGVAIFAPQLDKLLQKYQKVGSKIGRTAENVGNNLGKAGTVLSALQNFTGIALSGMALDELLRKQREGEDISQNDIAKSSIELINQLVDTVSSINSTVDSFSEQLNQLGSFLSSKPRLSSVGGKLQNLPDLGSLGDGLDVVSGILSAVSASFILGNSDAHTGTKAAAGIELTTQVLGNVGKAVSQYILAQRMAQGLSTTAASAGLITSAVMLAISPLSFLAAADKFERAKQLESYSERFKKLNYEGDALLAAFHKETGAIDAALTTINTVLSSVSAGVSAASSASLIGAPISMLVSALTGTISGILEASKQAMFEHVAEKFAARINEWEKEHGKNYFENGYDARHAAFLEDSLSLLADFSRQHAVERAVAITQQHWDEKIGELAGITRNADRSQSGKAYINYLENGGLLEAQPKEFTQQVFDPQKGTIDLSTGNVSSVLTFITPTFTPGEEVRERKQSGKYEYMTFLIVNGKDTWSVKGIKNHKGVYDYSKLIQFVEKDTKHYQARMISELGDKDDVVYSGAGSSEVFAGEGHDPVSYNKTDVGKLTIDATGASKPGEYIVPKNMYGDVEVLQEVVKEQEVSVGKRTEKIQYRDFEFRTGGIPYDVIDNLHSVEELIGGKHDDEFKGGKFNDIFHGADGNDYIEGNYGNDRLYGDDGDDYISGGQGDDQLFGGSGNDKLSGGDGNNYLTGGSGNDELQAHGAYNILSGGTGDDKLYGGGGIDLLDGGEGNDYLNGGFGNDIYVYRQNYGHHTIADEGGKGDRLHLSDISFDDIAFKRVGNDLIMNKAINGVLSFNESNDVNGITFKNWFAKDASGADNHLVEVITDKDGREIKVDKIPHNNNERSGYIKASNIASEKSMVNITSVANDINKIISSVSGFDSGDERLASLYNLSLHQNNTHSTTLTTTV

SEQ ID NO: 14787 - protein, 287 aa, Escherichia coli
MRRGISLWGSAGYLQQNCGIQRNYRRLRVNKRSAVTKFFTNRVTKVLGMTLALMMASQSAMASLAADQTRYVFRGDKDALTITVTNNDKTHTFGGQAWVDNIVEKDTRPTFVVTPSFFKVKPNGQQTLRIIMASDHLPKDKESVYWLNLQDIPPALEGSGLAIALRTKLKLFYRPKALLEGRKGAEEGISLQSRPDGRTMLVNTTPYIYAIGGLLDANGKKITTDSETTQKLLMFMPGDEVQVKGNVVKVESLDDFGDLKTWVINQKKSSTTSTNVDKTTQPHKSAA

SEQ ID NO: 14788 - protein, 682 aa, Escherichia coli; identical to SEQ ID NO: 3817

SEQ ID NO: 14789 - protein, 657 aa, Escherichia coli
MYMNVIKTAICTLITLPVGLQAATSHSSSMTKDTITVVATGNQNTVFETPSMVSVVTNDTPWSKNAVTSAGMLRGVAGLSQTGAGRTNGQTFNLRGYDKSGVLVLVDGVRQLSDMAKSSGTYLDPALVKRIEVVRGPNSSLYGSGGLGGVVDFRTADAADFLPPGETNGVSLWGNIASGDHSTGSGLTWFSKTEKTDALLSVIMRKRGSIYQSDGERAPNKEKPAALFAKGSVSITDSNKAGASLRLYRNSTTEPGNPTLTHGDSGLRDRKTAQNDMQFWYQYAPADNSLINVKSTLYLSDITVKTNGHNKTAEWRNNRTSGVNVVNRSHSLIFPGAHQLSYGAEYYRQQQKPEGTATLYPEGHIDFTSLYFQDEMTMESYPVNIIVGSRYDRYNSFNARAGELNAERLSPRAAMSVSPTDWLMMYGSISSAFRAPTMAEMYRDDVHFYRKGKPNYWVPNLNLKPENNTTREIGAGIQLDSLLTDNDRLQLKGGYFGTDARNYIATRVDMKRMRSYSYNVSRARIWGWDIQGNYQSDYVDWMLSYNRTESMDASSREWLGSGNPDTLISDISIPVGHRGVYAGWRTELSAPATHVKKGDPCQDGYAIHSFSLSYKPVSVKGFEASVTLDNAFNKLAMNGKGVPLSGRTVNLYTRYQW

SEQ ID NO: 14790 - protein, 567 aa, Escherichia coli; identical to SEQ ID NO: 4028

SEQ ID NO: 14791 - protein, 616 aa, Escherichia coli
MGPGVQGKVSIRTMTPLNERQYYQLFLNLLEAQGYAVVPMENDVLKVVKSSAAKVEPLPLVGEGSDNYAGDEMVTKVVPVRNVSVRELAPILRQMIDSAGSGNVVNYDPSNVIMLTGRASVVERLTEVIQRVDHAGNRTEEVIPLDNASASEIARVLESLTKNSGENQPATLKSQIVADERTNSVIVSGDPATRDKMRRLIRRLDSEMERSGNSQVFYLKYSKAEDLVDVLKQVSGTLTAAKEEAEGTVGSGREVVSIAASKHSNALIVTAPQDIMQSLQSVIEQLDIRRAQVHVEALIVEVAEGSNINFGVQWASKDAGLMQFANGTQIPIGTLGAAISQAKPQKGSTVISENGATTINPDTNGDLSTLAQLLSGFSGTAVGVVKGDWMALVQAVKNDSSSNVLSTPSITTLDNQEAFFMVGQDVPVLTGSTVGSNNSNPFNTVERKKVGIMLKVTPQINEGNAVQMVIEQEVSKVEGQTSLDVVFGERKLKTTVLANDGELIVLGGLMDDQAGESVAKVPLLGDIPLIGNLFKSTADKKEKRNLMVFIRPTILRDGMAADGVSQRKYNYMRAEQIYRDEQGLSLMPHTAQPVLPAQNQALPPEVRAFLNAGRTR

SEQ ID NO: 14792 - protein, 84 aa, Escherichia coli
FMAVLFALASVNAMAADCAKGKIEFSKYNEENIHSEGAGKEYWTSRWNLQPLLQSAQLTGMTVTIKSSTCESGSGFAEVQFNND

SEQ ID NO: 14793 - protein, 70 aa, Escherichia coli
MKKIFVAALFAFVSVNAMAADCAKGKIEFSKYNENDTFTVKVAGKEYWTNRWNLQPLLQSAQLTGMTVTI

SEQ ID NO: 14794 - protein, 241 aa, Escherichia coli
MSNKNVNVRKSQEIIFCLLAGILMFMAMMVAGRAEAGVALGATRVIYPAGQKQVQLAVTNNDENSTYLIQSWVENADGVKDGRFIVTPPLFAMKGKKENTLRILDATNNQLPQDRESLFWMNVKAIPSMDKSKLTENTLQLAIISRIKLYYRPAKLALPPDQAAEKLRFRRSANSLTLINPTPYYLTVTELNAGTRVLENALVPPMGESTVKLPSDAGSNITYRTINDYGALTPKMTGVME

SEQ ID NO: 14795 - protein, 258 aa, Escherichia coli
MKNITFIFFILLASPLYANGDRLYRADSRPPDEIKRSGGLMPRGHNEYFDRGTQMNINLYDHARGTQTGFVRYDDGYVSTKLSLRSAHLAGQSILSGYSTYYIYVIATAPNMFNVNDVLGVYSPHPYEQEVSALGGIPYSQIYGWYRVNFGVIDERLHRNREYRDRYYRNLNIAPAEDGYRLAGFPPDHQAWREEPWIHHAPQGCGNSSRTITGDTCNEETQNLSTIYLREYQSKVKRQIFSDYQSEVDIYNRIRDEL

SEQ ID NO: 14796 - protein, 673 aa, Escherichia coli
MKMTRLYPLALGGLLLPTIANAQTSQQDESTLVVTASKQSSRSASANNVSSTVVSAPELSDAGVTASDKLPRVLPGLNIENSGNMLFSTISLRGVSSAQDFYNPAVTLYVDGVPQLSTNTIQALTDVQSVELLRGPQGTLYGKSAQGGIINIVTQQPDSTPRGYIEGGVSSRDSYRSKFNLSGPIQDGLLYGSVTLLRQVDDGDMINPATGSDDLGGTRASIGNVKLRLAPDDQPWEMGFAASRECTRATQDAYVGWNDIKGRKLSISDGSPDPYMRRCTDSQTLSGKYTTDDWVFNLISAWQQQHYSRTFPSGSLIVNMPQRWNQDVQELRAATLGDARTVDMVFGLYRQNTREKLNSAYDMPTMPYLSSTGYTTAETLAAYSDLTWHLTDRFDIGGGVRFSHDKSSTQYHGSMLGNPFGDQGKSNDDQVLGQLSAGYMLTDDWRVYTRVAQGYKPSGYNIVPTAGLDAKPFVAEKSINYELGTRYETADVTLQAATFYTHTKDMQLYSGPVGMQTLSNAGKADATGVELEAKWRFAPGWSWDINGNVIRSEFTNDSELYHGNRVPFVPRYGAGSSVNGVIDTRYGALMPRLAVNLVGPHYFDGDNQLRQGTYATLDSSLGWQATERMNISVYVDNLFDRRYRTYGYMNGSSAVAQVNMGRTVGINTRIDFF

SEQ ID NO: 14797 - protein, 89 aa, Escherichia coli
MKKILLIAASLSFFSASVLAAPDCVTGNVEYTKYNDDDTFTVKVGDKELFTNRWNLQSLLLSAQITGMTVTINTNACHNGGGFSEVIFR

SEQ ID NO: 14798 - protein, 306 aa, Escherichia coli
MHNVSTTTTGLPLAKILASTELGDNTIQAANDAANKLFSLTIADLTANKNINTTNAHSTSNILIPELKAPKSLNASSQLTLLIGNLIQILGEKSLTALTNKITAWKSQQQARQQKNLEFSDKINTLLSETEGLTRDYEKQINKLKNADSKIKDLENKINQIQTRLSELDPDSPENKKLRRGEIQLTIKKDAAVKDRTLIEQKTLSIHSKLTDKSMQLEKEIDSFSAFSNTASAEQLSTQQKSLTGLASVTQLMATFIQLVGKNNEESLKNDLALFQSLQESRKTEMERKSDEYAAEVRKAEELNRV

SEQ ID NO: 14799 - protein, 89 aa, Escherichia coli
  MOD_RES (69)..(69): Any amino acid
MKKMFMAVLFALASVNAMAADCAKGKIEFSKYNEDDTFTVKVDGKEYWTSRWNLQPLLQSAQLTGMTVXIKSSTCESGSGFAEVQFNND

SEQ ID NO: 14800 - protein, 221 aa, Escherichia coli; identical to SEQ ID NO: 4116

SEQ ID NO: 14801 - protein, 72 aa, Escherichia coli
MTVNKIKNIFNNATLTTKSAFNTASSSVRSAGKKLILLIPDNYEAQGVGINELVKAADELGIEIHRTERDDT

SEQ ID NO: 14802 - protein, 228 aa, Escherichia coli; identical to SEQ ID NO: 3034

SEQ ID NO: 14803 - protein, 250 aa, Escherichia coli; identical to SEQ ID NO: 9904

SEQ ID NO: 14804 - protein, 89 aa, Escherichia coli
MKKILLIAASLSFFSASVLAAPDCVTGKVGYTKYSDDDTFTVKVGDKELFTNRWNLQSLLPSAQITGMTVTIKTNACHNGGGFSEVIFR

SEQ ID NO: 14805 - protein, 733 aa, Escherichia coli; identical to SEQ ID NO: 9713

SEQ ID NO: 14806 - protein, 696 aa, Escherichia coli
MRITTLASVVIPCLGFSASSIAAAEDVMIVSASGYEKKLTNAAASVSVISQEELQSSQYHDLAEALRSVEGVDVESGTGKTGGLEISIRGMPASYTLILIDGVRQGGSSDVTPNGFSAMNTGFMPPLAAIERIEVIRGPMSTLYGSDAMGGVVNIITRKNADKWLSSVNAGLNLQESNKWGNSSQFNFWSSGPLVDDSVSLQVRGSTQQRQGSSVTSLSDTAATRIPYPTESQNYNLGARLDWKASAQDVLWFDMDTTRQRYDNRDGQLGSLTGGYDRTLRYERNKISAGYDHTFTFGTWKSYLNWNETENKGRELVRSVLKRDKWGLAGQPRELKESNLILNSLLLTPLGESHLVTVGGEFQSSSMKDGVVLASTGETFRQKSWSVFAEDEWHLTDALALTVGSRYEHHEQFGGHFSPRAYLVWDVADAWTLKGGVTTGYKAPRMGQLHKGISGVSGQGKTNLLGNPDLKPEESVSYEAGVYYDNPAGLNANVTGFMTDFSNKIVSYSVNDNTNSYVNSGKARLHGVEFAGTLPLWSEDVTLSLNYTWTRSEQRDGDNKGAPLSYTPEHMVNAKLNWQITEEVASWLGARYRGKTPRFTQNYSSLSAVQKKVYDEKGEYLKAWTVVNAGLSWKMTDALTLNAAVNNLLNKDYSDVSLYSAGKSTLYAGDYFQTGSSTTGYVIPERNYWMSLNYQF

SEQ ID NO: 14807 - protein, 696 aa, Escherichia coli
MRITTLASVVIPCLGFSASSIAAAEDVMIVSASGYEKKLTNAAASVSVISQEELQSSQYHDLAEALRSVEGVDVESGTGKTGGLEISIRGMPASYTLILIDGVRQGGSSDVTPNGFSAMNTGFMPPLAAIERIEVIRGPMSTLYGSDAMGGVVNIITRKNADKWLSSVNAGLNLQESNKWGNSSQFNFWSSGPLVDDSVSLQVRGSTQQRQGSSVTSLSDTAATRIPYPTESQNYNLGARLDWKASEQDVLWFDMDTTRQRYDNRDGQLGSLTGGYDRTLRYERNKISAGYDHTFTFGTWKSYLNWNETENKGRELVRSVLKRDKWGLAGQPRELKESNLILNSLLLTPLGESHLVTVGGEFQSSSMKDGVVLASTGETFRQKSWSVFAEDEWHLTDALALTAGSRYEHHEQFGGHFSPRAYLVWDVADAWTLKGGVTTGYKAPRMGQLHKGISGVSGQGKTNLLGNPNLKPEESVSYEAGVYYDNPAGLNANVTGFMTDFSNKIVSYSINDNTNSYVNSGKARLHGVEFAGTLPLWSEDVTLSLNYTWTRSEQRDGDNKGAPLGYTPEHMVNAKLNWQITEEVASWLGARYRGKTPRFTQNYSSLSAVQKKVYDEKGEYLKAWTVVDAGLSWKMTDALTLNAAVNNLLNKDYSDVSLYSAGKSTLYAGDYFQTGSSTTGYVIPERNYWMSLNYQF

SEQ ID NO: 14808 - protein, 119 aa, Escherichia coli
MNTVLSFQGASAPVEKKSFFSKFTRLNMLRLARAVIPAAVLMMFFPQLAMAAQGQDLMQSGNSTVKATFGKDSSVVKWVVLAEVLVGAVMYMMTKNVKFLAGFAIISVFIAVGMAVVGL

SEQ ID NO: 14809 - protein, 713 aa, Escherichia coli; identical to SEQ ID NO: 4590

SEQ ID NO: 14810 - protein, 121 aa, Escherichia coli; identical to SEQ ID NO: 5349

SEQ ID NO: 14811 - protein, 89 aa, Escherichia coli
MKKTLLIAASLSFFSASALATPDCVTGKVEYTKYNDDDSFTVKVGDKELFTNRWNLQSLLLSAQITGMTVTIKTNACHNGGGFSEVIFR

SEQ ID NO: 14812 - protein, 89 aa, Escherichia coli
MKKMFMAVLFALVSVNAMAADCAKGKIEFSKYNENDTFTVKVAGKEYWTSRWNLQPLLQSARLTGMTVTIKSSTCESGSGFAEVQFNND

SEQ ID NO: 14813 - protein, 124 aa, Escherichia coli
MNKVKFYVLFTALLSSLCAYGAPQSITELCSEYRNTQIYTINDKILSYTESMAGKREMVIITFKSGATFQVEVPGSQHIDSQKKAIERMKDTLRITYLTETKIDKLCVWNNKTPNSIAAISMEN

SEQ ID NO: 14814 - protein, 258 aa, Escherichia coli
MKNITFIFVILLASPLYANGDKLYRADSRSPDEIKRSGGLMPRGHNEYFDRGTQMNINLYDHARGTQTGFVRYDDGYVSTSLSLRSAHLAGQSILSGYSTYYIYVIATAPNMFNVNDVLGVYSPHPYEQEVSALGGIPYSQIYGWYRVNFGVIDERLHRNREYRDRYYRNLNIAPAEDGYRLAGFPPDHQAWREEPWIHHAPQGCGNLSRTITDDTCNEETQNLSTIYLREYQSKVKRQIFTDYQSEVDIYNRIRDEL

SEQ ID NO: 14815 - protein, 258 aa, Escherichia coli
MKNITFIFFILLASPLYANGDKLYRADSRPPDEIKRSGGLMPRGHNEYFDRGTQININLYDHARGTQTGFVRYDDGYVSTSLSLRSAHLAGQSILSGYSTYYIYVIATAPNMFNVNDVLGVYSPHPYEQEVSALGGIPYSQIYGWYRVNFGVIDERLHRNREYRDRYYRNLNIAPAEDGYRLAGFPPDHQAWREEPWIHHAPQGCGNSSRAITGDTCNEETQNLSTIYLREYQSKVKRQIFSDYQSEVDMYNRIRDEL

SEQ ID NO: 14816 - protein, 258 aa, Escherichia coli; identical to SEQ ID NO: 10452

SEQ ID NO: 14817 - protein, 89 aa, Escherichia coli
MKKMFMAVLFALVSVNAMAADCAKGKIEFSKYNEDDTFTVKVDGKEYWTSRWNLQPLLQSAQLTGMTVTIKSSTCESGSGFAEVHFNND

SEQ ID NO: 14818 - protein, 89 aa, Escherichia coli
MKKMFMAVLFALVSVNAMAADCAKGKIEFSKYNENDTFTVKVAGKEYWTNRWNLQPLLQSAQLTGMTVTIKSNTCAPGSGFAEVQCNND

SEQ ID NO: 14819 - protein, 206 aa, Escherichia coli
MSLLEVIIVLGIIGTIAAGVVILAQRAFDSRAVTDLVTNTNTVRVAMKDAYQRDGVYPDYVSPLNLTSDTIKTNTGKIPAAQLVQLGKITPDEVRNNISGDFIAIGGALTSNSATVKKGFAIELNGLSQEQCRSILGQVGNNWEYVAVGNSASGSYAMQAAGVDMSVAAAGDILRTLGTDGQKTLTAERILGTCTATVNSITLGSR

SEQ ID NO: 14820 - protein, 206 aa, Escherichia coli
MSLLEVIIVLGIIGTIAAGVVILAQRAFDSRAVTDLVTNTNTVRVAMKDAYQRDGKYPDFVDPLSLTANTIKTDTSGIPAAQLVQLGKITPDEVRNNISGDFIAIGGALTSNGAQVKKGFAIELNGLSQEQCRSILGQVGNNWEYVAIGTSASGSYAMTATGVDMSVAASTTVLRSLGNGGQTTLTADKILSTCTAQVNSITLGSR

SEQ ID NO: 14821 - protein, 840 aa, Escherichia coli; identical to SEQ ID NO: 9717

SEQ ID NO: 14822 - protein, 998 aa, Escherichia coli
MTVNKIKNIFNNATLTTKSAFNTASSSVRSAGKKLILLIPDNYEAQGVGINELVKAADELGIEIHRTERDDTAIANQFFGAAEKVVGLTERGVAIFAPQLDKLLQKYQKVGSKIGGTAENVGNNLGKAGTVLSALQNFTGIALSGMALDELLRKQREGEDISQNDIAKSSIELINQLVDTVSSINSTVDSFSEQLNQLGSFLSSKPRLSSVGGKLQNLPDLGSLGDGLDVVSGILSAVSASFILGNSDAHTGTKAAAGIELTTQVLGNVGKAVSQYILAQRMAQGLSTTAASAGLITSAVMLAISPLSFLAAADKFERAKQLESYSERFKKLNYEGDALLAAFHKETGAIDAALTTINTVLSSVSAGVSAASSASLIGAPISMLVSALTGTISGILEASKQAMFEHVAEKFAARINEWEKEHGKNYFENGYDARHAAFLEDSLSLLADFSRQHAVERAVAITQQHWDEKIGELAGITRNADRSQSGKAYINYLENGGLLEAQPKEFTQQVFDPQKGTIDLSTGNVSSVLTFITPTFTPGEEVRERKQSGKYEYMTSLIVNGKDTWSVKGIKNHKGVYDYSKLIQFVEKNNKHYQARIISELGDKDDVVYSGAGSSEVFAGEGHDTVSYNKTDVGKLTIDATGASKPGEYIVSKNMYGDVKVLQEVVKEQEVSVGKRTEKIQYRDFEFRTGGIPYDVIDNLHSVEELIGGKHDDEFKGGKFNDIFHGADGNDYIEGNYGNDRLYGDDGDDYISGGQGDDQLFGGSGNDKLSGGDGNNYLTGGSGNDELQAHGAYNILSGGTGDDKLYGGGGIDLLDGGEGNDYLNGGFGNDIYVYRQNYGHHTIADEGGKGDRLHLSDISFDDIAFKRVGNDLIMNKAINGVLSFNDSNDVNGITFKNWFAKDASGADNHLVEVITDKDGREIKVDKIPHNNNERSGYIKASNIASEKNMVNITSVANDINKIISSVSGFDSGDERLASLYNLSLHQNNTHSTTLTTTV

SEQ ID NO: 14823 - protein, 998 aa, Escherichia coli
MTVNKIKNIFNNATSTTKSAFNTASSSVRSAGKKLILLIPDNYEAQGVGINELVKAADELGIEIHRTERDDTAIANQFFGTAEKVVGLTERGVAIFAPQLDKLLQKYQKVGSKIGGTAENVGNNLGKAGTVLSALQNFTGIALSGMALDELLRKQREGEDISQNDIAKSSIELINQLVDTVSSINSTVDSFSEQLNQLGSFLSSKPRLSSVGGKLQNLPDLGPLGDGLDVVSGILSAVSASFILGNSDAHTGTKAAAGIELTTQVLGNVGKAVSQYILAQRMAQGLSTTAASAGLITSAVMLAISPLSFLAIADKFERAKQLESYSERFKKFNYEGDALLAAFHKESGAIDAALTTINTVLSSVSAGVSAASSASLIGAPISMLVSALTGTISGILDASKQAMFEHVADKFAARINEWEKEHGKNYFENGYDARHAAFLEDSLSLLADFSRQHAVERAVAITQQHWDEKIGELAGITRNADRSQSGKAYINYLENGGLLEAQPKEFTQQVFDPQKGTIDLSTGNVSSVLTFVTPTFTPGEEVRERKQSGKYEYMTSLIVNGKDTWSVKGIKNHKGVYDYSNLIQFVEKDNKHYQARIISELGDKDDIVYSGAGSSEVFAGEGHDTVSYNKTDVGKLTIDATGASKPGEYIVSKNMYGDVKVLQEVVKEQEVSVGKRTEKIQYRDFEFRTGGIPYDVIDNLHSVEELIGGKHDDEFKGGKFNDIFHGADGNDYIEGNYGNDRLYGDDGDDYISGGQGDDQLFGGSGNDKLSGGDGNNYLTGGSGNDELQAHGAYNILSGGTGDDKLYGGGGIDLLDGGEGNDYLNGGFGNDIYVYRQNYGHHTIADEGGKGDRLHLSDISFDDIAFKKVGNDLIMNKAINGALSFNESNDVNGITFKNWFAKDASGEDNHLVEVITDKDGREIKADKISHNNNEQSGYIKPSNIASEKNMVNITSVANDINKIISSVSGFDSGDERLASLYNLSLHQNNTHSTTLTTTV

SEQ ID NO: 14824 - protein, 997 aa, Escherichia coli
MTVNKIKNIFSNATSTTKSAFNTASSNVRTAGKKIILLIPDDYEAQGVGINELVKAADELGIEIHRTERDDTAIANQFFGTAEKVLGLTERGVAIFAPQLDKLLQKYQNVGSKIGGTAENVGNNLGKAGTVLSALHNFTGIALSGMALDELLRKQRGGEDISQNDIAKSSIELINHLVDTVSSINSTVDSFSEQLNQLGSFLSSKPSLSSVGGKLQNLPDLGPLGDGLDVISGILSAVSASFILGNSDAHTGTKAAAGIELTTQVLGNVGKAVSQYILAQRMAQGLSTTAASAGLITSAVMLAISPLSFLAIADKFERAKQLEAYSERFKKLNYEGDALLAAFHKETGAIDAALTTINTVLSSVSAGVSAASSASLIGAPISMLVSALTGTISGILEASKQAMFEHVADKFAARINEWEKEHGKNYFENGYDARHAAFLEDSLSLLADFSRQHAVERAVAITQQHWDEKIGELAGITRNADRSQSGKAYINYLENGGLLEDQPKEFTQQVFDPQKGTIDLSTGNVSSVLTFVTPTFTPGEEVRERKQSGKYEYMTSLIVNGKDTWTVKGLKSHKGVYDYSNLIQFVEKDNKYHQAKIISELGDKNDIVYSGSGSSEVFAGEGHDTVSYNKTDAGKLTIDATGASKPGEYIVSKNMYGDVKVLQEVVNEQEVSVGKRTEKIQYRDFEFRAGGISYDVIDKLHSVEELIGGKHDDEFKGGKFNDIFHGADGNDYIEGNYGNDRLYGDDGDDYISGGQGDDQLFGGSGNDKLSGGDGNNYLTGGSGNDELQAHGAYNILSGGTGDDKLYGGGIDLLDGGEGNDYLNGGFGNDIYVYRQNYGHHTIADEGGKGDRLHLSDISFDDIAFKKVGNDLIMNKAINGVLSFNESNDVNGITFKNWFAKDASGADNHLVEIITDKDGREIKSDNIPHKNNDWSGYIKASSIASEKNMVNITSVANDINKIISSVSGLDSGDERLASLYNLALHQNNTHSTTLTTTV

SEQ ID NO: 14825 - protein, 997 aa, Escherichia coli
MTVNKIKNIFSNATSTTKSAFNTASSNVRTAGKKIILLIPDDYEAQGVGINELVKAADELGIEIHRTERDDTAIANQFFGTAEKVLGLTERGVAIFAPQLDKLLQKYQNVGSKIGGTAENVGNNLGKAGTVLSALHNFTGIALSGMALDELLRKQRGGEDISQNDIAKSSIELINHLVDTVSSINSTVDSFSEQLNQLGSFLSSKPSLSSVGGKLQNLPDLGPLGDGLDVISGILSAVSASFILGNSDAHTGTKAAAGIELTTQVLGNVGKAVSQYILAQRMAQGLSTTAASAGLITSAVMLAISPLSFLAIADKFERAKQLEAYSERFKKLNYEGDALLAAFHKETGAIDAALTTINTVLSSVSAGVSAASSASLIGAPISMLVSALTGTISGILEASKQAMFEHVADKFAARINEWEKEHGKNYFENGYDARHAAFLEDSLSLLADFSRQHAVERAVAITQQHWDEKIGELAGITRNADRSQSGKAYINYLENGGLLEDQPKEFTQQVFDPQKGTIDLSTGNVSSVLTFVTPTFTPGEEVRERKQSGKYEYMTSLIVNGKDTWTVKGLKSHKGVYDYSNLIQFVEKDNKYHQAKIISELGDKNDIVYSGSGSSEVFAGEGHDTVSYNKTDAGKLTIDATGASKPGEYIVSKNMYGDVKVLQEVVNEQEVSVGKRTEKIQYRDFEFRAGGISYDVIDKLHSVEELIGGKHDDEFKGGKFNDIFHGADGNDYIEGNYGNDRLYGDDGDDYISGGQGDDQLFGGSGNDKLSGGDGNNYLTGGSGNDELQAHGAYNILSGGTGDDKLYGGGIDLLDGGEGNDYLNGGFGNDIYVYRQNYGHHTIADEGGKGDRLHLSDISFDDIAFKKVGNDLIMNKAINGVLSFNESNDVNGITFKNWFAKDASGADNHLVEIITDKDGREIKSDNIPHKNNDWSGYIKASSIASEKNMVNITSVANDINKIISSVSGLDSGDERLASLYNLALHQNNTHSTTLTTPV

SEQ ID NO: 14826 - protein, 998 aa, Escherichia coli; identical to SEQ ID NO: 3056

SEQ ID NO: 14827 - protein, 206 aa, Escherichia coli
MSLLEVIIVLGIIGTIAAGVVILAQRAFDSRAVTDLVTNTNTVRVAMKDAYQRDGVYPDYVSPLNLTSDTIKTDTGKIPAAQLVQLGKITPDEVRNNISGDFIAIGGALTSDGATVKKGFAIELNGLSQEQCRSILGQVGNNWEYVAVGNSASGSYAMQTAGVNMSVAATGNILRTLGTDGQTTLTADKILSTCTAQVNSITLGSR

SEQ ID NO: 14828 - protein, 1024 aa, Escherichia coli
MPTITTAQIKSTLQSAKQSAANKLHSAGQSTKDALKKAAEQTRNAGNRLILLIPKDYKGQGSSLNDLVRTADELGIEVQYDEKNGTAITKQVFGTAEKLIGLTERGVTIFAPQLDKLLQKYQKAGNKLGGSAENIGDNLGKAGSVLSTFQNFLGTALSSMKIDELIKKQKSGSNVSSSELAKASIELINQLVDTAASINNNVNSFSQQLNKLGSVLSNTKHLNGVGNKLQNLPNLDNIGAGLDTVSGILSAISASFILSNADADTGTKAAAGVELTTKVLGNVGKGISQYIIAQRAAQGLSTSAAAAGLIASVVTLAISPLSFLSIADKFKRANKIEEYSQRFKKLGYDGDSLLAAFHKETGAIDASLTTISTVLASVSSGISAAATTSLVGAPVSALVGAVTGIISGILEASKQAMFEHVASKMADVIAEWEKKHGKNYFENGYDARHAAFLEDNFKILSQYNKEYSVERSVLITQQHWDTLIGELAGVTRNGDKTLSGKSYIDYYEEGKRLEKKPDEFQKQAFDPLKGNIDLSDSKSSTLLKFVTPLLTPGEEIRERRQSGKYEYITELLVKGVDKWTVKGVQDKGSVYDYSNLIQHASVGNNQYREIRIESHLGDGDDKVFLSAGSANIYAGKGHDVVYYDKTDTGYLTIDGTKATEAGNYTVTRVLGGDVKVLQEVVKEQEVSVGKRTEKTQYRSYEFTHINGKNLTETDNLYSVEELIGTTRADKFFGSKFTDIFHGADGDDHIEGNDGNDRLYGDKGNDTLSGGNGDDQLYGGDGNDKLIGGAGNNYLNGGDGDDELQVQGNSLAKNVLSGGKGNDKLYGSEGADLLDGGEGNDLLKGGYGNDIYRYLSGYGHHIIDDDGGKDDKLSLADIDFRDVAFRREGNDLIMYKAEGNVLSIGHKNGITFRNWFEKESGDISNHQIEQIFDKDGRVITPDSLKKALEYQQSNNKASYVYGNDALAYGSQDNLNPLINEISKIISAAGNFDVKEERAAASLLQLSGNASDFSYGRNSITLTASA

SEQ ID NO: 14829 - protein, 451 aa, Escherichia coli
APQLDKLLQKYQKVGSKIGGTAENVGNNLGKAGTVLSALQNFTGIALSGMALDELLRKQRAGEDISQNDIAKSSIELINQLVDTVSSINSTVDSFSEQLNQLGSFLSSKPRLSSVGGKLQNLPDLGPLGDGLDVVSGILSAVSASFILGNSDAHTGTKAAAGIELTTQVLGNVGKAVSQYILAQRMAQGLSTTAASAGLITSAVMLAISPLSFLAAADKFERAKQLESYSERFKKLNYEGDALLAAFHKETGAIDAALTTINTVLSSVFAGVSAASSASLIGAPISMLVSALTGTISGILEASKQAMFEHVAEKFAARINEWEKEHGKNYFENGYDARHAAFLEDSLSLLADFSRQHAVERAVAITQQHWDEKIGELAGITRNADRSQSGKAYINYLENGGLLEAQPKEFTQQVFDPQKGTIDLSTGNVSSVLTFITPTFTPGEEVRERKQ

SEQ ID NO: 14830 - protein, 567 aa, Escherichia coli
MKIKLRITIILISALCIFNGLLTPGAYAATANGYVANKENLRSFFETVSSYAGKPTIVSKLAMKKQISGNFDLTEPYALIERLSAQMGLIWYDDGKAIYIYDSSEMRNALINLRKVSTNEFNNFLKKSGLYNSRYEIKGGGNGTFYVSGPPVYVDLVVNAAKLMEQNSDGIEIGRNKVGIIHLVNTFVNDRTYELRGEKIVIPGMAKVLSTLLNNNIKQSTGVNVLSEISSRQQLKNVSRMPPFPGAEEDDDLQVEKIISTAGAPETDDIQIIAYPDTNSLLVKGTVSQVDFIEKLVATLDIPKRHIELSLWIIDIDKTDLEQLGADWSGTIKIGSSLSASFNNSGSISTLDGTQFIATIQALAQKRRAAVVARPVVLTQENIPAIFDNNRTFYTKLVGERTAELDEVTYGTMISVLPRFAARNQIELLLNIEDGNEINSDKTNVDDLPQVGRTFISTIARVPQGKSLLIGGYTRDTNTYESRKIPILGSIPFIGKLFGYEGTNANNIVRVFLIEPREIDERMMNNANEAAVDARAIPQQMALNNEINDEVLQKWIKSDLNREVVGG

SEQ ID NO: 14831 - protein, 65 aa, Escherichia coli
MKKMFMAVLFALASVNAMAADCAKGKIEFSKYNEDDTFTVKVDGKEYWTSRWNLQPLLQSAQLTG

SEQ ID NO: 14832 - protein, 227 aa, Escherichia coli
MDNNITNRTKFFSIHIGATRVIYDMASSGATLAITNKHEFPILVQSDVLSEDKEMSTHFIITPPLFRLDPLQSTRLRIVRTGGNFPIDRESMQWICVKGIPPKEDSKWGGTDAENKDEKMTLNVQLSVNSCIKMFIRPSNVKGHPEDVAGKVKWQITGNKLKGINPTPFYINLAELRVGKKEITDPHYIEPFSSYEYQIPTNGAKKVEWKIITDYGGVGKNFEEFLD

SEQ ID NO: 14833 - protein, 732 aa, Escherichia coli
MISKKYTLWALNPLLLTMMAPAVAQQTDDETFVVSANRSNRTVAEMAQTTWVIENAELEQQIQGGKELKDALAQLIPGLDVSSRSRTNYGMNVRGRPLVVLVDGVRLNSSRTDSRQLDSIDPFNIDHIEVISGATSLYGGGSTGGLINIVTKKGQPETMMEFEAGTKSGFSSSKDHDERIAGAVSGGNEHISGRLSVAYQKFGGWFDGNGDATLLDNTQTGLQYSDRLDIMGTGTLNIDESRQLQLITQYYKSQGDDDYGLNLGKGFSAIRGTSTPFVSNGLNSDRIPGTERHLISLQYSDSAFLGQELVGQVYYRDESLRFYPFPTVNANKQVTAFSSSQQDTDQYGMKLTLNSKPMDGWQITWGLDADHERFTSNQMFFDLAQASASGGLNNKKIYTTGRYPSYDITNLAVFLQSGYDINNLFTLNGGVRYQYTENKIDDFIGYAQQRQIAAGKATSADAIPGGSVDYDNFLFNAGLLMHITERQQAWLNFSQGVELPDPGKYYGRGIYGAAVNGHLPLTKSVNVSDSKLEGVKVDSYELGWRFTGNNLRTQIAAYYSISDKSVVANKDLTISVVDDKRRIYGVEGAVDYLIPDTDWSTGVNFNVLKTESKVNGTWQKYDVKTASPSKATAYIGWAPDPWSLRVQSTTSFDVSDAQGYKVDGYTTVDLLGSYQLPVGTLSFSIENLFDRDYTTVWGQRAPLYYSPGYGPASLYDYKGRGRTFGLNYSVLF

SEQ ID NO: 14834 - protein, 446 aa, Escherichia coli; identical to SEQ ID NO: 2177

SEQ ID NO: 14835 - protein, 760 aa, Escherichia coli
MENNRNFPARQFHSLTFFAGLCIGITPVAQALAAEGQANADDTLVVEASTPSLYAPQQSADPKFSRPVADTTRTMTVISEQVIKDQGATNLTDALKNVPGVGAFFAGENGNSTTGDAIYMRGADTSNSIYIDGIRDIGSVSRDTFNTEQVEVIKGPSGTDYGRSAPTGSINMISKQPRNDSGIDASASIGSAWFRRGTLDVNQVIGDTTAMRLNVMGEKTHDAGRDKVKNERYGVAPSVAFGLGTANRLYLNYLHVTQHNTPDGGIPTIGLPGYSAPSAGTAALNHSGKVDTHNFYGTDSDYDDSITDTATMRFEHDINDNTTIRNTTRWSRVKQDYLMTAIMGGASNITQPTSDVNSWTWSRTANTKDVSNKILTNQTNLTSTFYTGAIGHDLSTGVEFTRETQTNYGVNPVTLPAVNIYHPDSSIHPGGLTRNGANANGQTDTFAIYAFDTLQITRDFELNGGIRLDNYHTEYDSATACGGSGRGAITCPAGVAKGSPVTTVDTAKSGNLVNWKAGALYHLTENGNVYINYAVSQQPPGGNNFALAQSGSGNSANRTDFKPQKANTSEIGTKWQVLDKRLLLTAALFRTDIENEVEQNDDGTYSQYGKKRVEGYEISVAGNITPAWQMIGGYTQQKATIKNGKDVAQDGSSSLPYTPEHAFTLWSQYQATDDISVGAGARYIGSMHKGSDGAVGTPAFTEGYWVADAKLGYRVNRNLDFQLNVYNLFDTDYVASINKSGYRYHPGEPRTFLLTANMHF

SEQ ID NO: 14836 - protein, 663 aa, Escherichia coli; identical to SEQ ID NO: 9256

SEQ ID NO: 14837 - protein, 162 aa, Escherichia coli; identical to SEQ ID NO: 1965

SEQ ID NO: 14838 - protein, 375 aa, Escherichia coli
MKVKVLSLLVPALLVAGAANAAEVYNKDGNKLDLYGKVDGLHYFSDNKSEDGDQTYMRLGFKGETQVTDQLTGYGQWEYQIQGNAPESENNSWTRVAFAGLKFQDIGSFDYGRNYGVVYDVTSWTDVLPEFGGDTYGSDNFMQQRGNGFATYRNTDFFGLVDGLNFAVQYQGQNGSVSGENDPDFTGHGITNNGRKALRQNGDGVGGSITYDYEGFGVGAAVSSSKRTWDQNNTGLIGTGDRAETYTGGLKYDANNIYLAAQYTQTYNATRVGSLGWANKAQNFEAVAQYQFDFGLRPSVAYLQSKGKNLGVVAGRNYDDEDILKYVDVGATYYFNKNMSTYVDYKINLLDDNQFTRAAGINTDDIVALGLVYQF

SEQ ID NO: 14839 - protein, 191 aa, Escherichia coli
MKKSLLGLTFASLMFSAGSAVAADYKIDKEGQHAFVNFRIQHLGYSWLYGTFKDFDGTFTFDEKNPAADKVNVTINTTSVDTNHAERDKHLRSADFLNTAKYPQATFTSTSVKKDGDKLDITGDLTLNGVTKPVTLEAKLIGQGDDPWGGKRAGFEAEGKIKLKDFNIKTDLGPASQEVDLIISVEGVQQK

SEQ ID NO: 14840 - protein, 1024 aa, Escherichia coli; identical to SEQ ID NO: 3637

SEQ ID NO: 14841 - protein, 200 aa, Escherichia coli; identical to SEQ ID NO: 1785

SEQ ID NO: 14842 - protein, 373 aa, Escherichia coli
MKVKVLSLLVPALLVAGAANAAEVYNKDGNKLDLYGKVDGLHYFSDNKSEDGDQTYMRLGFKGETQVTDQLTGYGQWEYQIQGNSAENENNSWTRVAFAGLKFQDVGSFDYGRNYGVVYDVTSWTDVLPEFGGDTYGSDNFMQQCGNGFATYRNTDFFGLVDGLNFAVQYQGKNGSVDGEGMTNNGRGALRQNGDGVGGSITYDYEGFGIGAAVSSSKRTDDQNFGLNGYGERYLGNGDRAETYTGGLKYDANNIYLAAQYTQTYNATRVGSLGWANKAQNFEAVAQYQFDFGLRPSVAYLQSKGKNLGVINGRNYDDEDILKYVDVGATYYFNKNMSTYVDYKINLLDDNRFTRDAGINTDDIVALGLVYQF

SEQ ID NO: 14843 - protein, 375 aa, Escherichia coli
MMKRNILAVIVPALLVAGTANAAEIYNKDGNKVDLYGKAVGLHYFSKGNGEDSYGGNGDMTYARLGFKGETQINSDLTGYGQWEYNFQGNNSEGADAQTGNKTRLAFAGLKYADVGSFDYGRNYGVVYDALGYTDMLPEFGGDTAYSDMLPEFGGDTAYSDDFFVGRVGGVATYRNSNFFGLVDGLNFAVQYLGKNERDTARRSNGDGVGGSISYEYEGFGIVGAYGAADRTNLQEESPLGKGKKAEQWATGLKYDANNIYLAANYGETRNATPITNKFTNTSGFANKTQDVLLVAQYQFDFGLRPSIAYTKSKAKDVDGIGDVDLVNYFEVGATYYFNKNMSTYVDYIINQIDSDNKLGVGSDDTVAVGIVYQF

SEQ ID NO: 14844 - protein, 353 aa, Escherichia coli
MMKRNILAVIVPALLVAGTANAAEIYNKDGNKVDLYGKAVGLHYFSKDNGVNSYDETYARLGFKGETQINSDLTGYGQWEYNFQGNNSEGADAQKDNKTRLAFAGLKFADAGSIDYGRNYGVVYDALGYTDMLPEFGGDTAYSDDFFVGRVGGVATYRNSNFFGLVDGLNFAVQYLGKNERAGIPERSNGDGVGGSISYEFEGFGIVGAYGAADRTDAQEAEFRGQGKKAEQWATGLKYDANNIYLAANYGETRNATPIEGGFANKTQDVLLVAQYQFDFGLRPSIAYTKSKAKDVEGIGDVDLVNYFEVGATYYFNKNMSTYVDYIINQIDSDNKLGVGSDDTVAVGIVYQF

SEQ ID NO: 14845 - protein, 362 aa, Escherichia coli
MMKRNILAVIVPALLVAGTANAAEIYNKDGNKVDLYGTAVGLHYFSKGNGENSYGGNGDMTYARLGFKGETQINSDLTGYGQWEYNFQGNNSEGADAQTGNKTRLAFAGLKYADVGSFDYGRNYGVVYDALGYTDMLPEFGGDTAYSDDFFVGRVGGVATYRNSNFFGLVDGLNFAVQYLGKNERDTARRSNGDGVGGSISYEYEGFGIVGAYGAADRTNLQEAQPLGNGKKAEQWATGLKYDANNIYLAANYGETRNATPITNKFTNTSGFANKTQDVLLVAQYQFDFGLRPSIAYTKSKAKDVEGIGDVDLVNYFEVGATYYFNKNMSTYVDYIINQIDSDNKLGVGSDDTVAVGIVYQF

SEQ ID NO: 14846 - protein, 367 aa, Escherichia coli; identical to SEQ ID NO: 10627

SEQ ID NO: 14847 - protein, 190 aa, Escherichia coli
NNGRGALRQNGDGVGGSITYDYEGFGIGAAVSSSKRTDDQNGSYTSNGVVRNYIGTGDRAETYTGGLKYDANNIYLAAQYTQTYNATRVGSLGWANKAQNFEAVAQYQFDFGLRPSLAYLQSKGKNLGVINGRNYDDEDILKYVDVGATYYFNKNMSTYVDYKINLLDDNQFTRDAGINTDNIVALGLVY

SEQ ID NO: 14848 - protein, 695 aa, Escherichia coli
MRITTLASVAIPCLGFSVSSMAAEDVMIVTASGYEKKLTSAAASVSVISQEDLRSSQYHDLGEALRSVEGVDVESGTGKTGGLEISIRGMPASYTLILIDGVRQGGSRDVTPNGFSAMNTGFMPPLAAIERIEIIRGPMSTLYGSDAMGGVVNIITKKNADKWHSSVNAGLNLQESNKWGNSSQFNFWSSGPLVDDSLSLQVRGSTQQRQGSSVTSLSGTSATRIPYPTESQNYNAGARLDWKATDKDMFWLDMDTARQRYDNRDGQLGSLTGGYDRTLRYERNKISAGYDHAFTFGTWKSSLNWNETENKGRQLVRSVLKRDKWGLAGQPRELKESNFILNSLLLAPVGESHLVTVGGEYQNSSMKDGVVLTSTGETFRQKSWSAFVEDEWHITDAVALTVGSRYEHHEVFGGHLSPRAYMVWDVADEWTLKGGVTTGYKAPGMGQLHKGISGVSGQGRTNLLGNPDLKPEESVSYEAGVYYDNHAGLNANITGFMTEFSNKIVSYSIDDNTRSYTNSGKARTQGVEFAGTLPLWSEDVTLSLNYTWTQSEQRDGDNKGAPLSYTPEHMVNAKLNWQITEDVSSWLGARYRGKTPRFTQNYSSLSAVQKKVYDEKGEYLKAWTVLDAGMSWKVTDALTLNAAVNNVLNKDYSDVSLYRAGSGTLYAGDYFQTGASTTGYVIPERNYWMSLSYQF

SEQ ID NO: 14849 - protein, 430 aa, Escherichia coli; identical to SEQ ID NO: 6998

SEQ ID NO: 14850 - protein, 351 aa, Escherichia coli; identical to SEQ ID NO: 6970

SEQ ID NO: 14851 - protein, 240 aa, Escherichia coli
SNKNVNVRKSQEITFCLLAGILMFMAMMVAGRAEAGVALGATRVIYPAGQKQVQLAVTNNDENSTYLIQSWVENADGVKDGRFIVTPPLFAMKGKKENTLRILDATNNQLPQDRESLFWMNVKAIPSMDKSKLTENTLQLAIISRIKLYYRPAKLALPPDQVAEKLRFRHSANSLTLINPTPYYLTVTELNAGTRVLENALVPPMGESTVKLPSDAGSNITYRTINDYGALTPKMTGVME

SEQ ID NO: 14852 - protein, 240 aa, Escherichia coli
SNKNVNVRKSQEITFCLLAGILMFMAMMVAGRAEAGVALGATRVIYPAGQKQVQLAVTNNDENSTYLIQSWVENADDVKDGRFIVTPPLFAMKGKKENTLRILDATNNQLPQDRESLFWMNVKAIPSMDKSKLTENTLQLAIISRIKLYYRPAKLALPPDQAAEKLRFRRSANSLTLINPTPYYLTVTELNAGARVLENALVPPMGESTVKLPSDAGSNITYRTINDYGALTPKMTGVME

SEQ ID NO: 14853 - protein, 240 aa, Escherichia coli
SNKNVNVRKSQEITFCLLAGILMFMAMMVAGRAEAGVALGATRVIYPAGQKQVQLAVTNNDENSTYLIQSWVENTDGVKDGRFIVTPPLFAMKGKKENTLRILDATNNQLPQDRESLFWMNVKAIPSMDKSKLTENTLQLAIISRIKLYYRPAKLALPPDQAAEKLRFRRSANSLTLINPTPYYLTVTELNAGTRVLENALVPPMGESTVKLPSDAGSNITYRTINDYGALTPKMTGVME

SEQ ID NO: 14854 - protein, 240 aa, Escherichia coli
SNKNVNVRKSQEITFCLLAGILMFMAMMVAGRAEAGVALGATRIIYPAGQKQVQLAVTNNDENSTYLIQSWVENADGVKDGRFIVTPPLFAMKGKKENTLRILDATNNQLPQDRESLFWMNVKAIPSMDKSKLTENTLQLAIISRIKLYYRPAKLALPPDQAAEKLRFRRSANSLTLINPTPYYLTVTELNAGARVLENALVPPMGESTVKLPSDAGSNITYRTINDYGALTPKMTGVME

SEQ ID NO: 14855 - protein, 240 aa, Escherichia coli
SNKNVNVRKSQEITFCLLAGILMFMAMMVAGRAEAGVALGATRIIYPAGQKQVQLAVTNNDENSTYLIQSWVENADGVKDGRFIVTPPLFAMKGKKENTLRILDATNNQLPQDRESLFWMNVKAIPSMDKSKLTENTLQLAIISRIKLYYRPAKLALPPDQAAEKLRFRRSANSLTLINPTLYYLTVTELNAGARVLENALVPPMGESTVKLPSDAGSNITYRTINDYGALTPKMTGVME

SEQ ID NO: 14856 - protein, 240 aa, Escherichia coli
SNKNVNVRKSQEIIFCLLAGILMFMAMMVAGRAEAGVALGATRVIYPAGQKQVQLAVTNNDENSTYLIQSWVENADGVKDGRFIVTPPLFAMKGKKENTLRILDATNNQLPQDRESLFWMNVKAIPSMDKSKLTENTLQLAIISRIKLYYRPAKLALPPDQAAEKLRFRRSANSLTLINPTPYYLTVTELNAGTRVLENALVPPMGESTVKLPSDAGSNITYRTINDYGALTPKMTGVME

SEQ ID NO: 14857 - protein, 367 aa, Escherichia coli; identical to SEQ ID NO: 4369

SEQ ID NO: 14858 - protein, 360 aa, Escherichia coli
MKVKVLSLLVPALLVAGAANAAEIYNKDGNKLDLYGKVDGLHYFSDNDSKDGDKTYMRLGFKGETQVTDQLTGYGQWEYQIQGNEPESDNSSWTRVAFAGLKFQDVGSFDYGRNYGVVYDVTSWTDVLPEFGGDTYDSDNFMQQRGNGFATYRNTDFFGLVDGLDFAVQYQGKNGSAHGEGMTTNGRDDVFEQNGDGVGGSITYNYEGFGIGAAVSSSKRTWDQNNTGLIGTGDRAETYTGGLKYDANNIYLAAQYTQTYNATRVGSLGWANKAQNFEAVAQYQFDFGLRPSLAYLQSKGKNLGRGYDDEDILKYVDVGATYYFNKNMSTYVDYKINLLDDNQSGINTDDIVALGLVYQF

SEQ ID NO: 14859 - protein, 367 aa, Escherichia coli
MKVKVLSLLVPALLVAGAANAAEVYNKDGNKLDLYGKVDGLHYFSDNKDVDGDQTYMRLGFKGETQVTDQLTGYGQWEYQIQGNSAENENNSWTRVAFAGLKFQDVGSFDYGRNYGVVYDVTSWTDVLPEFGGDTYGSDNFMQQRGNGFATYRNTDFFGLVDGLNFAVQYQGKNGSVNGEGMTNNGRDALRQNGDGVGGSITYDYEGFGIGAAVSSSKRTDAQNTAAYIGNGDRAETYTGGLKYDANNIYLAAQYTQTYNATRVGSLGWANKAQNFEAVAQYQFDFGLRPSVAYLQSKGKNLGTIAGRNYDDEDILKYVDVGATYYFNKNMSTYVDYKINLLDDNQFTRDAGINTDNIVALGLVYQF

SEQ ID NO: 14860 - protein, 375 aa, Escherichia coli
MKVKVLSLLVPALLVAGAANAAEVYNKDGNKLDLYGKVDGLHYFSDNKSEDGDQTYMRLGFKGETQVTDQLTGYGQWEYQIQGNSAENENNSWTRVAFAGLKFQDVGSFDYGRNYGVVYDVTSWTDVLPEFGGDTYGSDNFMQQRGNGFATYRNTDFFGLVDGLNFAVQYQGKNGSVDGEGMTNNGRGALRQNGDGVGGSITYDYEGFGIGAAVSSSKRTDDQNFGLNGYGERYLGNGDRAETYTGGLKYDANNIYLAAQYTQTYNATRVGSLGWANKAQNFEAVAQYQFDFGLRPSVAYLQSKGKNLGVINGRNYDDEDILKYVDVDVGATYYFNKNMSTYVDYKINLLDDNRFTRDAGINTDDIVALGLVYQF

SEQ ID NO: 14861 - protein, 367 aa, Escherichia coli; identical to SEQ ID NO: 4285

SEQ ID NO: 14862 - protein, 753 aa, Escherichia coli; identical to SEQ ID NO: 6655

SEQ ID NO: 14863 - protein, 359 aa, Escherichia coli; identical to SEQ ID NO: 2329

SEQ ID NO: 14864 - protein, 678 aa, Escherichia coli
MVPSTFSRLKAARCLPVVLAALIFAGCGTHTPDQSTAYMQGTAQADSAFYLQQMQQSSDDTRINWQLLAIRALVKEGKTGQAVELFNQLPQELNDTQRREKTLLAAEIKLAQKDFAGAQNLLAKITPADLEQNQQARYWQAKIDASQGRPSIDLLRALIAQEPLLGAKEKQQNIDATWQALSSMTQEQANTLVINADENILQGWLDLQRVWFDNRNDPDMMKAGIADWQKRYPNNPGAKMLPTQLVNVKAFKPASTNKIALLLPLNGQAAVFGRTIQQGFEAAKNFGTQPVAAQVAAAPAADVAEQSQPQTVDDVASPAQASVSDLTGEQPAAQPVPVSAPATSTAAVSAPANPSAELKIYDTSSQPLSQILSQVQQDGASIVVGPLLKNNVEELLKSNTPLNVLALNQPENIENRVNICYFALSPEDEARDAARHIRDQGKQAPLVLIPRSSLGDRVANAFAQEWQKLGGGTVLQQKFGSTSELRAGVNGGSGIALTGSPITPRETTDSGMTTNNPTLQTTPTDDQFTNNGGRVDAVYIVATPGEIAFIKPMIAMRNGSQSGATLYASSRSAQGTAGPDFRLEMEGLQYSEIPMLAGGNLPLMQQALSAVNNDYSLARMYAMGVDAWSLANHFSQMRQVQGFEINGNTGSLTANPDCVINRKLSWLQYQQGQVVPAS

SEQ ID NO: 14865 - protein, 360 aa, Escherichia coli; identical to SEQ ID NO: 4018

SEQ ID NO: 14866 - protein, 565 aa, Escherichia coli; identical to SEQ ID NO: 2673

SEQ ID NO: 14867 - protein, 239 aa, Escherichia coli
MHQMQTTRTPYSVSFMATVLLLLLFACHSTIANAAVALGATRVIYPANQKQVLLPVTNNDPASVYLIQSWIENAGDQKDTQFVITPPLFSMQGKKENTLRIINATNHQLPGDRESLFWVNVKAIPAMEKDQKNENTLQLAIISRIKMFYRPTHLAMAPEEAPAMLRFRRSGSKLTLINPTPYFITVTNMKAGNSNLPNTMVPPKGEVSVDIPHAVTGDISFQTINDYGALTPRIKATMQ

SEQ ID NO: 14868 - protein, 250 aa, Escherichia coli
MSYKLSCPMLVSTALMALLTTASLTAHASVTPDRTRLVFNESDKSISVTLRNNNEKLPYLAQSWLEDEKGNKITSPLAVLPPVQRIDAMMNGQVKIQALPDIHTLPSDRESLFYYNVREIPPKSGKANTLQIALQTRIKLFWRPKALEKIDMRRPWQFKVTLTRSGQDYTVNNPTPYHVIISDASTQKKGLTAAGFKPLVMPPKTSQPLKAKLASAPVLTYINDYGARMPLIFRCEGNTCKVDEDQSSKG

SEQ ID NO: 14869 - protein, 250 aa, Escherichia coli; identical to SEQ ID NO: 3811

SEQ ID NO: 14870 - protein, 121 aa, Escherichia coli
MDAVLSVQGASAPVKKKSFFSKFTRLNMLRLARAVIPAAVLMMFFPQLAMAASSSGQDLMASGNTTVKATFGKDSSIVKWVVLAEVLVGAVMYMMTKNVKFLAGFAIISVFIAVGMAVVGL

SEQ ID NO: 14871 - protein, 230 aa, Escherichia coli; identical to SEQ ID NO: 5433

SEQ ID NO: 14872 - protein, 682 aa, Escherichia coli
MKNKYIIAPGIAVMCSAVISSGYASSDKKEDTLVVTASGFTQQLRNAPASVSVITSEQLQKKPVSDLVDAVKDVEGISITGGNEKPDISIRGLSGDYTLILVDGRRQSGRESRPNGSGGFEAGFIPPVEAIERIEVIRGPMSSLYGSDAIGGVINIITKPVNNQTWDGVLGLGGIIQEHGKFGNSTTNDFYLSGPLIKDKLGLQLYGGMNYRKEDSISQGTPAKDNKNITATLQFTPTESQKFVFEYGKNNQVHTLTPGESLDAWTMRGNLKQPNSKRETHNSRSHWVAAWNAQGEILHPEIAVYQEKVIREVKSGKKDKYNHWDLNYESRKPEITNTIIDAKVTAFLPENVLTIGGQFQHAELRDDSATGKKTTETQSVSIKQKAVFIENEYAATDSLALTGGLRLDDHEIYGSYWNPRLYAVYNLTDNLTLKGGIAKAFRAPSIREVSPGFGTLTQGGASIMYGNRDLKPETSVTEEIGIIYSNDSGFSASATLFNTDFKNKLTSYDIGTKDPVTGLNTFIYDNVGEANIRGVELATQIPVYDKWHVSANYTFTDSRRKSDDESLNGKSLKGEPLERTPRHAANAKLEWDYTQDITFYSSLNYTGKQIWAAQRNGAKVPRVRNGFTSMDIGLNYQILPDTLINFAVLNVTDRKSEDIDTIDGNWQVDEGRRYWANVRVSF

SEQ ID NO: 14873 - protein, 61 aa, Escherichia coli
LYYLPSFSQKAESVDSSKEKITLDTKKCNVVKNNSEKKSENMNNTFYCCELCCNPACAPCY

SEQ ID NO: 14874 - protein, 252 aa, Escherichia coli
MTQMTSIMSVIITSILSCFFSTAQAMDNNITNRTKFFSIHIGATRVIYDMASSGATLAITNKHEFPILVQSDVLSEDKEMSTHFIITPPLFRLDPLQSTRLRIVRTGGNFPIDRESMQWICVKGIPPKEDSKWGGTDAENKDEKMTLNVQLSVNSCIKMFIRPSNVKGHPEDVAGKVKWQITGNKLKGINPTPFYINLAELRVGKKEITEPHYIEPFSSYEYQIPTNGAKKVEWKIITDYGGVGKNFEEFLD

SEQ ID NO: 14875 - protein, 232 aa, Escherichia coli
MKSKLIILLTLVPFSSFSTGNNFEINKTRVIYSDSTPSVQISNNKAYPLIIQSNVWDESNNKNHDFIATPPIFKMESESRNIIKIIKTNIKLPDSQESMRWLCIESMPPIEKSTKINRKEGRTDSINISIRGCIKLIYRPASVPSPVFNNIVEKLKWHKNGKYLVLKNNTPYYISFSEVFFDSDKVNNAKDILYVKPYSEKKIDISNRIIKKIKWAMIDDAGAKTKLYESNL

SEQ ID NO: 14876 - protein, 374 aa, Escherichia coli
MKVKVLSLLVPALLVAGAANAAEVYNKDGNKLDLYGKVDGLHYFSDNKSEDGDQTYVRLGFKGETQVTDQLTGYGQWEYQIQGNTSEDNKENSWTRVAFAGLKFQDVGSFDYGRNYGVVYDVTSWTDVLPEFGGDTYGSDNFMQQRGNGYATYRNTDFFGLVDGLNFAVQYQGKNGSVSGEGMTNNGRGALRQNGDGVGGSITYDYEGFGIGAAVSSSKRTDDQNFGLNGYGERYLGNGDRAETYTGGLKYDANNIYLAAQYTQTYNATRVGSLGWANKAQNFEAVAQYQFDFGLRPSVAYLQSKGKNLGVVAGRNYDDEDILKYVDVGATYYFNKNMSTYVDYKINLLDDNQFTRDAGINTDDIVALGLVYQF

SEQ ID NO: 14877 - protein, 682 aa, Escherichia coli; identical to SEQ ID NO: 5938

SEQ ID NO: 14878 - protein, 44 aa, Escherichia coli
GTEYWTNRWNLQPLLQSAQLTGMTVTIKSNTCASGSGFAEVQFN

SEQ ID NO: 14879 - protein, 89 aa, Escherichia coli
MKKMFMAVLFALVSVNAMAADCAKGKIEFSKYNEDDTFTVKVDGKEYWTSRWNLQPLLQSAQLTGMTVTVKSSTCESGSGFAEVQFNND

SEQ ID NO: 14880 - protein, 308 aa, Escherichia coli
GLLEAQPKEFTQQVFDPQKGTIDLSTGNVSSVLTFITPTFTPGEEVRERKQSGKYEYMTSLIVNGKDTWSVKGIKNHKGVYDYSKLIQFVEKNNKHYQARIISELGDKDDVVYSGAGSSEVFAGEGYDTVSYNKTDVGKLTIDATGASKPGEYIVSKNMYGDVKVLQEVVKEQEVSVGKRTEKIQYRDFEFRTGGIPYDVIDNLHSVEELIGGKHDDEFKGGKFNDIFHGADGNDYIEGNYGNDRLYGDDGDDYISGGQGDDQLFGGSGNDKLSGGDGNNYLTGGSGNDELQAHGAYNILSGGTGDDK

SEQ ID NO: 14881 - protein, 89 aa, Escherichia coli
MKKMFMAVLFALASVNAMAADCAKGKIEFSKYNEDDTFTVKVDGKEYWTSRWNLQPSLQSAQLTGMTVTIKSSTCESGSGFAEVQFNND

SEQ ID NO: 14882 - protein, 258 aa, Escherichia coli
MKNITFIFFILLASPLYANGDKLYRADSRPPDEIKRSGGLMPRGHNEYFDRGTQMNINLYDHARGTQTGFVRYDDGYVSTSLSLRSAHLAGQSILSGYSTYYIYVIATAPNMFNVNDVLGVYSPHPYEQEVSALGGIPYSQIYGWYRVNFGVIDERLHRNREYRDRYYRNLNIAPAEDGYRLAGFPPDHQAWREEPWIHHAPRGCGNSSRTITGDTCNEETQNLSTIYLRKYQSKVKRQIFSDYQSEVDIYSRIRDEL

SEQ ID NO: 14883 - protein, 255 aa, Escherichia coli
MKIRHLAALVGILAGLPASGVMAAGNQESTKTTSKVFSLHLGATRVIYNLDSSGASLTVMNDLDYPMLVQSEVLAENQKDPAPFVVTPPLFRLDALQSSRLRIVRTGGVFPGDRESLQWLCVKGIPPKHDDRWAEEKGADKKKADKATLQVNLSVSSCVKLFVRPPAVKGPPEDAGGKVEWTKSGNKLKGNNPTPFYINISELSVGGKEVKEHRYISPYSSYEYEIPSGASGKVNWTVITDYGGKSKPFESELKS

SEQ ID NO: 14884 - protein, 43 aa, Escherichia coli
EEYWTNRWNLQPLLQSAQLTGMTVTIKSNTCASGSGFAEVQFN

SEQ ID NO: 14885 - protein, 89 aa, Escherichia coli
MKKMFMAVLFALASVNAMAADCAKGKIEFSKYNEDDTFTVKVAGKEYWTSRWNLQPLLQSAQLTGMTVTIKSSTCESGSGFAEVQFNND

SEQ ID NO: 14886 - protein, 249 aa, Escherichia coli
MIKVVIVLFSLLFSTAQAGLVIGGTRFAYPENQSSISVELKNTSNRDMLVKVAVSPDDARQLTGTVESLPSYSETVFIATPPLFVLKPDKNTKIRINRVGGSLPTDRESLFILNVAALPTLENSHSVKTDNQLQIAVRNRMKIFYRPSNLSEDPNMSYQKLRWARKNEIVTVYNPGPRYVTLYNLHVDGKVIDGGMVAPFSHRQQSWCKSQGVCEIAWQTLDIYNNVLPILKVKLNPSQLDVTGFAFSQ

SEQ ID NO: 14887 - protein, 360 aa, Escherichia coli; identical to SEQ ID NO: 3862

SEQ ID NO: 14888 - protein, 265 aa, Escherichia coli
MKMRAVAVFTGMLTGVLSVAGLLSAGAYAAGGEGNMSASATETNARVFSLHLGATRVVYNPASSGETLTVINDQDYPMLVQSEVLSEDQKSPAPFVVTPPLFRLDGQQSSRLRIVRTGGEFPPDRESLQWICVKGIPPKEGDRWAEGKDGEKKADKVSLNVQLSVSSCIKLFVRPPAVKGRPDDVAGKVEWQRAGNRLKGVNPTPFYINLSTLTVGGKEVKEREYIAPFSSREYPLPAGASGKVQWKVITDYGGTSKQFEAELKG

SEQ ID NO: 14889 - protein, 72 aa, Escherichia coli; identical to SEQ ID NO: 2163

SEQ ID NO: 14890 - protein, 64 aa, Escherichia coli
MKKMFMAVLFALVSVNAMAADCAKGKIEFSKYNEDDTFTVKVDGKEYWTSRWNLQPLLQSAQLT

SEQ ID NO: 14891 - protein, 64 aa, Escherichia coli
MKKMFIAVLFALVSVNAMAADCAKGKIEFSKYNEDNTFTVKVSGREYWTNRWNLQPLLQSAQLT

SEQ ID NO: 14892 - protein, 181 aa, Escherichia coli
GSSLNDLVRTADELGIEVQYDEKNGTAITKQVFGTAEKLIGLTERGVAIFAPQLDKLLQKYQKAGNKLGGSAENIGDNLGKAGSVLSTFQNFLGTALSSMKIDELIKKQKSGNNVSSSELAKASIELINQLVDTAASINNNVNSFSQQLNKLGSVLSNTKHLNGVGNKLQNLPNLDNIGAG

SEQ ID NO: 14893 - protein, 656 aa, Escherichia coli
MRLKKRYLCTVLSLAFTQQSVAAQESDTLTVWSSPVSSTTTTVLDQPTMKALDKQNVAQALSVVPGVVLQKSGSRNEEQVKVRGFDSRQVPVYFDGVPIYVPYDGNLDLARILTNNLGAVEVSKGYSSLLQGPNQMGGAINITTQKPTKPLEANLGYRQGWSRSQDNAYDMHASFAASSDLGYLQISGSQLKQDFLGLPHGVNNDIAGKHGKMINSSADDKRGIVKLGFTPRENDEYTLTYIKQDGEKDNPPYSGNSGQKSRYWQWPEYDKESFYYQGTTQLNDRFTLKSRLYRDTFENTLMMYNSLADLKNKKGSYSHYSDYSDGAGLQLAADVRENDLLSFAVNWKDDVHREKGAPHAAYDRYEDRTWSLASEYQWAAADNVDVVAGISYDWRDSVEAKKHEKDGSITHYDDNNQSAFNWQVMGKYHFANEDTLALSYYDRTRFPTLKERYTTSKPAYNQIAIVNPQLKPERARGVDLTWNGAFPHDWGFEVSVYYNRVSDAILSHNIDADTIQNQNSGTVDYSGLDAGIKGKISNILDVGLSYALIHADAKRKDIGKITDLPTQTMTAWMTLKPWEPLSVTLSEEARSSSYSNSDGSQKAAGFAVTHIRADYTLGHGFSVNASVNNLFDTKYAYSEGFIEEGRNFWAGIEYTF

SEQ ID NO: 14894 - protein, 120 aa, Escherichia coli
MNTVLSVQGASAPVENKSFFSKFTRLNMLRLVRAVIPVAVLMMLFPELAMAAGKGTDLMAKGQETVKATFGKDSSIVKWVVLAEVLVGAVMYMMTKNVKFLVGFAILSVFIAVGMSVAGF

SEQ ID NO: 14895 - protein, 300 aa, Escherichia coli; identical to SEQ ID NO: 4800

SEQ ID NO: 14896 - protein, 89 aa, Escherichia coli
MKKMFMAVLFALVSVNAMAADCAKGKIEFSKYNEDDTFTVKVDGKEYWTSRWNLQPLLQSAQLTGMTVTIKSSTCASGSGFAEVQFNND

SEQ ID NO: 14897 - protein, 84 aa, Escherichia coli
MKKTLLIAASLSFFSASALATPDCVTGKVEYTKYNDDDTFTVKVGDKELFTNRWNLQSLLLSAQITGMTVTIKTNACHNGGGFR

SEQ ID NO: 14898 - protein, 749 aa, Escherichia coli; identical to SEQ ID NO: 11957

SEQ ID NO: 14899 - protein, 240 aa, Escherichia coli
MINFAKMKRFTFNRIATTFGLTLAVLMSSQSALASLSADQTRYIFNGNKDSLTITVTNNDKEKTFGGQAWVDNIIEKDTRPTFVVTPSFFKVKPKGQQTLRVIMASDHVPQDKESVYWLNLQDIPPAMEGNGIAVALRTKLKLFYRPKALIEGRKGAEEGITFKVRPDGRNVLVNTTPYIYAIGNLLDVNGKKISVDSDAAKKLLMFMPGDEVPVNGKVVKVESLNDYGEIETWEVNKKR

SEQ ID NO: 14900 - protein, 258 aa, Escherichia coli
MSKRNAVTTFFTNRVTKALGITLALMMTCQSAVASLAADQTRYIFRGDKDALTITVTNNDKERTFGGQAWVDNIVEKDTRPTFVVTPSFFKVKPNGQQTMRIIMASDHLPEDKESVYWLNLQDIPPALEGSGIAVALRTKLKLFYRPKALLEGRKGAEEGLSLQSRPDGRIMLVNTTPYIFAIGSLLDGNGKKIATDNETAQKLLMFMPGDEVQVKGNVVKVDSLNDYGELQTWTINKKKPTTPEAAKTEKADSTEQK

SEQ ID NO: 14901 - protein, 695 aa, Escherichia coli; identical to SEQ ID NO: 13767

SEQ ID NO: 14902 - protein, 512 aa, Escherichia coli; identical to SEQ ID NO: 11139

SEQ ID NO: 14903 - protein, 747 aa, Escherichia coli; identical to SEQ ID NO: 9180

SEQ ID NO: 14904 - protein, 206 aa, Escherichia coli
MSLLEVIIVLGIIGTIAAGVVILAQRAFDSRAVTDLVTNTNTVRVAMKDAYQRDGVYPDYVSPLNLTSDTIKTDTGKIPAAQLVQLGKITPDEVRNNISGDFIAIGGALTSDGATVKKGFAIELNGLSQEQCRSILGQVGNNWEYVAVGNSASGSYAMQTAGVNMSVAATGNILRTLGTDGQTTLTADKILRTCTAQVNSITLGSR

SEQ ID NO: 14905 - protein, 660 aa, Escherichia coli; identical to SEQ ID NO: 7233

SEQ ID NO: 14906 - protein, 614 aa, Escherichia coli; identical to SEQ ID NO: 6666

SEQ ID NO: 14907 - protein, 89 aa, Escherichia coli
MKKMFMAVLFALVSVNAMAADCAKGKIEFSKYNEDDTFTVKVAGKEYWTSRWNLQPLLQSAQLTGMTVTIKSSTCESGSGFAEVQFNND

SEQ ID NO: 14908 - protein, 233 aa, Escherichia coli; identical to SEQ ID NO: 6999

SEQ ID NO: 14909 - protein, 336 aa, Escherichia coli
MKVKVLSLLVPALLVAGAANAAEVYNKDGNKLDLYGKVDGLHYFSDNKDVDGDQTYMRLGFKGETQVTDQLTGYGQWEYQIQGNSAENENNSWTRVAFAGLKFQDVGSFDYGRNYGVVYDVTSWTDVLPEFGGDTYGSDNFMQQRGNGFATYRNTDFFGLVDGLNFAVQYQGKNGNPSGEGFTSGVTNNGRDALRQNGDGVGGSITYDYEGFGIGGAISSSKRTDAQYTQTYNATRVGSLGWANKAQNFEAVAQYQFDFGLRPSLAYLQSKGKNLGRGYDDEDILKYVDVGATYYFNKNMSTYVDYKINLLDDNQFTRDAGINTDNIVALGLVYQF

SEQ ID NO: 14910 - protein, 386 aa, Escherichia coli; identical to SEQ ID NO: 3810

SEQ ID NO: 14911 - protein, 551 aa, Escherichia coli; identical to SEQ ID NO: 2452

SEQ ID NO: 14912 - protein, 656 aa, Escherichia coli
MRLKKRYLCTALSLAFTQQAVAAQESDTLTVWSSPVSSTTTTVLDQPTMKALDKQNVAQALSVVPGVVLQKSGSRNEEQVKVRGFDSRQVPVYFDGVPIYVPYDGNLDLARILTNNLGAVEVSKGYSSLLQGPNQMGGAINITTQKPTKPLEASLGYRQGWSRSQDNAYDMHASFAVSSDLGYLQVSGSQLKQDFLGLPHGVNNDIAAKHGKMINSSADDKRGIVKLGFTPRENDEYTLTYIKQDGEKDNPPYSRNSGQKSRYWQWPEYDKESFYYQGTTQLNDRFTLKSRLYRDTFENTLMMYNSLADLKNKKGSYSHYSDYSDGAGLQLAADVRENDLLSFAVNWKDDVHREKGAPHAAYDRYEDRTWSLASEYQWAAADNVDVVAGISYDWRDSVEAKKHEKDGSITHYDDNNQSAFNWQVMGKYHFGNEDTLALSYYDRTRFPTLKERYTTSKPAYNQIAIVNPQLKPERARGVDLTWNGAFTHDWGFEVSVYYNRVSDAILSHNIDADTIQNQNSGTVDYSGLDAGIKGKISNILDVGLSYALIHADAKRKDIGKINDLPTQTMTAWMTLKPWEPLSVTLSEEARSSSYSNSDGSQKAAGFGVTHIRADYTLGHGFSVNASVNNLFDTKYAYSEGFIEEGRNFWAGIEYTF

SEQ ID NO: 14913 - protein, 250 aa, Escherichia coli; identical to SEQ ID NO: 4096

SEQ ID NO: 14914 - protein, 660 aa, Escherichia coli
MSRPQFTSLRLSLLALAVSATLPTFAFATETMTVTATGNARSSFEAPMMVSVIDTSAPENQTATSATDLLRHVPGITLDGTGRTNGQDVNMRGYDHRGVLVLVDGVRQGTDTGHLNGTFLDPALIKRVEIVRGPSALLYGSGALGGVISYDTVDAKDLLQEGQSSGFRVFGTGGTGDHSLGLGASAFGRTENLDGIVAWSSRDRGDLRQSNGETAPNDESINNMLAKGTWQIDSAQSLSGLVRYYNNDAREPKNPQTVEASDSSNPMVDRSTIQRDAQLSYKLAPQGNDWLNADAKIYWSEVRINAQNTGSSGEYREQITKGARLENRSTLFADSFASHLLTYGGEYYRQKQHPGGATTGFPQAKIDFSSGWLQDEITLRDLPITLLGGTRYDSYRGSSDGYKDVDADKWSSRAGMTINPTNWLMLFGSYAQAFRAPTMGEMYNDSKHFSIGRFYTNYWVPNPNLRPETNETQEYGFGLRFDDLMLSNDALEFKASYFDTKAKDYISTTVDFAAATTMSYNVPNAKIWGWDVMTKYTTDLFSLDVAYNRTRGKDTDTGEYISSINPDTVTSTLNIPIAHSGFSVGWVGTFADRSTHISSSYSKQPGYGVNDFYVSYQGQQALKGMTTTLVLGNAFDKEYWSPQGIPQDGRNGKIFVSYQW

SEQ ID NO: 14915 - protein, 193 aa, Escherichia coli; identical to SEQ ID NO: 2253

SEQ ID NO: 14916 - protein, 678 aa, Escherichia coli; identical to SEQ ID NO: 9215

SEQ ID NO: 14917 - protein, 258 aa, Escherichia coli
MKNITFIFFILLASPLYANGDKLYRADSRPPDEIKHSGGLIPRGHNEYFDRGTQMNINLYDHARGTQTGFVRYDDGYVSTSLSLRSAHLAGQSILSGYSTYYIYVIATAPNMFNVNDVLGVYSPHPYEQEVSALGGIPYSQIYGWYRVNFGVIDERLHRNREYRDRYYRNLNIAPAEDGYRLAGFPPDHQAWREEPWIHHAPQGCGNSSRTITGDTCNEETQNLSTIYLRKYQSKVKRQIFSDYQSEVDIYNRIRDEL

SEQ ID NO: 14918 - protein, 132 aa, Escherichia coli; identical to SEQ ID NO: 10092

SEQ ID NO: 14919 - protein, 306 aa, Escherichia coli
MRDVSAATTGLSLAKILASTELGDNTIQAANDAANKLFSLTIADLTANKNINTTNAHSTSNILIPELKAPKSLNASSQLTLLIGNLIQILGEKSLTALTNKITAWKSQQQARQQKNLEFSDKINTLLSETEGLTRDYEKQINKLKNADSKIKDLENKINQIQTRLSELDPDSPEKKKLSREEIQLTIKKDAAVKDRTLIEQKTLSIHSKLTDKSMQLEKEIDSFFAFSNTASAEQLSTQQKSLTGLASVTQLMATFIQLVGKNNEESLKNDLALFQSLQESRKTEMERKSDEYAAEVRKAEELNRV

SEQ ID NO: 14920 - protein, 706 aa, Escherichia coli
MRDEMLYNIPCRIYILSTLSLCISGIVSTATATSSETKISNEETLVVTTNRSASNLWESPATIQVIDQQTLQNSTNASIADNLQDIPGVEITDNSLAGRKQIRIRGEASSRVLILIDGQEVTYQRAGDNYGVGLLIDESALERVEVVKGPYSVLYGSQAIGGIVNFITKKGGDKLASGVVKAVYNSATAGWEESIAVQGSIGGFDYRINGSYSDQGNRDTPDGRLPNTNYRNNSQGVWLGYNSGNHRFGLSLDRYRLATQTYYEDPDGSYEAFSVKIPKLEREKVGVFYDTDVDGDYLKKIHFDAYEQTIQRQFANEVKTTQPVPSPMIQALTVHNKTDTHDKQYTQAVTLQSHFSLPANNELVTGAQYKQDRVSQRSGGMTSSKSLTGFINKETRTRSYYESEQSTVSLFAQNDWQFADHWTWTMGVRQYWLSSKLTRGDGVSYTAGIISDTSLARESASDHEMVTSTSLRYSGFDNLELRAAFAQGYVFPTLSQLFMQTSAGGSVTYGNPDLKAEHSNNFELGARYNGNQWLIDSAVYYSEAKDYIASLICDGSIVCNGNTNSSRSSYYYYDNIDRAKTWGLEISAEYNGWVFSPYISGNLIRRQYETSTLKTTNTGEPAINGRIGLKHTLVMGQANIISDVFIRAASSAKDDSNGTETNVPGWATLNFAVNTEFGNEDQYRINLALNNLTDKRYRTAHETIPA

SEQ ID NO: 14921 - protein, 89 aa, Escherichia coli
MKKIFVAALFAFVSVNAMAADCAKGKIEFSKYNENDTFTVKVAGKEYWTNRWNLQPLLQGAQLTGMTVTIKSNTCASGSGFAEVQFNND

SEQ ID NO: 14922 - protein, 343 aa, Escherichia coli
MKVKVLSLLVPALLVAGAANAAEIYNKDGNKLDLYGKVDGLHYFSDNDSKDGDKTYMRLGFKGETQVTDQLTGYGQWEYQIQGNEPESDNSSWTRVAFAGLKFQDVGSFDYGRNYGVVYDVTSWTDVLPEFGGDTYDSDNFMQQRGNGFATYRNTDFFGLVDGLDFAVQYQGKNGSAHGEGMTTNGRDDVFEQNGDGVGGSITYNYEGFGIGAAVSSSKRTWDQNNTGLIGTGDRAETYTGGLKYDANNIYLAAQYTQTYNATRVGSLGWANKAQNFEAVAQYQFDFGLRPSLAYLQSKGKNLGRGYDDEDILKYVDVGATYYFNKNMSTYVDYNAGRQPLHP

SEQ ID NO: 14923 - protein, 89 aa, Escherichia coli
  MOD_RES (35)..(35): Any amino acid
MKKMFMAVLFALVSVNAMAADCAKGKIEFSKYNEXDTFTVKVDGKEYWTSRWNLHPLLQSAQLTGMTVTIKSSTCESGSGFAEVQFNND

SEQ ID NO: 14924 - protein, 784 aa, Escherichia coli
MKKRIPTLLATMIATALYSQQGLAADLASQCMLGVPSYDRPLVQGDTNDLPVTINADHAKGDYPDDAVFTGSVDIMQGNSRLQADEVQLHQKEAPGQPEPVRTVDALGNVHYDDNQVILKGPKGWANLNTKDTNVWEGDYQMVGRQGRGKADLMKQRGENRYTILDNGSFTSCLPGSDTWSVVGSEIIHDREEQVAEIWNARFKVGPVPIFYSPYLQLPVGDKRRSGFLIPNAKYTTTNYFEFYLPYYWNIAPNMDATITPHYMHRRGNIMWENEFRYLSQAGAGLMELDYLPSDKVYKDEHPNDDSSRRWLFYWKHSGVMDQVWRFNVDYTKVSDPSYFNDFDNKYGSSTDGYATQKFSVGYAVQNFNATVSTKQFQVFSEQNTSSYSAEPQLDVNYYQNDVGPFDTRIYGQAVHFVNTRDDMPEATRVHLEPTINLPLSNNWGSINTEAKLLATHYQQTNLGWYNSRNTTRLAESANRVMPQFKVDGRMVFERDMEMLAPGYTQTLEPRAQYLYVPYRDQSKIYNYDSSLLQSDYSGLFRDRTYGGLDRIASANQVTTGVTSRIYDDAAVERFNISVGQIYYFTESRTGDDNITWENDDKTGSLVWAGDTYWRISDRWGLRGGIQYDTRLDNVATSNSSIEYRRDEDRLVQLNYRYASPEYIQATLPKYYSTAEQYKNGISQVGAVASWPIADRWSIVGAYYYDTNANKQADSMLGVQYSSCCYAIRVGYERKLNGWDNDKQHAVYDNAIGFNIELRGLSSNYGLGTQEMLRSNILPYQNTL

SEQ ID NO: 14925 - protein, 363 aa, Escherichia coli
MKVKVLSLLVPALLVAGAANAAEIYNKDGNKLDLYGKVDGLHYFSDNDSKDGDKTYMRLGFKGETQVTDQLTGYGQWEYQIQGNEPESDNSSWTRVAFAGLKFQDVGSFDYGRNYGVVYDVTSWTDVLPEFGGDTYDSDNFMQQRGNGFATYRNTDFFGLVDGLDFAVQYQGKNGSSWRRYDPNGRDDVFEQNGDGVGGSITYNYEGFGIGAAVSSSKRTWDQNNTGLIGTGDRAETYTGGLKYDANNIYLAAQYTQTYNATRVGSLGWANKAQNFEAVAQYQFDFGLRPSLAYLQSKGKNLGRGYDDEDILKYVDVGATYYFNKNMSTYVDYKINLLDDNRFTRDAGINTDDIVALGLVYQF

SEQ ID NO: 14926 - protein, 240 aa, Escherichia coli
SNKNVNVRKSQEITFCLLAGILMFMAMMVAGRAEAGVALGATRVIYPAGQKQVQLAVTNNDENSTYLIQSWVENADGVKDGRFIVTPPLFAMKGKKENTLRILDATNNHLPQDWESLFWMNVKAIPSMDKSKLTENTLQLAIISRIKLYYRPAKLALPPDQAAEKLRFRRSANSLTLINPTPYYLTVTELNAGARVLENALVPPMGESTVKLPSDAGSNITYRTINDYGALTPKMTGVME

SEQ ID NO: 14927 - protein, 823 aa, Escherichia coli
MFTVQFFIDCRNILIILLITICICNSVMARRGKRGHLLTNCTACLSGSKVFAVAGCVVLRTTMPDSCNSWQKCRNKTMNKKIHSLALLVNLGIYGVAQAQEPTDTPVSHDDTIVVTAAEQNLQAPGVSTITADEIRKNPVARDVSEIIRTMPGVNLTGNSTSGQRGNNRQIDIRGMGPENTLILIDGKPVSSRNSVRQGWRGERDTRGDTSWVPPEMIERIEVLRGPAAARYGNGAAGGVVNIITKKGSGEWHGSWDAYFNAPEHKEEGATKRTNFSLTGPLGDEFSFRLYGNLDKTQADAWDINQGHQSARAGTYATTLPAGREGVINKDINGVVRWDFAPLQSLELEAGYSRQGNLYAGDTQNTNSDAYTRSKYGDETNRLYRQNYSLTWNGGWDNGVTTSNWVQYEHTRNSRIPEGLAGGTEGKFNEKATQDFVDIDLDDVMLHSEVNLPLDFLVNQTLTLGTEWNQQRMKDLSSNTQALTGTNTGGAIDGVSATDRSPYSKAEIFSLFAENNMELTDSTIVTPGLRFDHHSIVGNNWSPALNISQGLGDDFTLKMGIARAYKAPSLYQTNPNYILYSKGQGCYASAGGCYLQGNDDLKAETSINKEIGLEFKRDGWLAGVTWFRNDYRNKIEAGYVAVGQNAVGTDLYQWDNVPKAVVEGLEGSLNVPVSETVMWTNNITYMLKSENKTTGDRLSIIPEYTLNSTLSWQAREDLSMQTTFTWYGKQQPKKYNYKGQPAVGPETKEISPYSIVGLSATWDVTKNVSLTGGVDNLFDKRLWRAGNAQTTGDLAGANYIAGAGAYTYNEPGRTWYMSVNTHF

SEQ ID NO: 14928 - protein, 998 aa, Escherichia coli
MTVNKIKNIFNNATLTTKSAFNTASSSVRSAGKKLILLIPDNYEAQGVGINELVKAADELGIEIHRTERDDTAIANQFFGAAEKVVGLTERGVAIFAPQLDKLLQKYQKVGSKIGGTAENVGNNLGKAGTVLSALQNFTGIALSGMALDELLRKQREGEDISQNDIAKSSIELINQLVDTVSSINSTVDSFSEQLNQLGSFLSSKPRLSSVGGKLQNLPDLGPLGDGLDVVSGILSAVSASFILGNSDAHTGTKAAAGIELTTQVLGNVGKAVSQYILAQRMAQGLSTTAASAGLITSAVMLAISPLSFLAAADKFERAKQLESYSERFKKLNYEGDALLAGFHKETGAIDAGLTTINTVLSSVSAGVSAASSASLIGAPISMLVSALTGTISGILEASKQAMFEHVAEKFAARINEWEKEHGKNYFENGYDARHAAFLEDSLSLLADFSRQHAVERAVAITHQHWDEKIGELAGITRNADRSQSGKAYINYLENGGLLEAQPKEFTQQVFDPQKGTIDLSTGNVSSVLTFITPTFTPGEEVRERKQSGKYEYMTSLIVNGKDTWSVKGIKNHKGVYDYSKLIQFVEKNTKHYQARIISELGDKDDVVYSGAGSSEVFAGEGYDPVSYNKTDVGKLTIDATGAPKPGEYIVPKNMYGDVEVLQEVVKEQEVSVGKRTEKIQYRDFEFRTGGIPYDVIDNLHSVEELIGGKHDDEFKGGKFNDIFHGADGNDYIEGNYGNDRLYGDDGDDYISGGQGDDQLFGGSGNDKLSGGDGNNYLTGGSGNDELQAHGAYNILSGGTGDDKLYGGGGIDLLDGGEGNDYLNGGFGNDIYVYGQNYGHHTIADEGGKGDRLHLSDISFDDIAFKRVGNDLIMNKAINGVLSFNESNDVNGITFKNWFAKDASGADNHLVEVITDKDGREIKVDKIPHNNNERSGYIKASNIASEKNMVNITSVANDINKIISSVSGFDSGDERLASLYNLSLHQNNTHSTTLTTTV

SEQ ID NO: 14929 - protein, 220 aa, Escherichia coli
MNKLGKVALTALLSVSFCNQAMAAFVLNGTRFIYEEGKKNVSFEVTNNADKTYGGQVWIDNTNQGNGVYMVPQPPFFKVGAKQKQIIRIINTDSNLPKDRESLFWLNVQEVPPKPEVKDSDEGVLAIAMNSRVKLIYRPASIKNGRQDAEKQLKMELRGDTTWLKNPTPYYMAIISVKHDGKDISLSDNVMKEIAQLRPFSDVNLGRVVRDKISVDAVND

SEQ ID NO: 14930 - protein, 89 aa, Escherichia coli; identical to SEQ ID NO: 7167

SEQ ID NO: 14931 - protein, 189 aa, Escherichia coli
MPARHLYFIMTNTWNRLALLIFAVLSLLVAGELQAGVVVGGTRFIFPADRESISILLTNTSQESWLINRKINRPTRWAGGEASTVPAPLLAAPPLILLKPGTTGTLRLLRTESDILPVDRETLFELSIASVPSGKVENQSVKVAMRSVFKLFWRPEGCRATRWKLINNYAGHGSRRVYNSLTQRLITLT

SEQ ID NO: 14932 - protein, 258 aa, Escherichia coli
MKNITFIFFILLASPLYANGDKLYRADSRPPDEIKRSGGLMPRGHNEYFDRGTQMNINLYDHARGTQTGFVRYDDGYVSTSLSLRSAHLAGQSILSGYSTYYIYVIATAPNMFNVNDVLGVYSPHPYEQEVSALGGIPYSQIYGWYRVNFGVIDERLHRNREYRDRYYRNLNIAPAEDGYRLAGFPPDHQAWREEPWIHHAPQGCGNSSRTITGDTCNEEAQNLSTIYLREYQSKVKRQIFSDYQSEVDIYNRIRDEL

SEQ ID NO: 14933 - protein, 258 aa, Escherichia coli
MKNITFIFFILLASPLYANGDKLCRADSRPPDEIKRSGGLMPRGHNEYFDRGTQMNINLYDHARGTQTGFVRYDDGYVSTSLSLRSAHLAGQSILSGYSTYYIYVIATAPNMFNVNDVLGVYSPHPYEQEVSALGGIPYSQIYGWYRVNFGVIDERLHRNREYRDRYYRNLNIAPAEDGYRLAGFPPDHQAWREEPWIHHAPQGCGNLSRTITDDTCNEETQNLSTIYLREYQSKVKRQIFTDYQSEVDIYNRIRDEL

SEQ ID NO: 14934 - protein, 998 aa, Escherichia coli; identical to SEQ ID NO: 8351

SEQ ID NO: 14935 - protein, 233 aa, Escherichia coli
MRYQYSVLFVFLFSGVVQAAEFFGPRESRLLFEEKKGNTFYRIDNSDKKLPWLVQAWIEDASEKKTTALTATPMVFRVEPSSVFTVRVVKTGALPEDRETLFWAVSNSLPGGASTKQDNEEGKISAKISLAYRFKVPLIYRPAALDNFRQEPEKLEWTYNGKEGLKLYNPTRYVVQLHNVTANGREFKGKGVSFILLPMSGKNVSAAVNKGTRIKYGVINDYGAVKEYDGVVK

SEQ ID NO: 14936 - protein, 231 aa, Escherichia coli; identical to SEQ ID NO: 10692

SEQ ID NO: 14937 - protein, 580 aa, Escherichia coli
AYNVSTTTTGLSLAKILASTELGDNTIQAANDAANKLFSLTIADLTANKNINTTNAHSTSNILIPELKAPKSLNASSQLTLLIGNLIQILGEKSLTALTNKITAWKSQQQARQQKNLEFSDKINTLLSETEGLTRDYEKQINKLKNADSKIKDLENKINQIQTRLSELDPDSPEKKKLSREEIQLTIKKDAAVKDRTLIEQKTLSIHSKLTDKSMQLEKEIDSFSAFSNTASAEQLSTQQKSLTGLASVTQLMATFIQLVGKNNEESLKNDLALFQSLQESRKTEMERKSDEYAAEVRKAEELNRVMGCVGKILGALLTIVSVVAAAFSGGASLALAAVGLALMVTDAIVQAATGNSFMEQALNPIMKAVIEPLIKLLSDAFTKMLEGLGVDSKKAKMIGSILGAIAGALVLVAAVVLVATVGKQAAAKLAENIGKIIGKTLTDLIPKFLKNFSSQLDDLITNAVARLNKFLGAAGDEVISKQIISTHLNQAVLLGESVNSATQAGGSVASAVFQNSASTNLADLTLSKYQVEQLSKYISEAIEKFGQLQEVIADLLASMSNSQANRTDVAKAILQQTTA

SEQ ID NO: 14938 - protein, 89 aa, Escherichia coli
  MOD_RES (75)..(75): Any amino acid
MKKMFMAVLFALASVNAMAADCAKGKIEFSKYNEDDTFTVKVDGKEYWTSRWNLQPLLQSAQLTGMTVTIKSSTXESGSGFAEGQFNND

SEQ ID NO: 14939 - protein, 267 aa, Escherichia coli
MMYNQEMRMHQFPLSSLMINVLICILICCTNAQAGVVVGGTRFVYPEKQSSISVELKNTASKDMLVKISVTPDDGRQLKGTLESQPLLPDKAFIATPPLLVLKQDKNTKIRINRVGGQLPIDRESLFILNIAVLPAQEQNSQLKNENQLQVAVRNRMKIFYRPETLSGNPLDAYQQLRWSRNNEAVTVFNPTPWYVTLYNLSIDGKSINGGMVAPFSHRQQDWCQRQGYCEINWQTLDLYNNALPVWSVKLNVLQNNAIMGAVAIHG

SEQ ID NO: 14940 - protein, 119 aa, Escherichia coli; identical to SEQ ID NO: 11978

SEQ ID NO: 14941 - protein, 376 aa, Escherichia coli
MKVKVLSLLVPALLVAGAANAAEVYNKDGNKLDLYGKVDGLHYFSDNKSEDGDQTYVRLGFKGETQVTDQLTGYGQWEYQIQGNTSEDNKENSWTRVAFAGLKFQDVGSFDYGRNYGVVYDVTSWTDVLPEFGGDTYGSDNFMQQRGNGFATYRNTDFFGLVDGLNFAVQYQGKNGSVSGEGMTNNGRGALRQNGDGVGGSITYDYEGFGIGAAVSSSKRTDDQNGSYTSNGVVRNYIGTGDRAETYTGGLKYDANNIYLAAQYTQTYNATRVGSLGWANKAQNFEAVAQYQFDFGLRPSLAYLQSKGKNLGVINGRNYDDEDILKYVDVGATYYFNKNMSTYVDYKINLLDDNQFTRDAGINTDNIVALGLVYQF

SEQ ID NO: 14942 - protein, 367 aa, Escherichia coli; identical to SEQ ID NO: 3105

SEQ ID NO: 14943 - protein, 362 aa, Escherichia coli; identical to SEQ ID NO: 5589

SEQ ID NO: 14944 - protein, 258 aa, Escherichia coli
MKNITFIFFILLASPLYANGDKLYRADSRPPYEIKRSGGLMPRGHNEYFDRGTQMNINLYDHARGTQTGFVRYDDGYVSTSLSLRSAHLAGQSILSGYSTYYIYVIATAPNMFNVNDVLGVYSPHPYEQEVSALGGIPYSQIYGWYRVNFGVIDERLHRNREYRDRYYRNLNIAPAEDGYRLAGFPPDHQAWREEPWIHHAPQGCGNSSRTITGDTCNEETQNLSTIYLRKYQSKVKRQIFSDYQSEVDIYNRIRDEL

SEQ ID NO: 14945 - protein, 366 aa, Escherichia coli
MKVKVLSLLVPALLVAGAANAAEVYNKDGNKLDLYGKVDGLHYFSDDKSVDGDQTYMRLGFKGETQVTDQLTGYGQWEYQIQGNSAENENNSWTRVAFAGLKFQDVGSFDYGRNYGVVYDVTSWTDVLPEFGGDTYGSDNFMQQRGNGFATYRNTDFFGLVDGLNFAVQYQGKNGSVSEGMTNNGREALRQNGDGVGGSITYDYEGFGIGAAVSSSKRTDDQNSPLYIGNGDRAETYTGGLKYDANNIYLAAQYTQTYNATRVGSLGWANKAQNFEAVAQYQFDFGLRPSLAYLQSKGKNLGVINGRNYDDEDILKYVDVGATYYFNKNMSTYVDYKINLLDDNQFTRDAGINTDNIVALGLFYQF

SEQ ID NO: 14946 - protein, 68 aa, Escherichia coli
AWREEPWIHHAPQGCGDSSRTITGDTCNEETQNLSTIYLRKYQSKVKRQIFSDYQSEVDIYNRIRNEL

SEQ ID NO: 14947 - protein, 249 aa, Escherichia coli; identical to SEQ ID NO: 9840

SEQ ID NO: 14948 - protein, 87 aa, Escherichia coli
MKKMFIAVLFALVSVNAMAADCAKGKIEFSKYNEDNTFTVKVSGREYWTNRWNLQPLLQSAQLTGMTVTIISNTCSPGSGFAQVKFN

SEQ ID NO: 14949 - protein, 512 aa, Escherichia coli
MKKISFFIFTALFCCSAQAAPSSLEKRLGKNEYFIITKSSPVRAILNDFAANYSIPVFISSSVNDDFSGEIKNEKPVKVLEKLSKLYHLTWYYDENILYIYKTNEISRSIITPTYLDIDSLLKYLSDTISVNKNSCNVRKITTFNSIEVRGVPECIKYITSLSESLDKEAQSKAKNKDVVKVFKLNYASATDITYKYRDQNVVVPGVVSILKTMASNGSLPSTGKGAVERSGNLFDNSVTISADPRLNAVVVKDREITMDIYQQLISELDIEQRQIEISVSIIDVDANDLQQLGVNWSGTLNAGQGTIAFNSSTAQVNISSSVISNASNFMIRVNALQQNSKAKILSQPSIITLNNMQAILDKNVTFYTKVSGEKVASLRSITSGTLLRVTPRILDDSSNSLTGKRRERVRLLLDIQDGNQSTNQSNAQDASSTLPEVQNSEMTTEATLSAGKVYYLADLSKIKKVPSKDGIPLLSDIPVIGSLFSSTVKQKHSVVRLFLIKATPIKSASSE

SEQ ID NO: 14950 - protein, 725 aa, Escherichia coli; identical to SEQ ID NO: 10741

SEQ ID NO: 14951 - protein, 669 aa, Escherichia coli; identical to SEQ ID NO: 13976

SEQ ID NO: 14952 - protein, 367 aa, Escherichia coli
MKVKVLSLLVPALLVAGAANAAEVYNKDGNKLDLYGKVDGLHYFSDNKDVDGDQTYMRLGFKGETQVTDQLTGYGQWEYQIQGNSAENENNSWTRVAFAGLKFQDVGSFDYGRNYGVVYDVTSWTDVLPEFGGDTYGSDNFMQQLGNGFATYRNTDFFGLVDGLNFAVQYQGKNGNPSGEGFTSGVTNNGRDALRQNGDGVGGSITYDYEGFGIGGAISSSKRTDAQNTAAYIGNGDRAETYTGGLKYDANNIYLAAQYTQTYNATRVGSLGWANKAQNFEAVAQYQFDFGLRPSLAYLQSKGKNLGRGYDDEDILKYVDVGATYYFNKNMSTYVDYKINLLDDNQFTRDAGINTDNIVALGLVYQF

SEQ ID NO: 14953 - protein, 628 aa, Escherichia coli; identical to SEQ ID NO: 4513

SEQ ID NO: 14954 - protein, 79 aa, Escherichia coli
MKKMFMAVLFALVSVNAMAADCAKGKIEFSKYNGDNTFTVKVDGKEYWTNRWNLQPLLQSAQLTGMTVTIKSNTCESGS

SEQ ID NO: 14955 - protein, 375 aa, Escherichia coli; identical to SEQ ID NO: 2432

SEQ ID NO: 14956 - protein, 241 aa, Escherichia coli
MSNKNVNVRKSQEITFCLLAGILMFMAMMVAGRAEAGVALGATRVIYPAGQKQVQLAVTNNDENSTYLIQSWVENADGVKDGRFIVTPPLFAMKGKKENTLRILDATNNQLPQDRESLFWMNVKAIPSMDKSKLTENTLQLAIISRIKLYYRPAKLALPPDKAAEKLRFRRSANSLTLINPTPYYLTVTELNAGTRVLENALVPPMGESTVKLPSDAGSNITYRTINDYGALTPKMTGVME

SEQ ID NO: 14957 - protein, 1024 aa, Escherichia coli
  MOD_RES (59)..(59): Any amino acid
MPTITTAQIKSTLQSAKQSAANKLHSAGQSTKDALKKAAEQTRNAGNRLILLIPKDYKXQGSSLNDLVRTADELGIEVQYDEKNGTAITKQVFGTAEKLIGLTERGVTIFAPQLDKLLQKYQKAGNKLGGSAENIGDNLGKAGSVLSTFQNFLGTALSSMKIDELIKKQKSGGNVSSSELAKASIELINQLVDTAASLNNNVNSFSQQLNKLGSVLSNTKHLNGVGNKLQNLPNLDNIGAGLDTVSGILSAISASFILSNADADTGTKAAAGVELTTKVLGNVGKGISQYIIAQRAAQGLSTSAAAAGLIASVVTLAISPLSFLSIADKFKRANKIEEYSQRFKKLGYDGDSLLAAFHKETGAIDASLTTISTVLASVSSGISAAATTSLVGAPVSALVGAVTGIISGILEASKQAMFEHVASKMADVIAEWEKKHGKNYFENGYDARHAAFLEDNFEILSQYNKEYSVERSVLITQQHWDTLIGELAGVTRNGDKTLSGKSYIDYYEEGKRLEKEPDEFQKQVFDPLKGNIDLSVIKSSTLLKFITPLLTPGKEIRERRQSGKYEYITELLVKGVDKWTVKGVQDKGSVYDYSNLIQHASVGNNQYREIRIESHLGDGDDKVFLSAGSANIYAGKGHDVVYYDKTDTGYLTIDGTKATEAGNYTVTRVLGGDVKVLQEVVKEQEVSVGKRTEKTQYRSYEFTHINGTDLTETDNLYSVEELIGTNRADKFFGSKFTDIFHGADGDDHIEGNDGNDRLYGDKGNDTLRGGNGDDQLYGGDGNDKLTGGVGNNYLNGGDGDDELQVQGNSLAKNVLSGGKGNDKLYGSEGADLLDGGEGNDLLKGGYGNDIYRYLSGYGHHIIDDDGGKDDKLSLADIDFRDVAFKREGNDLIMYKAEGNVLSIGHKNGITFRNWFEKESGDISNHQIEQIFDKDGRVITPDSLKKAFEYQQSNNQANYVYGEYASTYADLDNLNPLINEISKIISAAGNFDVKEERSAASLLQLSGNASDFSYGRNSITLTASA

SEQ ID NO: 14958 - protein, 72 aa, Escherichia coli; identical to SEQ ID NO: 2162

SEQ ID NO: 14959 - protein, 89 aa, Escherichia coli
MKKMFMAVLFALASVNAMAADCAKGKIEFSKYNEDDTFTVKVDGKEYWTSRWNLRPLLQSAQLTGMTVTIKSSTCESGSGFAEVQFNND

SEQ ID NO: 14960 - protein, 170 aa, Escherichia coli; identical to SEQ ID NO: 2565

SEQ ID NO: 14961 - protein, 228 aa, Escherichia coli; identical to SEQ ID NO: 6714

SEQ ID NO: 14962 - protein, 998 aa, Escherichia coli
MTVNKIKNIFNNATSTTKSAFNTASSSVRSAGKKLILLIPDNYEAQGVGINELVKAADELGIEIHRTERDDTAIANQFFGTAEKVVGLTERGVAIFAPQLDKLLQKYQKVGSKIGGTAENVGNNLGKAGTVLSALQNFTGIALSGMALDELLRKQREGEDISQNDIAKSSIELINQLVDTVSSINSTVDSFSEQLNQLGSFLSSKPRLSSVGGKLQNLPDLGPLGDGLDVVSGILSAVSASFILGNSDAHTGTKAAAGIELTTQVLGNVGKAVSQYILAQRMAQGLSTTAASAGLITSAVMLAISPLSFLAIADKFERAKQLESYSERFKKFNYEGDALLAAFHKESGAIDAALTTINTVLSSVSAGVSAASSASLIGAPISMLVSALTGTISGILEASKQAMFEHVADKFAARINEWEKEHGKNYFENGYDARHAAFLEDSLSLLADFSRQHAVERAVAITQQHWDEKIGELAGITRNADRSQSGKAYINYLENGGLLEAQPKEFTQQVFDPQKGTIDLSTGNVSSVLTFVTPTFTPGEEVRERKQSGKYEYMTSLIVNGKDTWSVKGIKNHKGVYDYSNLIQFVEKDNKHYQARIISELGDKDDIVYSGAGSSEVFAGEGHDTVSYNKTDVGKLTIDATGASKPGEYIVSKNMYGDVKVLQEVVKEQEVSVGKRTEKIQYRDFEFRTGGIPYDVIDNLHSVEELIGGKHDDEFKGGKFNDIFHGADGNDYIEGNYGNDRLYGDDGDDYISGGQGDDQLFGGSGNDKLSGGDGNNYLTGGRGNDELQAHGAYNILSGGTGDDKLYGGGGIDLLDGGEGNDYLNGGFGNDIYVYRQNYGHHTIADEGGKGDRLHLSDISFDDIAFKKVGNDLIMNKAINGALSFNESNDVNGITFKNWFAKDASGEDNHLVEVITDKDGREIKADKISHNNNEQSGYIKASNIASEKNMVNITSVANDINKIISSVSGFDSGDERLASLYNLSLHQNNTHSTTLTTTV

SEQ ID NO: 14963 - protein, 99 aa, Escherichia coli
GAPQSITELCSEYRNTQIYTINDKILSYTESMAGKREMVIITFKSGATFQVEVPGSQHIDSQKKAIERMKDTLRIAYLTETKIDKLCVWNNKTPNSIAA

SEQ ID NO: 14964 - protein, 998 aa, Escherichia coli
MTVNKIKNIFNNATLTTKSAFNTASSSVRSAGKKLILLIPDNYEAQGVGINELVKAADELGIEIHRTERDDTAIANQFFGAAEKVVGLTERGVAIFAPQLDKLLQKYQKVGSKIGRTAENVGNNLGKAGTVLSALQNFTGIALSGMALDELLRKQREGEDISQNDIAKSSIELINQLVDTVSSINSTVDSFSEQLNQLGSFLSSKPRLSSVGGKLQNLPDLGSLGDGLDVVSGILSAVSASFILGNSDAHTGTKAAAGIELTTQVLGNVGKAVSQYILAQRMAQGLSTTAASAGLITSAVMLAISPLSFLAAADKFERAKQLESYSERFKKLNFDDAALLAAFHKETGAIDAALTTINTVLSSVSAGVSAASSASLIGAPISMLVSALTGTISGILEASKQAMFEHVAEKFAARINEWEKEHGKNYFENGYDARHAAFLEDSLSLLADFSRQHAVERAVAITQQHWDEKIGELAGITRNADRSQSGKAYINYLENGGLLEAQPKEFTQQVFDPQKGTIDLSTGNVSSVLTFITPTFTPGEEVRERKQSGKYEYMTSLIVNGKDTWSVKGIKNHKGVYDYSKLIQFVEKNNKHYQARMISELGDKDDVVYSGAGSSEVFAGEGHDTVSYNKTDVGKLTIDATGASKPGEYIVSKNMYGDVKVLQEVVKEQEVSVGKRTEKIQYRDFEFRTGGIPYDVIDNLHSVEELIGGKHDDEFKGGKFNDIFHGADGNDYIEGNYGNDRLYGDDGDDYISGGQGDDQLFGGSGNDKLSGGDGNNYLTGGSGNDELQAHGAYNILSGGTGDDKLYGGGGIDLLDGGEGNDYLNGGFGNDIYVYRQNYGHHTIADEGGKGDRLHLSDISFDDIAFKRVGNDLIMNKAINGVLSFNESNDVNGITFKNWFAKDASGADNHLVEVITDKDGREIKVDKIPHNNNERSGYIKASNIASEKNMVNITSVANDINKIISSVSGFDSGDERLASLYNLSLHQNNTHSTTLTTTV

SEQ ID NO: 14965 - protein, 614 aa, Escherichia coli; identical to SEQ ID NO: 4469

SEQ ID NO: 14966 - protein, 367 aa, Escherichia coli
MKVKVLSLLVPALLVAGAANAAEVYNKDGNKLDLYGKVDGLHYFSDNKDVDGDQTYMRLGFKGETQVTDQLTGYGQWEYQIQGNSAENENNSWTRVAFAGLKFQDVGSFDYGRNYGVVYDVTSWTDVLPEFGGDTYGSDNFMQQRGNGFATYRNTDFFGLVDGLNFAVQYQGKNGNPSGEGFTSGVTNNGRDALRQNGDGVGGSITYDYEGFGIGGAISSSKRTDAQNTAAYIGNGDRAETYTGGLKYDANNIYLAAQYPQTYNATRVGSLGWANKAQNFEAVAQYQFDFGLRPSLAYLQSKGKNLGRGYDDEDILKYVDVGATYYFNKNMSTYVDYKINLLDDNQFTRDAGINTDNIVALGLVYQF

SEQ ID NO: 14967 - protein, 89 aa, Escherichia coli
  MOD_RES (52)..(52): Any amino acid
  MOD_RES (75)..(75): Any amino acid
MKKMFMAVLFALASVNAMAADCAKGKIEFSKYNEDDTFTVKVDGKEYWTSRXNLQPLLQSAQLTGMTVTIKSSTXESGSGFAEGQFNND

SEQ ID NO: 14968 - protein, 242 aa, Escherichia coli
MQKMKPALKKTLMAVVSERTPAAQAAVSLDRTRAIFNGDEKSMTLNIANDNKQLPYLAQAWVENEKKEKITTGPIIATPPVQRLEPGSKSMVRLTSTPDISRLPQDRESLFYFSLREIPPKSDKANVLQIALQTKIKLFYRPESIKAKPNAVWQDQLVLNKTSGGYRIDNPTPYYVTVIGIGGSEKQAREGEFDAVMLAPKSTQMVKSGTYNTPYLSYINDYGGRPVLQFSCGGSRCTAVKK

SEQ ID NO: 14969 - protein, 241 aa, Escherichia coli
MKIRRIRLVLILALVFFMNAQASENTRVFSLHLGATRVVYNQQSSGEALAVINDHNYPMLVQSEVLTEDKKESAPFVITPPLFRLDALQSSRLRVVRIGGTFPADRETLQWICVKGIPPKANDRWAENDSKNVLDNKVALNIHLSVTSCIKLFFRPLVVKGHPEDVAGEVRWQKIGDKLKGINPTPFYINLSELKFGGEEITERHYIAPFSSYEYLIPKTMNRNNIVQWKVVTDYGGISNS

SEQ ID NO: 14970 - protein, 111 aa, Escherichia coli
MKKQIEGMTMKKVLALVVAAAMGLSSAAFAAETATTPAPTATTTKAAPAKTTHHKKQHKAAPAQKAQAAKKHHKNTKAEQKAPEQKAQSAKKHAKKHSHQQPAKPAAQPAA

SEQ ID NO: 14971 - protein, 120 aa, Escherichia coli; identical to SEQ ID NO: 2525

SEQ ID NO: 14972 - protein, 224 aa, Escherichia coli; identical to SEQ ID NO: 3792

SEQ ID NO: 14973 - protein, 90 aa, Escherichia coli
PFIITPPVFRVEPLSGQTMRIMYTGEKLPADRESLFWLNVLDIPAKPSFAGKSEKAQGYNYLQFAVRSRIKFFFRPDGLPFSPDDAYKKV

SEQ ID NO: 14974 - protein, 451 aa, Escherichia coli
APQLDKLLQKYQKVGSKIGGTAENVGNNLGKAGTVLSALQNFTGIALSGMALDELLRKQRAGEDISQNDIAKSSIELINQLVDTVSSINSTVDSFSEQLNQLGSFLSSKPRLSSVGGKLQNLPDLGPLGDGLDVVSGILSAVSASFILGNSDAHTGTKAAAGIELTTQVLGNVGKAVSQYILAQRMAQGLSTTAASAGLITSAVMLAISPLSFLAAADKFERAKQLESYSERFKKLNYEGDALLAAFHKETGAIDAALTTINTVLSSVSAGVSAASSASLIGAPISMLVSALTGTISGILEASKQAMFEHVAEKFAARINEWEKEHGKNYFENGYDARHAAFLEDSLSLLADFSRQHAVERAVAITQQHWDEKIGELAGITRNADRSQSGKAYINYLENGGLLEAQPKEFTQQVFDPQKGTIDLSTGNVSSVLTFITPTFTPGEEVRERKQ

SEQ ID NO: 14975 - protein, 367 aa, Escherichia coli
MKVKVLSLLVPALLVAGAANAAEVYNKDGNKLDLYGKVDGLHYFSDNKDVDGDQTYMRLGFKGETQVTDQLTGYGQWEYQIQGNSAENENNSWTRVAFAGLKFQDVGSFDYGRNYGVVYDVTSWTDVLPEFGGDTYGSDNFMQQLGNGFATYRNTDFFGLVDGLNFAVQYQGKNGSVSGEGMTNNGRDALRQNGDGVGGSITYDYEGFGIGAAVSSSKRTDAQNTAAYIGNGDRAETYTGGLKYDANNIYLAAQYTQTYNATRVGSLGWANKAQNFEAVAQYQFDFGLRPSVAYLQSKGKNLGTIAGRNYDDEDILKYVDVGATYYFNKNMSTYVDYKINLLDDNQFTRDAGINTDNIVALGLVYQF

SEQ ID NO: 14976 - protein, 679 aa, Escherichia coli
MSIWRKKTTGLKTKKRLLPLMLAAALCSSPVWAEEATFTANFKDTDLKSFIETVGANLNKTIIMGPGVQGKVSIRTMTPLNERQYYQLFLNLLEAQGYAVVPMENDVLKVVKSSAAKVEPLPLVGEGSDNYAGDEMVTKVVPVRNVSVRELAPILRQMIDSAGSGNVVNYDPSNVIMLTGRASVVERLTEVIQRVDHAGNRTEEVIPLDNASASEIARVLESLTKNSGENQPATLKSQIVADERTNSVIVSGDPATRDKMRRLIRRLDSEMERSGNSQVFYLKYSKAEDLVDVLKQVSGTLTAAKEEAEGTVGSGREVVSIAASKHSNALIVTAPQDIMQSLQSVIEQLDIRRAQVHVEALIVEVAEGSNINFGVQWGSKDAGLMQFANGTQIPIGTLGAAISAAKPQKGSTVISENGATTINPDTNGDLSTLAQLLSGFSGTAVGVVKGDWMALVQAVKNDSSSNVLSTPSITTLDNQEAFFMVGQDVPVLTGSTVGSNNSNPFNTVERKKVGIMLKVTPQINEGNAVQMVIEQEVSKVEGQTSLDVVFGERKLKTTVLANDGELIVLGGLMDDQAGESVAKVPLLGDIPLIGNLFKSTADKKEKRNLMVFIRPTILRDGMAADGVSQRKYNYMRAEQIYRDEQGLSLMPHTAQPILPAQNQALPPEVRAFLNAGRTR

SEQ ID NO: 14977 - protein, 616 aa, Escherichia coli
MGPGVQGKVSIRTMTPLNERQYYQLFLNLLEAQGYAVVPMENDVLKVVKSSAAKVEPLPLVGEGSDNYAGDEMVTKVVPVRNVSVRELAPILRQMIDSAGSGNVVNYDPSNVIMLTGRASVVERLTEVIQRVDHAGNRTEEVIPLDNASASEIARVLESLTKNSGENQPATLKSQIVADERTNSVIVSGDPATRDKMRRLIRRLDSEMERSGNSQVFYLKYSKAEDLVDVLKQVSGTLTAAKEEAEGTVGSGREIVSIAASKHSNALIVTAPQDIMQSLQSVIEQLDIRRAQVHVEALIVEVAEGSNINFGVQWASKDAGLMQFANGTQIPIGTLGAAISQAKPQKGSTVISENGATTINPDTNGDLSTLAQLLSGFSGTAVGVVKGDWMALVQAVKNDSSSNVLSTPSITTLDNQEAFFMVGQDVPVLTGSTVGSNNSNPFNTVERKKVGIMLKVTPQINEGNAVQMVIEQEVSKVEGQTSLDVVFGERKLKTTVLANDGELIVLGGLMDDQAGESVAKVPLLGDIPLIGNLFKSTADKKEKRNLMVFIRPTILRDGMAADGVSQRKYNYMRAEQIYRDEQGLSLMPHTAQPVLPAQNQALPPEVRAFFNAGRTR

SEQ ID NO: 14978 - protein, 233 aa, Escherichia coli
MSKFVIFLVFLFISCSSLAAGAFGPTENRLIFDGSKSFISYQISNSDKKIPWLVQAWVEDAKENRTNDFTAAPLVFRVEPSSQFSARLIKKGSVREDQETIYWVVSNAIPGGEEVKTEQERGKISAKLSLAYRYKVPMIYRPKSLSNINKEPESLNWTTNKDGHVKVYNPSRYVVQINHVDINGQRKQGDGISYLIPPMATVDMAIKASVNTKIKYGVINDYGAVNEYEGTVQ

SEQ ID NO: 14979 - protein, 175 aa, Escherichia coli
RGALRQNGDGVGGSITYDYEGFGIGGAISSSKRTDDQNSPLYIGNGDRAETYTGGLKYDANNIYLAAQYTQTYNATRVGSLGWANKAQNFEAVAQYQFDFGLRPSLAYLQSKGKNLGRGYDDEDILKYVDVGATYYFNKNMSTYVDYKINLLDDNQFTRDAGINTDNIVALGLVY

SEQ ID NO: 14980 - protein, 64 aa, Escherichia coli
MKKMFMAVLFALVSVNAMAADCAKGKIEFSKYNENDTFTVKVAGKEYWTNRWNLQPLLQSAQLT

SEQ ID NO: 14981 - protein, 64 aa, Escherichia coli
MKKIFVAALFAFVSVNAMAADCAKGKIEFSKYNENDTFTVKVAGKEYWTNRWNLQPLLQSAQLT

SEQ ID NO: 14982 - protein, 89 aa, Escherichia coli
MKKTLLIAASLSFFSASALATPDCVTGKVEYTKYNDDDTFTAKVGDKELFTNRWNLQSLLLSAQITGMTVTIKTNACHNGGGFSEVIFR

SEQ ID NO: 14983 - protein, 124 aa, Escherichia coli
MNKVKFYVLFTVLLSSLCAHGAPQSITELCSEYRNTQIYTINDKILSYTESMAGKREMVIITFKSGATFQVEVPGSQHIDSQKKAIERMKDTLRIAYLTETKIDKLCVWNNKTPNSIAAISMEN

SEQ ID NO: 14984 - protein, 241 aa, Escherichia coli
MSNKNVNVRKSQEITFCLLAGILMFMAMMVAGRAEAGVALGATRVIYPAGQKQVQLAVTNNDENSTYLIQSWVENADGVKDGRFIVTPPLFAMKGKKENTLRILDATNNQLPQDRESLFWMNVKAIPSMDKSKLTENTLQLVIISRIKLYYRPAKLALPPDQAAEKLRFRRSANSLTLINPTPYYLTVTELNAGTRILENALVPPMGESTVKLPSDAGSNITYRTINDYGALTPKMTGVME

SEQ ID NO: 14985 - protein, 85 aa, Escherichia coli
FMAVLFALVSVNAMAADCAKGKIEFSKYNENDTFTVKVAGKEYWTSRWNLQPLLQSAQLTGMTVTIKSSTCASGSGFAEVQFNND

SEQ ID NO: 14986 - protein, 246 aa, Escherichia coli; identical to SEQ ID NO: 3838

SEQ ID NO: 14987 - protein, 181 aa, Escherichia coli
GSSLNDLVRTADELGIEVQYDEKNGTAITKQVFGTAEKLIGLTERGVAIFAPQLDKLLQKYQKAGNKLGGSAENIGDNLGKAGSVLSTFQNFLGAALSSMKIDELIKKQKSGNNVSSSELAKASIELINQLVDTAASINNNVNSFSQQLNKLGSVLSNTKHLNGVGNKLQNLPNLDNIGAG

SEQ ID NO: 14988 - protein, 42 aa, Escherichia coli
WTSRWNLQPLLQSAQLTGMTVTIKSSTCASGSGFAEVQFNND

SEQ ID NO: 14989 - protein, 43 aa, Escherichia coli
ILDQSLESATATASAQLTGMTVTIKSSTCASGSGFAEVQFNND

SEQ ID NO: 14990 - protein, 65 aa, Escherichia coli
MKKMFMAVLFALVSVNAMAADCAKGKIEFSKYNEDDTFTVKVAGKEYWTSRWNLQPLLQSAQLTG

SEQ ID NO: 14991 - protein, 362 aa, Escherichia coli; identical to SEQ ID NO: 4554

SEQ ID NO: 14992 - protein, 207 aa, Escherichia coli
MSLLEVIIVLGIIGTIAAGVVILAQRAFDSRAVTELVTNTNTVRVAMKDAYQRDGAYPDYLSPLSLTADTINTTTDKIPAAQLVQLGKISPDEVRNNISGDFIGIGGAKTSAAATVNKGFVIELNGLSQEQCRTILGQVGNNWEYVAVGNSASGAYSLTNTALDMTTAANGTSILRSLGANSQDTLTAEKILATCTATVNSITLGSR

SEQ ID NO: 14993 - protein, 998 aa, Escherichia coli
MTVNKIKNIFNNAALTTKSAFNTASSSVRSAGKKLILLIPDNYEAQGVGINELVKAADELGIEIHRTERDDTAIANQFFGTAEKVVGLTERGVAIFAPQLDKLLQKYQKVGSKIGGTAENVGNNLGKAGTVLSPLQNFTGIALSGMALDELLRKQREGEDISQNDIAKSSIELINQLVDTVSSINSTVDSFSEQLNQLGSFLSSKPRLSSVGGKLQNLPDLGPLGDGLDVVSGILSAVSASFILGNSDAHTGTKAAAGIELTTQVLGNVGKAVSQYILAQRIAQGLSTTAASAGLITSAVMLAISPLSFLAIADKFERAKQLESYSERFKKLNYEGDALLAAFHKETGAIDAALTTINTVLSSVSAGVSAASSASLIGAPISMLVSALTGTISGILEASKQAMFEHVADKFAARINEWEKEHGKNYFENGYDARHAAFLEDSLSLLADFSRQHAVERAVAITQQHWDEKIGELAGITRNADRSQSGKAYINYLENGGLLAAQPKEFTQQVFDPQKGTIDLSTGNVSSVLTFVTPTFTPGEEVRERKQSGKYEYMTSLIVNGKDTWSVKGIKNHKGVYDYSNLIQFVEKDNKHYQARIISELGDKDDIVYSGAGSSEVFAGEGHDTVSYNKTDVGKLTIDATGASKPGEYIVSKNMYGDVKVLQEVVKEQEVSVGKRTEKIQYRDFEFRTGGIPYDVIDNLHSVEELIGGKHDDEFKGGKFNDIFHGADGNDYIEGNYGNDRLYGDDGDDYISGGQGDDQLFGGSGNDKLSGGDGNNYLTGGSGNDELQAHGAYNILSGGTGDDKLYGGGGIDLLDGGEGNDYLNGGFGNDIYVYRQNYGHHTIADEGGKGDRLHLSDISFDDIAFKRVGNDLIMNKAINGVLSFNESNDVNGITFKNWFAKDASGADNHLVEVITDKDGREIKADKIPHNNNERSGYIKASNIASEKNMVNITSVADDINKIISSVSGFDSGDERLASLYNLSLHQNNTHSTTLTTTV

SEQ ID NO: 14994 - protein, 232 aa, Escherichia coli; identical to SEQ ID NO: 9194

SEQ ID NO: 14995 - protein, 1024 aa, Escherichia coli
MPTITTAQIKSTLQSAKQSAANKLHSAGQSTKDALKKAAEQNRNAGNRLILLIPKDYKGQGSSLNDLVRTADELGIEVQYDEKNGTAITKQVFGTAEKLIGLTERGVTIFAPQLDKLLQKYQKAGNKLGGSAENIGDNLGKAGSVLSTFQNFLGTALSSMKIDELIKKQKSGSNVSSSELAKASIELINQLVDTAASINNNVNSFSQQLNKLGSVLSNTKHLNGVGNKLQNLPNLDNIGAGLDTVSGILSVISASFILSNADADTGTKAAAGVELTTKVLGNVGKGISQYIIAQRAAQGLSTSAAAAGLIASAVTLAISPLSFLSIADKFKRANKIEEYSQRFKKLGYDGDSLLAAFHKETGAIDASLTTISTVLASVSSGISAAATTSLVGAPVSALVGAVTGIISGILEASKQAMFEHVASKMADVIAEWEKKHGKNYFENGYDARHAAFLEDNFKILSQYNKEYSVERSVLITQQHWDTLIGELAGVTRNGDKTLSGKSYIDYYEEGKRLEKKPDEFQKQVFDPLKGNIDLSDSKSSTLLKFVTPLLTPGEEIRERRQSGKYEYITELLVKGVDKWTVKGVQDKGSVYDYSNLIQHASVGNNQYREIRIESHLGDGDDKVFLAAGSANIYAGKGHDVVYYDKTDTGYLTIDGTKATEAGNYTVTRVLGGDVKVLQEVVKEQEVSVGKRTEKTQYRSYEFTHINGTDLTETDNLYSVEELIGTNRADKFFGSKFTDIFHGADGDDHIEGNDGNDRLYGDKGNDTLRGGNGDDQLYGGDGNDKLTGGVGNNYLNGGDGDDELQVQGNSLAKNVLSGGKGNDKLYGSEGADLLDGGEGNDLLKGGYGNDIYRYLSGYGHHIIDDDGGKDDKLSLADIDFRDVAFKREGNDLIMYKAEGNVLSIGHKNGITFRNWFEKESGDISNHQIEQIFDKDGRVITPDSLKKAFEYQQSNNQANYVYGEYASTYADLDNLNPLINEISKIISAAGNFDVKEERSAASLLQLSGNASDFSYGRNSITLTASA

SEQ ID NO: 14996 - protein, 230 aa, Escherichia coli
MNKLGKVALTALLSVSFCNQAMAAFVLNGTRFIYEEGKKNVSFEVTNNADKTYGGQVWIDNTNQGNGVYMVPQPPFFKVGAKQKQIIRIINTDSNLPKDRESLFWLNVQEVPPKPEVKDSDEGVLAIAMNSRVKLIYRPASIKNGRQDAEKQLKMELRGDTTWLKNPTPYYMAIISVKHDGKDISLSDNVMKEIAQLRPFSDVNLGRVVRDKISVDAVNDWGGVQSYEIP

SEQ ID NO: 14997 - protein, 512 aa, Escherichia coli
MKKISFFIFTALFCCSAQAAPSSLEKRLGKNEYFIITKSSPVRAILNDFAANYSIPVFISSSVNDDFSGEIKNEKPVKVLEKLSKLYHLTWYYDENILYIYKTNEISRSIITPTYLDIDSLLKYLSDTISVNKNSCNVRKITTFNSIEVRGVPECIKYITSLSESLDKEAQSKAKNKDVVKVFKLNYASATDITYKYRDQNVVVPGVVSILKTMASNGSLPSTGKGAVERSGNLFDNSVTISADPRLNAVVVKDREITMDIYQQLISELDIEQRQIEISVSIIDVDANDLQQLGVNWSGTLNAGQGTIAFNSSTAQVNISSSVISNASNFMIRVNALQQNSKAKILSQPSIITLNNMQAILDKNVTFYTKVSGEKVASLRSITSGTLLRVTPRILDDSSNSLTGKRRERVRLLLDIQDGNQSTNQSNAQDASSTLPEVQNSEMTTEATLSAGESLLLGGFIQDKESSSKDGIPLLSDIPVIGSLFSSTVKQKHSVVRLFLIKATPIKSASSE

SEQ ID NO: 14998 - protein, 119 aa, Escherichia coli; identical to SEQ ID NO: 5512

SEQ ID NO: 14999 - protein, 89 aa, Escherichia coli
MKKMFMAVLFALVSVNAMAADCAKGKIEFSKYNGDNTFTIKVDGKEYWTNRWNLQPLLQSAQLTGMTVTIKSNTCDSGSGFAEVQFNND

SEQ ID NO: 15000 - protein, 258 aa, Escherichia coli
MKNITFIFFILLASPLYANGDKLYRADSRPPDEIKHSGGLMPRGHNEYFDRGTQININLYDHARGTQTGFVRYDDGYVSTSLSLRSAHLAGQSILSGYSTYYIYVIATAPNMFNVNDVLGVYSPHPYEQEVSALGGIPYSQIYGWYRVNFGVIDERLHRNREYRDRYYRNLNIAPAEDGYRLAGFPPDHQAWREEPWIHHAPQGCGNSSRTITGDTCNEETQNLSTIYLRKYQSKVKRQIFSDYQSEVDIYNRIRDEL

SEQ ID NO: 15001 - protein, 119 aa, Escherichia coli; identical to SEQ ID NO: 13496

SEQ ID NO: 15002 - protein, 240 aa, Escherichia coli
SNKNVNVRKSQEITFCLLAGILIFMAMMVAGRAEAGVALGATRVIYPAGQKQVQLAVTNNDENSTYLIQSWVENADGVKDGRFIVTPPLFAMKGKRENTLRILDATNNQLPQDRESLFWMNVKAIPSMDKSKLTENTLQLAIISRIKLYYRPAKLALPPDQAAEKLRFRRSANSLTLINPTPYYLTVTELNAGARVLENALVPPMGESTVKLPSDAGSNITYRTINDYGALTPKMTGVME

SEQ ID NO: 15003 - protein, 177 aa, Escherichia coli
ASSSVRSAGKKLILLIPDNYEAQGVGINELVKAADELGTEIHRTERDDTAIANQFFGTAEKVVGLTERGVAIFAPQLDKLLQKYQKVGSKIGGTAENVGNNLGKAGTVLSALQNFTGIALSGMALDELLRKQREGEDISQNDIAKSSIELINQLVDTVSSINSTVDSFSEQLNQLGS

SEQ ID NO: 15004 - protein, 124 aa, Escherichia coli
  MOD_RES (42)..(42): Any amino acid
MNKVKCYVLFTALLSSLYAHGAPQTITELCSEYRNTQIYTIXDKILSYTESMAGKREMVIITFKSGETFQVEVPGSQHIDSQKKAIERMKDTLRITYLTETKIDKLCVWNNKTPISIAAISMEN

SEQ ID NO: 15005 - protein, 89 aa, Escherichia coli
MKKMFMAVLFALASVNAMAADCAKGKIEFSKYNEDDTFTVKVDGKEYWTSRWNLQPLLQSAQLTGMTVTLKSSTCESGSGFAEVQFNND

SEQ ID NO: 15006 - protein, 89 aa, Escherichia coli
  MOD_RES (24)..(24): Any amino acid
  MOD_RES (66)..(66): Any amino acid
MKKMFMAVLFALASVNAMAADCAXGKIEFSKYNEDDTFTVKVDGKEYWTSRWNLQPLLQSAQLTGXTVTIKSSTCESGSGFAEVQFNND

SEQ ID NO: 15007 - protein, 733 aa, Escherichia coli; identical to SEQ ID NO: 4570

SEQ ID NO: 15008 - protein, 241 aa, Escherichia coli; identical to SEQ ID NO: 6961

SEQ ID NO: 15009 - protein, 258 aa, Escherichia coli
MKNITFIFFILLASPLYANGDKLYRADSRPPDEIKRSGGLMPRGHNEYFDRGTQMNINLYDHARGTQTGFVRYDDGYVSTSLSLRSAHLAGQSILSGYSTYYIYVIATAPNMFNVNDVLGVYSPHPYEQEVSALGGIPYSQIYGWYRVNFGVIDERLHRNREYRDRYYRNLNIAPAEGGYRLAGFPPDHQAWREEPWIHHAPQGCGNLSRTITDDTCNEETQNLSTIYLREYQSKVKRQIFTDYQSEVDIYNRIRDEL

SEQ ID NO: 15010 - protein, 200 aa, Escherichia coli; identical to SEQ ID NO: 1789

SEQ ID NO: 15011 - protein, 1023 aa, Escherichia coli
MTTITTAQIKSTLQSAKQSAANKLHSAGQSTKDALKKAAEQTRNAGNRLILLIPKDYKGQGSSLNDLVRTADELGIEVQYDEKNGTAITKQVFGTAEKLIGLTERGVTIFAPQLDKLLQKYQKAGNILGGGAENIGDNLGKAGGILSTFQNFLGTALSSMKIDELIKKQKSGGNVSSSELAKASIELINQLVDTVASLNNVNSFSQQLNTLGSVLSNTKHLNGVGNKLQNLPNLDNIGAGLDTVSGILSAISASFILSNADADTRTKAAAGVELTTKVLGNVGKGISQYIIAQRAAQGLSTSAAAAGLIASAVTLAISPLSFLSIADKFKRANKIEEYSQRFKKLGYDGDSLLAAFHKETGAIDASLTTISTVLASVSSGISAAATTSLVGAPVSALVGAVTGIISGILEASKQAMFEHVASKMADVIAEWEKKHGKNYFENGYDARHAAFLEDNFKILSQYNKEYSVERSVLITQQHWDTLIGELAGVTRNGDKTLSGKSYIDYYEEGKRLEKKPDEFQKQVFDPLKGNIDLSDSKSSTLLKFVTPLLTPGEEIRERRQSGKYEYITELLVKGVDKWTVKGVQDKGAVYDYSNLIQHASVGNNQYREIRIESHLGDGDDKVFLSAGSANIYAGKGHDVVYYDKTDTGYLTIDGTKATEAGNYTVTRVLGGDVKVLQEVVKEQEVSVGKRTEKTQYRSYEFTHINGKNLTETDNLYSVEELIGTTRADKFFGSKFTDIFHGADGDDLIEGNDGNDRLYGDKGNDTLSGGNGDDQLYGGDGNDKLIGVAGNNYLNGGDGDDEFQVQGNSLAKNVLFGGKGNDKLYGSEGADLLDGGEGDDLLKGGYGNDIYRYLSGYGHHIIDDDGGKEDKLSLADIDFRDVAFKREGNDLIMYKGEGNVLSIGHKNGITFRNWFEKESGDISNHEIEQIFDKSGRIITPDSLKKALEYQQRNNKASYVYGNDALAYGSQGDLNPLINEISKIISAAGSFDVKEERTAASLLQLSGNASDFSYGRNSITLTTSA

SEQ ID NO: 15012 - protein, 375 aa, Escherichia coli
MKVKVLSLLVPALLVAGAANAAEVYNKDGNKLDLYGEVDGLHYFSDDKSVDGDQTYMRLGFKGETQVTDQLTGYGQWEYQIQGNAPESENNSWTRVAFAGLKFQDIGSIDYGRNYGVVYDVTSWTDVLPEFGGDTYDSDNFMQQRGNGFATYRNTDFFGLVDGLNFAVQYQGQNGSVSGENDPDFTGHGITNNGRKALRQNGDGVGGSITYDYEGFGIGGAISSSKRTWDQNNTGLIGTGDRAETYTGGLKYDANNIYLAAQYTQTYNATRVGSLGWANKAQNFEAVAQYQFDFGLRPSVAYLQSKGKNLGVIKGRNYDDEDILKYVDVGATYYFNKNMSTYVDYKINLLDDNRFTRDAGINTDDIVALGLVYQF

SEQ ID NO: 15013 - protein, 79 aa, Escherichia coli
MFFPQLALAAQGAGQDLMQSGNSTVKATFGKDSSVVKWVVLAEVLVGAVMYMMTKNVKFLAGFAIISVFIAVGMAVVGL

SEQ ID NO: 15014 - protein, 247 aa, Escherichia coli
MKMRAVAVFTGMLTGVLSVTGLLSAGAYAAGGEGNMSASATETNARVFSLHLGATRVVYNPASSGETLTVINDQDYPMLVQSEVLSEDQKSPAPFVVTPPLFRLDGQQSSRLRIVRTGGEFPSDRESLQWICVKGIPPKEGDRWAEGKDGEKKADKVTLNVQLSVSSCIKLFVRPPAVKGRPDDVAGKVEWQRAGNRLKGVNPTPFYINLSALTVGGKEVKEHEYIAPFSSREYPLPAGHRVRFSGR

SEQ ID NO: 15015 - protein, 367 aa, Escherichia coli; identical to SEQ ID NO: 13162

SEQ ID NO: 15016 - protein, 998 aa, Escherichia coli; identical to SEQ ID NO: 4621

SEQ ID NO: 15017 - protein, 89 aa, Escherichia coli
MKKMFMAVLFALVSVNAMAADCAKGKIEFSKYNEDDTFTVKVDGEEYWTSRWNLQPLLQSAQLTGMTVTIKSSTCESGSGFAEVQFNND

SEQ ID NO: 15018 - protein, 230 aa, Escherichia coli
MFKKSILLFFISSSAIAGAFGPRESKLIFESDKAYIQYRIDNTGKDMPWLVQAWVEDSKEKKTKEFTPTPLVFRVEPSSVFSVRVMKTGSPDEHKETLYWIVSNSLPGGDKTELKSHDDKITAKMNLAYRFKVPMFYRPISLKNIPQQPENLEWSVDGKGKVKVKNSSRYIVQLQSINIHNSLHQGKGVSYFINPMSDVALNVSAKSGTKIHYSVINDYGAVKEYEGVIK

SEQ ID NO: 15019 - protein, 89 aa, Escherichia coli
MKKMFMAVLFALASVNAMAADRAKGKIEFSKYNEDDTFTVKVDGKEYWTSRWNLQPLLQSAQLTGMTVTIKSSTCESGSGFAEVQFNND

SEQ ID NO: 15020 - protein, 673 aa, Escherichia coli
MKMTRLYPLALGGLLLPTIANAQTSQQDESTLEVTASKQSSRSASANNVSSTVVSAPELSDAGVTASDKLPRVLPGLNIENSGNMLFSTISLRGVSSAQDFYNPAVTLYVDGVPQLSTNTIQALTDVQSVELLRGPQGTLYGKSAQGGIINIVTQQPDSTPRGYIEGGVSSRDSYRSKFNLSGPIQDGLLYGSVTLLRQVDDGDMINPATGSDDLGGTRASIGNVKLRLAPDDQPWEMGFAASRECTRATQDAYVGWNDIKGRKLSLSDGSPDPYMRRCTDSQTLSGKYTTDDWVFNLISAWQQQHYSRTFPSGSLIVNMPQRWNQDVQELRAATLGDARTVDMVFGLYRQNTREKLNSAYNMPTMPYLSSTGYTTAETLAAYSDLTWHLTDRFDIGGGVRFSHDKSSTQYHGSMLGNPFGDQGKSNDDQVLGQLSAGYMLTDDWRVYTRVAQGYKPSGYNIVPTAGLDAKPFVAEKSINYELGTRYETADVTLQAATFYTHTKDMQLYSGPVGMQTLSNAGKADATGVELEAKWRFAPGWSWDINGNVIRSEFTNDSELYHGNRVPFVPRYGAGSSVNGVIDTRYGALMPRLAVNLVGPHYFDGDNQLRQGTYATLDSSLGWQATERMNISVYVDNLFDRRYRTYGYMNGSSAVAQVNMGRTVGINTRIDFF

SEQ ID NO: 15021 - protein, 1024 aa, Escherichia coli
MPTITTAQIKSTLQSAKQSAANKLHSAGQSTKDALKKAAEQTRNAGNRLILLIPKDYKGQGSSLNDLVRTADELGIEVQYDEKNGTAITKQVFGTAEKLIGLTERGVTIFAPQLDKLLQKYQKAGNKLGGSAENIGDNLGKAGSVLSTFQNFLGTALSSMKIDELIKKQKSGSNVSSSELAKASIELINQLVDTAASINNNVNSFSQQLNKLGSVLSNTKHLNGVGNKLQNLPNLDNIGAGLDTVSGILSAISASFILSNADADTGTKAAAGVELTTKVLGNVGKGISQYIIAQRAAQGLSTSAAAAGLIASVVTLAISPLSFLSIADKFKRANKIEEYSQRFKKLGYDGDSLLAAFHKETGAIDASLTTISTVLASVSSGISAAATTSLVGAPVSALVGAVTGIISGILEASKQAMFEHVASKMADVIAEWEKKHGKNYFENGYDARHAAFLEDNFKILSQYNKEYSVERSVLITQQHWDTLIGELAGVTRNGDKTLSGKSYIDYYEEGKRLEKKPDEFQKQVFDPLKGNIDLSDSKSSTLLKFVTPLLTPGEEIRERRQSGKYEYITELLVKGVDKWTVKGVQDKGSVYDYSNLIQHASVGNNQYREIRIESHLGDGDDKVFLSAGSANIYAGKGHDVVYYDKTDTGYLTIDGTKATEAGNYTVTRVLGGDVKVLQEVVKEQEVSVGKRTEKTQYRSYEFTHINGKNLTETDNLYSVEELIGTTRADKFFGSKFTDIFHGADGDDHIEGNDGNDRLYGDKGNDTLSGGNGDDQLYGGDGNDKLIGGAGNNYLNGGDGDDELQVQGNSLAKNVLSGGKGNDKLYGSEGADLLDGGEGNDLLKGGYGNDIYRYLSGYGHHIIDDDGGKDDKLSLADIDFRDVAFRREGNDLIMYKAEGNVLSIGHKNGITFRNWFEKESGDISNHQIEQIFDKDGRVITPDSLKKALEYQQSNNKASYVYGNDALAYGSQDNLNPLINEISKIISAAGNFDVKEERAAASLLQLSGNASDFSYGRNSITLTASA

SEQ ID NO: 15022 - protein, 222 aa, Escherichia coli; identical to SEQ ID NO: 1956

SEQ ID NO: 15023 - protein, 240 aa, Escherichia coli
SNKNVNVRKSQEITFCLLAGILMFMAMMVAGRAEAGVALGATRVIYPAGQKQVQLAVTNNDENSTYLIQSWVENADGVKDGRFIVTPPLFAMKGKRENILRILDATNNQLPQDRESLFWMNVKAIPSMDKSKLTENTLQLAIISRIKLYYRPAKLALPPDQAAEKLRFRRSANSLTLINPTPYYLTVTELNAGTRVLENALVPPMGESTVKLPSDAGSNITYRTINDYGALTPKMTGVME

SEQ ID NO: 15024 - protein, 650 aa, Escherichia coli
MKGLNKITCCLLAALLMPCAGHAENEQYGANFNNADIRQFVEIVGQHLGKTILIDPSVQGTISVRSNDTFSQQEYYQFFLSILDLYGYSVITLDNGFLKVVRSANVKTSPGMIADSSRPGVGDELVTRIVPLENVPARDLAPLLRQMMDAGSVGNVVHYEPSNVLILTGRASTINKLIEVIKRVDVIGTEKQQIIHLEYASAEDLAEILNQLISESHGKSQMPALLSAKIVADKRTNSLIISGPEKARQRITSLLKSLDVEESEEGNTRVYYLKYAKATNLVEVLTGVSEKLKDEKGNSRKPSSTSAMDNVAITADEQTNSLVITADQSVQEKLATVIARLDIRRAQVLVEAIIVEVQDGNGLNLGVQWANKNVGAQQFTNTGLPVFNAAQGVADYKKNGGITSANPAWDMFSAYNGMAAGFFNGDWGVLLTALASNNKNDILATPSIVTLDNKLASFNVGQDVPVLSGSQTTSGDNVFNTVERKTVGTKLKVTPQVNEGDAVLLEIEQEVSSVDSSSNSTLGPTFNTRTIQNAVLVKTGETVVLGGLLDDFSKEQVSKVPLLGDIPLVGQLFRYTSTERAKRNLMVFIRPTIIRDDDVYRSLSKEKYTRYRQEQQLRIDGKSKALVGSEDLPVLNENTFNSHAPAPSSR

SEQ ID NO: 15025 - protein, 111 aa, Escherichia coli; identical to SEQ ID NO: 3419

SEQ ID NO: 15026 - protein, 725 aa, Escherichia coli
MISKKYTLWALNPLLLTMMAPAVAQRTDDETFVVSANRSNRTVAEMAQTTWVIENAELEQQIQGGKELKDALAQLIPGLDVSSRSRTNYGMNVRGRPLVVLVDGVRLNSSRTDSRQLDSIDPFNIDHIEVISGATSLYGGGSTGGLINIVSKKGQPETMKEFEAGTKSGFSSSKDHDERIAGAVSGGNEHISGRLSVAYQKFGGWFDGNGDATLLDNTQTGLQYSDRLDIMGTGTLNIDESRQLQLITQYYKSQGDDDYGLNLGKGFSAIRGTSTPFVSNGLNSDRIPGTERHLISLQYSDSAFLGQELVGQVYYRDESLRFYPFPTVNANKQVTAFSSSQQDTDQYGMKLTLNSKPMDGWQITWGLDADHERFTSNQMFFDLAQASASGGLNNKKIYTTGRYPSYDITNLAVFLQSGYDINNLFTLNGGVRYQYTENKIDDFIGYAQQRQIAAGKAISADAIPGGSVDYDNFLFNAGLLMHITERQQAWLNFSQGVELPDPGKYYGRGIYGAAVNGHLPLTKSVNVSDSKLEGVKVDSYELGWRFTGNNLRTQIAAYYSISDKSVVANKDLTISVVDDKRRIYGVEGAVDYLIPDTDWSTGVNFNVLKTESKVNGTWQKYDVKTASPSKATVYIGWAPDPWSLRVQSTTSFDVSDAQGYKVDGYTIVDLLGSYQLPVGTLSFSIENLFDRDYTTVWGQRAPLYYSPGYGPASLYGDKGRGPPLV

SEQ ID NO: 15027 - protein, 758 aa, Escherichia coli
SFILGNSDAHTGTKAAAGIELTTQVLGNVGKAVSQYILAQRMAQGLSTTAASAGLITSAVMLAISPLSFLAAADKFERAKQLESYSERFKKLNYEGDALLAAFHKETGAIDAALTTINTVLSSVSAGVSAASSASLIGAPISMLVSALTGTISGILEASKQAMFEHVAEKFAARINEWEKEHGKNYFENGYDARHAAFLEDSLSLLADFSRQHAVERAVAITQQHWDEKIGELAGITRNADRSQSGKAYINYLENGGLLEAQPKEFTQQVFDPQKGTIDLSTGNVSSVLTFITPTFTPGEEVRERKQSGKYEYMTSLIVNGKDTWSVKGIKNHKGVYDYSKLIQFVEKNNKHYQARIISELGDKDDVVYSGAGSSEVFAGEGYDTVSYNKTDVGKLTIDATGASKPGEYIVSKNMYGDVKVLQEVVKEQEVSVGKRTEKIQYRDFEFRTGGIPYDVIDNLHSVEELIGGKHDDEFKGGKFNDIFHGADGNDYIEGNYGNDRLYGDDGDDYISGGQGDDQLFGGSGNDKLSGGDGNNYLTGGSGNDELQAHGAYNILSGGTGDDKLYGGGGIDLLDGGEGNDYLNGGFGNDIYVYGQNYGHHTIADEGGKGDRLHLSDISFDDIAFKRVGNDLIMNKAINGVLSFNESNDVNGITFKNWFAKDASGADNHLVEVITDKDGREIKVDKIPHNNNERSGYIKASNIASEKNMVNITSVANDINKIISSVSGFDSGDERLASLYNLSLHQNNTHSTTLTTTV

SEQ ID NO: 15028 - protein, 84 aa, Escherichia coli
MKKMFMAVLFALVSVNAMAADCAKGKIEFSKYNENDTFTVKVAGKEYWTSRWNLQPLLQSAQLTGMTVTIKSSTCESGSGFAEV

SEQ ID NO: 15029 - protein, 713 aa, Escherichia coli
MAMFTPSFSGLKGRALFSLLFAAPMIHATDSVTTKDGETITVTADANTATEATDGYQPLSTSTATLTDMPMLDIPQVVNTVSDQVLENQNATTLDEALYNVSNVVQTNTLGGTQDAFVRRGFGTNRDGSIMTNGLRTVLPRSFNAATERVEVLKGPASTLYGILDPGGLINVVTKRPEKTFHGSVSATSSSFGGGTGQLDITGPIEGTQLAYRLTGEVQDEDYWRNFGKERSTFIAPSLTWFGDNATVTMLYSHRDYKTPFDRGTIFDLTTKQPVNVDRKIRFDEPFNITDGQSDLAQLNAEYHLNSQWTARFDYSYSQDKYSDNQARVTAYDATTGTLTRRVDATQGSTQRMHATRADLQGNVDIAGFYNEILGGVSYEYYDLLRTDMIRCKKAKDFNIYNPVYGNTSKCTTVSASDSDQTIKQESYSAYAQDALYLTDNWIAVAGIRYQYYTQYAGKGRPFNVNTDSRDEQWTPKLGLVYKLTPSVSLFANYSQTFMPQSSIASYIGDLPPESSNAYEVGAKFELFDGITADIALFDIHKRNVLYTESVGDETIAKTAGRVRSRGVEVDLAGALTENINIIASYGYTDAKVLEDPDYAGKPLPNVPRHTGSLFLTYDIHNMPGNNTLTFGGGGHGVSRRSATNGADYYLPGYFVADAFAAYKMKLQYPVTLQLNVKNLFDKTYYTSSIATNNLGNQIGDPREVQFTVKMEF

SEQ ID NO: 15030 - protein, 351 aa, Escherichia coli
MKKSTLALVVMGIVASVSVQAAEIYNKDGNKLDVYGKVKAMHYMSDNDSKDGDQSYIRFGFKGETQINDQLTGYGRWEAEFAGNKAESDTAQQKTRLAFAGLKYKDLGSFDYGRNLGALYDVEAWTDMFPEFGGDSSAQTDNFMTKRASGLATYRNTDFFGVIDGLNLTLQYQGKNENRDVKKQNGDGFGTSLTYDFGGSDFAISGAYTNSDRTNEQNLQSRGTGKRAEAWATGLKYDANNIYLATFYSETRKMMPISGGFANKTQNFEAVAQYQFDFGLRPSLGYVLSKGKDIEGIGDEDLVNYVDVGATYYFNKNMSAFVDYKINQLDSDNKLNINNDDIVAVGMTYQF

SEQ ID NO: 15031 - protein, 332 aa, Escherichia coli; identical to SEQ ID NO: 2702

SEQ ID NO: 15032 - protein, 89 aa, Escherichia coli
MKKILLIAASLSFFSASVLAAPDCVTGNVEYTKYNDDDTFTVKVGDKELFTNRWNLQSLLLSAQITGMTVTIKTNACHNGRGFSEVIFR

SEQ ID NO: 15033 - protein, 998 aa, Escherichia coli
MTVNKIKNIFNNATLTTKSAFNTASSSVRSAGKKLILLIPDNYEAQGVGINELVKAADELGIEIHRTERDDTAIANQFFGAAEKVVGLTERGVAIFAPQLDKLLQKYQKVGSKIGGTAENVGNNLGKAGTVLSALQNFTGIALSGMALDELLRKQREGEDISQNDIAKSSIELINQLVDTVSSINSTVDSFSEQLNQLGSFLSSKPRLSSVGGKLQNLPDLGSLGDGLDVVSGILSAVSASFILGNSDAHTGTKAAAGIELTTQVLGNVGKAVSQYILAQRMAQGLSTTAASAGLITSAVMLAISPLSFLAAADKFERAKQLESYSERFKKLNYEGDALLAAFHKETGAIDAALTTINTVLSSVSAGVSAASSASLIGAPISMLVSALTGTISGILEASKQAMFEHVAEKFAARINEWEKEHGKNYFENGYDARHAAFLEDSLSLLADFSRQHAVERAVAITQQHWDEKIGELAGITRNADRSQSGKAYINYLENGGLLEAQPKEFTQQVFDPQKGTIDLSTGNVSSVLTFITPTFTPGEEVRERKQSGKYEYMTSLIVNGKDTWSVKGIKNHKGVYDYSKLIQFVEKNNKHYQARIISELGDKDDVVYSGAGSSEVFAGEGHDTVSYNKTDVGKLTIDATGASKPGEYIVSKNMYGDVKVLQEVVKEQEVSVGKRTEKIQYRDFEFRTGGIPYDVIDNLHSVEELIGGKHDDEFKGGKFNDIFHGADGNDYIEGNYGNDRLYGDDGDDYISGGQGDDQLFGGSGNDKLSGGDGNNYLTGGSGNDELQAHGAYNILSGGTGDDKLYGGGGIDLLDGGEGNDYLNGGFGNDIYVYRQNYGHHTIADEGGKGDRLHLSDISFDDIAFKRVGNDLIMNKPINGVLSFNESNDVNGITFKNWFAKDASGADNHLVEVITDKDGREIKVDKIPHNNNERSGYIKASNIASEKNMVNITSVANDINKIISSVSGFDPGDERLASLYNLSLHQNNTHSTTLTTTV

SEQ ID NO: 15034 - protein, 250 aa, Escherichia coli
MKIRTALLVSSLPLCFFVSANAKTFENEGNKTQMFSLHLGATRVIYNIFSSGETLTIINDYDYPMLVQSEVLLEDQKTPAPFIITPPLFRLDALQSSRLRIVRTGGDFPKDRETLQWICVKGIPPKSDEKWAESNKNSLNNVTLNVQVSLSTCIKMFVRPSSVKGHPEDVAGEVKWQRVNNKLKGVNPTPFYINLSELRVGGEEISEHHYIAPFSSFEYPIPVSKSSKVQWKIVTDYGGVSEFFETDINL

SEQ ID NO: 15035 - protein, 89 aa, Escherichia coli
  MOD_RES (48)..(48): Any amino acid
  MOD_RES (75)..(75): Any amino acid
  MOD_RES (85)..(85): Any amino acid
MKKMFMAVLFALASVNAMAADCAKGKIEFSKYNEDDTFTVKVDGKEYXDQSLNLQPLLQSAQLTGMTVTIKSSTXESGSGFAEGXFNND

SEQ ID NO: 15036 - protein, 61 aa, Escherichia coli
VLSFSPFAQDAKPAGSSKEKITLESKKCNIVKKNNESSPESMNGSNYCCELCCNPACTGCY

SEQ ID NO: 15037 - protein, 518 aa, Escherichia coli
MKKLKINYLFIGILALLLAVALWPSIPWFGKADNRIAAIQARGELRVSTIHTPLTYNEINGKPFGLDYELAKQFADYLGVKLKVTVRQNISQLFDDLDNGNADLLAAGLVYNSERVKNYQPGPTYYSVSQQLVYKVGQYRPRTLGNLTAEQLTVAPGHVVVNDLQTLKDTKFPELSWKVDDKKGSAELMEDVIEGKLDYTIADSVAISLFQRVHPELAVALDITDEQPVTWFSPLDGDNTLSAALLDFFNEMNEDGTLARIEEKYLGHGDDFDYVDTRTFLRAVDAVLPQLKPLFEKYAEEIDWRLLAAIAYQESHWDAQATSPTGVRGMMMLTKNTAQSLGITDRTDAEQSISGGVRYLQDMMSKVPESVPENERIWFALAAYNMGYAHMLDARALTAKTKGNPDSWADVKQRLPLLSQKPYYSKLTYGYARGHEAYAYVENIRKYQISLVGYLQEKEKQATEAAMQLAQDYPAVSPTELGKEKFPFLSFLSQSSSNYLTHTPSLLFSRKGSEEKQN

SEQ ID NO: 15038 - protein, 747 aa, Escherichia coli; identical to SEQ ID NO: 6089

SEQ ID NO: 15039 - protein, 104 aa, Escherichia coli
MAPQSITELCSEYRNTQIYTINDKILSYTESMAGKREMVIITFKSGATFQVEVPGSQHIDSQKKAIERMKDTLRITYLTETKIDKLCVWNNKTPNSIAAISMEN

SEQ ID NO: 15040 - protein, 241 aa, Escherichia coli
MYFYSEVSMKRIALFFCFIFSFAAHANNIIVNGTRFIYPGNEKEITVQLSNNADRPALAQAWLDNGDADATPDTITTPFIITPPISRVDAKSGQTLRIKLGSSAGLAKDKETLWWLNLLEIPPVVANQKNEGQNVLQLAIRSRFKFIYRPAGLGNRDAAAEKLTLTASGSSLAINNPTPFYITVSRISRDGGKALNSKTVMLAPQSSQTVALSSAVNRGETLTVNNINDYGADVAVKVAVK

SEQ ID NO: 15041 - protein, 241 aa, Escherichia coli
MSNKNVNVRKSQEITFCLLAGILIFMAMMVAGRAEAGVALGATRVIYPAGQKQVQLAVTNNDENSTYLIQSWVENADGVKDGRFIVTPPLFAMKGKKENTLRILDATNNQLPQDRESLFWMNVKAIPSMDKSKLTENTLQLAIISRIKLYYRPAKLALPPDQAAEKLRFRRSANSLTLINPTPYYLTVTELNAGARVLENALVPPMGESTVKLPSDAGSNITYRTINDYGAFTPKMTGVME

SEQ ID NO: 15042 - protein, 89 aa, Escherichia coli
MKKILLIAASLSFFSASVLAAPDCVTGKVEYTKYNDDDTFTVKVGDKELFTNRWNLQSLLLSAQIAGMTVTIKTNACHNGGGFSEVIFR

SEQ ID NO: 15043 - protein, 89 aa, Escherichia coli
MKKMFMAVLFALVSVNAMAADCAKGKIEFSKYNEDDTFTVKVDGKEYWTSRWNLQPLLQSAQLTGMTVTIKSSTCESGSGFAEVQFHND

SEQ ID NO: 15044 - protein, 168 aa, Escherichia coli
ITFCLLAGILMFMAMMVAGRAEAGVALGATRVIYPAGQKQEQLAVTNNDENSTYLIQSWVENADGVKDGRFIVTPPLFAMKGKKENTLRILDATNNQLPQDRESLFWMNVKAIPSMDKSKLTENTLQLAIISRIKLYYRPAKLALPPDQAAEKLRFRRSANSLTLINP

SEQ ID NO: 15045 - protein, 367 aa, Escherichia coli
MKVKVLSLMVPALLVAGAANAAEVYNKDGNKLDLYGKVDGLHYFSDNKDVDGDQTYMRLGFKGETQVTDQLTGYGQWEYQIQGNSAENENNSWTRVAFAGLKFQDVGSFDYGRNYGVVYDVTSWTDVLPEFGGDTYGSDNFMQQRGNGFATYRNTDFFGLVDGLNFAVQYQGKNGNPSGEGFTSGVTNNGRDALRQNGDGVGGSITYDYEGFGIGGAISSSKRTDAQNTAAYIGNGDRAETYTGGLKYDANNIYLAAQYTQTYNATRVGSLGWANKAQNFEAVAQYQFDFGLRPSLAYLQSKGKNLGRGYDDEDILKYVDVGATYYFNKNMSTYVDYKINLLDDNQFTRDAGINTDNIVALGLVYQF

SEQ ID NO: 15046 - protein, 700 aa, Escherichia coli; identical to SEQ ID NO: 11995

SEQ ID NO: 15047 - protein, 213 aa, Escherichia coli
MLSVYNRTQKMKEEARKKLAKYHELRKQRGMSLLEVIIVLGIIGTIAAGVVILAQRAFDSRAITELVTNTNTVRVAMKDAFQRDGVYPAYASPLSLTGDTIKTTPDKIAAAQLVKLGKITADEVRNNISGDFIGIGGAITTSGSKVLKGFAMELNGLSQEQCRSILGQVGNNWEYVGVGSSGSGTYSLNAAGVDMTQAADGSTILRSLGQDSQ

SEQ ID NO: 15048 - protein, 89 aa, Escherichia coli
  MOD_RES (24)..(24): Any amino acid
MKKMFMVVLFALVSVNAMAADCAXGKIEFSKYNENDTFTVKVAGKEYWTSRWNLQPLLQSAQLTGMTVTIKSSTCESGSGFAEVQFNND

SEQ ID NO: 15049 - protein, 53 aa, Escherichia coli
KYNDDDTFTVKVGDKELFTNRWNLQSLLLSAQITGMTVTIKTNACHNGGGFSE

SEQ ID NO: 15050 - protein, 505 aa, Escherichia coli
MYKKTTLAVLIALLTGATTVHAQTDISSIESRLAALEQRLKNAESRAQAAEARAKTAELQVQKLAETQQQNQLTTQEVAQRTVQLEQKSAENSGFEFHGYARSGLLMNDAGSSSKSGPYLTPAGETGGAVGRLGKEADTYVELNVEHKQTLDNGATTRFKAMLADGQRDYNDWTGGSSNLNIRQAFAELGALPSFTGAFQDSTVWAGKRFDRDNFDIHWLDSDVVFLAGTGGGIYDVKWNDTFRSNFSLYGRNFGDLDDIDNNVQNYILTMNHYAGPFQLMVSGLGAKDNDDRKDGNGDLIQTDAANTGVHALVGLHNDTFYGLREGTAKTALLYGHGLGAEVKGIGSDGALLSEANTWRFASYGTTPLGSGWYVAPAILAQSSKDRYVKGDSYEWVTFNTRLIKEVTQNFALAFEGSYQYMDLKPKGYQNHNAVNGSFYKLTFAPTLKANDINNFFSRPELRLFATWMDWSSKLDDFASNDAFGSSGFNTGGEWNFGVQMETWF

SEQ ID NO: 15051 - protein, 478 aa, Escherichia coli; identical to SEQ ID NO: 2409

SEQ ID NO: 15052 - protein, 729 aa, Escherichia coli; identical to SEQ ID NO: 10713

SEQ ID NO: 15053 - protein, 360 aa, Escherichia coli
MMKKYLALALIAPLLISCSTTKKGGTYNEAWVKDTNGFDILMGQFAHNIENIWGFKEVVIAGPKDYVKYTDQYQTRSHINFDDGTITIETIAGTEPAAHLRRAIIKTLLMGDDPSSVDLYSDVDDITISKEPFLYGQVVDNTGQPIRWEGRASNFADYLLKNRLKSRSNGLRIIYSVTINMVPNHLDKRAHKYLGMVRQASRKYGVDESLILAIMQTESSFNPYAVSRSDALGLMQVVQHTAGKDVFRSQGKSGTPSRSFLFDPTSNIDTGTAYLAMLNNVYLGGIDNPTSRRYAVITAYNGGAGSVLRVFSNDKIQAANIINTMTPGDVYQTLTTRHPSAESRRYLYKVNTAQKSYRRR

SEQ ID NO: 15054 - protein, 274 aa, Escherichia coli; identical to SEQ ID NO: 2301

SEQ ID NO: 15055 - protein, 306 aa, Escherichia coli
MHNVSTTTTGLSLAKILASTELGDNTIQAANDAANKLFSLTIADLTANKNINTTNAHSTSNILIPELKAPKSLNASSQLTLLIGNLIQILGEKSLTALTNKITAWKSQQQARQQKNLEFSDKINTLLSETEGLTRGYEKQINKLKNADSKIKGLENKINQIQTRLSELDPDSPEKKKLSREEIQLTIKKDAAVKDRTLIEQKTLSIHSKLTDKSMQLEKEIDSFSAFSNTASAEQLSTQQKSLTGLASVTQLMATFIQLVGKNNEESLKNDLALFQSLQESRKTEMERKSDEYAAEVRKAEELNRV

SEQ ID NO: 15056 - protein, 523 aa, Escherichia coli
MPMILVKKNPRGKVIRELSSEEETAVKTVCGLKKPATMAQHNLANDLLREMREYDAWLQCDCIPGDSPAMNFAALKNNTGTLYLSSFNHEHAPECPMYRQLSGNEEETSFGASRHPVSTRINYRNFLPPDDSNSVIRLQTRSAYHNGERSSVRKKRPRLGRLLLSLIEDAGLNKLDSLANPRIRTNYRECLDAIRQVTLQQEYIRGRSLSEIIHFRPGMSERSQERLMETLENSERHWPARRKHMFFQIFMAQHICRDAVEIHWANGNIQVFRPVRGISINGEAQGGIRPPYWVILAFCRSADGRIICSEGYAHALYQLTCPVHFAVQYQGKNGSAHGEGMTTNGRDDVFEQNGDGVGGSITYNYEGFGIGAAVSSSKRTWDQNNTGLIGTGDRAETYTGGLKYDANNIYLAAQYTQTYNATRVGSLGWANKAQNFEAVAQYQFDFGLRPSLAYLQSKGKNLGRGYDDEDILKYVDVGATYYFNKNMSTYVDYKINLLDDNRFTRDAGINTDDIVALGLVYQF

SEQ ID NO: 15057 - protein, 673 aa, Escherichia coli
MKMTRLYPLALGGLLLPAIANAQTSQQDESTLVVTASKQSSRSASANNVSSTVVSAPELSDAGVTASDKFPRVLPGLNIENSGNMLFSTISLRGVSSAQDFYNPAVTLYVDGVPQLSTNTIQALTDVQSVELLRGPQGTLYGKSAQGGIINIVTQQPDSTPRGYIEGGVSSRDSYRSKFNLSGPIQDGLLYGSVTLLRQVDDGDMINPATGSDDLGGTRASIGNVKLRLAPDDQPWEMGFAASRECTRATQDAYVGWNDIKGRKLSISDGSPDPYMRRCTDSQTLSGKYTTDDWVFNLISAWQQQHYSRTFPSGSLIVNMPQRWNQDVQELRAATLGDARTVDMVFGLYRQNTREKLNSAYDMPTMPYLSSTGYTTAETLAAYSDLTWHLTDRFDIGGGVRFSHDKSSTQYHGSMLGNPFGDQGKSNDDQVLGQLSAGYMLTDDWRVYTRVAQGYKPSGYNIVPTAGLDAKPFVAEKSINYELGTRYETADVTLQAATFYTHTKDMQLYSGPVGMQTLSNAGKADATGVELEAKWRFAPGWSWDINGNVIRSEFTNDSELYHGNRVPFVPRYGAGSSVNGVIDTRYGALMPRLAVNLVGPHYFDGDNQLRQGTYATLDSSLGWQATERMNISVYVDNLFDRRYRTYGYMNGSSAVAQVNMGRTVGINTRIDFF

SEQ ID NO: 15058 - protein, 89 aa, Escherichia coli
MKKMFMAVLFALVSVNAMAADCAKGKIEFSKYNENDTFTVKVAGKEYWTSRWNLQPLLQSAQLTGMTVTIKSSTCESGSGFAELQFNND

SEQ ID NO: 15059 - protein, 206 aa, Escherichia coli
MSLLEVIIVLGIIGTIAAGVVILAQRAFDSRAVTDLVTNTNTVRVAMKDAYQRDGVYPDYVSPLKLTSDTIKKDTGKIPAAQLVQLGKITPDEVRNNISGDFIAIGGALTSNGATVKKGFAIELNGLSQEQCRSILGQVGNNWEYVAVGNSASGSYAMQAAEVDMSVAATGDILRTLGTDGQTTLTADKILSTCTAQVNSITLGSR

SEQ ID NO: 15060 - protein, 179 aa, Escherichia coli
RKSQEITFCLLAGILMFMAMMVAGRAEAGVALGATRVIYPAGQKQVQLAVTNNDENSTYLIQSWVENADGVKDGRFIVTPPLFAMKGKKENTLRILDATNNQLPQDRESLFWMNVKAIPSMDKSKLTENTLQLAIISRIKLYYRPAKLALPPDQAAEKLRFRRSANSLTLINPTPYYLT

SEQ ID NO: 15061 - protein, 472 aa, Escherichia coli; identical to SEQ ID NO: 7769

SEQ ID NO: 15062 - protein, 412 aa, Escherichia coli; identical to SEQ ID NO: 9102

SEQ ID NO: 15063 - protein, 187 aa, Escherichia coli
RGALRQNGDGVGGSITYDYEGFGIGAAVSSSKRTDAQNGTYVVDNVTHNYIGTGDRAETYTGGLKYDANNIYLAAQYTQTYNATRVGSLGWANKAQNFEAVAQYQFDFGLRPSLAYLQSKGKNLGVINGRNYDDEDILKYVDVGATYYFNKNMSTYVDYKINLLDDNQFTRDAGINTDNIVALGLVY

SEQ ID NO: 15064 - protein, 240 aa, Escherichia coli
SNKNVNVRKSQEITFCLLAGILMFMAMMVAGRAEAGVALGATRVIYPAGQKQVQLAVTNNDENSTYLIQSWVENADGVKDGRFIVTPPLFAMKGKKENTLRILDATNNQLPQDRESLFWMNVKAIPSMDKSKLTENTLQLAIISRIKLYYRPAKLALLPDQAAEKLRFRRSANSLTLINPTPYYLTVTELNAGTRVLENALVPPMGESTVKLPSDAGSNITYRTINDYGALTPKMTGVME

SEQ ID NO: 15065 - protein, 233 aa, Escherichia coli
MKRIALFFCFIFSFAAHANNIIVNGTRFIYPGNEKEITVQLSNTADRPALAQAWLDNGNADATPDTITTPFIITPPISRVDAKSGQTLRIKLGSNAGLAKDKETLWWLNLLEIPPVEASQKNEGQNILQLAIRSRFKFIYRPAGLGNRDAAAEKLALSANGSSLSVSNPTPFYITVSRISRNGGKALNSKTVMFAPQSSQTIALSSAVSKGETLTVNNINDYGADVAVKVTVK

SEQ ID NO: 15066 - protein, 89 aa, Escherichia coli
MKKMFMAVLFALVSVNAMAADCAKGKIEFSKYNENDTFTVKVAGKEYWTSRWNLQPLLQSAQLTGMTVTIKSSTCESGSGFAEVHLIMT

SEQ ID NO: 15067 - protein, 596 aa, Escherichia coli
MQGTITVRSYDMLNEEQYYQFFLSVLDVYGFAVVDMHNGILKVVRSKDAKTSAVPVASDVSPGTGDEVVTRVVPVSNVAARDLAPLLRQLNDNAGAGSVVHYEPSNVLLMTGRAAVMKRLMEIVERVDKVGNRSVATVPLTYASATDVARLVTELTKETDKTAIPAWMTAKLVADERTNSVLVSGEPISQQRIISIIKQLDRQEDVQGNTKVIYLKYAKAKDLVEVLTGISSSIENDSKKSPSTEALRKGVTIKSHEQTNALILTGAPDVIRDLENVISQLDIRRPQVLVEAIIAEIQDADGLNLGIQWVNKHAGVAQFTSTGLPITTMVQTRQNEILDSDQSNALSMFNGIAAGFYQGNWAMLLTALSTSSKNDILATPSIVTLDNMEATFNVGQEVPVLSGSQTTSGDNIFNTVERKTVGIKLRVKPQINEGDSVLLEIEQEVSGVADTAVATTTDLGATFNTRTVTNAMLVGNCETVVVGGLLDKSIRGSESKVPLLGDIPVLGHLFRAKSEQTAKRNLMLFIRPTIIRERDGFRHASAEKYQSFNQEQVQSRGKETTALTLNEEQLRLSPDQDDTAFRKVKAAIAAFYAQEM

SEQ ID NO: 15068 - protein, 61 aa, Escherichia coli
VLSFSPFAQDAKPVESSKEKITLESKKCNIAKKSNKSDPESMNSSNYCCELCCNPACTGCY

SEQ ID NO: 15069 - protein, 258 aa, Escherichia coli
MKNITFIFFILLASPLYANGDKLYRADSRPPDEIKRSGGLMPRGHNEYFDRGTQMNINLYDHARGTQTGFVRYDDGYVSTSLSLRSAHLAGQSILSGYSTYYIYVIATAPNMFNVNDVLGVYSPHPYEQEVSALGGIPYSQIYGWYRVNFGVIDERLHRNREYRDRYYRNLNIAPAEDGYRLAGFPPDHQAWREEPWIHHAPQGCGNSSRTITDDTCNEETQNLSTIYLRKYQSKVKRQIFSDYQSEVDIYNRIRDEL

SEQ ID NO: 15070 - protein, 732 aa, Escherichia coli
MMISKKYTLWALNPLLLTMMAPAVAQQTDDETFVVSANRSNRTVAEMAQTTWVIENAELEQQIQGGKELKDALAQLIPGLDVSSRSRTNYGMNVRGRPLVVLVDGVRLNSSRTDSRQLDSIDPFNIDHIEVISGATSLYGGGSTGGLINIVTKKGQPETMMEFEAGTKSGFSSSKDHDERIAGAVSGGNEHISGRLSVAYQKFGGWFDGNGDATLLDNTQTGLQYSDRLDIMGTGTLNIDESRQLQLITQYYKSQGDDDYGLNLGKGFSAIRGTSTPFVSNGLNSDRIPGTERHLISLQYSDSAFLGQELVGQVYYRDESLRFYPFPTVNANKQVTAFSSSQQDTDQYGMKLTLNSKPMDGWQIPWGLDADHERFTSNQMFFDLAQASASGGLNNKKIYTTGRYPSYDITNLAAFLQSGYDINNLFTLNGGVRYQYTENKIDDFIGYAQQRQIAAGKATSADALWRLSRLRHFLFNAGLLMHITERQQAWLNFSQGVELPDPGKYYGRGIYGAAVNGHLPLTKSVNVSDSKLEGVKVDSYELGWRFTGNNLRTQIAAYYSISDKSVVANKDLTISVVDDKRRIYGVEGAVDYLIPDTDWSTGVNFNVLKTESKVNGTWQKYDVKTASPSKATAYIGWAPDPWSLRVQSTTSFDVSDAQGYKVDGYTTVDLLGSYQLPVGTLSFSIENLFDRDYTTVWGQRAPLYYSPGYGPASLYDYKGRGRTFGLNYSVLF

SEQ ID NO: 15071 - protein, 247 aa, Escherichia coli; identical to SEQ ID NO: 1777

SEQ ID NO: 15072 - protein, 89 aa, Escherichia coli
  MOD_RES (9)..(9): Any amino acid
  MOD_RES (30)..(30): Any amino acid
  MOD_RES (72)..(72): Any amino acid
  MOD_RES (81)..(81): Any amino acid
MKKMFMAVXFALVSVNAMAADCAKGKIEFXKYNEDDTFTVKVDGKEYWISRWNLQPLLQSAQLTGMTVTIKXSTCESGSGXAEVQFNND

SEQ ID NO: 15073 - protein, 208 aa, Escherichia coli; identical to SEQ ID NO: 1948

SEQ ID NO: 15074 - protein, 89 aa, Escherichia coli
MKKMFMAVLFALASVNAMAADCAQGKIEFSKYNEDDTFTVKVDGKEYWTSRWNLQPLLQSAQLTGMTVTIKSSTCESGSGFAEVQFNND

SEQ ID NO: 15075 - protein, 357 aa, Escherichia coli
MMKRNILAVIVPALLVAGTANAAEIYNKDGNKVDLYGKAVGLHYFSKDNGVNSYGGNGDKTYARLGFKGETQINSDLTGYGQWEYNFQGNNSEGADAQKGNKTRLAFAGLKFADAGSIDYGRNYGVVYDALGYTDMLPEFGGDTAYSDDFFVGRVGGVATYRNSNFFGLVDGLNFAVQYLGKNERAGIPERSNGDGVGGSISYEFEGFGIVGAYGAADRTDAQEAEFRGQGKKAEQWATGLKYDANNIYLAANYGETRNATPIKGGFANKTQDVLLVAQYQFDFGLRPSIAYTKSKAKDVEGIGDVDLVNYFEVGATYYFNKNMSTYVDYIINQIDSDNKLGVGSDDTVAVGIVYQF

SEQ ID NO: 15076 - protein, 65 aa, Escherichia coli
MKKMFMAVLFALASVNAMAADCAKGKIEFSKYNEDDTFTVKVAGKEYWTSRWNLQPLLQSAQLTG

SEQ ID NO: 15077 - protein, 828 aa, Escherichia coli; identical to SEQ ID NO: 2390

SEQ ID NO: 15078 - protein, 998 aa, Escherichia coli
MTVNKIKNIFNNATSTTKSAFNTASSSVRSAGKKLILLIPDNYEAQGVGINELVKAADELGIEIHRTERDDTAIANQFFGTAEKVVGLTERGVAIFAPQLDKLLQKYQKVGSKIGGTAENVGNNLGKAGTVLSALQNFTGIALSGMALDELLRKQREGEDISQNDIAKSSIELINQLVDTVSSINSTVDSFSEQLNQLGSFLSSKPRLSSVGGKLQNLPDLGPLGDGLDVVSGILSAVSASFILGNSDAHTGTKAAAGIELTTQVLGNVGKAVSQYILAQRMAQGLSTTAASAGLITSAVMLAISPLSFLAIADKFERAKQLESYSERFKKFNYEGDALLAAFHKESGAIDAALTTINTVLSSVSAGVSAASSASLIGAPISMLVSALTGTISGILEASKQAMFEHVADKFAARINEWEKEHGKNYFENGYDARHAAFLEDSLSLLADFSRQHAVERAVAITQQHWDEKIGELAGITRNADRSQSGKAYINYLENGGLLEAQPKEFTQQVFDPQKGTIDLSTGNVSSVLTFVTPTFTPGEEVRERKQSGKYEYMTSLIVNGKDTWSVKGIKNHKGVYDYSNLIQFVEKDNKHYQARIISELGDKDDIVYSGAGSSEVFAGEGHDTVSYNKTDVGKLTIDATGASKPGEYIVSKNMYGDVKVLQEVVKEQEVSVGKRTEKIQYRDFEFRTGGIPYDVIDNLHSVEELIGGKHDDEFKGGKFNDIFHGADGNDYIEGNYGNDRLYGDDGDDYISGGQGDDQLFGGSGNDKLSGGDGNNYLTGGSGNDELQAHGAYNILSGGTGDDKLYGGGGIDLLDGGEGNDYLNGGFGNDIYVYRQNYGHHTIADEGGKGDRLHLSDISFDDIAFKKVGNDLIMNKAINGALSFNESNDVNGITFKNWFAKDASGEDNHLVEVITDKDGREIKADKISHNNNEQSGYIKASNIASEKNMVNITSVANDINKIISSVSGFDSGDERLASLYNLSLHQNNTHSTTLTTTV

SEQ ID NO: 15079 - protein, 241 aa, Escherichia coli
MSNKNVNVRKSQEITFCLLAGILMFMAMMVAGRAEAGVALGATRVIYPAGQKQVQLAVTNNDENSTYLIQSWVENADGVKDGRFIVTPPLFAMKGKKENTLRILDATNNQLPQDRESLFWMNVKAIPSMDKSKLTENTLQLAIISRIKLYYRPAKLALPPDQAAEKLRFRRRANSLTLINPTPYYLTVTELNAGTRVLENALVPPMGESTVKLPSDAGSNITYRTINDYGALTPKMTGVME

SEQ ID NO: 15080 - protein, 89 aa, Escherichia coli
  MOD_RES (78)..(78): Any amino acid
  MOD_RES (87)..(87): Any amino acid
MKKMFMAVLFALASVNAMAADCAKGKIEFSKYNEDDTFTVKVDGKEYWTSRWNLQPLLQSAQLTGMTVTIKSSTCESXSGFAEVQFXND

SEQ ID NO: 15081 - protein, 478 aa, Escherichia coli
MTRIKINARRIFSSLIPFFFFTSVHAEQTAAPATPVTVEAKNETFAPQHPDQYLSWKATSEQSERVDALAEDPRLVILWAGYPFSRDYNKPRGHAFAVTDVRETLRTGAPKNAEDGPLPMACWSCKSPDVARLIQKDGEDGYFHGKWARGGPEIVNNLGCADCHNTASPEFAKGKPELTLSRPYAARAMEAIGKPFEKAGRFDQQSMVCGQCHVEYYFDGKNKAVKFPWDDGMKVENMEQYYDKIAFSDWTNSLSKTPMLKAQHPEYETWTAGIHGKNNVTCIDCHMPKVQNAEGKLYTDHKIGNPFDNFAQTCANCHTQDKAALQKVVAERKQSINDLKIKVEDQLVHAHFEAKAALDAGATEAEMKPIQDDIRHAQWRWDLAIASHGIHMHAPEEGLRMLGTAMDKAADARTKLARLLATKGITHEIQIPDISTKEKAQQAIGLNMEQIKAEKQDFIKTVIPQWEEQARKNGLLSQ

SEQ ID NO: 15082 - protein, 451 aa, Escherichia coli
APQLDKLLQKYQKVGSKIGGTAENVGNNLGKAGTVLSALQNFTGIALSGMALDELLRKQREGEDISQNDIAKSSIELINQLVDTVSSINSTVDSFSEQLNQLGSFLSSKPRLSSVGGKLQNLPDLGSLGDGLDVVSGILSAVSASFILGNSDAHTGTKAAAGIELTTQVLGNVGKAVSQYILAQRMAQGLSTTAASAGLITSAVMLAISPLSFLAAADKFERAKQLESYSERFKKLNYEGDALLAAFHKETGAIDAALTTINTVLSSVSAGVSAASSASLIGAPISMLVSALTGTISGILEASKQAMFEHVAEKFAARINEWEKEHGKNYFENGYDARHAAFLEDSLSLLADFSRQHAVERAVAITQQHWDEKIGELAGITRNADRSQSGKAYINYLENGGLLEAQPKEFTQQVFDPQKGTIDLSTGNVSSVLTFITPTFTPGEEVRERKQ

SEQ ID NO: 15083 - protein, 118 aa, Escherichia coli
MKKRGAFLGLLLVSACASVFAANNETSKSVTFPKCEGLDAAGIAASVKRDYQQNRVARWADDQKIVGQAYPVAWVSLQDIQGKDDKWSVPLTVRGKSADIHYQVSVDCKAGMAEYQRR

SEQ ID NO: 15084 - protein, 616 aa, Escherichia coli; identical to SEQ ID NO: 11430

SEQ ID NO: 15085 - protein, 120 aa, Escherichia coli; identical to SEQ ID NO: 3383

SEQ ID NO: 15086 - protein, 866 aa, Escherichia coli; identical to SEQ ID NO: 3945

SEQ ID NO: 15087 - protein, 266 aa, Escherichia coli; identical to SEQ ID NO: 3338

SEQ ID NO: 15088 - protein, 161 aa, Escherichia coli; identical to SEQ ID NO: 2582

SEQ ID NO: 15089 - protein, 869 aa, Escherichia coli
MKIPTTTDIPQRYTWCLAGICYSSLAISPSFLSYAESYFNPAFLLENGTSVADLSRFERGNHQPAGVYRVDLWRNDEFIGSQDIVFESTTVNTGDKSGGLMPCFNQALLERIGLNSSAFPELAQQQNNKCINLLKAVPDATINFDFAAMRLNITIPQIALLSSAHGYIPPEEWDEGIPALLLNYNFTGNRGNGNDSYFFSELSGINIGPWRLRNNGSWNYFRGNGYHSEQWNNIGTWVQRAIIPLKSELVMGDGNTGSDIFDGVGFRGVRLYSSDNMYPDSQQGFAPTVRGIARTAAQLTIRQNGFIIYQSYVSPGAFEITDLHPTSSNGDLDVTIDERDGNQQNYTIPYSTVPILQREGRFKFDLTAGDFRSGNSQQSSPFFFQGTALGGLPQEFTAYGGTQLSANYTAFLLGLGRNLGNWGAVSLDVTHARSQLADDSRHEGDSIRFLYAKSMNTFGTNFQLMGYRYSTQGFYTLDDVAYRRMEGYEYDYDYDGEHRDEPIIVNYHNLRFSRKDRLQLNISQSLNDFGSLYISGTHQKYWNTSDSDTWYQVGYTSSWVGISYSLSFSWNESVGIPDNERIVGLNVSVPFNVLTKRRYTRENALDRAYASFNANRNSNGQNSWLAGVGGTLLEGHNLSYHVSQGDTSNNGYTGSATANWQAAYGTLGVGYNYDRDQHDVNWQLSGGVVGHENGITLSQPLGDTNVLIKAPGAGGVRIENQTGILTDWRGYAVMPYATVYRYNRIALDTNTMGNSIDVEKNISSVVPTQGALVRANFDTRIGVRALITVTQGGKPVPFGSLVRENSTGITSMVGDDGQVYLSGAPLSGELLVQWGDGANSRCIAHYVLPKQSLQQAVTVISAVCTHSGS

SEQ ID NO: 15090 - protein, 871 aa, Escherichia coli
MHQVLLLPRFARLTIALGLATAVFPVDAEYYFNPRFLSNDLAESVDLSAFTKGREAPPGTYRVDIYLNDEFITSRDITFIADDNNADLIPCLSTDLLVSLGIKKSALLDNKEHSAEKHVPDNSACTPLQDRLADASTEFDVGQQHLSLSVPQIYVGRMARGYVSPDLWEEGINAGLLNYSFNGNSINNRSNHNAGKSNYAYLNLQSGINIGSWRLRDNSTWSYNSGSSNSSDSNKWQHINTSAERDIIPLRSRLTVGDSYTDGDIFDSVNFRGLKINSTEAMLPDSQHGFAPVIHGIARGTAQVSVKQNGYDVYQTTVPPGPFTIDDINSAANGGDLQVTIKEADGSIQTLYVPYSSVPVLQRAGYTRYALAMGEYRSGNNLQSSPKFIQGSLMHGLEGNWTPYGGMQIAEDYQAFNLGIGKDLGLFGAFSFDITQANTTLADGTRHSGQSIKSVYSKSFYQTGTNIQVAGYRYSTQGFYNLSDSAYSRMSGYTVKPPTGDSNEQTQFIDYFNLFYSKRGQEQISISQQLGNYGTTFFSASRQSYWNTSRSDQQISFGLNVPFGDITTSLNYSYSNNIWQNDRDHLLAFTLNVPFSHWMRTDSQSAFRNSNASYSMSNDLKGGMTNLSGVYGTLLPDNNLNYSVQVGNTHGGNTSSGTSGYSSLNYRGAYGNTNVGYSRSGDSSQIYYGMSGGIIAHADGITFGQPLGDTMVLVKAPGADNVKIENQTGIHTDWRGYAILPFATEYRENRVALNANSLADNVELDETVVTVIPTHGAIARATFNAQIGGKVLMTLKYGNKSVPFGAIVTHGKNKNGSIVAENGQVYLTGLPQSGKLQVSWGKDKNSNCIVEYKLPEVSPGTLLNQQTAICR

SEQ ID NO: 15091 - protein, 237 aa, Escherichia coli; identical to SEQ ID NO: 1814

SEQ ID NO: 15092 - protein, 368 aa, Escherichia coli
MNKTITALTIIMASFAANASVLPETPVPFKSGTGAIDNDTVYIGLGSAGTAWYKLDTQAKDKRWTALAAFPGGPRDQATSAFIDGNLYVFGGIGKNSEGLTQVFNDVHKYNPKTNSWVKLMSHAPMGMAGHVTFVHNGKAYVTGGVNQNIFNGYFEDLNEAGKDSTAIDKINAHYFDKKAEDYFFNKFLLSFDPSTQQWSYAGESPWYGTAGAAVVNKGDKTWLINGEAKPGLRTDAVFELDFTGDNLKWNKLAPVASPDGVAGGFAGMSNDSLIFAGGAGFKGSRENYQNGKNYAHEGLKKSYSADIHLWHNGKWDKSGELSQGRAYGVSLPWNNSLLIIGGETAGGKAVTDSVLISVKDNKVTVQN

SEQ ID NO: 15093 - protein, 823 aa, Escherichia coli
MTPLASAIVALLLGIEAYAAEETFDTHFMIGGVKDQQVANIRLDDNQPLPGQYDIDIYVNKQWRGKYEIIVKDNPQETCLSREIIKRLGINTDNFASGKQCLTFEQLVQGGSYTWDIGVFRLDFSVPQAWVEELESGYVPPENWERGINAFYTSYYVSQYYSDYKASGNSKSTYVRFNSGLNLLGWQLHSDASFSKTNNNPGTWKSNTLYLERGFAQLLGTLRVGDMYTSSDIFDSVRFSGVRLFRDMQMLPNSKQNFTPRVQGIAQSNALVTIEQNGFVVYQKEVSPGPFAITDLQLAGGGADLDVSVKEADGSVTTYLVPYAAVPNMLQPGVSKYDFAAGRSHIEGASKQSEFVQAGYQYGFNNLLTLYGGSMVANNYYAFTLGTGWNTRIGAISVDATKSHSKQDNGDVFDGQSYQIAYNKFVSQTSTRFGLAAWRYSSRDYRTFNDHVWANNKDNYRRDENDIYDIADYYQNDFGRKNSFSANMSQSLPEGWGSVSLSTLWRDYWGRSGSSKDYQLSYSNNLRRISYTLAASQAYDENHHEEKRFNIFISIPFDWGDDVTTTRRQIYMSNSTTFDDQGFASNNTGLSGTVGSRDQFNYGVNLSHQYQGNETTVGANLTWNAPVATVNGSYSQSSTYRQAGASVSGGIVAWSGGVNLANRLSETFAVMNASGIKDAFVNGQKYRTTNRNGVVVYDGMTPYRENHLMLDVSQSDSEAELRGNRKIAAPYRGAVVLVNFDTDQRKPWFIKALRADGQPLTFGYEVNDIHGHNIGVVGQGSQLFIRTNEVPPSVNVAIDKQQGFSCTITFGKEIDESKNYICQ

SEQ ID NO: 15094 - protein, 207 aa, Escherichia coli; identical to SEQ ID NO: 2211

SEQ ID NO: 15095 - protein, 816 aa, Escherichia coli; identical to SEQ ID NO: 3939

SEQ ID NO: 15096 - protein, 816 aa, Escherichia coli
MNIYRLSFISCLVMAIPSALAVEFNLNVLDKSMRDRIDISLLKGKGGIAPGEYFVSVAVNNNQISNGQKIDWKKNGDQTIPCINDLLVDKFGLKPEVRQSLPRLNQCVDFSSRPEILFIFDQASQQLNITIPQAWLAWHSDNWTPPSTWKEGVAGVLMDYNLFASSYRPQDGSNSTNLNAYGTAGINAGAWRLRSDYQLNQTDSDDNHEQSGEISRTYLFRPLPQLGSKLTLGETDFSSNIFDGFSYTGAALASDDRMLPWELRGYAPQISGIAQTNATVTVSHSGRVIYQKKVPPGPFIIDDLNQSVQGTLDVKVTEEDGRVNNFQVSAASTPFLTRQGQVRYKLAAGQPRPSMSHQTENETFFSNEVSWGMLSNTSLYGGLLISGDDYHSAAMGIGQNMLWLGALSFDVTWASSQFDTQQDERGLSYRFNYSKQVDATNSTISLAAYRFSDRHFHSYANYLDHKYNDNDAQDEKQTISLSVGQPITPLNFNLYANLLHQTWWNADASTTANITAGFNVDIGNWRDISISTSFNTTHYEDKDRDNQIYLSISLPFGNGGRVGYDMQNSNHSTTHRMSWNDTLDERNSWGMSTGLQSDRPDNGAQVSGNYQHLSSAGEWDISGTYAANDYSSVSSSWSGSFTATQYGAAFHRRSSTNEPRLMVSTDGVADIPVQGNLDYTNHFGIAVVPLISSYQPSTVAVNMNDLPDGVTVADNVIKETWIEGAIGYKSLASRSGKDVNVIIRNASGQFPPLGADIRQEDSGISVGMVGEEGHAWLSGVAENQQFTVVWGDSQHCSLYLPEHMENTANRLILPCH

SEQ ID NO: 15097 - protein, 878 aa, Escherichia coli
MSYLNLRLYQRNTQCLHIRKHRLAGFFVRLFVACAFTAQAPLSSAELYFNPRFLADDPQAVADLSRFENGQELPPGTYRVDIYLNNGYMATRDVTFNTGDSEQGIVPCLTRAQLASMGLNTASVSGMNLLADDACVPLTSMIHDATAQLDVGQQRLNLTIPQAFMSNRARGYIPPELWDPGINAGLLNYNFSGNSVQNRIGGNSHYAYLNLQSGLNIGAWRLRDNTTWSYNSSDSSSGSKNKWQHINTWLERDIIPLRSRLTLGDGYTQGDIFDGINFRGAQLASDDNMLPDSQRGFAPVIHGIARGTAQVTIKQNGYDIYNSTVPPGPFTINDIYAAGNSGDLQVTIKEADGSTQIFTVPYSSVPLLQREGHTRYSITAGEYRSGNAQQEKPRFFQSTLLHGLPAGWTIYGGTQMADRYRAFNFGIGKNMGALGALSVDMTQANSTLPDDSQHDGQSVRFLYNKSLNESGTNIQLVGYRYSTSGYFNFADTTYSRMNGYNIETQDGVIQVKPKFTDYYNLAYNKRGKLQLTVTQQLGRTSTLYLSGSHQTYWGTSNVDEQFQAGLNTAFEDINWTLSYSLTKNAWQKGRDQMLALNVNIPFSHWLRSDSKSQWRHASASYSMSHDLNGRMTNLAGVYGTLLEDNNLSYSVQTGYAGGGDGNSGSTGYATLNYRGGYGNANIGYSHSDDIKQLYYGVSGGVLAHANGVTLGQPLNDTVVLVKAPGAKDAKVENQTGVRTDWRGYAVLPYATEYRENRVALDTNTLADNVDLDNAVANVVPTRGAIVRAEFKARVGIKLLMTLTHNNKPLPFGAMVTSESSQSSGIVADNGQVYLSGMPLAGKVQVKWGEEENAHCVANYQLPPESQQQLLTQLSAECR

SEQ ID NO: 15098 - protein, 879 aa, Escherichia coli
MPEHSFLRLRGLSWWIALAISGSPFNALADDTVQFDGRFLDLKGNTKIDLGRFSQKGYVEPGKYNLRVHVNNQPLPDDYDIYWYATENDPNKSYACLSPELVAQFGLKEDIAKNLQWIRDGQCLNTALLAGTEISGDLGQSALLVSVPQAYLEYTDSEWDPPSRWDDGIPGLIADYSINAQTRHENGGDDTNDISGNGTVGVNVGPWRLRADWQSDYQHTRSNDDGDTDDSGTQKNWEWSRYYAWRALPSLKAKLSLGEDYLNSDIFDGFSYIGGSISTDDQMLPPNLRGYAPDISGVAHTTAKVTVTQMGRVIYETQVPAGPFRIQDIGDSVSGTLHVRIEEQNGQVQEYDVSTASMPFLTRPGQVRYKVTMGRPQNWDHQVAGSFFSGGEASWGIANGWSLYGGALADENYQSAALGLGRDLALLGALAFDVTHSRVQLDDNSVYGNKTLDGNSYRVSYAKDFDELNSRVTFAGYRFSEKNYMTMSEYLDANDDDRARTGNDKEMYTVTYNQNFTDARVSVYLNYSHHTYWDRQDQTNYNMMLSHYFNLGSLRNLSVSLTGYRYEYDKSADKGVYLSLSLPWGDNSTISYNGNYGSGADSNQVSLYHRIDDASHYTLSAGTSENHSSVDGYYSHDGTLAKVDLSANYHEGQYTSAGISLQGGATLTAHGGALHRTQNMGGTRLLIDADGVANVPVEGNGSAVYTNMFGKAVVADVNDYYRNQAYIDLNKLPENAEATKSVVQATLTEGAIGYRKFAVISGEKAMAVLRLQDGSHPPFGAEVKNDNQQQVGLVDDEGNVYLAGVKPGEHMTVFWEGESHCDISLPDPLPNDLFNGLLLPCQQKGGSSPVIPHDIQPVIQEQTQQVTPMEPPMSVSSNQ

SEQ ID NO: 15099 - protein, 243 aa, Escherichia coli
MLNKKNIVALCVASSMAFSMPVMADIVISGTRVIYKSDQKSVSVRLENKGNSHLLVQSWLDTGDDNAEPGSINVPFTATPPVSRIDAKRGQTIKLMYTGSTVLPSDKESVFWFNVLEVPPKPDASKVENQSLLQLAFRTRIKLFYRPAGLNGNPSEAPLALKWKWAEGKSGLSVYNPTPYYVSFNSAELIAGGKSNPLNVKMVAPKSEEIFTISGSGGKATSGKVHFSAINDFGGAIEGDVNL

SEQ ID NO: 15100 - protein, 747 aa, Escherichia coli
MARSKTAQPKHSLRKIAVVVATAVSGMSVYAQAAVEPKEDTITVTAAPAPQESAWGPAATIAARQSATGTKTDTPIQKVPQSISVVTAEEMALHQPKSVKEALSYTPGVSVGTRGASNTYDHLIIRGFAAEGQSQNNYLNGLKLQGNFYNDAVIDPYMLERAEIMRGPVSVLYGKSSPGGLLNMVSKRPTTEPLKEVQFKAGTDSLFQTGFDFSDALDDDGVYSYRLTGLARSANAQQKGSEEQRYAIAPAFTWRPDDKTNFTFLSYFQNEPETGYYGWLPKEGTVEPLPNGKRLPTDFNEGAKNNTYSRNEKMVGYSFDHEFNDTFTVRQNLRFAENKTSQNSVYGYGVCSDPANAYSKQCAALAPADKGHYLARKYVVDDEKLQNFSVDTQLQSKFATGDIDHTLLTGVDFMRMRNDINAWFGYDDSVPLLDLYNPVNTDFDFNAKDPDNSGPYRILNKQKQTGVYVQDQAQWDKVLVTLGGRYDWADQESLNRVAGTTDKRDDKQFTWRGGVNYLFDNGVTPYFSYSESFEPSSQVGKDGNIFAPSKGKQYEVGVKYVPEDRPIVVTGAVYNLTKTNNLMADPEGSFFSVEGGEIRARGVEIEAKAALSASVNVVGSYTYTDAEYTTDTTYKGNTPAQVPKHMASLWADYTFFDGPLSGLTLGTGGRYTGSSYGDPTNSFKVGSYTVVDALVRYDLARVGMAGSNVALHVNNLFDREYVASCFNTYGCFWGAERQVVATATFRF

SEQ ID NO: 15101 - protein, 162 aa, Escherichia coli
MRIITALLMSFFILPVHAGVVIYGTRIIYPEKNREVLVQLMNQSKNASLIQAWIDDGNTTIAPEKIQVPFILTPPVSRVAGGSGQQLKIRKMPNNLPHNKESLFYLNVLDIPPNNPQNAGKNKIKLALQNRIKLLWRPSGIAPVDKKSLSQLNIKKKITPSQ

SEQ ID NO: 15102 - protein, 789 aa, Escherichia coli; identical to SEQ ID NO: 13137

SEQ ID NO: 15103 - protein, 236 aa, Escherichia coli; identical to SEQ ID NO: 4069

SEQ ID NO: 15104 - protein, 446 aa, Escherichia coli; identical to SEQ ID NO: 2182

SEQ ID NO: 15105 - protein, 351 aa, Escherichia coli; identical to SEQ ID NO: 2872

SEQ ID NO: 15106 - protein, 230 aa, Escherichia coli; identical to SEQ ID NO: 2580

SEQ ID NO: 15107 - protein, 249 aa, Escherichia coli
MTKYLSAKTLTTVLSLLAATVSFSAQASVTPDRTRLIFNESDKSISVTLRNNDPKLPYLAQSWIEDEKGVKISSPLAVLPPVQRIEAMMNGQVKIQGLPDIHKLPADRESMFYFNVREIPPKSNKSNTLQIALQTRIKLFWRPKALEKNTTQNPWQHKVTLTRNGQEFTVNNPTPYYVIFSNASAQKNGNPAAGFSPIVMSPKTSAPLNVKMGSVPVLTYVNDYGARMPLFFTCNGNSCQVDEEQSRKG

SEQ ID NO: 15108 - protein, 362 aa, Escherichia coli; identical to SEQ ID NO: 2827

SEQ ID NO: 15109 - protein, 565 aa, Escherichia coli
MKSPTPSRPQKMALIPACIFLCFAALSVQAEETPVTPQPPDILLGPLFNDVQNAKLFPDQKTFADAVPNSDPLMILADYRMQQNQSGFDLRHFVNVNFTLPKEGEKYVPPEGQSLREHIDGLWPVLTRSTENTEKWDSLLPLPEPYVVPGGRFREVYYWDSYFTMLGLAESGHWDKVADMVANFAHEIDTYGHIPNGNRSYYLSRSQPPFFALMVELLAQHEGDAALKQYLPQMQKEYAYWMDGVENLQAGQQEKRVVKLQDGTLLNRYWDDRDTPRPESWVEDIATAKSNPNRPATEIYRDLRSAAASGWDFSSRWMDNPQQLNTLRTTSIVPVDLNSLMFKMEKILARASKAAGDNAMANQYETLANARQKGIEKYLWNDQQGWYADYDLKSHKVRNQLTAAALFPLYVNAAAKDRASKMATATKTHLLQPGGLNTTSVKSGQQWDAPNGWAPLQWVATEGLQNYGQKEVAMDISWHFLTNVQHTYDREKKLVEKYDVSTTGTGGGGGEYPLQDGFGWTNGVTLKMLDLICPKEQPCDNVPATRPLSESTTQPLKQKEAEPTP

SEQ ID NO: 15110 - protein, 432 aa, Escherichia coli; identical to SEQ ID NO: 2026

SEQ ID NO: 15111 - protein, 359 aa, Escherichia coli; identical to SEQ ID NO: 2329

SEQ ID NO: 15112 - protein, 686 aa, Escherichia coli; identical to SEQ ID NO: 14004

SEQ ID NO: 15113 - protein, 430 aa, Escherichia coli; identical to SEQ ID NO: 2617

SEQ ID NO: 15114 - protein, 332 aa, Escherichia coli; identical to SEQ ID NO: 2701

SEQ ID NO: 15115 - protein, 713 aa, Escherichia coli; identical to SEQ ID NO: 7177

SEQ ID NO: 15116 - protein, 222 aa, Escherichia coli; identical to SEQ ID NO: 4102

SEQ ID NO: 15117 - protein, 678 aa, Escherichia coli
MVPSTFSRLKAARCLPVVLAALIFAGCGTHTPDQSTAYMQGTAQADSAFYLQQMQQSSDDTRINWQLLAIRALVKEGKTGQAVELFNQLPQELNDSQRREKTLLAAEIKLAQKDFAGAQNLLAKITPADLEQNQQARYWQAKIDASQGRPSIDLLRALIAQEPLLGAKEKQQNIDATWQALSSMTQEQANTLVINADENILQGWLDLQRIWFDNRNDPDMMKAGIADWQKRYPNNPGAKMLPTQLVNVKAFKPASTNKIALLLPLNGQAAVFGRTIQQGFEAAKNIGTQPVAAQVAAAPAADVAEQPQPQTVDGVASPAQASVSDLTGEQPAAQPVPVSAPAATTAAVSAPANPSAELKIYDTSSQPLSQILSQVQQDGASIVVGPLLKNNVEELLKSNTPLNVLALNQPENIENRVNICYFALSPEDEARDAARHIRDQGKQAPLVLIPRSSLGDRVANAFAQEWQKLGGGTVLQQKFGSTSELRAGVNGGSGIALTGSPITPRATTDSGMTTNNPTLQTTPTDDQFTNNGGRVDAVYIVATPGEIAFIKPMIAMRNGSHSGATLYASSRSAQGTAGPDFRLEMEGLQYSEIPMLAGGNLPLMQQALSAVNNDYSLARMYAMGVDAWSLANHFSQMRQVQGFEINGNTGSLTANPDCVINRKLSWLQYQQGQVVPAS

SEQ ID NO: 15118 - protein, 656 aa, Escherichia coli
MRLKKRYLCTALSLAFTQQAVAAQESDSLTVWSSPVSSTTTTILDQPTMKALDKQNVAQALSVVPGVVLQKSGSRNEEQVKVRGFDSRQVPVYFDGVPIYVPYDGNLDLARILTNNLGAVEVSKGYSSLLQGPNQMGGAINITTQKPTKPLEANLGYRQGWSRSQDNAYDMHASFAASSDLGYLQVSGSQLKQDFLGLPHGVNNDIAGKHGKMINSSADDKRGIVKLGFTPRENDEYTLTYIKQDGEKDNPPYSGNSGQKSRYWQWPEYDKESFYYQGTTQLNDRFTLKSRLYRDTFENTLMMYNSLADLKNKKGSYSHYSDYSDGAGLQLAADVRENDLLSFAVNWKDDVHREKGAPHAAYDRYEDRTWSLASEYQWAAADNVDVVAGISYDWRDSVEAKKHEKDGSITHYDDNNQSAFNWQVMGKYHFANEDTLALSYYDRTRFPTLKERYTTSKPAYNQIAIVNPQLKPERARGVDLTWNGAFTHDWGFEVSVYYNRVSDAILSHNIDADTIQNQNSGTVDYSGLDAGIKGKISNILDVGLSYALIHADAKRKDIGKITDLPTQTMTAWMTLKPWEPLSVTLSEEARSSSYSNSDGSQKAAGFAVTHIRADYTLGHGFSVNASVNNLFDTQYAYSEGFIEEGRNFWAGIEYTF

SEQ ID NO: 15119 - protein, 828 aa, Escherichia coli
MKLSRRSFMKANAVAAAAAAAGLSVPGVARAVVGQQEAIKWDKAPCRFCGTGCGVLVGTQQGRVVACQGDPDAPVNRGLNCIKGYFLPKIMYGKDRLTQPLLRMKNGKYDKEGEFTPITWDQAFDVMEEKFKTALKEKGPESIGMFGSGQWTIWEGYAASKLFKAGFRSNNIDPNARHCMASAVVGFMRTFGMDEPMGCYDDIEQADAFVLWGANMAEMHPILWSRITNRRLSNQNVTVAVLSTYQHRSFELADNGIIFTPQSDLVILNYIANYIIQNNAINQDFFSKHVNLRKGATDIGYGLRPTHPLEKAAKNPGSDASEPMSFEDYKAFVAEYTLEKTAEMTGVPKDQLEQLAQLYADPNKKVISYWTMGFNQHTRGVWANNLVYNLHLLTGKISKPGCGPFSLTGQPSACGTAREVGTFAHRLPADMVVTNEKHRDICEKKWNIPSGTIPAKIGLHAVAQDRALKDGKLNVYWTMCTNNMQAGPNINEERMPGWRDPRNFIIVSDPYPTVSALAADLILPTAMWVEKEGAYGNAERRTQFWRQQVQAPGEAKSDLWQLVQFSRRFKTEDVWPEELLAKKPELRGKTLYEVLYATPEVSKFPLSELAEDQLNDESRELGFYLQKGLFEEYAWFGRGHGHDLAPFDDYHKARGLRWPVVNGKETQWRYSEGNDPYVKAGEGYKFYGKPDGKAVIFALPFEPAAEAPDEEYDLWLSTGRVLEHWHTGSMTRRVPELHRAFPEAVLFIHPLDAKARDLRRGDKVKVVSRRGEVISIVETRGRNRPPQGLVYMPFFDAAQLVNKLTLDATDPLSKETDFKKCAVKLEKV

SEQ ID NO: 15120 - protein, 213 aa, Escherichia coli; identical to SEQ ID NO: 2232

SEQ ID NO: 15121 - protein, 202 aa, Escherichia coli
MKDSWMLTSVLRQNLQRDTFNEFTLQVANNSYASSFASFSDASNTMAHGRYYYGDHTNGIAWRLISQGEMYLTDNIIMANALVYSHGEDVYSYESGAHSDFDSIRTVVRPAWIWNTWNQTGLELGWFKQQNKTQQGVTLNESAYKTTLWHALKVGESILGSRPEIRFYGTYINILDNELSNFKFNENSKDEFMAGIQAEVWW

SEQ ID NO: 15122 - protein, 660 aa, Escherichia coli; identical to SEQ ID NO: 4097

SEQ ID NO: 15123 - protein, 614 aa, Escherichia coli; identical to SEQ ID NO: 4016

SEQ ID NO: 15124 - protein, 241 aa, Escherichia coli; identical to SEQ ID NO: 2922

SEQ ID NO: 15125 - protein, 541 aa, Escherichia coli
MAMAAVCGTSGIASLFSQAAFAADSDIADGQTQRFDFSILQSMAHDLAQTAWRGAPRPLPDTLATMTPQAYNSIQYDAEKSLWHNVENRQLDAQFFHMGMGFRRRVRMFSVDPATHLAREIHFRPELFKYNDAGVDTKQLEGQSDLGFAGFRVFKAPELARRDVVSFLGASYFRAVDDTYQYGLSARGLAIDTYTDSKEEFPDFTAFWFDTVKPGATTFTVYALLDSASITGAYKFTIHCEKSQVIMDVENHLYARKDIKQLGIAPMTSMFSCGTNERRMCDTIHPQIHDSDRLSMWRGNGEWICRPLNNPQKLQFNAYTDNNPKGFGLLQLDRDFSHYQDIMGWYNKRPSLWVEPRNKWGKGTIGLMEIPTTGETLDNIVCFWQPEKAVKAGDEFAFQYRLYWSAQPPVHCPLARVMATRTGMGGFPEGWAPGEHYPEKWARRFAVDFVGGDLKAAAPKGIEPVITLSSGEAKQIEILYIEPIDGYRIQFDWYPSSDSTDPVDMRMYLRCQGDAISETWLYQYFPPAPDKRQYVDDRVMS

SEQ ID NO: 15126 - protein, 203 aa, Escherichia coli; identical to SEQ ID NO: 9490

SEQ ID NO: 15127 - protein, 193 aa, Escherichia coli; identical to SEQ ID NO: 2246

SEQ ID NO: 15128 - protein, 118 aa, Escherichia coli [sequence omitted]

SEQ ID NO: 15129 - protein, 518 aa, Escherichia coli; identical to SEQ ID NO: 2349

SEQ ID NO: 15130 - protein, 243 aa, Escherichia coli; identical to SEQ ID NO: 4001

SEQ ID NO: 15131 - protein, 162 aa, Escherichia coli; identical to SEQ ID NO: 1967

SEQ ID NO: 15132 - protein, 111 aa, Escherichia coli; identical to SEQ ID NO: 3419

SEQ ID NO: 15133 - protein, 367 aa, Escherichia coli; identical to SEQ ID NO: 13162

SEQ ID NO: 15134 - protein, 700 aa, Escherichia coli; identical to SEQ ID NO: 13077

SEQ ID NO: 15135 - protein, 259 aa, Escherichia coli; identical to SEQ ID NO: 7163

SEQ ID NO: 15136 - protein, 517 aa, Escherichia coli; identical to SEQ ID NO: 2462

SEQ ID NO: 15137 - protein, 208 aa, Escherichia coli; identical to SEQ ID NO: 1949

SEQ ID NO: 15138 - protein, 760 aa, Escherichia coli; identical to SEQ ID NO: 4114

SEQ ID NO: 15139 - protein, 243 aa, Escherichia coli
MTFMKGLPLLLLVASLCSHAALQPDRTRIVFNANDKATSLRVDNRSDKLPYLAYSWLENEKGEKSDDLLVALPPIQRLEPKATTQVRIVKQASTTKLPGDRETLFFYNMREIPPSPEKNSGHAVLQVAIQSRIKVFWIPSALRKKAGEKVELQLQVSQQGNQLNLKNPTGYYLTIAYLGRNEQGILPGFKTVMVAPFSTVNTNTGSYSGRQFYLGYMDDYGALRMTTLNCSGQCRLQAVEAKK

SEQ ID NO: 15140 - protein, 729 aa, Escherichia coli
MLSTQFNRDNQYQAITKPSLLAGCIVLALLPSAAFAAPATEETVIVEGSATAPDDGENDYSVTSTSAGTKMQMTQRDIPQSVTIVSQQRMEDQQLQTLGEVMENTLGISKSQADSDRALYYSRGFQIDNYMVDGIPTYFESRWNLGDALSDMALFERVEVVRGATGLMTGTGNPSAAINMVRKHATSREFKGDVSAEYGSWNKERYVADLQSPLTEDGKIRARIVGGYQNNDSWLDRYNSEKTFFSGIVDADLGDLTTLSAGYEYQRIDVNSPTWGGLPRWNTDGSSNSYDRARSTAPDWAYNDKEINKVFMTLKQRFADTWQATLNATHSEVEFDSKMMYVDAYVNKADGMLVGPYSNYGPGFDYVGGTGWNSGKRKVDALDLFADGSYELFGRQHNLMFGGSYSKQNNRYFSSWANIFPDEMGSFYNFNGNFPQTDWSPQSLAQDDTTHMKSLYAATRVTLADPLHLILGARYTNWRVDTLTYSMEKNHTTPYAGLVFDINDNWSTYASYTSIFQPQNDRDSSGKYLAPIIGNNYELGLKSDWMNSRLTTTLAIFRIEQDNVAQSTGTPIPGSNGETAYKAVDGTVSKGVEFELNGAITDNWQLTFGATRYIAEDNEGNAVNPNLPRTTVKMFTRYRLPVMPELTVGGGVNWQNRVYTDTVTPYGTFRAEQGSYALVDLFTRYQVTKNFSLQGNVNNLFDKTYDTNVEGSIVYGAPRNFSITGTYQF

SEQ ID NO: 15141 - protein, 366 aa, Escherichia coli; identical to SEQ ID NO: 4014

SEQ ID NO: 15142 - protein, 567 aa, Escherichia coli
MKIKLRITIILISALCIFNGLLTPGAYAATANGYVANKENLRSFFETVSSYAGKPTIVSKLAMKKQISGNFDLTEPYALIERLSAQMGLIWYDDGKAIYIYDSSEMRNALINLRKVSTNEFNNFLKKSGLYNSRYEIKGGGNGTFYVSGPPVYVDLVVNAAKLMEQNSDGIEIGRNKVGIIHLVNTFVNDRTYELRGEKIVIPGMAKVLSTLLNNNIKQSTGVNVLSEISSRQQLKNVSRMPPFPGAEEDDDLQVEKIIATAGAPETDNIQIIAYPDTNSLLVKGTVSQVDFIEKLVATLDIPKRHIELSLWIIDIDKTDLEQLGADWSGTIKIGSSLSASFNNSGSISTLDGTQFIATIQALAQKRRAAVVARPVVLTQENIPAIFDNNRTFYTKLVGERTAELDEVTYGTMISVLPRFAARNQIELLLNIEDGNEINSDKTNVDDLPQVGRTLISTIARVPQGKSLLIGGYTRDTNTYESRKIPILGSIPFIGKLFGYEGTNANNIVRVFLIEPREIDERMMNNANEAAVDARAITQQMAKNKEINDELLQKWIKTYLNREVVGG

SEQ ID NO: 15143 - protein, 154 aa, Escherichia coli
MLTPPVAKIGANSGQQVKIKIMPNKLPTNKESIFYLNVLDIPPNSPEQEGKNALKFAMQNRIKLFYRPAGIAPVNKATFKKLLVNRSGNGLVIKNDSANWVTISDVKANNVKVNYETIMIAPLESQSINVKSNNANNWYLTIIDDNGNYISDKI

SEQ ID NO: 15144 - protein, 200 aa, Escherichia coli; identical to SEQ ID NO: 1801

SEQ ID NO: 15145 - protein, 232 aa, Escherichia coli; identical to SEQ ID NO: 13195

SEQ ID NO: 15146 - protein, 746 aa, Escherichia coli; identical to SEQ ID NO: 4130

SEQ ID NO: 15147 - protein, 250 aa, Escherichia coli
MRWISKNKCFSNRNINSLLKTQYIIRAGALFLLSAISINAIAAGGFGLGSTRLVYPSDSQQITLSVQNGGANTSYLIQSWIDDNQSSKKSQDFVVTPPLFMLPTRKEASLRIMFIGKSQLPTDRETLFWMNVKAIPPTDEKNTQKNTLQLALQNRIKLFYRPTNLPVQAGKARDMLRFKYEGKQLRVINPSPYYLTVTGIRVQGAKLPNAFVPPKSDVTVSSPVMLAGEITYQTINDYGATTARQKGTMQ

SEQ ID NO: 15148 - protein, 412 aa, Escherichia coli
MKQWIAALLLMLIPGVQAAKPQKVTLMVDDVPVAQVLQALAEQEKLNLVVSPDVSGTVSLHLTDVPWKQALQTVVKSAGLITRQEGNILSVHSVAWQNDNIARQEAEQARAQANLPLENRNITLQYADAGELAKAGEKLLSAKGSMTVDKRTNRLLLRDNKTALSALEQWVAQMDLPVGQVELSAHIVTINEKSLRELGVKWTLADAQQAGGVGQVTTLGSDLSVATATTHVGFNIGRINGRLLDLELSALEQKQQLDIIASPRLLASHLQPASIKQGSEIPYQVSSGESGATSVEFKEAVLGMEVTPTVLQKGRIRLKLHISQNVPGQVLQQADGEVLAIDKQEIETQVEVKSGETLALGGIFTRKNKSGQDSVPLLGDIPWFGQLFRHDGKEDERRELVVFITPRLVSSE

SEQ ID NO: 15149 - protein, 191 aa, Escherichia coli; identical to SEQ ID NO: 13179

SEQ ID NO: 15150 - protein, 274 aa, Escherichia coli; identical to SEQ ID NO: 9502

SEQ ID NO: 15151 - protein, 659 aa, Escherichia coli; identical to SEQ ID NO: 2942

SEQ ID NO: 15152 - protein, 386 aa, Escherichia coli; identical to SEQ ID NO: 3094

SEQ ID NO: 15153 - protein, 113 aa, Escherichia coli; identical to SEQ ID NO: 6468

SEQ ID NO: 15154 - protein, 774 aa, Escherichia coli; identical to SEQ ID NO: 3122

SEQ ID NO: 15155 - protein, 368 aa, Escherichia coli; identical to SEQ ID NO: 3171

SEQ ID NO: 15156 - protein, 351 aa, Escherichia coli
MIAPLLISCSTTKKGDTYNEAWVKDTNGFDILMGQFAHNIENIWGFKEVVIAGPKDYVKYTDQYQTRSHINFDDGTITIETIAGTEPAAHLRRAIIKTLLMGDDPSSVDLYSDVDDITISKEPFLYGQVVDNTGQPIRWEGRASNFADYLLKNRLKSRSNGLRIIYSVTINMVPNHLDKRAHKYLGMVRQASRKYGVDESLILAIMQTESSFNPYAVSRSDALGLMQVVQHTAGKDVFRSQGKSGTPSRSFLFDPASNIDTGTAYLAMLNNVYLGGIDNPTSRRYAVITAYNGGAGSVLRVFSNDKIQAANIINTMTPGDVYQTLTTRHPSAESRRYLYKVNTAQKSYRRR

SEQ ID NO: 15157 - protein, 731 aa, Escherichia coli
MRKKYMPRALGPLLLVVLSPAVAQQNDDNEIIVSASRSNRTVAEMAQTTWVIENAELEQQIQGGKELKDALAQLIPGLDVSSQSRTNYGMNMRGRPLVVLIDGVRLNSSRSDSRQLDSVDPFNIDHIEVISGATALYGGGSTGGLINIVTKKGQPETMMEFEAGTKSGFNSSKDHDERIAGAVSGGNDHISGRLSVAYQKFGGWFDGNGDATLLDNTQTGLQHSNRLDIMGTGTLNIDESRQLQLITQYYKSQGDDNYGLNLGKGFSAISGSSTPYVSKGLNSDRIPGTERHLISLQYSDSDFLRQELVGQVYYRDESLRFYPFPTVNANKQATAFSSSQQDTDQYGMKLTLNSQLMDGWQITWGLDAEHERFTSNQMFFDLAQASASGGLNNHKIYTTGRYPSYDITNLAAFLQSSYDINDIFTVSGGVRYQYTENRVDDFIDYTQQQKIAAGKAISADAIPGGSVDYDNFLFNAGLLMHITERQQAWFNFSQGVALPDPGKYYGRGIYGAAVNGHLPLTKSVNVSDSKLEGVKVDSYELGWRFTGDNLRTQIAAYYSLSNKSVERNKDLTISVKDDRRRIYGVEGAVDYLIPDTDWSTGVNFNVLKTESKVNGQWQKYDVKESSPSKATAYISWAPEPWSLRVQSTTSFDVSDAEGNDINGYTTVDFISSWLLPVGTLSFSVENLFDRDYTTVWGQRAPLYYSPGYGPASLYDYKGRGRTFGLNYSVLF

SEQ ID NO: 15158 - protein, 232 aa, Escherichia coli; identical to SEQ ID NO: 2087

SEQ ID NO: 15159 - protein, 391 aa, Escherichia coli
MAVKISGVLKDGTGKPVENCTIQLKARRTSSTVVVNTVASENPDEAGRYSMDVEYGQYSVILLVEGFPPSHAGTITVYEDSQPGTLNDFLGAMSEDDVRPEALRRFELMVEEAARHAEEAKKNAGEAETSARNAGISASQAEESAANADTSAGDASESARQAVESAAAAKQSEEASSSSASAAAQKASESSQSAAEAELSRKTAESAAGNAARDATTATEKARESAESAQSAEQSRIAAEEAVNRIPTVVGPPGPKGEPGPAGPQGPKGDKGERGDTGPAGATGERGPRGDTGPAGPQGPKGDRGERGETGLTGDAGPQGPKGDTGAAGPAGPQGPKGETGAAGPVGATGPQGPKGDPGETQIRFVWGRRALLRQTAMAGSRIQMAHSSPD

SEQ ID NO: 15160 - protein, 207 aa, Escherichia coli; identical to SEQ ID NO: 2211

SEQ ID NO: 15161 - protein, 822 aa, Escherichia coli
MIKNIYCSLSVLIIGCASAYAVEFNKDLIEAEDRENVNLSQFETDGQLPVGKYSLNALINNKRTPIHLDLQWVLIDNQTAVCLTPEQLTLLGFTDEIIEEAQQNLIDGCYPIEKEKQITTYLDKGKMQLSISAPQAWLKYKDANWTPPELWDHGIAGAFLDYNLYASHYAPHQGDNSQNISSYGQAGVNLGAWRLRTDYQYDQSFNNGKSQANNLDFPRIYLFRPIPAINAKLTIGQYDTESSIFDSFHFSGVSLKSDENMLPPDLRGYAPQITGVAQTNAKVTVSQNNRIIYQENVPPGPFAITNLFNTLQGQLDVKVEEEDGQVTQWQVASNSIPYLTRKGQIRYTTAMGKPTSVGGDSLQQPFFWTGEFSWGWLNNVSLYGGSVLTNRDYQSLAAGVGFNLNSLGSLSFDVTRSDAQLHNQDKETGYSYRANYSKRFESTGSQLTFAGYRFSDKNFVTMNEYINDTNHYTNYQNEKESYIVTFNQYLESLRLNTYVSLARNTYWDASSNVNYSLSLSRDFDIGPLKNVSTSLTFSRINWEEDNQDQLYLNISIPWGTSRTLSYGMQRNQDNKISHTASWYDSSDRNNSWSVSASGDNDEFKDMKASLRASYQHNTENGRLYLSGTSQRDSYYSLNASWNGSFTATRHGAAFHDYSGSADSRFMIDADGAEDIPLNNKRAVTNRYGIGVIPSVSSYITTSLSVDTRNLPENVDIENSVITTTLTEGAIGYAKLDTRKGYQIMGVIRLADGSHPPLGISVKDKTSHKELGLVADGGFVYLNGIQDDSKLTLRWGDKSCFIQPPNSSNLTTGTVILPCISQN

SEQ ID NO: 15162 - protein, 231 aa, Escherichia coli; identical to SEQ ID NO: 7365

SEQ ID NO: 15163 - protein, 672 aa, Escherichia coli
MIVSAAPQVVSELDTPAAVSVVDGEEMRLATPRINLSESLTGVPGLQVQNRQNYAQDLQLSIRGFGSRSTYGIRGIRLYVDGIPATMPDGQGQTSNIDLSSVQNVEVLRGPFSALYGNASGGVMNVTTQTGQQPPTIEASSYYGSFGSWRYGLKATGATGDGTQPGDVDYTVSTTRFTTHGYRDHSGAQKNLANAKLGVRIDEASKLSLIFNSVDIKADDPGGLTKAEWKANPQQAPRAEQYDTRKTIKQTQAGLRYERSLSAQDDMSVMMYAGERETTQYQSIPMAPQLNPSHAGGVITLQRHYQGIDSRWTHRGELGVPVTFTTGLNYENMSENRKGYNNFRQNSGMPEYGQKGELRRDERNLMWNIDPYLQTQWQLSEKLSLDAGVRYSSVWFDSNDHYVTPGNGDDSGDASYHKWLPAGSLKYAMTDAWNIYLAAGRGFETPTINELSYRADGQSGMNFGLKPSTNDTIEIGSKTRIGDGLLSLALFQTDTDDEIVVDSSSGGRTTYKNAGKTRRQGAELAWDQRFAGDFRVNASWTWLDATYRSNVCNEQDCNGNRMPGIARNMGFASIGYVPEDGWYAGTEARYMGDIMADDENTAKAPSYTLVGLFTGYKYNYHNLTVDLFGRVDNLFDKEYVGSVIVNESNGRYYEPSPGRNYGVGMNIAWRFE

SEQ ID NO: 15164 - protein, 747 aa, Escherichia coli; identical to SEQ ID NO: 14675

SEQ ID NO: 15165 - protein, 231 aa, Escherichia coli; identical to SEQ ID NO: 3055

SEQ ID NO: 15166 - protein, 678 aa, Escherichia coli; identical to SEQ ID NO: 3014

SEQ ID NO: 15167 - protein, 266 aa, Escherichia coli; identical to SEQ ID NO: 1894

SEQ ID NO: 15168 - protein, 222 aa, Escherichia coli; identical to SEQ ID NO: 13594

SEQ ID NO: 15169 - protein, 673 aa, Escherichia coli; identical to SEQ ID NO: 3719

SEQ ID NO: 15170 - protein, 118 aa, Escherichia coli [sequence omitted]

SEQ ID NO: 15171 - protein, 840 aa, Escherichia coli; identical to SEQ ID NO: 6560

SEQ ID NO: 15172 - protein, 243 aa, Escherichia coli; identical to SEQ ID NO: 2910

SEQ ID NO: 15173 - protein, 746 aa, Escherichia coli; identical to SEQ ID NO: 3695

SEQ ID NO: 15174 - protein, 243 aa, Escherichia coli; identical to SEQ ID NO: 12586

SEQ ID NO: 15175 - protein, 816 aa, Escherichia coli; identical to SEQ ID NO: 12597

SEQ ID NO: 15176 - protein, 826 aa, Escherichia coli; identical to SEQ ID NO: 3700

SEQ ID NO: 15177 - protein, 514 aa, Escherichia coli; identical to SEQ ID NO: 8138

SEQ ID NO: 15178 - protein, 430 aa, Escherichia coli; identical to SEQ ID NO: 2617

SEQ ID NO: 15179 - protein, 631 aa, Escherichia coli; identical to SEQ ID NO: 3058

SEQ ID NO: 15180 - protein, 331 aa, Escherichia coli; identical to SEQ ID NO: 2700

SEQ ID NO: 15181 - protein, 760 aa, Escherichia coli; identical to SEQ ID NO: 3026

SEQ ID NO: 15182 - protein, 478 aa, Escherichia coli
MTRIKINARRIFSLLIPFFFFTSVHAEQTAAPAKPVTVEAKNETFAPQHPDQYLSWKATSEQSERVDALAEDPRLVILWAGYPFSRDYNKPRGHAFAVTDVRETLRTGAPKNAEDGPLPMACWSCKSPDVARLIQKDGEDGYFHGKWARGGPEIVNNLGCADCHNTASPEFAKGKPELTLSRPYAARAMEAIGKPFEKAGRFDQQSMVCGQCHVEYYFDGKNKAVKFPWDDGMKVENMEQYYDKIAFSDWTNSLSKTPMLKAQHPEYETWTAGIHGKNNVTCIDCHMPKLQNAEGKLYTDHKIGNPFDNFAQTCANCHTQDKAALQKVVAERKQSINDLKIKVEDQLVHAHFEAKAALDAGATEAEMKPIQDDIRHAQWRWDLAIASHGIHMHAPEEGLRMLGTAMDKAADARTKLARLLATKGITHEIQIPDISTKEKAQQAIGLNMEQIKAEKQDFIKTVIPQWEEQARKNGLLSQ

SEQ ID NO: 15183 - protein, 881 aa, Escherichia coli; identical to SEQ ID NO: 3713

SEQ ID NO: 15184 - protein, 361 aa, Escherichia coli; identical to SEQ ID NO: 3061

SEQ ID NO: 15185 - protein, 200 aa, Escherichia coli; identical to SEQ ID NO: 1784

SEQ ID NO: 15186 - protein, 551 aa, Escherichia coli; identical to SEQ ID NO: 2446

SEQ ID NO: 15187 - protein, 111 aa, Escherichia coli; identical to SEQ ID NO: 3096

SEQ ID NO: 15188 - protein, 432 aa, Escherichia coli; identical to SEQ ID NO: 2026

SEQ ID NO: 15189 - protein, 224 aa, Escherichia coli; identical to SEQ ID NO: 3165

SEQ ID NO: 15190 - protein, 823 aa, Escherichia coli; identical to SEQ ID NO: 13608

SEQ ID NO: 15191 - protein, 363 aa, Escherichia coli; identical to SEQ ID NO: 3347

SEQ ID NO: 15192 - protein, 170 aa, Escherichia coli [sequence omitted]

SEQ ID NO: 15193 - protein, 230 aa, Escherichia coli; identical to SEQ ID NO: 3348

SEQ ID NO: 15194 - protein, 89 aa, Escherichia coli; identical to SEQ ID NO: 2833

SEQ ID NO: 15195 - protein, 128 aa, Escherichia coli; identical to SEQ ID NO: 7495

SEQ ID NO: 15196 - protein, 518 aa, Escherichia coli; identical to SEQ ID NO: 2349

SEQ ID NO: 15197 - protein, 203 aa, Escherichia coli; identical to SEQ ID NO: 2201

SEQ ID NO: 15198 - protein, 565 aa, Escherichia coli; identical to SEQ ID NO: 2678

SEQ ID NO: 15199 - protein, 237 aa, Escherichia coli; identical to SEQ ID NO: 13595

SEQ ID NO: 15200 - protein, 360 aa, Escherichia coli; identical to SEQ ID NO: 3694

SEQ ID NO: 15201 - protein, 856 aa, Escherichia coli; identical to SEQ ID NO: 3234

SEQ ID NO: 15202 - protein, 669 aa, Escherichia coli; identical to SEQ ID NO: 13681

SEQ ID NO: 15203 - protein, 729 aa, Escherichia coli; identical to SEQ ID NO: 3720

SEQ ID NO: 15204 - protein, 250 aa, Escherichia coli; identical to SEQ ID NO: 3707

SEQ ID NO: 15205 - protein, 614 aa, Escherichia coli; identical to SEQ ID NO: 3301

SEQ ID NO: 15206 - protein, 162 aa, Escherichia coli; identical to SEQ ID NO: 1965

SEQ ID NO: 15207 - protein, 869 aa, Escherichia coli; identical to SEQ ID NO: 8419

SEQ ID NO: 15208 - protein, 765 aa, Escherichia coli; identical to SEQ ID NO: 4323

SEQ ID NO: 15209 - protein, 392 aa, Escherichia coli
MAVKISGVLKDGTGKPVENCTIQLKARRTSSTVVVNTVASENPDEAGRYSMDVEYGQYSVILLVEGFPPSHAGTITVYEDSQPGTLNDFLGAMSEDDVRPEALRRFELMVEEVARHAEEAKKNAGEAETSARNAGISASQAEESAANADTSAGEASESARQAAESAAAAKQSEEASSSSASAAAQKASESSQSAAEAELSRKTAESAAGNAARDATTATEKARESAESAQSAEQSRIAAEEAVNRIPTVVGPPGPKGEPGPAGPQGPKGDKGERGDTGPVGATGERGPAGDAGPAGPQGPKGDKGERGETGLTGNAGPQGPKGDTGAAGPAGPQGPKGETGSGWPGGGNRTSGTEGRPGGRHKYGSVWGRETLLRQTAMAGSRIQMAHSSPD

SEQ ID NO: 15210 - protein, 351 aa, Escherichia coli; identical to SEQ ID NO: 3691

SEQ ID NO: 15211 - protein, 224 aa, Escherichia coli; identical to SEQ ID NO: 3115

SEQ ID NO: 15212 - protein, 445 aa, Escherichia coli; identical to SEQ ID NO: 6625

SEQ ID NO: 15213 - protein, 241 aa, Escherichia coli; identical to SEQ ID NO: 2922

SEQ ID NO: 15214 - protein, 203 aa, Escherichia coli; identical to SEQ ID NO: 2009

SEQ ID NO: 15215 - protein, 784 aa, Escherichia coli; identical to SEQ ID NO: 2244

SEQ ID NO: 15216 - protein, 221 aa, Escherichia coli; identical to SEQ ID NO: 3672

SEQ ID NO: 15217 - protein, 193 aa, Escherichia coli; identical to SEQ ID NO: 2246

SEQ ID NO: 15218 - protein, 208 aa, Escherichia coli; identical to SEQ ID NO: 1949

SEQ ID NO: 15219 - protein, 591 aa, Escherichia coli; identical to SEQ ID NO: 3668

SEQ ID NO: 15220 - protein, 210 aa, Escherichia coli; identical to SEQ ID NO: 3228

SEQ ID NO: 15221 - protein, 274 aa, Escherichia coli; identical to SEQ ID NO: 3721

SEQ ID NO: 15222 - protein, 161 aa, Escherichia coli; identical to SEQ ID NO: 2582

SEQ ID NO: 15223 - protein, 263 aa, Escherichia coli
VNDAVANIPVPADGKSITPDDVRPMLEQMVKEAVSHIPAPRDGRDYDPEVLKQAVNDAVANIPVPADGKSITPDDVRPMLEQMVKEAVSHIPAPRDGRDYDPEVLKQAVLEAVNALPAPQDGRDATALEVLPAIDDQKSFPRGTYATHLGGLWRAYEKTHGMRGWECLVDGVADIDVSMTDERLFSVVIRQSSGQCTEKTFSLPVMLYRGVFRAGETYHPGDTVTWGGSLWHCNSMTGDKPGEAHSSGWTLAAKRGRDAGGGK

SEQ ID NO: 15224 - protein, 207 aa, Escherichia coli; identical to SEQ ID NO: 2211

SEQ ID NO: 15225 - protein, 161 aa, Escherichia coli; identical to SEQ ID NO: 2582

SEQ ID NO: 15226 - protein, 878 aa, Escherichia coli
MSYLNLRLYQRNTQCLHIRKHRLAGLFVRLFVACAFAAQAPLSSAELYFNPRFLADDPQAVADLSRFENGQELPPGTYRVDIYLNNAYMATRDVTFNTGDSEQGIVPCLTRVQLASMGLNTASVSGMNLLADDACVPLTSMIHDATAHLDVGQQRLNLTIPQAFMSNRARGYIPPELWDPGINAGLLNYNFSGNSVQNRIGSNSHYAYLNLQSGLNIGAWRLRDNTTWSYNSSDSSSGSKNKWQHINTWLERDIIPLRSRLTLGDGYTQGDIFDGINFRGAQLASDDNMLPDSQRGFAPVIHGIARGTAQVTIKQNGYDIYNSTVPPGPFTINDIYAAGNSGDLQVTIKEADGSTQIFTVPYSSVPLLQREGHTRYSITAGEYRSGNAQQEKPRFFQSTLLHGLPAGWTIYGGTQLADRYRAFNFGIGKNMGALGALSVDMTQANSTLPDDSQHDGQSVRFLYNKSLNESGTNIQLVGYRYSTSGYFNFADTTYSRMNGYNIETQDGVIQVKPKFTDYYNLAYNKRGKLQLTVTQQLGRTSTLYLSGSHQTYWGTSNVDEQFQAGLNTAFEDINWTLSYSLTKNAWQKGRDQMLALNVNIPFSHWLRSDSKSQWRHASASYSMSHDLNGRMTNLAGVYGTLLEDNNLSYSVQTGYAGGGDGNSGSTGYATLNYRGGYGNANIGYSHSDDIKQLYYGVSGGVLAHANGVTLGQPLNDTVVLVKAPGAKDAKVENQTGVRTDWRGYAVLPYATEYRENRVALDTNTLADNVDLDNAVANVVPTRGAIVRAEFKARVGIKLLMTLTHNNKPLPFGAMVTSESSQSSGIVADNGQVYLSGMPLAGKVQVKWGEEENAHCVANYQLPPESQQQLLTQLSAECR

SEQ ID NO: 15227 - protein, 803 aa, Escherichia coli
MAMPCALAVEFNLNVLDKSMRDRIDISLLKEKGVIAPGEYFVSVAVNNNQISNGQKINWQKKGDKTIPCINDSLVDKFGLKPDIRQSLPQIDRCIDFSSRPEMLFNFDQANQQLNITIPQAWLAWHSDNWTPPSTWKEGVAGVLMDYNLFASSYRPQDGSNSTNLNAYGTAGINAGAWRLRSDYQLNQTDSDDNHEQSGEISRTYLFRPLPQLGSKLTLGETDFSSNIFDGFSYTGAALASDDRMLPWELRGYAPQISGIAQTNATVTVSHSGRVIYQKKVPPGPFIIDDLNQSVQGTLDVKVTEEDGRVNNFQVSAASTPFLTRQGQVRYKLAAGQPRPSMSHQTENETFFSNEVSWGMLSNTSLYGGLLISGDDYHSAAMGIGQNMLWLGALSFDVTWASSQFDTQQDERGLSYRFNYSKQVDATNSTISLAAYRFSDRHFHSYANYLDHKYNDNDAQDEKQTISLSVGQPITPLNFNLYANLLHQTWWNADASTTANITAGFNVDIGNWRDISISTSFNTTHYEDKDRDNQIYLSISLPFGNGGRVGYDMQNSNHSTTHRMSWNDTLDERNSWGMSTGLQSDRPDNGAQVSGNYQHLSSAGEWDISGTYAANDYSSVSSSWSGSFTATQYGAAFHRRSSTNEPRLMVSTDGVADIPVQGNLDYTNHFGIAVVPLISSYQPSTVSVNMNDLPDGVTVADNVIKETWIEGAIGYKSLASRSGKDVNVIIRNASGQFPPLGADIRQDDSGISVGMVGEEGHAWLSGVAENQQFTVVWGDSQRCSIHLPEHMEDTANRLILPCH

SEQ ID NO: 15228 - protein, 851 aa, Escherichia coli
MPSFIGGLVVFVSAAFNAQAETWFDPAFFKDDPSMVADLSRFERGQKITPRVYRVDIVLNQTMVDTRNVNFVEITPEKGIAACLTTESLDAMGVNIDAFLAFKQLDKQACAPLAEIIPDASVTFNVNKLRLEISVPQIAIKSNARGYVPPERWDEGINALLLGYSFSGANSIHRSADSDSGDSYFLNLNSGVNLGPWRLRNNSTWSRSSGQTAEWKNLSSYLQRAVIPLKGELTVGDDYTAGDFFDSVSFRGVQLASDDNMLPDSLKGFAPVVRGIAKSNAQITIKQNGYTIYQTYVSPGAFEISDLYSTSSSGDLLVEIKEADGSINSYSVPFSSVPLLQRQGRIKYAVTLAKYRTNSNDQQESKFAQATLQWGGPWGTTWYGGGQYAEYYRAAMLGLGFNLGDFGAISFDATQAKSTLADQSEHKGQSYRFLYAKTLNQLGTNFQLMGYRYSTSGFYTLSDTMYKHMDGYEFNDGDDEDTPMWSRYYNLFYTKRGKLQVNISQQLGDYGSFYLSGSQQTYWHTDQQDRLLQFGYNTQIKDLSLGVSWNYSKSRGQPDADQVFALNFSLPLNLLLSRSNDSYTRKKNYAWMTSNTSIDNEGHTTQNLGLTETLLDDGNLSYSVQQGYNSEGKTANGSASMDYKGAFADARVGYNYSDSGSQQQLNYALSGSLVAHSRGITLGQSLGETNVLIAAPGAENTRVANSTGLKTDWRGYTVVPYATSYRENRIVLDAASLKRNVDLENAVVNVVPTKGALVLAEFNAHAGGRVLMKTSTQGIPLRFGAIATLDGVQTNSGIIDDDGSLYMSGLPAQGAITVRWGEAPDQICHISYQLTEQQINAAITRMDAICR

SEQ ID NO: 15229 - protein, 266 aa, Escherichia coli; identical to SEQ ID NO: 3338

SEQ ID NO: 15230 - protein, 869 aa, Escherichia coli
MKIPTTTDIPQRYSWCLAGICYSSLAILPSFLSYAESYFNPAFLLENGTSVADLSRFERGNHQPAGVYRVDLWRNDEFIGSQDIVFESTTVNTGDKSGGLMPCFNQALLERIGLNSSAFPELAQQQNNKCINLLKAVPDATINFDFAAMRLNITIPQIALLSSAHGYIPPEEWDEGIPALLLNYNFTGNRGNGNDSYFFSELSGINIGPWRLRNNGSWNYFRGNGYHSEQWNNIGTWVQRAIIPLKSELVMGDGNTGSDIFDGVGFRGVRLYSSDNMYPDSQQGFAPTVRGIARTAAQLTIRQNGFIIYQSYVSPGAFEITDLHPTSSNGDLDVTIDERDGNQQNYTIPYSTVPILQREGRFKFDLTAGDFRSGNSQQSSPFFFQGTALGGLPQEFTAYGGTQLSANYTAFLLGLGRNLGNWGAVSLDVTHARSQLADDSRHEGDSIRFLYAKSMNTFGTNFQLMGYRYSTQGFYTLDDVAYRRMEGYEYDYDYDGEHRDEPIIVNYHNLRFSRKDRLQLNISQSLNDFGSLYISGTHQKYWNTSDSDTWYQVGYTSSWVGISYSLSFSWNESVGIPDNERIVGLNVSVPFNVLTKRRYTRENALDRAYASFNANRNSNGQNSWLAGVGGTLLEGHNLSYHVSQGDTSNNGYTGSATANWQAAYGTLGVGYNYDRDQHDVNWQLSGGVVGHENGITLSQPLGDTNVLIKAPGAGGVRIENQTGILTDWRGYAVMPYATVYRYNRIALDTNTMGNSIDVEKNISSVVPTQGALVRANFDTRIGVRALITVTQGGKPVPFGSLVRENSTGITSMVGDDGQVYLSGAPLSGELLVQWGDGANSRCIAHYVLPKQSLQQAVTVISAVCTHSGS

SEQ ID NO: 15231 - protein, 883 aa, Escherichia coli
MDTPMPEHSFLRLRGLSWWIALAISGSPFNALADDTIQFDGRFLDLKGNTKIDLGRFSQKGYVEPGKYNLRVHVNNQPLPDDYDIYWYATENDPNKSYACLSPELVAQFGLKEDIAKNLQWIRDGQCLNTALLAGTEISGDLGQSALLVSVPQAYLEYTDSEWDPPSRWDDGIPGLIADYSINAQTRHENGGDDTNDISGNGTVGVNVGPWRLRADWQSDYQHTRSNDDGDTDDSGTQKNWEWSRYYAWRALPSLKAKLSLGEDYLNSDIFDGFSYIGGSISTDDQMLPPNLRGYAPDISGVAHTTAKVTVTQMGRVIYETQVPAGPFRIQDIGDSVSGTLHVRIEEQNGQVQEYDVSTASMPFLTRPGQVRYKVTMGRPQNWDHQVAGSFFSGGEASWGIANGWSLYGGALADENYQSAALGLGRDLALLGALAFDVTHSRVQLDDNSVYGNKTLDGNSYRVSYAKDFDELNSRVTFAGYRFSEKNYMTMSEYLDANDDDRARTGNDKEMYTVTYNQNFTDARVSVYLNYSHHTYWDRQDQTNYNMMLSHYFNLGSLRNLSVSLTGYRYEYDKSADKGVYLSLSLPWGDNSTISYNGNYGSGADSNQVSLYHRIDDASHYTLSAGTSENHSSVDGYYSHDGTLAKVDLSANYHEGQYTSAGISLQGGATLTAHGGALHRTQNMGGTRLLIDADGVANVPVEGNGSAVYTNMFGKAVVADVNDYYRNQAYIDLNKLPENAEATKSVVQATLTEGAIGYRKFAVISGEKAMAVLRLQDGSHPPFGAEVKNDNQQQVGLVDDEGNVYLAGVKPGEHMTVFWEGESHCDISLPDPLPNDLFNGLLLPCQQKGGSSPVIPHDIQPVIQEQTQQVTPMEPPMSVSSNQ

SEQ ID NO: 15232 - protein, 237 aa, Escherichia coli
MRKITQAISAVCLLFALNSSAVALASSPSPLNPGTNVARLAEQAPIHWVSVAQIENSLAGRPPMAVGFDIDDTVLFSSPGFWRGKKTFSPESEDYLKNPVFWEKMNNGWDEFSIPKEVARQLIDMHVHRGDAIFFVTGRSPTKTETVSKTLADNFHIPATNMNPVIFAGDKPGQNTKSQWLQDKNIRIFYGDSDNDITAARDVGARGIRILRASNSTYKPLPQAGAFGEEVIVNSEY

SEQ ID NO: 15233 - protein, 219 aa, Escherichia coli
MSLNFTVIVWLRLSIGGVYVLAFCRSSLKSKKYFIILLALAAIAGLGTHAAWSSNGLPRIDNKTLARLAQQHPVVVLFRHAERCDRSTNQCLSDKTGITVKGTQDARELGNAFSADIPDFDLYSSNTVRTIQSATWFSSGKKLTVDKRLLQCGNEIYSAIKDLQSKAPDKNIVIFTHNHCLTYIAKDKRDATFKPDYLDGLVMHVEKGKVYLDGEFVNH

SEQ ID NO: 15234 - protein, 235 aa, Escherichia coli; identical to SEQ ID NO: 4365

SEQ ID NO: 15235 - protein, 364 aa, Escherichia coli; identical to SEQ ID NO: 2927

SEQ ID NO: 15236 - protein, 747 aa, Escherichia coli; identical to SEQ ID NO: 13148

SEQ ID NO: 15237 - protein, 541 aa, Escherichia coli; identical to SEQ ID NO: 3377

SEQ ID NO: 15238 - protein, 719 aa, Escherichia coli
MRDEMLYNIPCRIYILSTLSLCISGIVSTATATSSETKISNEETLVVTTNRSASNLWESPATIQVIDQQTLQNSTNASIADNLQDIPGVEITDNSLAGRKQIRIRGEASSRVLILIDGQEVTYQRAGDNYGVGLLIDESALERVEIVKGPYSVLYGSQAIGGIVNFITKKGGNKLASGVVKAVYNSATAGWEESIAVQGSIGGFDYRINGSYSDQGNRDTPDGRLPNTNYRNNSQGVWLGYNSGNHRFGLSLDRYRLATQTYYEDPDGSYEAFSVKIPKLEREKVGVFYDTDVDGDYLKKIHFDAYEQTIQRQFANEVKTTQPVPSPMIQALTVHNKTDTHDKQYTQAVTLQSHFSLPANNELVTGAQYKQDRVNQRSGGMTSSKSLTGFINKETRTRSYYESEQSTVSLFAQNDWQFADHWTWTMGVRQYWLSSKLTRGDGVSYTAGIISDTSLARESASDHEMVTSTSLRYSGFDNLELRAAFAQGYVFPTLSQLFMQTSAGGSVTYGNPDLKAEHSNNFELGARYNGNQWLIDSAVYYSEAKDYIASLICDGSIVCNGNTNSSRSSYYYYDNIDRAKTWGLEISAEYNGWVFSPYISGNLIRRQYETSTLKTTNTGEPAINGRIGLKHTLVMGQANIISDVFIRAASSAKDDSNGTETNVPGWATLNFAVNTEFGNEDQYRINLALNNLTDKRYRTAHETIPAAGFNAAIGFVWNF

SEQ ID NO: 15239 - protein, 331 aa, Escherichia coli; identical to SEQ ID NO: 2705

SEQ ID NO: 15240 - protein, 431 aa, Escherichia coli; identical to SEQ ID NO: 3408

SEQ ID NO: 15241 - protein, 208 aa, Escherichia coli; identical to SEQ ID NO: 1949

SEQ ID NO: 15242 - protein, 244 aa, Escherichia coli
MWKLSMIRKKILMAAIPLFVISGADAAVSLDRTRAVFDGSEKSMTLDISNDNKQLPYLAQAWIENENQEKIIAGPVIATPPVQRLEPGAKSMVRLSTTPDISKLPQDRESLFYFNLREIPPRSEKANVLQIALQTKIKLFYRPAAIKTRPNEVWQDQLILNKVSDGYRIENPTPYYVTVIGLGGSEKQAEEGEFETVMLSPRSEQTVKSANYNTPYLSYINDYGGRPVLSFICNGSRCSVKKEK

SEQ ID NO: 15243 - protein, 243 aa, Escherichia coli; identical to SEQ ID NO: 9512

SEQ ID NO: 15244 - protein, 243 aa, Escherichia coli; identical to SEQ ID NO: 4001

SEQ ID NO: 15245 - protein, 673 aa, Escherichia coli; identical to SEQ ID NO: 4735

SEQ ID NO: 15246 - protein, 746 aa, Escherichia coli
MNKKIHSLALLVNLGIYGVAQAQEPTDTPVSHDDTIVVTAAEQNLQAPGVSTITADEIRKNPVARDVSEIIRTMPGVNLTGNSTSGQRGNNRQIDIRGMGPENTLILIDGKPVSSRNSVRQGWRGERDTRGDTSWVPPEMIERIEVLRGPAAARYGNGAAGGVVNIITKKGSGEWHGSWDAYFNAPEHKEEGATKRTNFSLTGPLGDEFSFRLYGNLDKTQADAWDINQGHQSARAGTYATTLPAGREGVINKDINGVVRWDFAPLQSLELEAGYSRQGNLYAGDTQNTNSDSYTRSKYGDETNRLYRQNYSLTWNGGWDNGVTTSNWVQYEHTRNSRIPEGLAGGTEGKFNEKATQDFVDIDLDDVMLHSEVNLPIDFLINQTLTLGTEWNQQRMKDLSSNTQALTGTNTGGAIDGVSATDRSPYSKAEIFSLFAENNMELTDSTIVTPGLRFDHHSIVGNNWSPALNISQGLGDDFTLKMGIARAYKAPSLYQTNPNYILYSKGQGCYASAGGCYLQGNDDLKAETSINKEIGLEFKRDGWLAGVTWFRNDYRNKIEAGYVAVGQNAVGTDLYQWDNVPKAVVEGLEGSLNVPVSETVMWTNNITYMLKSENKTTGDRLSIIPEYTLNSTLSWQAREDLSMQTTFTWYGKQQPKKYNYKGQPAVGPETKEISPYSIVGLSATWDVTKNVSLTGGVDNLFDKRLWRAGNAQTTGDLAGANYIAGAGAYTYNEPGRTWYMSINTHF

SEQ ID NO: 15247 - protein, 836 aa, Escherichia coli
MKDRIPFAVNNITCVILLSLFCNAASAVEFNTDVLDAADKKNIDFTRFSEAGYVLPGQYLLDVIVNGQSISPASLQISFVEPQSSGDKAEKKLPQACLTSDMVRLMGLTAESLDKVVYWHDGQCADFHGLPGVDIRPDTGAGVLRINMPQAWLEYSDATWLPPSRWDDGIPGLMLDYNLNGTVSRNYQGGDSHQFSYNGTVGGNLGPWRLRADYQGSQEQSRYNGEKTTNRNFTWSRFYLFRAIPRWRANLTLGENNINSDIFRSWSYTGASLESDDRMLPPRLRGYAPQITGIAETNARVVVSQQGRVLYDSMVPAGPFSIQDLDSSVRGRLDVEVIEQNGRKKTFQVDTASVPYLTRPGQVRYKLVSGRSRGYGHETEGPVFATGEASWGLSNQWSLYGGAVLAGDYNALAAGAGWDLGVPGTLSADITQSIARIEGERTFQGKSWRLSYSKRFDNADADITFAGYRFSERNYMTMEQYLNARYRNDYSSREKEMYTVTLNKNVADWNTSFNLQYSRQTYWDIRKTDYYTVSVNRYFNVFGLQGVAVGLSASRSKYLGRDNDSAYLRISVPLGTGTASYSGSMSNDRYVNMAGYTDTFNDGLDSYSLNAGLNSGGGLTSQRQINAYYSHRSPLANLSANIASLQKGYTSFGVSASGGATITGKGAALHAGGMSGGTRLLVDTDGVGGVPVDGGQVVTNRWGTGVVTDISSYYRNTTSVDLKRLPDDVEATRSVVESALTEGAIGYRKFSVLKGKRLFAILRLADGSQPPFGASVTSEKGRELGMVADEGLAWLSGVTPGETLSVNWDGKIQCQVNVPETAISDQQLLLPCTPQK

SEQ ID NO: 15248 - protein, 360 aa, Escherichia coli
MMKKYLALALIAPLLISCSTTKKGDTYNEAWVKDTNGFDILMGQFAHNIENIWGFKEVVIAGPKDYVKYTDQYQTRSHINFDDGTITIETIAGTEPAAHLRRAIIKTLLMGDDPSSVDLYSDVDDITISKEPFLYGQVVDNTGQPIRWEGRASNFADYLLKNRLKSRSNGLRIIYSVTINMVPNHLDKRAHKYLGMVRQASRKYGVDESLILAIMQTESSFNPYAVSRSDALGLMQVVQHTAGKDVFRSQGKSGTPSRSFLFDPASNIDTGTAYLAILNNVYLGGIDNPTSRRYAVITAYNGGAGSVLRVFSNDKIQAANIINTMTPGDVYQTLTTRHPSAESRRYLYKVNTAQKSYRRR

SEQ ID NO: 15249 - protein, 191 aa, Escherichia coli; identical to SEQ ID NO: 2730

SEQ ID NO: 15250 - protein, 111 aa, Escherichia coli; identical to SEQ ID NO: 3419

SEQ ID NO: 15251 - protein, 368 aa, Escherichia coli
MNKTITALTIIMASFAANASVLPETPVPFKSGTGAIDNDTVYIGLGSAGTAWYKLDTQAKNKSWTALAAFPGGPRDQATSAFIDGNLYVFGGIGKNSEGLTQVFNDVHKYNPKTNSWVKLMSHAPMGMAGHVTFVHNGKAYVTGGVNQNIFNGYFEDLNEAGKDSTAIDKINAHYFDKKAEDYFFNKFLLSFDPSTQQWSYAGESPWYGTAGAAVVNKGDKTWLINGEAKPGLRTDAVFELDFTGNNLKWNKLAPVSSPDGVAGGFAGMSNDSLIFAGGAGFKGSRENYQNGKNYAHEGLKKSYSADIHLWHNGKWDKSGELSQGRAYGVSLPWNNSLLIIGGETAGGKAVTDSVLISVKDNKVTVQN

SEQ ID NO: 15252 - protein, 883 aa, Escherichia coli
MTAFHAAFKAYRMHQVLILPRFVRLTFALGLATAVFPVDAEYYFNPRFLSNDLAESVDLSAFTKGREAPPGTYRVDIYLNDEFMTSRDITFIADDNNADLIPCLSTDLLVSLGIKKSALLDNKEHLAEKHVPDNSACTPLQDRLADASTEFDVGQQHLSLSVPQIYVGRMARGYVSPDLWEEGINAGLLNYSFNGNSINNRSNHNAGKSNYAYLNLQSGINIGSWRLRDNSTWSYNSGSSNSSDSNKWQHINTSAERDIIPLRSRLTVGDSYTDGDIFDSVNFRGLKINSTEAMLPDSQHGFAPVIHGIARGTAQVSVKQNGYDVYQTTVPPGPFTIDDINSAANGGDLQVTIKEADGSIQTLYVPYSSVPVLQRAGYTRYALAMGEYRSGNNLQSSPKFIQGSLMHGLEGNWTPYGGMQIAEDYQAFNLGIGKDLGLFGAFSFDITQANTTLADDTRHSGQSVKSVYSKSFYQTGTNIQVAGYRYSTQGFYNLSDSAYSRMSGYTVKPPTGDTNEQTQFIDYFNLFYSKRGQEQISISQQLGNYGTTFFSASRQSYWNTSRSDQQISFGLNVPFGDITTSLNYSYSNNIWQNDRDHLLAFTLNVPFSHWMRTDSQSAFRNSNASYSMSNDLKGGMTNLSGVYGTLLPDNNLNYSVQVGNTHGGNTSSATSGYSSLNYRGAYGNTNVGYSRSGDSSQIYYGMSGGIIAHADGITFGQPLGDTMVLVKAPGADNVKIENQTGIHTDWRGYAILPFATEYRENRVALNANSLADNVELDETVVTVIPTHGAIARATFNAQIGGKVLMTLKYGNKSVPFGAIVTHGENKNGSIVAENGQVYLTGLPQSGKLQVSWGKDKNSNCIVEYKLPEVSPGTLLNQQTAICR

SEQ ID NO: 15253 - protein, 732 aa, Escherichia coli
MMRKKYMPRALGPLLLVVLSPAVAQQNDDNEIIVSASRSNRTVAEMAQTTWVIENAELEQQIQGGKELKDALAQLIPGLDVSSQSRTNYGMNMRGRPLVVLIDGVRLNSSRSDSRQLDSVDPFNIDHIEVISGATALYGGGSTGGLINIVTKKGQPETMMEFEAGTKSGFNSSKDHDERIAGAVSGGNDHISGRLSVAYQKFGGWFDGNGDATLLDNTQTGLQHSNRLDIMGTGTLNIDESRQLQLITQYYKSQGDDNYGLNLGKGFSAISGSSTPYVSKGLNSDRIPGTERHLISLQYSDSDFLGQELVGQVYYRDESLRYYPFPTVNANKQATAFSSSQQDTDQYGMKLTLNSQLMDGWQITWGLDAEHERFTSNQMFFDLAQASASGGLNNHKIYTTGRYPSYDITNLAAFLQSSYDINDIFTVSGGVRYQYTENRVDDFIDYTQQQKIAAGKAISADAIPGGSVDYDNFLFNAGLLMHITERQQAWFNFSQGVALPDPGKYYGRGIYGAAVNGHLPLTKSVNVSDSKLEGVKVDSYELGWRFTGDNLRTQIAAYYSLSNKSVERNKDLTISVKDDRRRIYGVEGAVDYLIPDTDWSTGVNFNVLKTESKVNGQWQKYDVKESSPSKATAYINWAPEPWSLRVQSTTSFDVSDAEGNDINGYTTVDFISSWQLPVGTLSFSVENLFDRDYTTVWGQRAPLYYSPGYGPASLYDYKGRGRTFGLNYSVLF

SEQ ID NO: 15254 - protein, 250 aa, Escherichia coli
MINVLICILICCTNAQAGVVVGGTRFVYPEKQSSISVELKNTASKDMLVKISVTPDDGRQLKGTLESQPLLPDKAFIATPPLLVLKQDKNTKIRINRVGGQLPIDRESLFILNIAALPAQEQNSQLKNENQLQVAVRNRMKIFYRPETLSGNPLDAYQQLRWSRNNEAVTVFNPTPWYVTLYNLSIDGKSINGGMVAPFSHRQQDWCQRQGYCEINWQTLDLYNNALPVWSVKLNVLQNNAIMGAVAIHG

SEQ ID NO: 15255 - protein, 224 aa, Escherichia coli; identical to SEQ ID NO: 9574

SEQ ID NO: 15256 - protein, 204 aa, Escherichia coli
MMKKIAITCALLSSLVASSVWADAASDLKSRLDKVSSFHASFTQKVTDGSGAAVQEGQGDLWVKRPNLFNWHMTQPDESILVSDGKTLWFYNPFVEQATATWLKDATGNTPFMLIARNQSSDWQQYNIKQNGDDFVLTPKASNGNLKQFTINVGRDGTIHQFSAVEQDDQRSSYQLKSQQNGAVEAAKFTFTPPQGVTVDDQRK

SEQ ID NO: 15257 - protein, 784 aa, Escherichia coli; identical to SEQ ID NO: 2244

SEQ ID NO: 15258 - protein, 816 aa, Escherichia coli
MLRTTRWVAAIIFLYSFPGYAEETFDTHFMIGGMRGEKVSEYRFDNKQPLPGNYELDFYVNHQWRGKKDITIPESPAKPCLPKVLLTTLGVKTDNLNTEDNCILLDEAVHGGQYQWDISEHRLNLTVPQAYINELERGYVPPESWDRGIDAFYTSYNLSQYRSYDSNNNSNTASYGRFNSGLNLFSWQLHSDASYSKPDDMKGKWQSNTLYLERGWSQILSTVQIGENHTSSLIFDSLRFSGIRLFRDMQMLPDSMQSFTPLVQGVAQSNALITVSQNGYTIYQKEVPPGPFTIADLQLSGSGSDLDVSIKEADGSVRSFLVPYSSVPNMLQPGVSNFDFIAGRSQIYGVKNQEDFLEANYIYGLNNLLTLYGGMILSDNYNAITLGNGWNTPLGAISFDATRSSSKLNNDTRHEGTSYQVAYNKYLLQTATHFSVAAWRYASQDYRTFSDHLYENDKINHQSDYNDFYDIGRKNSLSANIMQPLSNNLGNVSLSALWRNYWGRSGNAKDYQFSYSNSWQRISYTFSASQSYDENDKEEERFNLFISIPFYWGDDIAKTRHQINLSNSTSFSKDGYSSNNTGITGIAGEHDQLNYGIYVNQQQQNNDTSLGTNLSWRTPIAIIDGSYSHSKNTWQSGGSISSGLVVWPGGINITNQLSDTFAILDAPGLEGAHINGQKYNRTNSKGQVVYDLIIPHRENHLVLDIANSESETELQGNRQIIAPYRGAVSYVQFTTNQRKPWYIQALRPDGSPLTFGYDVLDLQENNIGVVGQGSRLFIRVDEIPTGIKVALNDEQNLFCTITFQHVIDENKTYICQ

SEQ ID NO: 15259 - protein, 150 aa, Escherichia coli
MSFFILPVHAGVVIYGTRIIYPEKNREVLVQLMNQSKNASLIQAWIDDGNTTIAPEKIQVPFILTPPVSRVAGGSGQQLKIRKMPNNLPHNKESLFYLNVLDIPPNNPQNAGKNKIKLALQNRIKLLWRPSGIAPVDKKSLSQLNIKKKK

SEQ ID NO: 15260 - protein, 700 aa, Escherichia coli
MKIFSVRQTVLPALLVLSPVVFAADEQTMIVSAAPQVVSELDTPAAVSVVDGEEMRLATPRINLSESLTSVPGLQVQNRQNYAQDLQLSIRGFGSRSTYGIRGIRLYVDGIPATMPDGQGQTSNIDLSSVQNVEVLRGPFSALYGNASGGVMNVITQTGQQPPTIEASSYYGSFGSWRYGLKATGAMGDGTQPGDVDYTVSTTRFTTHGYRDHSGAQKNLANAKLGVRIDDASKLSLIFNSVDIKADDPGGLTEAEWKANPQQAPRAEQYDTRKTIKQTQAGLRYERSLSAQDDMSVMMYAGERETTQYQSIPMAPQLNPSHAGGVITLQRHYQGIDSRWTHRGELGVPLTFTTGLNYENMSENRKGYNNFRLNSGVPEYGQKGELRRDERNLMWNVDPYLQTQWQLSEKLSLDAGVRYSSVWFDSNDHYVTSGNGDDSGDASYHKWLPAGSLKYAMTDAWNIYLAAGRGFETPTINELSYRADGQSGMNFGLKPSTNDTIEIGSKTRIGDGLLSLALFQTDTDDEIVVDSSSGGRTTYKNAGKTRRQGAELAWDQRFAGDFRVKASWTWLDATYRSNVCNEQDCNGNRMPGIARNMGFASIGYVPEDGWYAGTEARYMGDIMADDENTAKAPSYTLVGLFTGYKYNYHNLTVDLFGRVDNLFDKEYVGSVIVNESNGRYYEPAPGRNYGVGMNIAWRFE

SEQ ID NO: 15261 - protein, 729 aa, Escherichia coli
MLSTQFNRDNQYQTTSKPSLLAACIALALLPSAAFAAPATEETVIVEGSATTPVDDENDYSVTSTSAGTKMQMTQRDIPQSVTIVSQQRMEDQQLQTLGEVMENTLGISKSQADSDRALYYSRGFQIDNYMVDGIPTYFESRWNLGDALSDMALFERVEVVRGATGLMTGTGNPSAAINMVRKHATSREFKGDVSAEYGSWNKERYVADIQSPLTEDGKIRARIVGGYQNNDSWLDRYNSEKTFFSGIVDADLGDLTMLSAGYEYQRIDVNSPTWGGLPRWNTDGSSNSYDRARSTAPDWAYNDKEINKVFMTLKQRFADTWQATLNATHSEVEFDSKMMYVDAYVNKADGMLVGPYSNYGPGFDYVGGTGWNSGKRKVDALDLFADGSYELFGRQHNLMFGGSYSKQNNRYFSSWANIFPDEIGSFYNFNGNFPQTDWSPQSLAQDDTTHMKSLYAATRVTLADPLHLILGARYTNWRVDTLTYSMEKNHTTPYAGLVFDINDNWSTYASYTSIFQPQNDRDSSGKYLAPITGNNYELGLKSDWMNSRLTTTLAIFRIEQDNVAQSTGTPIPGSNGKTAYKAVDGTVSKGVEFELNGAITDNWQLTFGATRYIAEDNEGNAVNPNLPRTTVKMFTSYRLPVMPELTVGGGVNWQNRVYTDTVTPYDTFRAEQGSYALVDLFTRYQVTKNFSLQGNVNNLFDKTYDTNVEGSIVYGAPRNFSITGTYQF

SEQ ID NO: 15262 - protein, 432 aa, Escherichia coli; identical to SEQ ID NO: 2026

SEQ ID NO: 15263 - protein, 840 aa, Escherichia coli
MNNKNTFTGDKLSHAIKIALSGVVCSLLFVLPVHAVEFNVDMIDVEDRENIDISRFEKKGYITPGKYLVRVQINKNMLPQTLILEWVKADNESGSLLCLTKENLTSFGLNTEFIESLQTIAGSECLNLSQRQELTTRLDKATMILSLSVPQAWLKYQATNWTPPEFWDAGIAGFILDYNMYASQYAPHHGDSTQNVSSYGTLGFNLGAWRLRSDYQYNQNFADGRSVNHDSEFARTYLFRPIPSWSSKFTMGQYDLSSNLYDTFHFTGASLESDESMLPPDLQGYAPQITGIAQTNAKVTVAQNGRVLYQTTVAPGPFTISDLGQSFQGQLDVTVEEEDGRTSTFQVGSASIPYLTRKGQVRYKTSLGKPTSVGHNDINNPFFWTAEASWGWLNNVSLYGGGMFTADDYQAITTGIGFNLNQFGSLSFDVTGADASLQQQNSDNLRGYSYRFNYAKHFESTGSQITFAGYRFSDKDYVSMSEYLSSRNGDESIDNEKESYVISLNQYFETLELNSYLNVTRNTYWDSASNTNYSVSVSKNFDIGDFKGISASLAVSRIRWDDDEENQYYFSFSLPLQQNRNISYSMQRTGSSNTSQMISWYDSSDRNNIWNISASATDDNIRDGEPTLRGSYQHYSPWGRLNINGSVQPNQYNSVTAGWYGSLTVTRHGVALHDYSYGDNARMMVDTDGISGVEINSNRTVTNGLGIAVIPSLSNYTTSMLRVNNNDLPEGVDVENSVIRTTLTQGAIGYAKLNATTGYQIVGVIRQENGRFPPLGVNVTDKATGKDVGLVAEDGFVYLSGIQENSILHLTWGDNTCEVTPPNQSNISESAIILPCKTVK

SEQ ID NO: 15264 - protein, 249 aa, Escherichia coli; identical to SEQ ID NO: 9840

SEQ ID NO: 15265 - protein, 353 aa, Escherichia coli
MKMKKSTLALVVMGIVASASVQAAEIYNKDGNKLDVYGKVKAMHYMSDNDSKDGDQSYIRFGFKGETQINDQLTGYGRWEAEFAGNKAESDTAQQKTRLAFAWLKYKDLGSFDYGRNLGALYDVEAWTDMFPEFGGDSSAQTDNFMTKRASGLATYRNTDFFGVIDGLNLTLQYQGKNENRDVKKQNGDGFGTSLTYDFGGSDFAISGAYTNSDRTNEQNLQSRGTGKRTEAWATGLKYDANNIYLATFYSETRKMTPISGGFANKTQNFEAVAQYQFDFGLRPSLGYVLSKGKDIEGIGDEDLVNYIDVGATYYFNKNMSAFVDYKINQLDSDNKLNINNDDIVAVGMTYQF

SEQ ID NO: 15266 - protein, 337 aa, Escherichia coli
MPLTAINQFLTVGGEWRHDKLSDAVNLTGGTSSKTSASQYALFVEDEWRIFEPLALTTGVRMDDHETYGEHWSPRAYLVYNATDTVTVKGGWATAFKAPSLLQLSPDWTSNSCRGACKIVGSPDLKPETSESWELGLYYMGEEGWLEGVESSVTVFRNDVKDRISISRTSDVNAAPGYQNFVGFTANGVPVFSYYNVNKARIQGVETELKIPFNDEWKLSINYTYNDGRDVSNGENKPLSDLPFHTANGTLDWKPLALEDWSFYVSGHYTGQKRADSATAKTPGGYTIWNTGAAWQVTKDVKLRAGVLNLGDKDLSRDDYSYNEDGRRYFMAVDYRF

SEQ ID NO: 15267 - protein, 274 aa, Escherichia coli; identical to SEQ ID NO: 9502

SEQ ID NO: 15268 - protein, 369 aa, Escherichia coli
MKVKNFIYLPFCLFIGTSVAGALPEIPEPFKYGVGGIENGKIYIGLGSLGNNWYMIDTNQSEKKWTKIAQWPTVPREQATATIIDGKIYVFGGIGKDTSGVITLQKDVYSYDIAKDKWEKLMTRPPVSLAGHVSFIHNGHAVSTGGVNENIFNGYFSDVELSKGNSALTEKVNRDYFSKPADDYFLNNHIISYDPSKNQWKNLGTTPFPGTAGSSVIFAEQQIYILGGERKPGLRSVRSWTGELSHDRIKWSELPPVASPEGVSGAYASVIDGNIFLAGGAYFPGAAEKYSNGEYWSHKGLDKAYSKEIYQLIKNDWKKVGSLPEGLAYGVSLPWQGGMLILGGEKKDGKAVSDVIYLKKNDKQIKIVK

SEQ ID NO: 15269 - protein, 831 aa, Escherichia coli
MQELPMLRMTPLASAIVALLLGIEAYAAEETFDTHFMIGGMKDQQVANIRLDDNQPLPGQYDIDIYVNKQWRGKYEIIVKDNPQETCISREIIKRLGINTDNFASGKQCLTFEQLVQGGSYTWDIGVFRLDFSVPQAWVEELESGYVPPENWERGINAFYTSYYVSQYYSDYKASGNSKSTYVRFNSGLNLLGWQLHSDASFSKTNSNPGGWKSNTLYLERGFAQLLGTLRVGDMYTSSDIFDSVRFSGVRLFRDMQMLPNSKQNFTPRVQGIAQSNALVTIEQNGFVVYQKEVPPGPFAITDLQLAGGGADLDVSVKEADGSVTTYLVPYAAVPNMLQPGVSKYDFAAGRSHIEGASKQSDFVQAGYQYGFNNLLTLYGGSMVANNYYAFTLGTGWNTRIGAISVDATKSHSKQDNGDVFDGQSYQIAYNKFVSQTSTRFGLAAWRYSSRDYRTFNDHVWANNKDNYRRDENDIYDIADYYQNDFGRKNSFSANMSQSLPEGWGSVSLSTLWRDYWGRSGSSKDYQLSYSNNLRRISYTLAASQAYDENHHEEKRFNIFISIPFDWGDDVTTPRRQIYMSNSTTFDDQGFASNNTGLSGTVGSRDQFNYGVNLSHQHQGNETTAGANLTWNAPVATVNGSYSQSSTYRQAGASVSGGIVAWSEGVNLANRLSETFAVMNAPGIKDAYVNGQKYRTTNRNGVVVYDGMTPYRENHLMLDVSQSDSEAELRGNRKIAAPYRGAVVLVNFDTDQRKPWFIKALRTDGQPLTFGYEVNDIHGHNIGVVGQGSQLFIRTNEVPPSVNVAINKQQGLSCTITFGKEIDESRNYICQ

SEQ ID NO: 15270 - protein, 656 aa, Escherichia coli
MRLKKRYLCTALSLAFTQQAVAAQESDTLTVWSSPVSSTTTTVLDQPTMKALDKQNVAQALSVVPGVVLQKSGSRNEEQVKIRGFDSRQVPVYFDGVPIYVPYDGNLDLARILTNNLGAVEVSKGYSSLLQGPNQMGGAINITTQKPTKPLEANLGYRQGWSRSQDNAYDMHASFAASSDLGYLQVSGSQLKQDFLGLPHGVNNDIAGKHGKMINSSADDKRGIVKLGFTPRENDEYTLTYIKQDGEKDNPPYSGNSGQKSRYWQWPEYDKERFYYQGTTQLNDRFTLKSRLYRDTFENTLMMYNSLADLKNKKGSYSHYSDYSDGAGLQLAADVRENDLLSFAVNWKDDVHREKGAPHAAYDRYEDRTWSLASEYQWAAADNVDVVAGISYDWRDSVEAKKHEKDGSITHYDDNNQSAFNWQVMGKYHFANEDTLALSYYDRTRFPTLKERYTTSKPAYNQIAIVNPQLKPERARGVDLTWNGAFTHDWGFEVSVYYNRVSDAILSHNIDADTIQNQNSGTVDYSGLDAGIKGKISNILDVGLSYALIHADAKRKDIGKITDLPTQTMTAWMTLKPWEPLNVTLSEEARSSSYSNSDGSQKAAGFAVTHIRADYTLGHGFSVNASVNNLFDTQYAYSEGFIEEGRNFWAGIEYTF

SEQ ID NO: 15271 - protein, 386 aa, Escherichia coli
MVDDVPVAQVLQALAEQEKLNLVVSPDVSGTVSLHLTDVPWKQALQTVVKSAGLITRQEGNILSVHSVAWQNDNIARQEAEQARAQANLPLENRNITLQYADAGELAKAGEKLLSAKGSMTVDKRTNRLLLRDNKAALSALEQWVAQMDLPVGQVELSAHIVTINEKSLRELGVKWTLADAQQAGGVGQVTTLGSDLSVATATTHVGFNIGRINGRLLDLELSALEQKQQLDIIASPRLLASHLQPASIKQGSEIPYQVSSGESGATSVEFKEAVLGMEVTPTVLQKGRIRLKLHISQNVPGQVLQQADGEVLAIDKQEIETQVEVKSGETLALGGIFTRKNKSGQDSVPLLGDIPWFGQLFRHDGKEDERRELVVFITPRLVSSE

SEQ ID NO: 15272 - protein, 518 aa, Escherichia coli; identical to SEQ ID NO: 13541

SEQ ID NO: 15273 - protein, 567 aa, Escherichia coli
MKIKLRITIILISALCIFNGLLTPGAYAATANGYVANKENLRSFFETVSSYAGKPTIVSKLAMKKQISGNFDLTEPYALIERLSAQMGLIWYDDGKAIYIYDSSEMRNALINLRKVSTNEFNNFLKKSGLYNSRYEIKGGGNGTFYVSGPPVYVDLVVNAAKLMEQNSDGIEIGRNKVGIIHLVNTFVNDRTYELRGEKIVIPGMAKVLSTLLNNNIKQSTGVNVLSEISSRQQLKNVSRMPPFPGAEEDDDLQVEKIISTAGAPETDDIQIIAYPDTNSLLVKGTVSQVDFIEKLVATLDIPKRHIELSLWIIDIDKTDLEQLGADWSGTIKIGSSLSASFNNSGSISTLDGTQFIATIQALAQKRRAAVVARPVVLTQENIPAIFDNNRTFYTKLVGERTAELDEVTYGTMISVLPRFAARNQIELLLNIEDGNEINSDKTNVDDLPQVGRTLISTIARVPQGKSLLIGGYTRDTNTYESRKIPILGSIPFIGKLFGYEGTNANNIVRVFLIEPREIDERMMNNANEAAVDARAITQQMAKNKEINDELLQKWIKTYLNREVVGG

SEQ ID NO: 15274 - protein, 629 aa, Escherichia coli
MTVTATGNARSSFEAPMMVSVIDTSAPENQTATSASDLLRHVPGITLDGTGRTNGQDVNMRGYDHRGVLVLVDGVRQGTDTGHLNGTFLDPALIKRVEIVRGPSALLYGSGALGGVISYDTVDAKDLLQEGQSSGFRVFGTGGTGDHSLGLGASAFGRTENLDGIVAWSSRDRGDLRQSNGETAPNDESINNMLAKGTWQIDSAQSLSGLVRYYNNDAREPKNPQTVEASDSSNPMVDRSTIQRDAQLSYKLAPQGNDWLNADAKIYWSEVRINAQNTGSSGEYREQITKGARLENRSTLFADSFASHLLTYGGEYYRQEQHPGGATTGFPQAKIDFSSGWLQDEITLRDLPITLLGGTRYDSYRGSSDGYKDVDADKWSSRAGMTINPTNWLMLFGSYAQAFRAPTMGEMYNDSKHFSIGRFYTNYWVPNPNLRPETNETQEYGFGLRFDDLMLSNDALEFKASYFDTKAKDYISTTVDFAAATTMSYNVPNAKIWGWDVMTKYTTDLFSLDVAYNRTRGKDTDTGEYISSINPDTVTSTLNIPIAHSGFSVGWVGTFADRSTHISSSYSKQPGYGVNDFYVSYQGQQALKGMTTTLVLGNAFDKEYWSPQGIPQDGRNGKIFVSYQW

SEQ ID NO: 15275 - protein, 635 aa, Escherichia coli
MNRYVQRDITAIRSQLIMGESYTTGETFDSVSIRGIRLYSDSRMLPPVLANFAPTIRGVANTNAKVSITQSGYKIYETTVPPGPFVIDDLSPSGYGSDLIVTIEEADGSKRTFSQPFSSVIQMLRPGVSRWDISGGQINKDDLHHEPNLLQATYYRGLSNLFTGYTGFQVTDNHYAAGLLGIGMNTSVGAISFDVTHSSVDIPDDKRYQGQSYRISWNKFFDLTDTSLNIAAYRYSTQDYLGLNDALTLIDEVEHPTQDLDPKTMRNYGRMKNQFTVSINQPLRFGKDDYGSFYTSGSWSDYWGGSKSRSNYSVGYSNSASWGSYSISAQRSWDEYSQTENSIYLSFSIPIEKLMGTEHRDSGFQSIDTQLSTNMDGNNQFNMSSSGYSNDNRVSYSVNAGYGMNKTGKDLSNIGGYASYESPWGTLAGSVSATSDNNRQYSVNTDGGFVLHSGGLTFSNDSFSDNDTIALVKAPGAKGARINYGNNTVDRWGYGVTSALSPYQENKIALDTENLENDIEMKSTSTVAVPRQGSVIFAGFETNQGQSAIMNIKRSDGKGIPFAADIHDETNAIIGNVGQGGQAFVRGIQQQGTIKITWLEASMPKTCIAQYQQPNVTSEKIQQTIILNNILCQLQ

SEQ ID NO: 15276 - protein, 236 aa, Escherichia coli
MTNTWNRLTLAIFAVLSLLVAGELQAGVVVGGTRFIFPADSESISISLTNTSQESWLINSKINRPTRWAGGEASTVPAPLLAAPPLILLKPGTTGTLRLLRTESGILPVDRETLFELSIASVPSGKVENQSVKVAMRSIFKLFWRPEGLPGDPLEAYQQLRWTRNSQGVQLTNPTPYYINLIQVSVNGKALSNAGVVPPKSQRQTSWCQAIAPCHVSWRTINDYGGLSAKKEQNLL

SEQ ID NO: 15277 - protein, 241 aa, Escherichia coli
MSNKNVNVRKSQEITFCLLAGILMFMAMMVAGRAEAGVALGATRVIYPAGQKQVQLAVTNNDENSTYLIQSWVENADGVKDGRFIVTPPLFAMKGKRENILRILDATNNQLPQDRESLFWMNVKAIPSMDKSKLTENTLQLAIISRIKLYYRPAKLALPPDQAAEKLRFRRSANSLTLINPTPYYLTVTELNAGTRVLENALVPPMGESTVKLPSDAGSNITYRTINDYGALTPKMTGVME

SEQ ID NO: 15278 - protein, 357 aa, Escherichia coli; identical to SEQ ID NO: 2888

SEQ ID NO: 15279 - protein, 162 aa, Escherichia coli; identical to SEQ ID NO: 1967

SEQ ID NO: 15280 - protein, 669 aa, Escherichia coli; identical to SEQ ID NO: 13976

SEQ ID NO: 15281 - protein, 213 aa, Escherichia coli; identical to SEQ ID NO: 2232

SEQ ID NO: 15282 - protein, 249 aa, Escherichia coli; identical to SEQ ID NO: 4132

SEQ ID NO: 15283 - protein, 239 aa, Escherichia coli
MHQMQTTRTLYSISFMATVLLLLLFACHSTIANAAVALGATRVIYPANQKQVLLPVTNNDPASVYLIQSWIENAGDQKDTQFVITPPLFSMQGKKENTLRIINATNHQLPGDRESLFWVNVKAIPAMEKDQKNENTLQLAIISRIKMFYRPTNLAMAPEEAPAMLRFRRSGSKLTLINPTPYFITVTNMKAGNSNLPNTMVPPKGEVSVDIPHAATGDISFQTINDYGALTPRIKATMQ

SEQ ID NO: 15284 - protein, 250 aa, Escherichia coli; identical to SEQ ID NO: 15147

SEQ ID NO: 15285 - protein, 733 aa, Escherichia coli
MAQALAAEGQANADDTLVVEASTPSLYAPQQSADPKFSRPVADTTRTMTVISEQVIKDQGATNLTDALKNVPGVGAFFAGENGNSTTGDAIYMRGADTSNSIYIDGIRDIGSVSRDTFNTEQVEVIKGPSGTDYGRSAPTGSINMISKQPRNDSGIDASASIGSAWFRRGTLDVNQAIGDTTAVRLNVMGEKTHDAGRDKIKNERYGVAPSVAFGLGTANRLYLNYLHVTQHNTPDGGIPTIGLPGYSAPSAGTAALNHSGKVDTHNFYGTDSDYDDSTTDTATMRFEHDINDNTTIRNTTRWSRVKQDYLMTAIMGGASNITQPTSDVNSWTWSRTANTKDVSNKILTNQTNLTSTFYTGSIGHDVSTGVEFTRETQTNYGVNPVTLPAVNIYHPDNSIHPGGLTRNGANANGQTDTFAIYAFDTLQITRDFELNGGIRLDNYHTEYDSATACGGSGRGAITCPAGVAKGSPVTTVDTAKSGNLVNWKAGALYHLTENGNVYINYAVSQQPPGGNNFALAQSGSGNSANRTDFKPQKANTSEIGTKWQVLDKRLLLTAALFRTDIENEVEQNDDGTYSQYGKKRVEGYEISVAGNITPAWQVIGGYTQQKATIKNGKDVAQDGSSSLPYTPEHAFTLWSQYQATDDISVGAGARYIGSMHKGSDGAVGTPAFTEGYWVADAKLGYRVNRNLDFQLNVYNLFDTDYVASINKSGYRFHPGEPRTFLLTANMHF

SEQ ID NO: 15286 - protein, 1024 aa, Escherichia coli
MPTITTAQIKSTLQSAKQSSANKLHSAGQSTKDALKKAAEQTRNAGNRLILLIPKDYKGQGSSLNDLVRTADELGIEVQYDEKNGTAITKQVFGTAEKLIGLTERGVTIFAPQLDKLLQKYQKAGNKLGGSAENIGDNLGKAGSVLSTFQNFLGTALSSMKIDELIKRQKSGSNVSSSELAKASIELINQLVDTAASINNNVNSFSQQLNKLGSVLSNTKHLNGVGNKLQNLPNLDNIGAGLDTVSGILSAISASFILSNADADTGTKAAAGVELTTKVLGNVGKGISQYIIAQRAAQGLSTSAAAAGLIASVVTLAISPLSFLSIADKFKRANKIEEYSQRFKKLGYDGDSLLAAFHKETGAIDASLTTISTVLASVSSGISAAATTSLVGAPVSALVGAVTGIISGILEASKQAMFEHVASKMADVIAEWEKKHGKNYFENGYDARHAAFLEDNFKILSQYNKEYSVERSVLITQQHWDTLIGELAGVTRNGDKTLSGKSYIDYYEEGKRLEKKPDEFQKQVFDPLKGNIDLSDSKSSTLLKFVTPLLTPGEEIRERRQSGKYEYITELLVKGVDKWTVKGVQDKGSVYDYSNLIQHASVGNNQYREIRIESHLGDGDDKVFLSAGSANIYAGKGHDVVYYDKTDTGYLTIDGTKATEAGNYTVTRVLGGDVKILQEVVKEQEVSVGKRTEKTQYRSYEFTHINGKNLTETDNLYSVEELIGTTRADKFFGSKFTDIFHGADGDDHIEGNDGNDRLYGDKGNDTLRGGNGDDQLYGGDGNDKLIGGTGNNYLNGGDGDDELQVQGNSLAKNVLSGGKGNDKLYGSEGADLLDGGEGNDLLKGGYGNDIYRYLSGYGHHIIDDDGGKDDKLSLADIDFRDVAFRREDNDLIMYKAEGNVLSIGHKNGITFRNWFEKESGDISNHQIEQIFDKDGRVITPDSLKKALEYQQSNNKASYVYGNDALAYGSQDNLNPLINEISKIISAAGNFDVKEERAAASLLQLSGNASDFSYGRNSITLTASA

SEQ ID NO: 15287 - protein, 517 aa, Escherichia coli
MKHKLQMMKMRWLSAAVMLTLYTSSSWAFSIDDVAKQAQSLAGKGYDAPKSNLPSVFRDMKYADYQQIQFNHDKAYWNNLKTPFKLEFYHQGMYFDTPVKINEVTATAVKRIKYSPDYFTFGDVQHDKDTVKDLGFAGFKVLYPINSKDKNDEIVSMLGASYFRVIGAGQVYGLSARGLAIDTALPSGEEFPRFKEFWIERPKPTDKRLTIYALLDSPRATGAYKFVVMPGRDTVVDVQSKIYLRDKVGKLGVAPLTSMFLFGPNQPSPANNYRPELHDSNGLSIHAGNGEWIWRPLNNPKHLAVSSFSMENPQGFGLLQRGRDFSRFEDLDDRYDLRPSAWVTPKGEWGKGSVELVEIPTNDETNDNIVAYWTPDQLPEPGKEMNFKYTITFSRDEDKLHAPDNAWVQQTRRSTGDVKQSNLIRQPDGTIAFVVDFTGAEMKKLPEDTPVTAQTSIGDNGEIVESTVRYNPVTKGWRLVMRVKVKDAKKTTEMRAALVNADQTLSETWSYQLPANE

SEQ ID NO: 15288 - protein, 713 aa, Escherichia coli
MAKFTPSFSGIKGRALFSLLFAAPMIHATDTATTKDGETITVTADANTATEATDGYQPLSTSMATLTDMPMLDIPQVVNTVSDQVLENQNATTLDEALYNVSNVVQTNTLGGTQDAFVRRGFGANRDGSIMTNGLRTVLPRSFNAATERVEVLKGPASTLYGILDPGGLINVVTKRPEKTFHGSVSATSSSFGGGTGQLDITGPIEGTQLAYRLTGEVQDEDYWRNFGKERSTFIAPSLTWFGDNATVTMLYSHRDYKTPFDRGTIFDLTTKQPVNVDRKIRFDEPFNITDGQSDLAQLNAEYHLNSQWTARFDYSYSQDKYGDNQARVTAYDATTGTLTRRVDATQGSTQRMHATRADLQGNVDIAGFYNEILGGVSYEYYDLLRTDMIRCKNAKDFNIYNPVYGNTSKCTTVSASDSDQTIKQESYSAYAQDALYLTDNWIAVAGIRYQYYTQYAGKGRPFNVNTDSRDEQWTPKLGLVYKLTPSVSLFANYSQTFMPQSSIASYIGDLPPESSNAYEVGAKFELFDGITADIALFDIHKRNVLYTESIGDETIAKTAGRVRSRGVEVDLAGALTENINIIASYGYTDAKVLEDPDYAGKPLPNVPRHTGSLFLTYDIHNMPGNNTLTFGGGGHGVSRRSATNGADYYLPGYFVADAFAAYKMKLQYPVTLQLNVKNLFDKTYYTSSIATNNLGNQIGDPREVQFTVKMEF

SEQ ID NO: 15289 - protein, 233 aa, Escherichia coli
MKTCITKGIVTVSLTAILLSCSFTWAAGKGGVGLAATRLVYSEGEEQISLGVRNTSPDVPYLIQSWVMTPDNKKSADFIITPPLFVLNPANENLLRIMYIGAPLAKDRETLFFTSVRAVPSTTKREEGNTLKIATQSVIKLFWRPKGLPYPLAEAPAKLRCTSSADMVTVSNPTPYFITLTDLKIGGKVVKNQMISPFDKYQFPLPKGAQNSSVTYRTINDYGAETPQLNCKS

SEQ ID NO: 15290 - protein, 614 aa, Escherichia coli
MIKKASLLTAFSVTAFSAWAQDTSPDTLVVTANRFEQPRSTVLAPTTVVTRQDIDRWQSTSVNDVLRRLPGVDITQNGGSGQLSSIFIRGTNASHVLVLIDGVRLNLAGVSGSADLSQFPIALVQRIEYIRGPRSAVYGSDAIGGVVNIITTRDEPGTEISAGWGSNSYQNYDVSTQQQLGDKTRVTLLGDYAHTHGYDVVAYGNTGTQAQTDNDGFLSKTLYGALEHNFTDAWSGFVRGYGYDNRTNYDAYYSPGSPLLDTRKLYSQSWDAGLRYNGELIKSQLITSYSHSKDYNYDPHYGRYDSSATLDEMKQYTVQWANNVTVGHGNIGAGVDWQKQSTAPGTAYVKDGYDQRNTGIYLTGLQQVGDFTFEGAARSDDNSQFGRHGTWQTSAGWEFIEGYRFIASYGTSYKAPNLGQLYGFYGNPNLNPEKSKQWEGAFEGLTAGVNWRISGYRNDVSDLIDYDDHTLKYYNEGKARIKGVEATANFDTGPLTHTVSYDYVDARNAITDTPLLRRAKQQVKYQLDWQLYDFDWGITYQYLGTRYDKDYSSYPYQTVKMGGVSLWDLAVAYPVTSHLTVRGKIANLFDKDYETVYGYQTAGREYTLSGSYTF

SEQ ID NO: 15291 - protein, 446 aa, Escherichia coli; identical to SEQ ID NO: 13532

SEQ ID NO: 15292 - protein, 366 aa, Escherichia coli; identical to SEQ ID NO: 4014

SEQ ID NO: 15293 - protein, 230 aa, Escherichia coli; identical to SEQ ID NO: 2580

SEQ ID NO: 15294 - protein, 228 aa, Escherichia coli
MAFSMPVMADIVISGTRVIYKSDQKSVSVRLENKGNSHLLVQSWLDTGDDNAEPGSINVPFTATPPVSRIDAKRGQTIKLMYTGSTVLPSDKESVFWFNVLEVPPKPDASKVENQSLLQLAFRTRIKLFYRPAGLNGNPSEAPLALKWKWAEGKSGLSVYNPTPYYVSFNNAELIAGGKSNPLNVKMVAPKSEEIFTISGSGGKATSGKVHFSAINDFGGAIEGDVNL

SEQ ID NO: 15295 - protein, 478 aa, Escherichia coli; identical to SEQ ID NO: 13192

SEQ ID NO: 15296 - protein, 122 aa, Escherichia coli; identical to SEQ ID NO: 2915

SEQ ID NO: 15297 - protein, 349 aa, Escherichia coli
MQELPMLRMTPLASAIVALLLGIEAYAAEETFDTHFMIGGMKDQQVANIRLDDNQPLPGQYDIDIYVNKQWRGKYEIIVKDNPQETCLSREVIKRLGINSDNFASGKQCLTFEQLVQGGSYTWDIGVFRLDFSVPQAWVEELESGYVPPENWERGINAFYTSYYLSQYYSDYKASGNNKSTYVRFNSGLNLLGWQLHSDASFSKTNNNPGVWKSNTLYLERGFAQLLGTLRVGDMYTSSDIFDSVRFRGVRLFRDMQMLPNSKQNFTPRVQGIAQSNALVTIEQNGFVVYQKEVPPGPFAITDLQLAGGGADLDVSVKEADGSVTTYLVPYAAVPNMLQPGVSKYDFAA

SEQ ID NO: 15298 - protein, 565 aa, Escherichia coli
MPSFIGGLVVFVSAAFNAQAETWFDPAFFKDDPSMVADLSRFEKGQKITPGVYRVDIVLNQTIVDTRNVNFVEITPEKGIAACLTTESLDAMGVNTDAFPAFKQLDKQACVPLAEIIPDASVTFNVNKLRLEISVPQIAIKSNARGYVPPERWDEGINALLLGYSFSGANSIHSSADSDSGDSYFLNLNSGVNLGPWRLRNNSTWSRSSGQTAEWKNLSSYLQRAVIPLKGELTVGDDYTAGDFFDSVSFRGVQLASDDNMLPDSLKGFAPVVRGIAKSNAQITIKQNGYTIYQTYVSPGAFEISDLYSTSSSGDLLVEIKEADGSVNSYSVPFSSVPLLQRQGRIKYAVTLAKYRTNSNEQQESKFAQATLQWGGPWGTTWYGGGQYAEYYRAAMFGLGFNLGDFGAISFDATQAKSTLADQSEHKGQSYRFLYAKTLNHLGTNFQLMGYRYSTSGFYTLSDTMYKHMDGYEFNDGDDEDTPMWSRYYNLFYTKRGKLQVNISQQLGEYGSFYLSVASKLTGIRINRIGYYSLATTRKLKIFRWGFPGTTVSPVVNLMLIRCLL

SEQ ID NO: 15299 - protein, 867 aa, Escherichia coli; identical to SEQ ID NO: 2581

SEQ ID NO: 15300 - protein, 207 aa, Escherichia coli; identical to SEQ ID NO: 2211

SEQ ID NO: 15301 - protein, 862 aa, Escherichia coli; identical to SEQ ID NO: 5294

SEQ ID NO: 15302 - protein, 813 aa, Escherichia coli
MVLTGSGMLCTTANAEEYYFDPIMLETTKSGMQTTDLSRFSKKYAQLPGTYQVDIWLNKKKVSQKKITFTANAEQLLQPQFTVEQLRELGIKVDEIPALAEKDDDSVINSLEQIIPGTAAEFDFNHQQLNLSIPQIALYRDARGYVSPSRWDDGIPTLFTNYSFTGSDNRYRQGNRSQRQYLNMQNGANFGPWRLRNYSTWTRNDQTSSWNTISSYLQRDIKALKSQLLLGESATSGSIFSSYTFTGVQLASDDNMLPNSQRGFAPTVRGIANSSAIVTIRQNGYVIYQSNVSAGAFEINDLYPSSNSGDLEVTIEESDGTQRRFIQPYSSLPMMQRPGHLKYSATAGRYRADANSDSKEPEFAEATAIYGLNNTFTLYGGLLGSEDYYALGIGIGGTLGALGALSMDINRADTQFDNQHSFHGYQWRTQYIKDIPETNTNIAVSYYRYTNDGYFSFNEANTRNWDYNSRQKSEIQFNISQTIFDGVSLYASGSQQDYWGNNDKNRNISVGVSGQQWGVGYSLNYQYSRYTDQNNDRALSLNLSIPLERWLPRSRVSYQMTSQKDRPTQHEMRLDGSLLDDGRLSYSLEQSLDDDNNHNSSLNASYRSPYGTFSAGYSYGNDSSQYNYGVTGGVVIHPHGVTLSQYLGNAFALIDANGASGVRIQNYPGIATDPFGYAVVPYLTTYQENRLSVDTTQLPDNVDLEQTTQFVVPNRGAMVAARFNANIGYRVLVTVSDRNGKPLPFGALASNDDTGQQSIVDEGGILYLSGISSKSQSWTVRWGNQADQQCQFAFSTPDSEPTTSVLQGTAQCH

SEQ ID NO: 15303 - protein, 897 aa, Escherichia coli; identical to SEQ ID NO: 1908

SEQ ID NO: 15304 - protein, 266 aa, Escherichia coli; identical to SEQ ID NO: 1894

SEQ ID NO: 15305 - protein, 802 aa, Escherichia coli
MAMPCAMAVEFNLNVLDKSMRDRIDISLLKEKGVIAPGEYFVSVAVNNNKISNGQKINWQKKGDKTIPCINDSLVDKFGLKPDIRQSLPQIDRCIDFSSRPEMLFNFDQANQQLNISIPQAWLAWHSENWAPPSTWKEGVAGVLMDYNLFASSYRPQDGSSSTNLNAYGTAGINAGAWRLRSDYQLNKTDSEDNHDQSGGISRTYLFRPLPQLGSKLTLGETDFSSNIFDGFSYTGAALASDDRMLPWELRGYAPQISGIAQTNATVTISQSGRVIYQKKVPPGPFIIDDLNQSVQGTLDVKVTEEDGRVNNFQVSAASTPFLTRQGQVRYKLAAGQPRPSMSHQTENETFFSNEVSWGMLSNTSLYGGLLISDDDYHSAAMGIGQNMLWLGALSFDVTWASSHFDTQQDERGLSYRFNYSKQVDATNSTISLAAYRFSDRHFHSYANYLDHKYNDSDAQDEKQTISLSVGQPITPLNLNLYANLLHQTWWNADASTTANITAGFNVDIGDWRDISISTSFNTTHYEDKDRDNQIYLSISLPFGNGGRVGYDMQNSSHSTIHRMSWNDTLDERNSWGMSAGLQSDRPDNGAQVSGNYQHLSSAGEWDISGTYAASDYSSVSSSWSGSFTATQYGAAFHRRSSTNEPRLMVSTDGVADIPVQGNLDYTNHFGIAVVPLISSYQPSTVAVNMNDLPDGVTVAENVIKETWIEGAIGYKSLASRSGKDVNVIIRNASGQFPPLGADIRQDDSGISVGMVGEEGHAWLSGVAENQLFTVVWGEQSCIIHLPERLEDTTKRLILPCH

SEQ ID NO: 15306 - protein, 865 aa, Escherichia coli; identical to SEQ ID NO: 8232

SEQ ID NO: 15307 - protein, 793 aa, Escherichia coli; identical to SEQ ID NO: 2768

SEQ ID NO: 15308 - protein, 834 aa, Escherichia coli; identical to SEQ ID NO: 3118

SEQ ID NO: 15309 - protein, 368 aa, Escherichia coli; identical to SEQ ID NO: 3933

SEQ ID NO: 15310 - protein, 161 aa, Escherichia coli; identical to SEQ ID NO: 2582

SEQ ID NO: 15311 - protein, 250 aa, Escherichia coli; identical to SEQ ID NO: 2761

SEQ ID NO: 15312 - protein, 274 aa, Escherichia coli
MNKTAIALLALLASSASLAATPWQKITQPVPGSAQSIGSFSNGCIVGADTLPIQSEHYQVMRTDQRRYFGHPDLVMFIQRLSSQVSNLGMGTVLIGDMGMPAGGRFNGGHASHQTGLDVDIFLQLPKTRWTSAQLLRPQALDLVSRDGKHVVSTLWKPEIFSLIKLAAQDKDVTRIFVNPAIKQQLCLDAGTDRDWLRKVRPWFQHRAHMHVRLRCPADSLECEDQPLPPSGDGCGAELQSWFEPPKPGTTKPEKKTPPPLPPFCQALLDEHVI

SEQ ID NO: 15313 - protein, 614 aa, Escherichia coli
MIKKASLLTACSVTAFSAWAQDTSPDTLVVTANRFEQPRSTVLAPTTVVTRQDIDRWQSTSVNDVLRRLPGVDITQNGGSGQLSSIFIRGTNASHVLVLIDGVRLNLAGVSGSADLSQFPIALVQRVEYIRGPRSAVYGSDAIGGVVNIITTRDEPGTEISAGWGSNSYQNYDVSTQQQLGDKTRVTLLGDYAHTHGYDVVAYGNTGTQAQTDNDGFLSKTLYGALEHNFTDAWSGFVRGYGYDNRTNYDAYYSPGSPLLDTRKLYSQSWDAGLRYNGELIKSQLITSYSHSKDYNYDPHYGRYDSSATLDEMKQYTVQWANNVIVGHGSIGAGVDWQKQTTTPGTGYVEDGYDQRNTGIYLTGLQQVGDFTFEGAARSGDNSQFGRHGTWQTSAGWEFIEGYRFIASYGTSYKAPNLGQLYGFYGNPNLDPEKSKQWEGAFEGLTAGVNWRISGYRNDVSDLIDYDDHTLKYYNEGKARIKGVEATANFDTGPLTHTVSYDYVDARNAITDTPLLRRAKQQVKYQLDWQLYDFDWGITYQYLGTRYDKDYSSYPYQTVKMGGVSLWDLAVAYPVTSHLTVRGKIANLFDKDYETVYGYQTAGREYTLSGSYTF

SEQ ID NO: 15314 - protein, 541 aa, Escherichia coli; identical to SEQ ID NO: 4657

SEQ ID NO: 15315 - protein, 673 aa, Escherichia coli; identical to SEQ ID NO: 2919

SEQ ID NO: 15316 - protein, 208 aa, Escherichia coli; identical to SEQ ID NO: 1949

SEQ ID NO: 15317 - protein, 213 aa, Escherichia coli; identical to SEQ ID NO: 8226

SEQ ID NO: 15318 - protein, 729 aa, Escherichia coli
MLSTQFNRDNQYQAITKPSLLAGCIALALLPSAAFAAPATEETVIVEGSATAPDDGENDYSVTSTSAGTKMQMTQRDIPQSVTIVSQQRMEDQQLQTLGEVMENTLGISKSQADSDRALYYSRGFQIDNYMVDGIPTYFESRWNLGDALSDMALFERVEVVRGATGLMTGTGNPSAAINMVRKHATSREFKGDVSAEYGSWNKERYVADLQSPLTEDGKIRARIVGGYQNNDSWLDRYNSEKTFFSGIVDADLGDLTTLSAGYEYQRIDVNSPTWGGLPRWNTDGSSNSYDRARSTAPDWAYNDKEINKVFMTLKQQFADIWQATLNATHSEVEFDSKMMYVDAYVNKADGMLVGPYSNYGPGFDYVGGTGWNSGKRKVDALDLFADGSYELFGRQHNLMFGGSYSKQNNRYFSSWANIFPDEIGSFYNFNGNFPQTDWSPQSLAQDDTTHMKSLYAATRVTLADPLHLILGARYTNWRVDTLTYSMEKNHTTPYAGLVFDINDNWSTYASYTSIFQPQNDRDSSGKYLAPITGNNYELGLKSDWMNSRLTTTLAIFRIEQDNVAQSTGTPIPGSNGETAYKAVDGTVSKGVEFELNGAITDNWQLTFGATRYIAEDNEGNAVNPNLPRTTVKMFTSYRLPVMPELTVGGGVNWQNRVYTDTVTPYGTFRAEQGSYALVDLFTRYQVTKNFSLQGNVNNLFDKTYDTNVEGSIVYGTPRNFSITGTYQF

SEQ ID NO: 15319 - protein, 784 aa, Escherichia coli
MKKRIPTLLATMIATALYSQQGLAADLASQCMLGVPSYDRPLVQGDTNDLPVTINADHAKGDYPDDAVFTGSVDIMQGNSRLQADEVQLHQKEAPGQPEPVRTVDALGNVHYDDNQVILKGPKGWANLNTKDTNVWEGDYQMVGRQGRGKADLMKQRGENRYTILDNGSFTSCLPGSDTWSVVGSEIIHDREEQVAEIWNARFKVGPVPIFYSPYLQLPVGDKRRSGFLIPNAKYTTTNYFEFYLPYYWNIAPNMDATITPHYMHRRGNIMWENEFRYLSQAGAGLMELDYLPSDKVYEDEHPNDDSSRRWLFYWNHSGVMDQVWRFNVDYTKVSDPSYFNDFDNKYGSSTDGYATQKFSVGYAVQNFNATVSTKQFQVFSEQNTSSYSAEPQLDVNYYQNDVGPFDTRIYGQAVHFVNTRDDMPEATRVHLEPTINLPLSNNWGSINTEAKLLATHYQQTNLDWYNSRNTTKLDESVNRVMPQFKVDGKMVFERDMEMLAPGYTQTLEPRAQYLYVPYRDQSDIYNYDSSLLQSDYSGLFRDRTYGGLDRIAPANQVTTGVTSRIYDDAAVERFNISVGQIYYFTESRTGDDNITWENDDKTGSLVWAGDTYWRISERWGLRGGIQYDTRLDNVATSNSSIEYRRDEDRLVQLNYRYASPEYIQATLPKYYSTAEQYKNGISQIGAVASWPIADRWSIVGAYYYDTNANKQADSMLGVQYSSCCYAIRVGYERKLNGWDNDKQHAVYDNAIGFNIELRGLSSNYGLGTQEMLRSNILPYQNTL

SEQ ID NO: 15320 - protein, 760 aa, Escherichia coli; identical to SEQ ID NO: 2080

SEQ ID NO: 15321 - protein, 233 aa, Escherichia coli; identical to SEQ ID NO: 2006

SEQ ID NO: 15322 - protein, 362 aa, Escherichia coli; identical to SEQ ID NO: 2434

SEQ ID NO: 15323 - protein, 230 aa, Escherichia coli; identical to SEQ ID NO: 2580

SEQ ID NO: 15324 - protein, 191 aa, Escherichia coli; identical to SEQ ID NO: 2727

SEQ ID NO: 15325 - protein, 700 aa, Escherichia coli
MKIFSVRQTVLPALLVLSPVVFAADEQTMIVSAAPQVVSELDTPAAVSVVDGEEMRLATPRINLSESLTGVPGLQVQNRQNYAQDLQLSIRGFGSRSTYGIRGIRLYVDGIPATMPDGQGQTSNIDLSSVQNVKVLRGPFSALYGNASGGVMNVTTQTGQQPPTIEASSYYGSFGSWRYGLKATGATGDGTQPGDVDYTVSTTRFTTHGYRDHSGAQKNLANAKLGVRIDEASKLSLIFNSVDIKADDPGGLTKAEWKANPQQAPRAEQYDTRKTIKQTQAGLRYERSLSSRDDMSVMMYAGERETTQYQSIPMAPQLNPSHAGGVITLQRHYQGIDSRWTHRGELGVPVTFTTGLNYENMSENRKGYNNFRLNSGMPEYGQKGELRRDERNLMWNIDPYLQTQWQLSEKLSLDAGVRYSSVWFDSNDHYVTPGNGDDSGDASYHKWLPAGSLKYAMTDAWNIYLAAGRGFETPTINELSYRADGQSGMNLGLKPSTNDTIEIGSKTRIGDGLLSLALFQTDTDDEIVVDSSSGGRTTYKNAGKTRRQGAELAWDQRFAGDFRVNASWTWLDATYRSNVCNEQDCNGNRMPGIARNMGFASIGYVPEDGWYAGTEARYMGDIMADDENTAKAPSYTLVGLFTGYKYNYHNLTVDLFGRVDNLFDKEYVGSVIVNESNGRYYEPSPGRNYGVGMNIAWRFE

SEQ ID NO: 15326 - protein, 252 aa, Escherichia coli; identical to SEQ ID NO: 14514

SEQ ID NO: 15327 - protein, 242 aa, Escherichia coli; identical to SEQ ID NO: 2697

SEQ ID NO: 15328 - protein, 431 aa, Escherichia coli; identical to SEQ ID NO: 3408

SEQ ID NO: 15329 - protein, 554 aa, Escherichia coli; identical to SEQ ID NO: 3409

SEQ ID NO: 15330 - protein, 1653 aa, Escherichia coli
MKKLRVAACMLMLALAGCDNNDNAPTAVKKDAPSEVTKAASSENASSAKLSVPERQKLAQQSAGKVLTLLDLSEVQLDGAATLVLTFSIPLDPDQDFSRVIHVVDKKSGKVDGAWELSDNLKELRLRHLEPKRDLIVTIGKEVKALNNATFSKDYEKTITTRDIQPSVGFASRGSLLPGKVVEGLPVMALNVNNVDVNFFRVKPESLPAFISQWEYRNSLANWQSDKLLQMADLVYTGRFDLNPARNTREKLLLPLGDIKPLQQAGVYLAVMNQAGRYDYSNPATLFTLSDIGVSAHRYHNRLDIFTQSLENGAAQQGIEVSLLNEKGQTLTQATSDAQGHVQLENDKNAALLLARKDGQTTLLDLKLPALDLAEFNIAGAPGYSKQFFMFGPRDLYRPGETVILNGLLRDADGKALPNQPIKLDVIKPDGQVLRSVVSQPENGLYHFTWPLDSNAATGMWHIRANTGDNQYRMWDFHVEDFMPERMALNLTGEKTPLTPKDEVKFSVVGYYLYGAPANGNTLQGQLFLRPLREAVSALPGFEFGDIAAENLSRTLDEVQLTLDDKGRGEVSTESQWKETHSPLQVIFQGSLLESGGRPVTRRAEQAIWPADALPGIRPQFASKSVYDYRTDSTVKQPIVDEGSNAAFDIVYSDAQGVKKAVSGLQVRLIRERRDYYWNWSEDEGWQSQFDQKDLIENEQTLDLKADETGKVSFPVEWGAYRLEVKAPNEAVSSVRFWAGYSWQDNSDGSGAVRPDRVTLKLDKASYRPGDTIKLHIAAPTAGKGYAMVESSEGPLWWQEIDVRAQGLDLTIPVDKTWNRHDLYLSTLVVRPGDKSRSATPKRAVGVLHLPLGDENRRLDLALETPAKMRPNQPLTVKIKASTKNGEKPKQVNVLVSAVDSGVLNITDYVTPDPWQAFFGQKRYGADIYDIYGQVIEGQGRLAALRFGGDGDELKRGGKPPVNHVNIVVQQALPVTLNEQGEGSVTLPIGDFNGELRVMAQAWTADDFGSNESKVIVAAPVIAELNMPRFMASGDTSRLTLDITNLTDKPQKLNVALTASGLLELVSDSPAAVELAPGVRTTLFIPVRALPGYGDGEIQATISGLALPGETVADQHKQWKIGVRPAFPAQTVNYGTALQPGETWAIPADGLQNFSPVTLEGQLLLSGKPPLNIARYIKELKAYPYGCLEQTASGLFPSLYTNAAQLQALGIKGDSDEKRRASVDIGISRLLQMQRDNGGFSLWDKNGDEEYWLTAYVMDFLVRAGEQGYSVPTDAINRGNERLLRYLQDPGMMSIPYADNLKASKFAVQSYAALVLARQQKAPLGALREIWEHRADAASGLPLLQLGVALKTMGDATRGEEAIALALKTPRNSDERIWLGDYGSSLRDNALMLSLLEENKLLPDEQYTLLNTLSQQAFGERWLSTQESNALFLAARTIQDLPGKWQAQTSFSAEQLTGEKAQNSNLNSDQLVTLQVSNSGDQPLWLRMDASGYPQSAPLPANNVLQIERHILGTDGKSKSLDSLRSGDLVLVWLQVKASNSVPDALVVDLLPAGLELENQNLANGSASLEQSGGEVQNLLNQMQQASIKHIEFRDDRFVAAVAVDEYQPVTLVYLARAVTPGTYQVPQPMVESMYVPQWRATGAAEDLLIVRP

SEQ ID NO: 15331 - protein, 774 aa, Escherichia coli; identical to SEQ ID NO: 3978

SEQ ID NO: 15332 - protein, 239 aa, Escherichia coli; identical to SEQ ID NO: 2759

SEQ ID NO: 15333 - protein, 111 aa, Escherichia coli; identical to SEQ ID NO: 3153

SEQ ID NO: 15334 - protein, 517 aa, Escherichia coli; identical to SEQ ID NO: 3116

SEQ ID NO: 15335 - protein, 122 aa, Escherichia coli; identical to SEQ ID NO: 2915

SEQ ID NO: 15336 - protein, 231 aa, Escherichia coli; identical to SEQ ID NO: 2794

SEQ ID NO: 15337 - protein, 663 aa, Escherichia coli; identical to SEQ ID NO: 1910

SEQ ID NO: 15338 - protein, 169 aa, Escherichia coli; identical to SEQ ID NO: 4636

SEQ ID NO: 15339 - protein, 650 aa, Escherichia coli; identical to SEQ ID NO: 2146

SEQ ID NO: 15340 - protein, 446 aa, Escherichia coli [sequence omitted]

SEQ ID NO: 15341 - protein, 360 aa, Escherichia coli; identical to SEQ ID NO: 3354

SEQ ID NO: 15342 - protein, 747 aa, Escherichia coli
MARSKTAQPKHSLRKIAVVVATAVSGMSVYAQAAVEPKEDTITVTAAPAPQESAWGPAATIAARQSATGTKTDTPIQKVPQSISVVTAEEMALHQPKSVKEALSYTPGVSVGTRGASNTYDHLIIRGFAAEGQSQNNYLNGLKLQGNFYNDAVIDPYMLERAEIMRGPVSVLYGKSSPGGLLNMVSKRPTTEPLKEVQFKAGTDSLFQTGFDFSDSLDDDGVYSYRLTGLARSANAQQKGSEEQRYAIAPAFTWRPDDKTNFTFLSYFQNEPETGYYGWLPKEGTVEPLPNGKRLPTDFNEGAKNNTYSRNEKMVGYSFDHEFNDTFTVRQNLRFAENKTSQNSVYGYGVCSDPANAYSKQCAALAPADKGHYLARKYVVDDEKLQNFSVDTQLQSKFATGDIDHTLLTGVDFMRMRNDINAWFGYDDSVPLLNLYNPVNTDFDFNAKDPANSGPYRILNKQKQTGVYVQDQAQWDKVLVTLGGRYDWADQESLNRVAGTTDKRDDKQFTWRGGVNYLFDNGVTPYFSYSESFEPSSQVGKDGNIFAPSKGKQYEVGVKYVPEDRPIVVTGAVYNLTKTNNLMADPEGSFFSVEGGEIRARGVEIEAKAALSASVNVVGSYTYTDAEYTTDTTYKGNTPAQVPKHMASLWADYTFFDGPLSGLTLGTGGRYTGSSYGDPANSFKVGSYTVVDALVRYDLARVGMAGSNVALHVNNLFDREYVASCFNTYGCFWGAERQFVATATFRF

SEQ ID NO: 15343 - protein, 367 aa, Escherichia coli; identical to SEQ ID NO: 2433

SEQ ID NO: 15344 - protein, 432 aa, Escherichia coli; identical to SEQ ID NO: 2026

SEQ ID NO: 15345 - protein, 331 aa, Escherichia coli; identical to SEQ ID NO: 2705

SEQ ID NO: 15346 - protein, 353 aa, Escherichia coli
MKMKKSTLALVVMGIVASASVQAAEIYNKDGNKLDVYGKVKAMHYMSDNASKDGDQSYIRFGFKGETQINDQLTGYGRWEAEFAGNKAESDTAQQKTRLAFAGLKYKDLGSFDYGRNLGALYDVEAWTDMFPEFGGDSSAQTDNFMTKRASGLATYRNTDFFGVIDGLNLPLQYKGKNENRDVKKQNGDGFGTSLTYDFGGSDFSISGAYTNSDRTNEQNLQSRGTGKRAEAWATGLKYDANNIYLATFYSETRKMTPITGGFANKTQNFEAVAQYQFDFGLRPSLGYVLSKGKDIEGIGDEDLVNYIDVGATYYFNKNMSAFVDYKINQLDSDNKLNINNDDIVAVGMTYQF

SEQ ID NO: 15347 - protein, 518 aa, Escherichia coli; identical to SEQ ID NO: 2349

SEQ ID NO: 15348 - protein, 235 aa, Escherichia coli; identical to SEQ ID NO: 4365

SEQ ID NO: 15349 - protein, 204 aa, Escherichia coli; identical to SEQ ID NO: 2957

SEQ ID NO: 15350 - protein, 236 aa, Escherichia coli; identical to SEQ ID NO: 2726

SEQ ID NO: 15351 - protein, 230 aa, Escherichia coli; identical to SEQ ID NO: 3222

SEQ ID NO: 15352 - protein, 478 aa, Escherichia coli; identical to SEQ ID NO: 2404

SEQ ID NO: 15353 - protein, 386 aa, Escherichia coli; identical to SEQ ID NO: 3072

SEQ ID NO: 15354 - protein, 686 aa, Escherichia coli; identical to SEQ ID NO: 3015

SEQ ID NO: 15355 - protein, 746 aa, Escherichia coli; identical to SEQ ID NO: 4083

SEQ ID NO: 15356 - protein, 192 aa, Escherichia coli; identical to SEQ ID NO: 5348

SEQ ID NO: 15357 - protein, 747 aa, Escherichia coli; identical to SEQ ID NO: 2072

SEQ ID NO: 15358 - protein, 161 aa, Escherichia coli; identical to SEQ ID NO: 2582

SEQ ID NO: 15359 - protein, 351 aa, Escherichia coli; identical to SEQ ID NO: 2872

SEQ ID NO: 15360 - protein, 826 aa, Escherichia coli; identical to SEQ ID NO: 7491

SEQ ID NO: 15361 - protein, 224 aa, Escherichia coli; identical to SEQ ID NO: 3115

SEQ ID NO: 15362 - protein, 230 aa, Escherichia coli; identical to SEQ ID NO: 3019

SEQ ID NO: 15363 - protein, 421 aa, Escherichia coli
MKIPTTTDIPQRYTWCLAGICYSSLAILLSFLSYAESYFNPAFLLENGTSVADLSRFERGNHQPAGVYRVDLWRNDEFIGSQDIVFESTTENTGDKSGGLMPCFNQVLLERIGLNSSAFPELAQQQNNKCINLLKAVPDATINFDFAAMRLNITIPQITLLSSAHGYIPPEEWDEGIPALLLNYNFTGNRGNGNDSYFFSELSGINIGPWRLRNNGSWNYFRGNGYHSEQWNNIGTWVQRAIIPLKSELVMGDGNTGSDIFDGVGFRGVRLYSSDNMYPDSQQGFAPTVRGIARTAAQLTIRQNGFIIYQSYVSPGAFEITDLHPTSSNGDLDVTIDERDGNQQNYTIPYSTVPILQREGRFKFDLTAGDFRSGNSQQSSPFFFQGTALGGLPQEFTAYGGTQLSANYTAFLLGLGRNRLC

SEQ ID NO: 15364 - protein, 365 aa, Escherichia coli; identical to SEQ ID NO: 3878

SEQ ID NO: 15365 - protein, 478 aa, Escherichia coli; identical to SEQ ID NO: 7448

SEQ ID NO: 15366 - protein, 746 aa, Escherichia coli
MNKKIHSLALLVNLGIYGVAQAQEPTDTPVSHDDTIVVTAAEQNLQAPGVSTITADEIRKNPVARDVSEIIRTMPGVNLTGNSTSGQRGNNRQIDIRGMGPENTLILIDGKPVSSRNSVRQGWRGERDTRGDTSWVPPEMIERIEVLRGPAAARYGNGAAGGVVNIITKKGSGEWHGSWDAYFNAPEHKEEGATKRTNFSLTGPLGDEFSFRLYGNLDKTQADAWDINQGHQSARAGTYVTTLPAGREGVINKDINGVVRWDFAPLQSLELEAGYSRQGNLYAGDTQNTNSDAYTRSKYGDETNRLYRQNYALTWNGGWDNGVTTSNWVQYEHTRNSRIPEGLAGGTEGKFNEKATQDFVDIDLDDVMLHSEVNLPIDFLVNQTLTLGTEWNQQRMKDLSSNTQALTGANTGGAIDGVSATDRSPYSKAEIFSLFAENNMELTDSTIVTPGLRFDHHSIVGNNWSPALNISQGLGDDFTLKMGIARAYKAPSLYQTNPNYILYSKGQGCYASAGGCYLQGNDDLKAETSINKEIGLEFKRDGWLAGVTWFRNDYRNKIEAGYVAVGQNAVGTDLYQWDNVPKAVVEGLEGSLNVPVSETVMWTNNITYMLKSENKTTGDRLSIIPEYTLNSTLSQQAREDLSMQTTFTWYGKQQPKKYNYKGQPAVGPETKEISPYSIVGLSATWDVTKNVSLTGGVDNLFDKRLWRAGNAQTTGDLARANYIAGAGAYTYNEPGRTWYMSVNTHF

SEQ ID NO: 15367 - protein, 512 aa, Escherichia coli; identical to SEQ ID NO: 2974

SEQ ID NO: 15368 - protein, 430 aa, Escherichia coli; identical to SEQ ID NO: 2617

SEQ ID NO: 15369 - protein, 250 aa, Escherichia coli; identical to SEQ ID NO: 3048

SEQ ID NO: 15370 - protein, 368 aa, Escherichia coli; identical to SEQ ID NO: 7478

SEQ ID NO: 15371 - protein, 203 aa, Escherichia coli; identical to SEQ ID NO: 2201

SEQ ID NO: 15372 - protein, 361 aa, Escherichia coli; identical to SEQ ID NO: 3061

SEQ ID NO: 15373 - protein, 518 aa, Escherichia coli; identical to SEQ ID NO: 2349

SEQ ID NO: 15374 - protein, 241 aa, Escherichia coli; identical to SEQ ID NO: 2922

SEQ ID NO: 15375 - protein, 232 aa, Escherichia coli; identical to SEQ ID NO: 2087

SEQ ID NO: 15376 - protein, 834 aa, Escherichia coli
MYKKLKLTTISELIKNIYCSLSVLIIGCASAYAVEFNKDLIEAEDRENVNLSQFETDGQLPVGKYSLNALINNKRTPIHLDLQWVLIDNQTAVCLTPEQLTLLGFTDEIFEVAQQNLIDGCYPIEKEKQITTYLDKGKMQLSISAPQAWLKYKDANWTPPELWDHGIAGAFLDYNLYASHYAPHQGDNSQNISSYGQAGVNLGAWRLRTDYQYDQSFNNGKSQANNLDFPRIYLFRPIPAINAKLTIGQYDTESSIFDSFHFSGVSLKSDENMLPPDLRGYAPQITGVAQTNAKVTVSQNNRIIYQENVPPGPFAITNLFNTLQGQLDVKVEEEDGQVTQWQVASDSIPYLTRKGQIRYTTAMGKPTSVGGDSLQQPFFWTGEFSWGWLNNVSLYGGSVLTNRDYQSLAAGVGFNLNSLGSLSFDVTRSDAQLHNQDKETGYSYRANYSKRFESTGSQLTFAGYRFSDKNFVTMNEYINDTNHYTNYQNEKESYIVTFNQYLESLRLNTYVSLARNTYWDASSNVNYSLSLSRDFDIGPLKNVSTSLTFSRINWEEDNQDQLYLNISIPWGTSRTLSYGMQRNQDNKISHTASWYDSSDRNNSWSVSASGDNDEFKDMKASLRASYQHNTENGRLYLSGTSQRDSYYSLNASWNGSFTATRHGAAFHDYSGSADSRFMIDADGAEDIPLNNKRAVTNRYGIGVIPSVSSYITTSLSVDTRNLPENVDIENSVITTTLTEGAIGYAKLDTRKGYQIMGVIRLADGSHPPLGISVKDKTSHKELGLVADGGFVYLNGIQDDSKLTLRWGDKSCFIQPPNSSNLTTGTVILPCISQN

SEQ ID NO: 15377 - protein, 721 aa, Escherichia coli; identical to SEQ ID NO: 7494

SEQ ID NO: 15378 - protein, 662 aa, Escherichia coli; identical to SEQ ID NO: 8124

SEQ ID NO: 15379 - protein, 539 aa, Escherichia coli; identical to SEQ ID NO: 3050

SEQ ID NO: 15380 - protein, 236 aa, Escherichia coli; identical to SEQ ID NO: 3482

SEQ ID NO: 15381 - protein, 208 aa, Escherichia coli; identical to SEQ ID NO: 1949

SEQ ID NO: 15382 - protein, 746 aa, Escherichia coli; identical to SEQ ID NO: 3143

SEQ ID NO: 15383 - protein, 331 aa, Escherichia coli; identical to SEQ ID NO: 2705

SEQ ID NO: 15384 - protein, 128 aa, Escherichia coli; identical to SEQ ID NO: 3240

SEQ ID NO: 15385 - protein, 359 aa, Escherichia coli; identical to SEQ ID NO: 2329

SEQ ID NO: 15386 - protein, 203 aa, Escherichia coli; identical to SEQ ID NO: 2015

SEQ ID NO: 15387 - protein, 207 aa, Escherichia coli; identical to SEQ ID NO: 2211

SEQ ID NO: 15388 - protein, 539 aa, Escherichia coli; identical to SEQ ID NO: 3146

SEQ ID NO: 15389 - protein, 683 aa, Escherichia coli
MSYPGTTITPLPNQEALDIIVSPQAIIPIGLDLTNAATGGTAALLNYSLMSSRAEFSNGSSDYSQAALEGGININDWMLRSHQFLTQTNGTFSNQNSSTYLQRTFTDLKTLMRAGEVNLNNSVLEGASIYGIEIAPDNALQTSGSGVQVTGIANTSQARVEIRQQGVLIHSILVPAGAFTIPDVPVRNGNSDLNVTVVETDGSSHNYIVPSTLFNQHVESFQGYRFAIGRVDDDYDESPWVISASSGWNLTRWSAMNGGVIVAENYQAASIRSSLVPLPDLTVSSQISTSQDTKDSLQGQKYRLDANYNLPFSLGLTTSLTRSDRHYRELSEAIDDDYTDPTKSTYALGLNWSNSILGGFNISGYKTYSYDGDNDSSNLNINWNKAFKHATVSVNWQHQLSASENNEDDGDLFYVNISIPFGRSNTATLYTRHDDHKTHYGTGVMGVVSDEMSYYVNAERDHDERETSLNGSISSNLHYTQVSLAAGASGSDSRTYNGTMSGGIAVHDQGVTFSPWTINDTFAIAKMDNNIAGVRITSQAGPVWTDFRGNAVIPSIQPWRTSGVEIDTASLPKNVDIGNGTKMIKQGRGAVGKVGFSAITQRRALLNITLSDGKKLPRGVAIEDSEGNYLTTSVDDGVVFLNNIKPDMVLDIKDEQQSCRIHLTFPEDAPKDVFYETATGECQ

SEQ ID NO: 15390 - protein, 650 aa, Escherichia coli; identical to SEQ ID NO: 2146

SEQ ID NO: 15391 - protein, 111 aa, Escherichia coli; identical to SEQ ID NO: 3153

SEQ ID NO: 15392 - protein, 747 aa, Escherichia coli; identical to SEQ ID NO: 2072

SEQ ID NO: 15393 - protein, 266 aa, Escherichia coli; identical to SEQ ID NO: 1894

SEQ ID NO: 15394 - protein, 826 aa, Escherichia coli; identical to SEQ ID NO: 3060

SEQ ID NO: 15395 - protein, 162 aa, Escherichia coli; identical to SEQ ID NO: 1973

SEQ ID NO: 15396 - protein, 367 aa, Escherichia coli; identical to SEQ ID NO: 2433

SEQ ID NO: 15397 - protein, 200 aa, Escherichia coli; identical to SEQ ID NO: 1793

SEQ ID NO: 15398 - protein, 274 aa, Escherichia coli; identical to SEQ ID NO: 2309

SEQ ID NO: 15399 - protein, 881 aa, Escherichia coli
MPDHSLFRLRILPWCIALAMSGSYSSVWAEDDIQFDSRFLELKGDTKIDLKRFSSQGYVEPGKYNLQVQLNKQPLAEEYHIYWYAGEDDVSKSYACLTPELVAQFGLKEDVAKNLQWSHDGKCLKPGQLEGVEIKADLSQSALVISLPQAYLEYTWPDWDPPSRWDDGISGIIADYSITAQTRHEENGGDDSNEISGNGTVGVNLGPWRMRADWQTNYQHTRSNDDDDEFGGDDTQKKWEWSRYYAWRALPSLKAKLALGEDYLNSDIFDGFNYVGGSVSTDDQMLPPNLRGYAPDISGVAHTTAKVTVSQMGRVIYETQVPAGPFRIQDLGDSVSGTLHIRIEEQNGQVQEYDISTASMPYLTRPGQVRYKIMMGRPQEWGHHVEGGFFSGAEASWGIANGWSLYGGALGDENYQSAALGVGRDLSTFGAVAFDVTHSHTKLDKDTAYGKGSLDGNSFRVSYSKDFDQLNSRVTFAGYRFSEENFMTMSEYLDASDSEMVRTGNDKEMYTATYNQNFRDAGVSVYLNYTRHTYWDREEQTNYNIMLSHYFNMGSIRNMSVSLTGYRYEYDNRADKGMYISLSMPWGDNSTVSYNGNYGSGTDSSQVGYFSRVDDATHYQLNIGTSDKHTSVDGYYSHDGSLAQVDLSANYHEGQYTSAGLSLQGGATLTTHGGALHRTQNMGGTRLLIDADGVADVPVEGNGAAVYTNMFGKAVVSDVNNYYRNQAYIDLNKLPENAEATQSVVQATLTEGAIGYRKFAVISGQKAMAVLRLQDGSHPPFGAEVKNDNEQTVGLVDDDGSVYLAGVKPGEHMSVFWSGVAHCDINLPDPLPADLFNGLLLPCQHKGNVAPVVPDDIKPVIQEQTQQVTPTDPPVSVSANQ

SEQ ID NO: 15400 - protein, 243 aa, Escherichia coli; identical to SEQ ID NO: 3483

SEQ ID NO: 15401 - protein, 784 aa, Escherichia coli; identical to SEQ ID NO: 2244

SEQ ID NO: 15402 - protein, 412 aa, Escherichia coli; identical to SEQ ID NO: 4058

SEQ ID NO: 15403 - protein, 231 aa, Escherichia coli; identical to SEQ ID NO: 3055

SEQ ID NO: 15404 - protein, 198 aa, Escherichia coli
MCIYLNLMILIKIIRGFISAEPGSITVPFTATPPVSRIDAKRGQTIKLMYTASTSLPKDRESVFWFNVLEVPPKPDAEKVANQSLLQLAFRTRIKLFYRPDGLKGNPSEAPLALKWFWSGSEGKASLRVTNPTPYYVSFSSGDLEASGKRYPIDVKMIAPFSDEVMKVTGLNGKASSAKVHFYAINDFGGAIEGNASL

SEQ ID NO: 15405 - protein, 170 aa, Escherichia coli [sequence omitted]

SEQ ID NO: 15406 - protein, 111 aa, Escherichia coli; identical to SEQ ID NO: 7471

SEQ ID NO: 15407 - protein, 200 aa, Escherichia coli; identical to SEQ ID NO: 1784

SEQ ID NO: 15408 - protein, 121 aa, Escherichia coli; identical to SEQ ID NO: 6314

SEQ ID NO: 15409 - protein, 614 aa, Escherichia coli; identical to SEQ ID NO: 1884

SEQ ID NO: 15410 - protein, 678 aa, Escherichia coli; identical to SEQ ID NO: 2231

SEQ ID NO: 15411 - protein, 729 aa, Escherichia coli; identical to SEQ ID NO: 2948

SEQ ID NO: 15412 - protein, 213 aa, Escherichia coli; identical to SEQ ID NO: 2232

SEQ ID NO: 15413 - protein, 266 aa, Escherichia coli; identical to SEQ ID NO: 1894

SEQ ID NO: 15414 - protein, 161 aa, Escherichia coli; identical to SEQ ID NO: 2582

SEQ ID NO: 15415 - protein, 203 aa, Escherichia coli; identical to SEQ ID NO: 2009

SEQ ID NO: 15416 - protein, 641 aa, Escherichia coli; identical to SEQ ID NO: 3774

SEQ ID NO: 15417 - protein, 721 aa, Escherichia coli; identical to SEQ ID NO: 3265

SEQ ID NO: 15418 - protein, 193 aa, Escherichia coli; identical to SEQ ID NO: 2246

SEQ ID NO: 15419 - protein, 863 aa, Escherichia coli; identical to SEQ ID NO: 8025

SEQ ID NO: 15420 - protein, 861 aa, Escherichia coli; identical to SEQ ID NO: 11195

SEQ ID NO: 15421 - protein, 728 aa, Escherichia coli; identical to SEQ ID NO: 3179

SEQ ID NO: 15422 - protein, 540 aa, Escherichia coli
MLAPTTVVTRQDIDRWQSTSVNDVLRRLPGVDITQNGGSGQLSSIFIRGTNASHVLVLIDGVRLNLAGVSGSADLSQFPIALVQRVEYIRGPRSAVYGSDAIGGVVNIITTRDEPGTEISAGWGSNSYQNYDVSTQQQLGDKTRVTLLGDYAHTHGYDVVAYGNTGTQAQTDNDGFLSKTLYGALEHNFTDAWSGFVRGYGYDNRTNYDAYYSPGSPLLDTRKLYSQSWDAGLRYNGELIKSQLITSYSHSKDYNYDPHYGRYDSSATLDEMKQYTVQWANNVIVGHGSIGAGVDWQKQTTTPGTGYVEDGYDQRNTGIYLTGLQQVGDFTFEGAARSDDNSQFGRHGTWQTSAGWEFIEGYRFIASYGTSYKAPNLGQLYGFYGNPNLDPEKSKQWEGAFEGLTAGVNWRISGYRNDVSDLIDYDDHTLKYYNEGKARIKGVEATANFDTGPLTHTVSYDYVDARNAITDTPLLRRAKQQVKYQLDWQLYDFDWGITYQYLGTRYDKDYSSYPYQTVKMGGCRFNLSMQHPFQLSLSVF

SEQ ID NO: 15423 - protein, 386 aa, Escherichia coli; identical to SEQ ID NO: 3072

SEQ ID NO: 15424 - protein, 700 aa, Escherichia coli; identical to SEQ ID NO: 2784

SEQ ID NO: 15425 - protein, 204 aa, Escherichia coli; identical to SEQ ID NO: 7477

SEQ ID NO: 15426 - protein, 696 aa, Escherichia coli; identical to SEQ ID NO: 3233

SEQ ID NO: 15427 - protein, 550 aa, Escherichia coli
MKIFSVRQTVLPALLVLSPVVFAADEQTMIVSAAPQVVSELDTPAAVSVVDGEEMRLATSRINLSESLTGVPGLQVQNRQNYAQDLQLSIRGFGSRSTYGIRGIRLYVDGIPATMPDGQGQTSNIDLSSVQNVEVLRGPFSALYGNASGGVMNVTTQTGQQPPTIEASSYYGSFGSWRYGLKATGATGDGTQPGDVDYTVSTTRFTTHGYRDHSGAQKNLANAKLGVRIDEASKLSLIFNSVDIKADDPGGLTKAEWKANPQQAPRAEQYDTRKTIKQTQAGLRYERSLSAQDDMSVMMYAGERETTQYQSIPMAPQLNPSHAGGVITLQRHYQGIDSRWTHRGELGVPVTFTTGLNYENMSENRKGYNNFRLNSGMPEYGQKGELRRDERNLMWNIDPYLQTQWQLSEKLSLDAGVRYSSVWFDSNDHYVTPGNGDDSGDASYHKWLPAGSLKYAMTDAWNIYLAAGRGFETPTINELSYRADGQSGMNFGLKPSTNDTIEIGSKTRIGDGLLSLALFQTDTDDEIVVDSSSGGRTTYKNAGKTRRAGR

SEQ ID NO: 15428 - protein, 203 aa, Escherichia coli; identical to SEQ ID NO: 2201

SEQ ID NO: 15429 - protein, 355 aa, Escherichia coli; identical to SEQ ID NO: 3196

SEQ ID NO: 15430 - protein, 232 aa, Escherichia coli; identical to SEQ ID NO: 2087

SEQ ID NO: 15431 - protein, 446 aa, Escherichia coli; identical to SEQ ID NO: 5547

SEQ ID NO: 15432 - protein, 274 aa, Escherichia coli; identical to SEQ ID NO: 3471

SEQ ID NO: 15433 - protein, 641 aa, Escherichia coli; identical to SEQ ID NO: 10808

SEQ ID NO: 15434 - protein, 221 aa, Escherichia coli; identical to SEQ ID NO: 3141

SEQ ID NO: 15435 - protein, 213 aa, Escherichia coli; identical to SEQ ID NO: 2232

SEQ ID NO: 15436 - protein, 200 aa, Escherichia coli
MKKIWLALAGLVLAFSASAAQYEDGKQYTTLEKPVAGAPQVLEFFSFFCPHCYQFEEVLHISDNVKKKLPEGVKMTKYHVNFMGGDLGKDLTQAWAVAMALGVEDKVTVPLFEGVQKTQTIRSASDIRDVFINAGIKGEEYDAAWNSFVVKSLVAQQEKAAADVQLRGVPAMFVNGKYQLNPQGMDTSNMDVLFSSMLIQ

SEQ ID NO: 15437 - protein, 430 aa, Escherichia coli; identical to SEQ ID NO: 2617

SEQ ID NO: 15438 - protein, 517 aa, Escherichia coli; identical to SEQ ID NO: 3116

SEQ ID NO: 15439 - protein, 249 aa, Escherichia coli; identical to SEQ ID NO: 3492

SEQ ID NO: 15440 - protein, 591 aa, Escherichia coli; identical to SEQ ID NO: 3248

SEQ ID NO: 15441 - protein, 869 aa, Escherichia coli; identical to SEQ ID NO: 3173

SEQ ID NO: 15442 - protein, 191 aa, Escherichia coli; identical to SEQ ID NO: 2727

SEQ ID NO: 15443 - protein, 774 aa, Escherichia coli; identical to SEQ ID NO: 3122

SEQ ID NO: 15444 - protein, 367 aa, Escherichia coli; identical to SEQ ID NO: 4285

SEQ ID NO: 15445 - protein, 472 aa, Escherichia coli; identical to SEQ ID NO: 7769

SEQ ID NO: 15446 - protein, 851 aa, Escherichia coli; identical to SEQ ID NO: 6877

SEQ ID NO: 15447 - protein, 774 aa, Escherichia coli; identical to SEQ ID NO: 7443

SEQ ID NO: 15448 - protein, 166 aa, Escherichia coli; identical to SEQ ID NO: 3130

SEQ ID NO: 15449 - protein, 897 aa, Escherichia coli; identical to SEQ ID NO: 1908

SEQ ID NO: 15450 - protein, 760 aa, Escherichia coli; identical to SEQ ID NO: 3923

SEQ ID NO: 15451 - protein, 249 aa, Escherichia coli; identical to SEQ ID NO: 3132

SEQ ID NO: 15452 - protein, 784 aa, Escherichia coli; identical to SEQ ID NO: 2244

SEQ ID NO: 15453 - protein, 856 aa, Escherichia coli; identical to SEQ ID NO: 3234

SEQ ID NO: 15454 - protein, 193 aa, Escherichia coli; identical to SEQ ID NO: 2246

SEQ ID NO: 15455 - protein, 815 aa, Escherichia coli; identical to SEQ ID NO: 2698

SEQ ID NO: 15456 - protein, 118 aa, Escherichia coli [sequence omitted]

SEQ ID NO: 15457 - protein, 478 aa, Escherichia coli; identical to SEQ ID NO: 2404

SEQ ID NO: 15458 - protein, 446 aa, Escherichia coli [sequence omitted]

SEQ ID NO: 15459 - protein, 230 aa, Escherichia coli; identical to SEQ ID NO: 3188

SEQ ID NO: 15460 - protein, 242 aa, Escherichia coli; identical to SEQ ID NO: 2697

SEQ ID NO: 15461 - protein, 359 aa, Escherichia coli; identical to SEQ ID NO: 2328

SEQ ID NO: 15462 - protein, 230 aa, Escherichia coli; identical to SEQ ID NO: 3222

SEQ ID NO: 15463 - protein, 760 aa, Escherichia coli; identical to SEQ ID NO: 2080

SEQ ID NO: 15464 - protein, 231 aa, Escherichia coli; identical to SEQ ID NO: 2794

SEQ ID NO: 15465 - protein, 191 aa, Escherichia coli; identical to SEQ ID NO: 2727

SEQ ID NO: 15466 - protein, 432 aa, Escherichia coli; identical to SEQ ID NO: 2026

SEQ ID NO: 15467 - protein, 170 aa, Escherichia coli [sequence omitted]

SEQ ID NO: 15468 - protein, 865 aa, Escherichia coli; identical to SEQ ID NO: 2167

SEQ ID NO: 15469 - protein, 250 aa, Escherichia coli; identical to SEQ ID NO: 2761

SEQ ID NO: 15470 - protein, 361 aa, Escherichia coli; identical to SEQ ID NO: 3061

SEQ ID NO: 15471 - protein, 226 aa, Escherichia coli; identical to SEQ ID NO: 3085

SEQ ID NO: 15472 - protein, 224 aa, Escherichia coli; identical to SEQ ID NO: 3155

SEQ ID NO: 15473 - protein, 765 aa, Escherichia coli; identical to SEQ ID NO: 7498

SEQ ID NO: 15474 - protein, 657 aa, Escherichia coli
MDYNLFASSYRPQDGSSTNLNAYGTAGINTGAWRLRSDYQLNQTDSDDNHEQSGEISRTYLFRPLPQLGSKLTLGETDFSSNIFDGFSYTGAALASDDRMLPWELRGYAPQISGIAQTNATVTISQSGRVIYQKKVPPGPFIIDDLNQSVQGTLDVKVTEEDGRVNNFQVSAASTPFLTRQGQVRYKLAAGQPRPSMSHQTENETFFSNEVSWGMLSNTSLYGGLLLSGDDYHSAAMGIGQNMLWLGALSFDVTWASSHFDTQQDERGLSYRFNYSKQVDATNSTISLAAYRFSDRHFHSYANYLDHKYNDSDAQDEKQTISLSVGQPITPLNLNLYANLLHQTWWNADASTTANITAGFNVDIGDWRDISISTSFNTTHYEDKDRDNQIYLSISLPFGNGGRVGYDMQNSSHSTTHRMSWNDTLDERNSWGMSAGLQSDRPDNGAQVSGNYQHLSSAGEWDISGTYAANDYSSVSSSWSGSFTATQYGAAFHRRSSTNEPRLMVSTDGVADIPVQGNLDYTNHFGIAVVPLISSYQPSTVAVNMNDLPDGVTVAENVIKETWIEGAIGYTLASRSGKDVNVIIRNASGQFPPLGADIRQDDSGISVGMVGEEGHAWLSGVAENQKFTVVWGDSQHCSLHLPEHMEDTANRLILPCH

SEQ ID NO: 15475 - protein, 207 aa, Escherichia coli; identical to SEQ ID NO: 2211

SEQ ID NO: 15476 - protein, 162 aa, Escherichia coli; identical to SEQ ID NO: 1973

SEQ ID NO: 15477 - protein, 432 aa, Escherichia coli; identical to SEQ ID NO: 2026

SEQ ID NO: 15478 - protein, 308 aa, Escherichia coli
MSDNASKDGDQSYIRFGFKGETQINDQLTGYGRWEAEFAGNKAESDTAQQKTRLAFAGLKYKDLGSFDYGRNLGALYDVEAWTDMFPEFGGDSSAQTDNFMTKRASGLATYRNTDFFGVIDGLNLTLQYQGKNENRDVKKQNGDGFGTSLTYDFGGSDFAISGAYTNSDRTNEQNLQSRGTGKRAEAWATGLKYDANNIYLATFYSETRKMTPITGGFANKTQNFEAVAQYQFDFGLRPSLGYVLSKGKDIEGIGDEDLVNYIDVGATYYFNKNMSAFVDYKINQLDSDNKLNINNDDIVAVGMTYQF

SEQ ID NO: 15479 - protein, 118 aa, Escherichia coli [sequence omitted]

SEQ ID NO: 15480 - protein, 565 aa, Escherichia coli
MKSPAPSRPQKMALIPACIFLCFAALSVQAEETPVTPQPPDILLGPLFNDVQNAKLFPDQKTFADAVPNSDPLMILADYRMQQNQSGFDLRHFVNVNFTLPKEGEKYVPPEGQSLREHIDGLWPVLTRSTENTEKWDSLLPLPEPYVVPGGRFREVYYWDSYFTMLGLAESGHWDKVADMVANFAHEIDTYGHIPNGNRSYYLSRSQPPFFALMVELLAQHEGDAALKQYLPQMQKEYAYWMDGVENLQAGQQEKRVVKLQDGTLLNRYWDDRDTPRPESWVEDIATAKSNPNRPATEIYRDLRSAAASGWDFSSRRMDNPHQLNTLRTTSIVPVDLNSLMFKMEKILARASKAAGDNAMANQYETLANARQKGIEKYMWNDQQGWYADYDLKSHKVRNQLTAAALFPLYVNAAAKDRANKMATATKTHLLQPGGLNTTSVKSGQQWDAPNGWAPLQWVATEGLQNYGQKEVAMDISWHFLTNVQHTYDREKKLVEKYDVSTTGTGGGGGEYPLQDGFGWTNGVTLKMLDLICPKEQPCDNVPATRPTVKSATTQPSTKEAQPTP

SEQ ID NO: 15481 - protein, 900 aa, Escherichia coli
MKLNIFTKSMIGMGLVCSSLPALAMEAWNNQQGGNKYQVIFDGKIYENAWWVSSTNCPGKAKANDATNPWRLKRTATAAEISQFGNTLSCEKSGSSSSSTSNTPASNTPANGGSATPAQGTVPSNSSVVAWNKQQGGQTWYVVFNGAVYKNAWWVASSNCPGDAKGNDASNPWRYVRAATATEISETSNPQSCTSAPQPAPDVKPAPDVKPAPDVQPAPADKSNDNYAVVAWKGQEGSSTWYVIYNGGIYKNAWWVGAANCPGDAKENDASNPWRYVRAATATEITQYGNPGSCSVKPDNNGGAVTPVDPTPETPETPVTPTPDNNEPSTPADSSNDYSLQAWSGQEGSEIYHVIFNGNVYQNAWWVGSEDCPRGTSVENSNNPWRLVRTATAAEMSQYGNPTTCEIDNGGVIIADGFQASKAYSANSIVDYNDAHYKTSVDQDAWGFVPSGDNPWKKYEPAKAWSASTVYVKGDRVVVDGQAYEALFWTQSDNPALVANQNATGSNSRPWKPLGKTQSYSNEELNNAPQFNPETLYASDTLIRFNGENYISQSKVQKVSPSDSNPWRVFVDWTGTKERVGTPKKAWPKHVYAPYVDFTLNTIPDLAALAKNHNVNHFTLAFVVSKDANTCLPTWGTAYGMQNYAQYSKIKALREAGGDVMLSIGGANNAPLAASCKNVDDPMQHYYDIVDNLNLRVLDFDIEGTWVADQASIERRNLAVKKVQDKWKSEGKDIAIWYTLPILPTGLTPEGMNVLSDAKAKGVELAGVNVMTMDYGNAICQSANTEGQNIHGKCATSAIANLHAQLKGLYGNKSDAEIDAMMGTTPMVGVNDVQGEVFYLSDARLVMQDAQKRNLGMVGIWSIARDLPGGTNLSPEFHGLTKEQAPKYAFSEIFAPFTKQ

SEQ ID NO: 15482 - protein, 866 aa, Escherichia coli
MTIKPTKNYHNHLTRIATFCALLYCNGAFCAELVEYDHTFLMGQNASNIDLSRYSEGNPAIPGVYDVSVYVNDQPVINQSITFVAIEGKKNARACITLKNLLQFHINSPDINSEKAVLLARDEALGNCLNLTEIIPQASVRYDVNDQRLDIDVPQAWVMKNYQNYVDPSLWENGINAAMLSYNLNGYHSETPGRKNDSIYAAFNGGMNLGAWRLRASGNYNWMTDSGGNYDFKNRYIQRDIASLRSQFIIGESYTTGETFDSVSIRGIRLYSDSRMLPPTLASFAPIIHGVANTNAKVTITQGGYKIYETTVPPGAFVIDDLSPSGYGSDLIVTIEESDGSKRTFSQPFSSVVQMLRPGVGRWDISGGQVLKDDIQDEPNLFQASYYYGLNNYLTGYTGIQITDNNYTAGLLGLGLNTSVGAFSFDVTHSNVRIPDDKTYQGQSYRVSWNKLFEETSTSLNIAAYRYSTQNYLGLNDALTLIDEVKHPEQDLEPKSMRNYSRMKNQVTVSINQPLKFEKKDYGSFYLSGSWSDYWASGQNRSNYSIGYSNSASWGSYSISAQRSWNEDGDADDSVYLSFTIPIEKLLGTEQRTSGFQSIDTQMSSDFKGNNQLNVSSSGYSDNARVSYSVNTGYTMNKASKDLSYVGGYASYESPWGTLAGSVSANSDNSRQVSLSTDGGFVLHSGGLTFSNDSFSDSDTLAVVQAPGAQGARINYGNSTIERWGYGVTSALSPYHENRIALDINDLENDVELKSTSAVAVPRQGSVVFADFETVQGQSAIMNITRSDGKNIPFAADIYDDQGNVIGNVGQGGQAFVRGIEQQGNINIKWLEESKPVSCLAHYQQSSEAEKIAQSIILNGIRCQIQ

SEQ ID NO: 15483 - protein, 266 aa, Escherichia coli; identical to SEQ ID NO: 8481

SEQ ID NO: 15484 - protein, 856 aa, Escherichia coli
MAGFFVRLFVACAFTAQAPLSSAELYFNPRFLADDPQAVADLSRFENGQELPPGTYRVDIYLNNGYMATRDVTFNTGDSEQGIVPCLTRAQLASMGLNTASVSGMNLLADDACVPLTSMIHDATAQLDVGQQRLNLTIPQAFMSNRARGYIPPELWDPGINAGLLNYNFSGNSVQNRIGGNSHYAYLNLQSGLNIGAWRLRDNTTWSYNSSDSSSGSKNKWQHINTWLERDIIPLRSRLTLGDGYTQGDIFDGINFRGAQLASDDNMLPDSQRGFAPVIHGIARGTAQVTIKQNGYDIYNSTVPPGPFTINDIYAAGNSGDLQVTIKEADGSTQIFTVPYSSVPLLQREGHTRYSITAGEYRSGNAQQEKPRFFQSTLLHGLPAGWTIYGGTQLADRYRAFNFGIGKNMGALGALSVDMTQANSTLPDDSQHDGQSVRFLYNKSLNESGTNIQLVGYRYSTSGYFNFADTTYSRMNGYNIETQDGVIQVKPKFTDYYNLAYNKRGKLQLTVTQQLGRTSTLYLSGSHQTYWGTSNVDEQFQAGLNTAFEDINWTLSYSLTKNAWQKGRDQMLALNVNIPFSHWLRSDSKSQWRHASASYSMSHDLNGRMTNLAGVYGTLLADNNLSYSVQTGYAGGGDGNSGSTGYATLNYRGGYGNANIGYSHSDDIKQLYYGVSGGVLAHANGVTLGQPLNDTVVLVKAPGAKDAKVENQTGVRTDWRGYAVLPYATEYRENRVALDTNTLADNVDLDNAVANVVPTRGAIVRAEFKARVGIKLLMTLTHNNKPLPFGAMVTSESSQSSGIVADNGQVYLSGMPLAGKVQVKWGEEENAHCVANYQLPPESQQQLLTQLSAECR

SEQ ID NO: 15485 - protein, 840 aa, Escherichia coli
MNNKNTFTGDTLSHAIKNALSGVVCSLLFVLPAHAVEFNVDMIDVEDRENIDISRFEKKGYIPPGRYLARVQINKNMLPQALILEWVKADNESGSLLCLTKENLTNFGLNTEFIESLQNIAGSECLDLSQRQELTTRLDKATMILSLSVPQAWLKYQATNWTPPEFWDAGIAGFILDYNVYASQYAPHHGYSTQNVSSYGTLGFNLGAWRLRSDYQYNQNFTDGRSVNYDSEFARTYLFRPIPSWSSKFTMGQYDLSSNLYDTFHFTGASLESDESMLPPDLQGYAPQITGIAQTNAKVTVAQNGRVLYQTTVAPGPFTISDLGQSFQGQLDVTVEEEDGRTSTFQVGSASIPYLTRKGQVRYKTSLGKPTSVGHNDINNPFFWTAEASWGWLNNVSLYGGGMFTADDYQAITTGIGFNLNQFGSLSFDVTGADASLQKQNSDNLRGYSYRFNYAKHFESTGSQITFAGYRFSDKDYVSMSEYLSSRNGDESIDNEKESYVISLNQYFETLELNSYLNVTRNTYWDSASNTNYSVSVSKNFDIGDFKGISASLAVSRIRWDDDEENQYYFSFSLPLQQNRNISYSMQRTGSSNTSQMISWYDSSDRNNIWNISASATDDNIRDGEPTLRGSYQHYSPWGRLNINGSVQPNQYNSVTAGWYGSLTATRHGVALHDYSYADNARMMVDTDGISGVEINSNRTVTNGLGIAVVPSLSNYTTSMLRVNNNDLPEGVDVENSVIRTTLTQGAIGYAKLNATTGYQIVGVIRQENGRFPPLGVNVTDKATGKDVGLVAEDGFVYLSGIQENSILHLTWGDNTCEVTPPNQSNISESAIILPCKTVK

SEQ ID NO: 15486 - protein, 826 aa, Escherichia coli
MLRMTPLASAIVALLIGIEAYAAEETFDTHFMIGGMKDQQVANIRLDDNQPLPGQYDIDIYVNKQWRGKYEIIVKDNPQETCLSREMIKRLGINTDNFASGKQCLTFKQLIQGGSYTWDIGVFRLDFSVPQAWVEELESGYVPPENWERGINAFYTSYYMSQYYSDYKASGNSKSTYVRFNSGLNLLGWQLHSDASFSKTNNNPGVWKSNTLYLERGFAQLLGTLRVGDMYTSSDIFDSVRFSGVRLFRDMQMLPNSKQNFTPRVQGIAQSNALVTIEQNGFVVYQKEVPPGPFAITDLQLAGGGADLDVSVKEADGSVTTYLVPYAAVPNMLQPGVSKYDFAAGRSHIEGASKQSDFVQAGYQYGFNNLLTLYGGSMVANNYYAFTLGTGWNTRFGAISVDATKSHSKQDNGDVFDGQSYQIAYNKFVSQTSTRFGLAAWRYSSRDYRTFNDHVWANNKDNYRRDENDIYDIADYYQNDFGRKNSFSANMSQSLPEGWGSVSLSTLWRDYWGRSGSSKNYQLSYSNNLRRISYTLAASHAYDENHHEEKRFNIFISIPFDWGDDVTTPRRQIYMSNSTTFDDQGFASNNTGLSGTVGSRDQFNYGVNLSYQYQGNETTAGANLTWNAPVATVNGSYSQSSAYRQAGASVSGGIVAWSGGVNLANRLSETFAVMNAPGIKDAYVNGQKYRTTNRNGVVVYDGMTPYRENYLMLDVSQSDSEAELRGNRKIAAPYRGAVVLVNFDTDQRKPWFIKALRADGQPLTFGYEVNDIHGHNIGVVGQGSQLFIRTNEVPPSVNVAIDKQQGLSCTITFGKEIDESKNYICQ

SEQ ID NO: 15487 - protein, 368 aa, Escherichia coli
MNKTITALTIIMASFAANASVLPETPVPFKSGTGAIDNDTVYIGLGSAGTAWYKLDTQAKDKKWTALAAFPGGPRDQATSAFIDGNLYVFGGIGKNSEGLTQVFNDVHKYNPKTNSWVKLMSHAPMGMAGHVTFVHNGKAYVTGGVNQNIFNGYFEDLNEAGKDSTTIDKINAHYFDKKAEDYFFNKFLLSFDPSTQQWSYAGESPWYGTAGAAVVNKGDKTWLINGEAKPGLRTDAVFELDFTGNNLKWNKLAPVASPDGVAGGFAGMSNDSLIFAGGAGFKGSRENYQNGKNYAHEGLKKSYSADIHLWHNGKWDKSGELSQGRAYGVSLPWNNSLLIIGGETAGGKAVTDSVLISVKDNKVAVQN

SEQ ID NO: 15488 - protein, 161 aa, Escherichia coli; identical to SEQ ID NO: 2582

SEQ ID NO: 15489 - protein, 119 aa, Escherichia coli; identical to SEQ ID NO: 2841

SEQ ID NO: 15490 - protein, 386 aa, Escherichia coli; identical to SEQ ID NO: 5575

SEQ ID NO: 15491 - protein, 654 aa, Escherichia coli; identical to SEQ ID NO: 5571

SEQ ID NO: 15492 - protein, 238 aa, Escherichia coli
MSVFSRVCLGFTFLLTASQVQASIVLGGTRIIYPSNQNEVQITLKNKDAYARYLVQSWVSNIDGSKAPFLITPPVYKLEENRQTLLHIVFTGDKNKLPQDRESLFLANIKSVSAMPEELKDKNTLQFAMKARLKLFWRPASLDNSDALTAWEKLKFHKEAGKLIVKNPTPFYISFSDLTVSGKNIVPTESKSEPGALLMMVGPFSEQRFSLPVGAGSIVEWSVITDYGSSSGKRQQKL

SEQ ID NO: 15493 - protein, 362 aa, Escherichia coli
MMKRNILAVIVPALLVAGTANAAEIYNKDGNKVDLYGKAVGLHYFSKGNGENSYGGNGDMTYARLGFKGETQINSDLTGYGQWEYNFQGNNSEGADAQTGNKTRLAFAGLKYADVGSFDYGRNYGVVYDALGYTDMLPEFGGDTAYSDDFFVGRVGGVATYRNSNFFGLVDGLNFAVQYLGKNERDTARRSNGDGVGGSISYEYEGFGIVGAYGAADRTNLQEESPLGKGKKAEQWATGLKYDANNIYLAANYGETRNATPITNKFTNTSGFANKTQDVLLVAQYQFDFGLRPSIAYTKSKAKDVDGIGDVDLVNYFEVGATYYFNKNMSTYVDYIINQIDSDNKLGVGSDDTVAVGIVYQF

SEQ ID NO: 15494 - protein, 191 aa, Escherichia coli
MKKSLLGLTFASLMFSAGSAVAADYKIDKEGQHAFVNFRIQHLGYSWLYGNFKDFDGTFTFDEKNPAADKVNVTINTTSVDTNHAERDKHLRSADFLNTAKYPQATFTSTSVKKDGDELDITGDLTLNGVTKPVTLEAKLIGQGDDPWGGKRAGFEAEGKIKLKDFNIKTDLGPASQEVDLIISVEGVQPK

SEQ ID NO: 15495 - protein, 232 aa, Escherichia coli; identical to SEQ ID NO: 5564

SEQ ID NO: 15496 - protein, 673 aa, Escherichia coli; identical to SEQ ID NO: 2919

SEQ ID NO: 15497 - protein, 729 aa, Escherichia coli
MLSTQFNRDNQHQAIIKPSLLAGCIALALLPSAAFAAPATEETVIVEGSATAPDDGENDYNVTSTSAGTKMQMTQRDIPQSVTIVSQQRMEDQQLQTLGEVMENTLGISKSQADSDRALYYSRGFQIDNYMVDGIPTYFESRWNLGDALSDMALFERVEVVRGATGLMTGTGNPSAAINMVRKHATSREFKGDVSAEYGSWNKERYVADLQSPLTEDGKIRARIVGGYQNNDSWLDRYNSEKTFFSGIVDADLGDLTMLSAGYEYQRIDVNSPTWGGLPRWNTDGSSNSYDRARSTAPDWAYNDKEINKVFMTLKQRFADTWQATLNATHSEVEFDSKMMYVDAYVNKADGMLVGPYSNYGPGFDYVGGTGWNSGKRKVDALDLFADGSYELFGRQHNLMFGGSYSKQNNRYFSSWANIFPDEIGSFYNFNGNFPQTDRSPQSLAQDDTTHMKSLYAATRVTLADPLHLILGARYTNWRVDTLTYSMEKNHTTPYAGLVFDINDNWSTYASYTSIFQPQNDRDSSGKYLAPITGNNYELGLKSDWMNSRLTTTLAIFRIEQDNVAQSTGTPIPGSNGETAYKAVDGTVSKGVEFELNGAITDNWQLTFGATRYIAEDNEGNAVNPNLPRTTVKMFTSYRLPVMPELTVGGGVNWQNRVYTDTVTPYGTFRAEQGSYALVDLFTRYQVTKNFSLQGNVNNLFDKTYDTNVEGSIVYGAPRNLSITGTYQF

SEQ ID NO: 15498 - protein, 631 aa, Escherichia coli
MIHLVIIIPLRSRLTVGDSYTDGDIFDSVNFRGLKINSTEAMLPDSQHGFAPVIHGIARGTAQVSVKQNGYDVYQTTVPPGPFTIDDINSAANGGDLQVTIKEADGSIQTLYVPYSSVPVLQRAGYTRYALAMGEYRSGNNLQSSPKFVQASLMHGLKGNWTPYGGMQIAEDYQAFNLGIGKDLGLFGAFSFDITQANTTLADDTRHSGQSVKSVYSKSFYQTGTNIQVAGYRYSTQGFYNLSDSAYSRMSGYTVKPPTGDTSEQTLFIDYFNLFYSKRGQEQISISQQLGNYGTTFFSASRQSYWNTSRSDQQISFGLNVPFGDITTSLNYSYSNNIWQNDRDHLLAFTLNVPFSHWMRTDSQSAFRNSNASYSMSNDLKGSMTNLSGVYGTLLLDNNLNYSVQVGNTQGGNTSSGTSGYSSLNYRGAYGNTNVGYSRSGDSSQIYYGMSGGIIAHADGITFGQPLGDTMVLVKAPGADNVKIENQIGIHTDWRGYAILPFATEYRENRVALNANSLADNVELDETVVTVIPTHGAIARATFNAQIGGKVLMTLKYGNKSIPFGAIVTHGENKNGSIVAENGQVYLTGLQQSGKLQVSWGNDKNSNCIVDYKLPAVSPGTLLNQQTAICR

SEQ ID NO: 15499 - protein, 430 aa, Escherichia coli; identical to SEQ ID NO: 2617

SEQ ID NO: 15500 - protein, 656 aa, Escherichia coli; identical to SEQ ID NO: 5574

SEQ ID NO: 15501 - protein, 565 aa, Escherichia coli
MKSPAPSRPQKMALIPVCIFLCFAALSVQAEETSVTPQPPDILLGPLFNDVQNAKLFPDQKTFADAVPNSDPLMILADYRMQQNQSGFDLRHFVNVNFTLPKEGEKYVPPEGQSLREHIDGLWPVLTRSTENTEKWDSLLPLPKPYVVPGGRFREVYYWDSYFTMLGLAESGHWDKVADMVANFAHEIDTYGHIPNGNRSYYLSRSQPPFFALMVELLAQHEGDAALKQYLPQMQKEYAYWMDGVENLQAGQQEKRVVKLQDGTLLNRYWDDRDTPRPESWVEDIATAKSNPNRPATEIYRDLRSAAASGWDFSSRWMDNPQQLNTLRTTSIVPVDLNSLMFKMEKILSRASKAAGDNAMANQYETLANARQKGIEKYLWNDQQGWYADYDLKSHKVRNQLTAAALFPLYVNAAAKDRASKMATATKTHLLQPGGLNTTSVKSGQQWDAPNGWAPLQWVATEGLQNYGQKEVAMDISWHFLTNVQHTYDREKKLVEKYDVSTTGTGGGGGEYPLQDGFGWTNGVTLKMLDLICPKEQPCDNVPATRPLSESTTQPLKQKEAEPTP

SEQ ID NO: 15502 - protein, 760 aa, Escherichia coli
MENNRNFPARQFHSLTFFAGLCIGITPVAQALAAEGQANADDTLVVEASTPSLYAPQKSADPKFSRPVADTTRTMTVISEQVIKDQGATNLTDALKNVPGVGAFFAGENGNSTTGDAIYMRGADTSNSIYIDGIRDIGSVSRDTFNTEQVEVIKGPSGTDYGRSAPTGSINMISKQPRNDSGIDASASIGSAWFRRGTLDVNQVIGDTTAVRLNVMGEKTHDAGRDKVKNERYGVAPSVAFGLGTANRLYLNYLHVTQHNTPDGGIPTIGLPGYSAPSAGTAALNHSGKVDTHNFYGTDSDYDDSTTDTATMRFEHDINDNTTIRNTTRWSRVKQDYLMTAIMGGASNITQPASDVNSWTWSRTANTKDVSNKILTNQTNLTSTFYTGAIGHDVSTGVEFTRETQTNYGVNPVTLPAVNIYHPDSSIHPGGLTRNGANANGQTDTFAIYAFDTLQITRDFELNGGIRLDNYHTEYDSATACGGSGRGAITCPAGVAKGSPVTTVDTAKSGNLVNWKAGALYHLTENGNVYINYAVSQQPPGGNNFALAQSGSGNSANRTDFKPQKANTSEIGTKWQVLDKRLLLTAALFRTDIENEVEQNDDGTYSQYGKKRVEGYEISVAGNITPAWQMIGGYTQQKATIKNGKDVAQDGSSSLPYTPEHAFTLWSQYQATDDISVGAGARYIGSMHKGSDGAVGTPAFTEGYWVADAKLGYRVNRNLDFQLNVYNLFDTDYVASINKSGYRYHPGEPRTFLLTANMHF

SEQ ID NO: 15503 - protein, 203 aa, Escherichia coli
MKKIAITCALLSSLVASSVWADAASDLKSRLDKVSSFQASFTQKVTDGSGAAVQEGQGDLWVKRPNLFNWHMTQPDESILVSDGKTLWFYNPFVEQATATWLKDATGNTPFMLIARNQSSDWQQYNIKQNGDDFVLTPKASNGNLKQFTINVGRDGTIHQFSAVEQDDQRSSYQLKSQQNGAVDAAKFTFTPPQGVTVDDQRK

SEQ ID NO: 15504 - protein, 784 aa, Escherichia coli; identical to SEQ ID NO: 2242

SEQ ID NO: 15505 - protein, 828 aa, Escherichia coli; identical to SEQ ID NO: 2388

SEQ ID NO: 15506 - protein, 749 aa, Escherichia coli
MARSKTAQPKHSLRKIAVVVATAVSGMSVYAQAAVEPKEDTITVTAAPAPQESAWGPAATIAARQSATGTKTDTPIQKVPQSISVVTAEEMALHQPKSVKEALSYTPGVAVGTRGASNTYDYLIIRGFAADGQSQNNYLNGLKMQGNFYNDAVIDPYMLERAEIMRGPVSVLYGKSSPGGLLNMVSKRPTTEPLKEVQFKAGTDSLFQTGFDFSDALDDDGVYSYRLTGLARSANAQQKGSEEQRYAIAPAFTWRPDDKTNFTFLSYFQNEPETGYYGWLPKEGTVEPLPNGKRLPTDFNEGAKNNTYSRNEKMIGYSFDHEFNDTFTVRQNLRFAQNKVSQKSVYGYGMCSDPLYSSNPSSSPCANVPQSQWGHTLTRQYVIDNEKLENFSVDTQLQSKFATGSVDHTLLTGVDFMRMRNDIDSWFGYAGSVAPSDIYNLDRSDFDFGAHPNPSGPYRVLLKQKQTGLYVQDQAQWDKVLVTLGGRYDWADQSSFNRDYGNKSERDDKEFTWRGGVNYLFDNGVTPYFSYSESFEPASQTDANGDLFAPSKGKQYEVGVKYVPEDRPIVVTGALYQLTKTNNLMADPNGSLFSVEGGEIRARGVELEAKAALSASVNLVGSYTYTDAEYTTDTNYKGNTPAQVPKHMASLWADYTFFDGPLSGLTLGTGGRYTGSSYGDPANSFKVGSYTVVDALVRYDLARVGMAGSNVALHVNNLFDREYVASCFNTYGCFWGAERQVVATATFRF

SEQ ID NO: 15507 - protein, 746 aa, Escherichia coli; identical to SEQ ID NO: 5579

SEQ ID NO: 15508 - protein, 236 aa, Escherichia coli
MQTTRTPYSVSFMATVLLLFLFACHSTIANAAVALGATRVIYPANQKQVLLPVTNNDPASVYLIQSWIENAGDQKDTQFVITPPLFSMQGKKENTLRIINATNHQLPGDRESLFWVNVKAIPAMEKDQKNENTLQLAIISRIKMFYRPTHLAMAPEEAPAMLRFRRSGSILTLINPTPYFITVTNMKAGNSNLPNTMVPPKGEVSVDIPHAVTGDISFQTINDYGALTPRIKATMQ

SEQ ID NO: 15509 - protein, 331 aa, Escherichia coli; identical to SEQ ID NO: 2705

SEQ ID NO: 15510 - protein, 250 aa, Escherichia coli
MKCIIENKKLVCGFRDELKASQNIIRSGILFLLSILFINNASAGGFGLGVTRLIYPAESKQITLSVQNSGDNTSYLIQSWVDDSKTEKKSQDFVITPPLFMLPTRKEASLRIMFLGKTNLPTDRETLYWMNVKAIPPTDEKNTQKNTLQLALQNKIKLFYRPENLPVQPGKARNMLRFKYEGKQLKVINPSPYYLTLTGIKVQGSKLPNTFVPPKSDITVSSPVTLAGEITYQTINDFGATTERQKGIMQ

SEQ ID NO: 15511 - protein, 224 aa, Escherichia coli; identical to SEQ ID NO: 3792

SEQ ID NO: 15512 - protein, 213 aa, Escherichia coli; identical to SEQ ID NO: 2232

SEQ ID NO: 15513 - protein, 432 aa, Escherichia coli; identical to SEQ ID NO: 2026

SEQ ID NO: 15514 - protein, 246 aa, Escherichia coli
MFFNTKYTAALCFATCVAFSSSAIADIVISGTRVIYKSDQKSVNIRLENKGNNPLLVQSWLDTGDDNAEPGSITVPFTATPPVSRIDAKRGQTIKLMYTASSVLPKDRESVFWFNVLEVPPKPDAATVANQSLLQLAFRTRIKLFYRPEALKGNPSEAPLALKWSWSGSEGKAALRVANPTPYYVSFSSGDLEASGKRFPIDVKMITPFSDEVMKVTGLNGKANSAKVHFYAINDFGGAIEGNASL

SEQ ID NO: 15515 - protein, 690 aa, Escherichia coli
MIVTGNTAADTTDSAAGAGFKTNDIDVGPLGTKSWIETPYSSTTVTKEMIENQQAQSVSEMLKYSPSTQMQARGGMDVGRPQSRGMQGSVVANSRLDGLNIVSTTAFPVEMLERMDVLNSLTGALYGPASPAGQFNFVAKRPTEETLRKVTLGYQSRSAFTGHADLGGHFDENKRFGYRVNLLDQEGEGNVDDSTLRRKLVSVALDWNIQPGTQLQLDASHYEFIQKGYVGSFNYGPNVKLPSAPNPKDKNLALSTAGNDLTTDTISTRLIHYFNDDWSMNAGVGWQQADRAMRSVSSKILNNQGDISRSMKDSTAAGRFRVLSNTAGLNGHIDTGSIGHDLSLSTTGYVWSLYSAKGTGSSYSWGTTNMYHPDAIDEQGDGKIRTGGPRYRSSVNTQQSVTLGDTVTFTPQWSAMFYLSQSWLQTKNYDKHGNQTNQVDENGLSPNAALMYKITPNTMAYVSYADSLEQGGTAPTDESVKNAGQTLNPYRSKQYEVGLKSDIGEMNLGAALFRLERPFAYLDTDNVYKEQGNQVNNGLELTAAGNVWQGLNIYSGVTFLDPKLKDTANASTSNKQVVGVPKVQANLLAEYSLPSIPEWVYSANVHYTGKRAANDTNTSYASSYTTWDLGTRYTTKVSNVPTTFRVVVNNVFDKHYWASIFPSGTDGDNGSPSAFIGGGREVRASVTFDF

SEQ ID NO: 15516 - protein, 162 aa, Escherichia coli; identical to SEQ ID NO: 1965

SEQ ID NO: 15517 - protein, 118 aa, Escherichia coli
MKKRGAFLGLLLVSACASVFAANNETSKSVTFPKCEGLDAAGIAASVKRDYQQNRVARWADDQKIVGQADPVAWVSLQDIQGKDDKWSVPLNVRGKSADIHYQVSVDCKSGMAEYQRR

SEQ ID NO: 15518 - protein, 359 aa, Escherichia coli; identical to SEQ ID NO: 2329

SEQ ID NO: 15519 - protein, 700 aa, Escherichia coli
MKIFSVRQTVLPALLVLSPVVFAADEQTMIVSAAPQVVSELDTPAAVSVVDGEEMRLATPRINLSESLTGVPGLQVQNRQNYAQDLQLSIRGFGSRSTYGIRGIRLYVDGIPATMPDGQGQTSNIDLSSVQNVEVLRGPFSALYGNASGGVMNVTTQTGQQPPTIEASSYYGSFGSWRYGLKATGATGDGTQPGDVDYTVATTRFTTHGYRDHSGAQKNLANAKLGVRIDDASKLSLIFNSVDIKADDPGGLTEAEWKANPQQAPRAEQYDMRKTIKQTQAGLRYERSLSAQDDMSVMMYAGERETTQYQSIPMAPQLNPSHAGGVITLQRHYQGIDSRWTHRGELGVPVTFTTGLNYENMSENRKGYNNFRLNRGVPEYGQKGELRRDERNLMWNVDPYLQTQWQLTDKLSLDAGVRYSSVWFDSNDHYVTPGNGDDSGDASYHKWLPAGSLKYAMTDAWNVYLAAGRGFETPTINELSYRADGQSGMNFGLKPSTNDTIEIGSKTRIGDGLLSLALFQTDTDDEIVVDSSSGGRTTYKNAGKTRRQGAELAWDQRFAGDFRVKASWTWLDATYRSNVCNEKDCNGNRMPGIARNMGFASIGYIPEDGWYAGTEARYMGDIMADDENTAKAPSYTLVGLFTGYKYNYHNLTVDLFGRVDNLFDKEYVGSVIVNESNGRYYEPAPGRNYGVGINIAWRFE

SEQ ID NO: 15520 - protein, 505 aa, Escherichia coli; identical to SEQ ID NO: 5681

SEQ ID NO: 15521 - protein, 246 aa, Escherichia coli
MKSPLITTGMICLLGICNFAQATVSPDRTRIIFNASNKSATVRLTNQSKIDPYLAQSWIEDASGKKTRDYISTLPPMERIEPDEQVQIRLMALASLNNLPQDRETLFYYNVREIPPRTKEQNVMQIAMQSRLKLFWRPKAIELKEGQMVPLQKVTITRTAAGLTLNNPTPYHITVGYIGTNGKTLMPGADSIMVTPFASATQYLNNLPSTFQLGFVADYGGLEMFKVECNSVQSLCQSSPAKKGKI

SEQ ID NO: 15522 - protein, 200 aa, Escherichia coli
MLAFCRSSLKSKKYFIILLALAAIAGLGTHAAWSSNGLPRIDNKTLARLAQQHPVVVLFRHAERCDRSTNQCLSDKTGITVKGTQDARELGNAFSADIPDFDLYSSNTVRTIQSATWFSAGKKLTVDKRFLQCGNEIYSAIKDLQHKAPDKNIVIFTHNHCLTYIAKDKRDATFKPDYLDGLVMHVEKGKVYLDGEFVNH

SEQ ID NO: 15523 - protein, 351 aa, Escherichia coli; identical to SEQ ID NO: 5565

SEQ ID NO: 15524 - protein, 678 aa, Escherichia coli
MVPSTFSRLKAARCLPVVLAALIFAGCGTHTPDQSTAYMQGTAQADSAFYLQQMQQSSDDTRINWQLLAIRALVKEGKTGQAVELFNQLPQELNDSQRREKTLLAAEIKLAQKDFAGAQNLLAKITPADLEQNQQARYWQAKIDASQGRPSIDLLRALIAQEPLLGAKEKQQNIDATWQALSSMTQEQANTLVINADENILQGWLDLQRVWFDNRNDPDMMKAGIADWQKRYPNNPGAKMLPTQLVNVKAFKPASTNKIALLLPLNGQAAVFGRTIQQGFEAAKNIGTQPVAAQVAAAPAADVAEQPQPQTVDGVASPAQASVSDLTGEQPAAQPVPVSAPATSTAAVSAPANPSAELKIYDTSSQPLSQILSQVQQDGASIVVGPLLKNNVEELLKSNTPLNVLALNQPENIENRVNICYFALSPEDEARDAARHIRDQGKQAPLVLIPRSSLGDRVANAFAQEWQKLGGGTVLQQKFGSTSELRAGVNGGSGIALTGSPITPRETTDSGMTTNNPTLQTTPTDDQFTNNGGRVDAVYIVATPGEIAFIKPMIAMRNGSQSGATLYASSRSAQGTAGPDFRLEMEGLQYSEIPMLAGGNLPLMQQALSAVNNDYSLARMYAMGVDAWSLANHFSQMRQVQGFEINGNTGSLTASPDCVINRKLSWLQYQQGQVVPAS

SEQ ID NO: 15525 - protein, 373 aa, Escherichia coli; identical to SEQ ID NO: 2969

SEQ ID NO: 15526 - protein, 203 aa, Escherichia coli; identical to SEQ ID NO: 2008

SEQ ID NO: 15527 - protein, 518 aa, Escherichia coli
MKKLKINYLFIGILALLLAVALWPSIPWFGKADNRIAAIQARGELRVSTIHTPLTYNEINGKPFGLDYELAKQFADYLGVKLKVTVRQNISQLFDDLDNGNADLLAAGLVYNSERVKNYQPGPTYYSVSQQLVYKVGQYRPRTLGNLTAEQLTVAPGHVVVNDLQTLKDTKFPELSWKVDDKKGSAELMEDVIEGKLDYTIADSVAISLFQRVHPELAVALDITDEQPVTWFSPLDGDNTLSAALLDFFNEMNEDGTLARIEEKYLGHGDDFDYVDTRTFLRAVDTVLPQLKPLFEKYAEEIDWRLLAAIAYQESHWDAQATSPTGVRGMMMLTKNTAQSLGITDRTDAEQSISGGVRYLQDMMSKVPESVPENERIWFALAAYNMGYAHMLDARALTAKTKGNPDSWADVKQRLPLLSQKPYYSKLTYGYARGHEAYAYVENIRKYQISLVGYLQEKEKQATEAAMQLAQDYPAVSPTELGKEKFPFLSFLSQSSSNYLTHSPSLLFSRKGSEEKQN

SEQ ID NO: 15528 - protein, 250 aa, Escherichia coli; identical to SEQ ID NO: 5650

SEQ ID NO: 15529 - protein, 641 aa, Escherichia coli
MLAVDDDGETMVVTASSVEQNLKDAPASISVITQEDLQRKPVQNLKDVLKEVPGVQLTNEGDNRKGVSIRGLDSSYTLILVDGKRVNSRNAVFRHNDFDLNWIPVDSIERIEVVRGPMSSLYGSDALGGVVNIITKKIGQKWSGTVTVDTTVQEHRDRGDTYNGQFFTSGPLIDGVLGMKAYGSLAKREKDDPQNSTTTDTGETPRIEGFSSRDGNVEFAWTPNQNHDFTAGYGFDRQDRDSDSLDKNRLERQNYSVSHNGRWDYGTSELKYYGEKVENKNPGNSSPITSESNTVDGKYTLPLTAINQFLTVGGEWRHDKLSDAVNLTGGTSSKTSASQYALFVEDEWRIFEPLALTTGVRMDDHETYGEHWSPRAYLVYNATDTVTVKGGWATAFKAPSLLQLSPDWTSNSCRGACKIVGSPDLKPETSESWELGLYYMGEEGWLEGVESSVTVFRNDVKDRISISRTSDVNAAPGYQNFVGFETGANGRRIPVFSYYNVNKARIQGVETELKIPFNDEWKLSINYTYNDGRDVSNGENKPLSDLPFHTANGTLDWKPLALEDWSFYVSGHYTGQKRADSATAKTPGGYTIWNTGAAWQVTKNVKLRAGVLNLGDKDLSRDDYSYNEDGRRYFMAVDYRF

SEQ ID NO: 15530 - protein, 539 aa, Escherichia coli; identical to SEQ ID NO: 3845

SEQ ID NO: 15531 - protein, 111 aa, Escherichia coli; identical to SEQ ID NO: 3419

SEQ ID NO: 15532 - protein, 711 aa, Escherichia coli; identical to SEQ ID NO: 5144

SEQ ID NO: 15533 - protein, 715 aa, Escherichia coli; identical to SEQ ID NO: 5610

SEQ ID NO: 15534 - protein, 241 aa, Escherichia coli; identical to SEQ ID NO: 2075

SEQ ID NO: 15535 - protein, 660 aa, Escherichia coli; identical to SEQ ID NO: 5588

SEQ ID NO: 15536 - protein, 897 aa, Escherichia coli; identical to SEQ ID NO: 1908

SEQ ID NO: 15537 - protein, 802 aa, Escherichia coli; identical to SEQ ID NO: 15305

SEQ ID NO: 15538 - protein, 207 aa, Escherichia coli; identical to SEQ ID NO: 2211

SEQ ID NO: 15539 - protein, 862 aa, Escherichia coli; identical to SEQ ID NO: 5294

SEQ ID NO: 15540 - protein, 865 aa, Escherichia coli; identical to SEQ ID NO: 8232

SEQ ID NO: 15541 - protein, 813 aa, Escherichia coli; identical to SEQ ID NO: 15302

SEQ ID NO: 15542 - protein, 700 aa, Escherichia coli
MKIFSVRQTVLPALLVLSPVVFAADEQTMIVSAAPQVVSELDTPAAVSVVDGEEMRLATPRINLSESLTGVPGLQVQNRQNYAQDLQLSIRGFGSRSTYGIRGIRLYVDGIPATMPDGQGQTSNIDLSSVQNVEVLRGPFSALYGNASGGVMNVTTQTGQQPPTIEASSYYGSFGSWRYGLKATGATGDGTQPGDVDYTVSTTRFTTHGYRDHSGAQKNLANAKLGVRIDEASKLSLIFNSVDIKADDPGGLTKAEWKANPQQAPRAEQYDTRKTIKQTQAGLRYERSLSAQDDMSVMMYAGERETTQYQSIPMAPQLNPSHAGGVITLQRHYQGIDSRWTHRGELGVPVTFTTGLNYENMSENRKGYNNFRQNSGMPEYGQKGELRRDERNLMWNIDPYLQTQWQLSEKLSLDAGVRYSSVWFDSNDHYVTPGNGDDSGDASYHKWLPAGSLKYAMTDAWNIYLAAGRGFETPTINELSYRADGQSGMNFGLKPSTNDTIEIGSKTRIGDGLLSLALFQTDTDDEIVVDSSSGGRTTYKNAGKTRRQGAELAWDQRFAGDFRVNASWTWLDATYRSNVCNEQDCNGNRMPGIARNMGFASIGYVPEDGWYAGTEARYMGDIMADDENTAKAPSYTLVGLFTGYKYNYHNLTVDLFGRVDNLFDKEYVGSVIVNESNGRYYEPSPGRNYGVGMNIAWRFE

SEQ ID NO: 15543 - protein, 208 aa, Escherichia coli; identical to SEQ ID NO: 1949

SEQ ID NO: 15544 - protein, 784 aa, Escherichia coli; identical to SEQ ID NO: 2244

SEQ ID NO: 15545 - protein, 386 aa, Escherichia coli; identical to SEQ ID NO: 3094

SEQ ID NO: 15546 - protein, 246 aa, Escherichia coli; identical to SEQ ID NO: 3021

SEQ ID NO: 15547 - protein, 747 aa, Escherichia coli; identical to SEQ ID NO: 14675

SEQ ID NO: 15548 - protein, 266 aa, Escherichia coli; identical to SEQ ID NO: 1894

SEQ ID NO: 15549 - protein, 221 aa, Escherichia coli; identical to SEQ ID NO: 3672

SEQ ID NO: 15550 - protein, 673 aa, Escherichia coli; identical to SEQ ID NO: 3719

SEQ ID NO: 15551 - protein, 869 aa, Escherichia coli; identical to SEQ ID NO: 8419

SEQ ID NO: 15552 - protein, 360 aa, Escherichia coli; identical to SEQ ID NO: 3694

SEQ ID NO: 15553 - protein, 228 aa, Escherichia coli; identical to SEQ ID NO: 3034

SEQ ID NO: 15554 - protein, 843 aa, Escherichia coli; identical to SEQ ID NO: 3163

SEQ ID NO: 15555 - protein, 224 aa, Escherichia coli; identical to SEQ ID NO: 3115

SEQ ID NO: 15556 - protein, 243 aa, Escherichia coli; identical to SEQ ID NO: 12586

SEQ ID NO: 15557 - protein, 430 aa, Escherichia coli; identical to SEQ ID NO: 2617

SEQ ID NO: 15558 - protein, 641 aa, Escherichia coli; identical to SEQ ID NO: 3774

SEQ ID NO: 15559 - protein, 512 aa, Escherichia coli; identical to SEQ ID NO: 2974

SEQ ID NO: 15560 - protein, 331 aa, Escherichia coli; identical to SEQ ID NO: 2700

SEQ ID NO: 15561 - protein, 760 aa, Escherichia coli; identical to SEQ ID NO: 3026

SEQ ID NO: 15562 - protein, 203 aa, Escherichia coli; identical to SEQ ID NO: 2201

SEQ ID NO: 15563 - protein, 224 aa, Escherichia coli; identical to SEQ ID NO: 3165

SEQ ID NO: 15564 - protein, 591 aa, Escherichia coli; identical to SEQ ID NO: 3668

SEQ ID NO: 15565 - protein, 178 aa, Escherichia coli; identical to SEQ ID NO: 7111

SEQ ID NO: 15566 - protein, 686 aa, Escherichia coli
MIVEGSATAPDDGENDYSVTSTSAGTKMQMTQRDIPQSVTIVSQQRMEDQQLQTLGEVMENTLGISKSQADSDRALYYSRGFQIDNYMVDGIPTYFESRWNLGDALSDMALFERVEVVRGATGLMTGTGNPSAAINMVRKHATSREFKGDVSAEYGSWNKERYVADLQSPLTEDGKIRARIVGGYQNNDSWLDRYNSEKTFFSGIVDADLGDLTTLSAGYEYQHIDVNSPTWGGLPRWNTDGSSNSYDRARSTAPDWAYNDKEINKVFMTLKQRFADTWQATLNATHSEVEFDSKMMYVDAYVNKADGMLIGPYSNYGPGFDYVGGTGWNSGKRKVDALDLFADGSYELFGRQHNLMFGGSYSKQNNRYFSSWANIFPDEIGSFYNFNGNFPQTDWSPQSLAQDDTTHIKSLYAATRVTLADPLHLILGARYTNWRVDTLTYSMEKNHTTPYAGLVFDINDNWSTYASYTSIFQPQNDRDSSGKYLAPITGNNYELGLKSDWMNSRLTTTLAIFRIEQDNVAQSTGTPIPGSNGETAYKAVDGTVSKGVEFELNGAITDNWQLTFGATRYIAEDNEGNAVNPNLPRTTVKMFTSYRLPVMPELTVGGGVNWQNRVYTDTVTPYGTFRAEQGSYALVDLFTRYQVTKNFSLQGNVNNLFDKTYDTNVEGSIVYGAPRNFSITGTYQF

SEQ ID NO: 15567 - protein, 732 aa, Escherichia coli; identical to SEQ ID NO: 3068

SEQ ID NO: 15568 - protein, 432 aa, Escherichia coli; identical to SEQ ID NO: 2026

SEQ ID NO: 15569 - protein, 289 aa, Escherichia coli
MVKEAVSHIPAPRDGRDYDPEVLKQAVNDAVANIPVPADGKSITPDDVRPMLEQMVKEAVSHIPAPRDGRDYDPEVLKQAVNDAVANIPVPADGKSITPDDVRPMLEQMVKEAVSHIPAPRDGRDYDPEVLKQAVLEAVNALPAPQDGRDATALEVLPAIDDQKSFPRGTYATHLGGLWRAYEKTHGMRGWECLVDGVADIDVSMTDERLFSVVIRQSSGQCTEKTFSLPVMLYRGVFRAGETYHPGDTVTWGGSLWHCNSMTGDKPGEAHSSGWTLAAKRGRDAGGGK

SEQ ID NO: 15570 - protein, 89 aa, Escherichia coli; identical to SEQ ID NO: 2833

SEQ ID NO: 15571 - protein, 207 aa, Escherichia coli; identical to SEQ ID NO: 2211

SEQ ID NO: 15572 - protein, 834 aa, Escherichia coli; identical to SEQ ID NO: 3692

SEQ ID NO: 15573 - protein, 539 aa, Escherichia coli; identical to SEQ ID NO: 3050

SEQ ID NO: 15574 - protein, 851 aa, Escherichia coli; identical to SEQ ID NO: 4440

SEQ ID NO: 15575 - protein, 274 aa, Escherichia coli; identical to SEQ ID NO: 3721

SEQ ID NO: 15576 - protein, 361 aa, Escherichia coli; identical to SEQ ID NO: 3061

SEQ ID NO: 15577 - protein, 678 aa, Escherichia coli; identical to SEQ ID NO: 3014

SEQ ID NO: 15578 - protein, 867 aa, Escherichia coli; identical to SEQ ID NO: 2581

SEQ ID NO: 15579 - protein, 826 aa, Escherichia coli; identical to SEQ ID NO: 3700

SEQ ID NO: 15580 - protein, 232 aa, Escherichia coli; identical to SEQ ID NO: 2087

SEQ ID NO: 15581 - protein, 359 aa, Escherichia coli; identical to SEQ ID NO: 2329

SEQ ID NO: 15582 - protein, 367 aa, Escherichia coli
KARRTSSTVVVNTVASENPDEAGRYSMDVEYGQYSVILLVEGFPPSHAGTITVYEDSQPGTLNDFLGAMSEDDVRPEALRRFELMLEEAARHAEEAKKNAGEAETSARNAGISASQAEESAAHADTSAGDASESARQAAESAAAAKQSEEASSSSASAAAQKASESSQSAAEAELSRKTAESAAGNAARDATTATEKARESAESAQSAEQSRIAAEEAVNRIPTVVGPPGPKGEQGPAGPQGPKGDKGERGDTGPVGATGERGPAGDAGPAGPQGPKGDRGERGETGLTGNAGPQGPKGDTGAAGPAGPQGPKGETGAAGPVGATGPQGPKGDPGEAQIRFRLGPETLLRQTAMAGSRIQMAHSSPD

SEQ ID NO: 15583 - protein, 793 aa, Escherichia coli; identical to SEQ ID NO: 2768

SEQ ID NO: 15584 - protein, 368 aa, Escherichia coli; identical to SEQ ID NO: 3933

SEQ ID NO: 15585 - protein, 765 aa, Escherichia coli; identical to SEQ ID NO: 4323

SEQ ID NO: 15586 - protein, 746 aa, Escherichia coli; identical to SEQ ID NO: 3695

SEQ ID NO: 15587 - protein, 241 aa, Escherichia coli; identical to SEQ ID NO: 2922

SEQ ID NO: 15588 - protein, 838 aa, Escherichia coli; identical to SEQ ID NO: 7717

SEQ ID NO: 15589 - protein, 446 aa, Escherichia coli; identical to SEQ ID NO: 2176

SEQ ID NO: 15590 - protein, 186 aa, Escherichia coli
KGERGDTGPAGATGERGPAGDAGPAGPQGPKGDRGERGETGLTGNAGPQGPKGDTGAAGPAGPQGPKGETGAAGPVGATGPQGPKGDPGETQIRFRLGPASIIETNSNGWFPGTDGALITGLTFLTPKMPHRFRGCFSICRSGLVTGRGRMLRGLMKWAVIQAEQENDSKPAHLNRLGLFPPALQK

SEQ ID NO: 15591 - protein, 200 aa, Escherichia coli; identical to SEQ ID NO: 1784

SEQ ID NO: 15592 - protein, 614 aa, Escherichia coli; identical to SEQ ID NO: 3301

SEQ ID NO: 15593 - protein, 161 aa, Escherichia coli; identical to SEQ ID NO: 2582

SEQ ID NO: 15594 - protein, 162 aa, Escherichia coli; identical to SEQ ID NO: 1965

SEQ ID NO: 15595 - protein, 198 aa, Escherichia coli; identical to SEQ ID NO: 3645

SEQ ID NO: 15596 - protein, 478 aa, Escherichia coli; identical to SEQ ID NO: 15182

SEQ ID NO: 15597 - protein, 831 aa, Escherichia coli
MQELPMLRMTPLASAIVALLLGIEAYAAEETFDTHFMIGGMKDQQVANIRLDDNQPLPGQYDIDIYVNKQWRGKYEIIVKDNPQETCLSREVIKRLGINSDNFASGKQCLTFEQLVQGGSYTWDIGVFRLDFSVPQAWVEELESGYVPPENWERGINAFYTSYYLSQYYSDYKASGNNKSTYVRFNSGLNLLGWQLHSDASFSKTNNNPGVWKSNTLYLERGFAQLLGTLRVGDMYTSSDIFDSVRFRGVRLFRDMQMLPNSKQNFTPRVQGIAQSNALVTIEQNGFVVYQKEVPPGPFAITDLQLAGGGADLDVSVKEADGSVTTYLVPYAAVPNMLQPGVSKYDFAAGRSHIEGASKQSEFVQVGYQYGFNNLLTLYGGSMVANNYYAFTLGTGWNTRIGAISVDATKSHSKQDNGDVFDGQSYQIAYNKFVSQTSTRFGLAAWRYSSRDYRTFNDHVWANNKDNYRRDENDVYDIADYYQNDFGRKNSFSANMSQSLPEGWGSVSLSTLWRDYWGRSGSSKDYQLSYSNNWRRISYTLAASQAYDENHHEEKRFNIFISIPFDWGDDVTTPRRQIYMSNSTTFDDQGFASNNTGLSGTVGSRDQFNYGVNLSYQHQGNETTAGANLTWNAPVATVNGSYSQSSTYRQAGASVSGGIVAWSGGVNLANRLSETFAVMNAPGIKDAYVNGQKYRTTNRNGVVIYDGMTPYRENHLMLDVSQSDSEAELRGNRKIAAPYRGAVVLVNFDTDQRKPWFIKALRADGQSLTFGYEVNDIHGHNIGVVGQGSQLFIRTNEVPPSVNVAIDKQQGLSCTITFGKEIDESRNYICQ

SEQ ID NO: 15598 - protein, 460 aa, Escherichia coli; identical to SEQ ID NO: 14627

SEQ ID NO: 15599 - protein, 774 aa, Escherichia coli
MTPLRVFRKTTPLVNAIRLSLLPLAGLSFSAFAAQVNIAPGSLDKALNQYAAHSGFTLSVDASLTRGKQSNGLHGDYDVESGLQQLLDGSGLQVKPLGNNSWTLEPAPAPKEDALTVVGDWLGDARENDVFEHAGARDVIRREDFAKTGATTMREVLNRIPGVSAPENNGTGSHDLAMNFGIRGLSPRLASRSTVLMDGIPVPFAPYGQPQLSLAPVSLGNMDAIDVVRGGGAVRYGPQSVGGVVNFVTCAIPQDFGIEAGVEGQLSPTSSQNNPKETHNLMVGGTADNGFGTALLYSGTRGSDWREHSATRIDDLMLKSKYAPDEVHTFNSLLQYYDGEADMPGGLSRADYDADRWQSTRPYDRFWGRRKLASLGYQFQPDSQHKFNIQGFYTQTLRSGYLEQGKRITLSPRNYWVRGIEPRYSQIFMIGPSAHEVGVGYRYLNESTHEMRYYTATSSGQLPSGSSPYDRDTRSGTEAHAWYLDDKIDIGNWTITPGMRFEHIESYQNNAITGTHEEVSYNAPLPALNVLYHLTDSWNLYANTEGSFGTVQYSQIGKAVQSGNVEPEKARTWELGTRYDDGALTAEMGLFLINFNNQYDSNQTNDTVTARGKTRHTGLETQARYDLGTLTPTLDNVSIYASYAYVNAEIREKGDTYGNLVPFSPKHKGTLGVDYKPGNWTFNLNSDFQSSQFADNANTVKESADGSTGRIPGFMLWGARVAYDFGPQMADLNLAFGVKNIFDQDYFIRSYDDNNKGIYAGQPRTLYMQGSLKF

SEQ ID NO: 15600 - protein, 130 aa, Escherichia coli; identical to SEQ ID NO: 3706

SEQ ID NO: 15601 - protein, 518 aa, Escherichia coli; identical to SEQ ID NO: 2349

SEQ ID NO: 15602 - protein, 213 aa, Escherichia coli; identical to SEQ ID NO: 2232

SEQ ID NO: 15603 - protein, 834 aa, Escherichia coli; identical to SEQ ID NO: 3118

SEQ ID NO: 15604 - protein, 878 aa, Escherichia coli; identical to SEQ ID NO: 12633

SEQ ID NO: 15605 - protein, 351 aa, Escherichia coli; identical to SEQ ID NO: 3691

SEQ ID NO: 15606 - protein, 231 aa, Escherichia coli; identical to SEQ ID NO: 3055

SEQ ID NO: 15607 - protein, 368 aa, Escherichia coli; identical to SEQ ID NO: 3171

SEQ ID NO: 15608 - protein, 266 aa, Escherichia coli; identical to SEQ ID NO: 1894

SEQ ID NO: 15609 - protein, 203 aa, Escherichia coli; identical to SEQ ID NO: 2009

SEQ ID NO: 15610 - protein, 161 aa, Escherichia coli; identical to SEQ ID NO: 2582

SEQ ID NO: 15611 - protein, 230 aa, Escherichia coli; identical to SEQ ID NO: 3723

SEQ ID NO: 15612 - protein, 111 aa, Escherichia coli; identical to SEQ ID NO: 3096

SEQ ID NO: 15613 - protein, 249 aa, Escherichia coli; identical to SEQ ID NO: 3492

SEQ ID NO: 15614 - protein, 363 aa, Escherichia coli; identical to SEQ ID NO: 3347

SEQ ID NO: 15615 - protein, 565 aa, Escherichia coli; identical to SEQ ID NO: 2678

SEQ ID NO: 15616 - protein, 170 aa, Escherichia coli [sequence omitted]

SEQ ID NO: 15617 - protein, 395 aa, Escherichia coli
MAVKISGVLKDGTGKPVENCTIQLKARRTSSTVVVNTVASENPDEAGRYSMDVEYGQYSVILLVEGFPPSHAGTITVYEDSQPGTLNDFLGAMSEDDVRPEALRRFELMVEEVARHAEEAKKNAGEAETSARNAGISASQAEESAANADTSAGEASESARQAAESAASAKQSEDASSSSASAAAQKASESSQSAAEAELSRKTAESAAGNAARDATTAPEKARESAESAQSAEQSRIAAEEAVNRIPTVVGPPGPKGEPGPAGPQGPKGDKGERGDTGPVGATGERGPAGDAGPAGPQGPKGDRGERGETGLTGNAGPQGPKGDTGAAGPAGPQGPKGETGAAGPVGATGPQGPKGDPGETQIRFRLGPASIIETKQPWLVPGYRWCAHHRTDLS

SEQ ID NO: 15618 - protein, 118 aa, Escherichia coli [sequence omitted]

SEQ ID NO: 15619 - protein, 816 aa, Escherichia coli; identical to SEQ ID NO: 12597

SEQ ID NO: 15620 - protein, 236 aa, Escherichia coli; identical to SEQ ID NO: 3286

SEQ ID NO: 15621 - protein, 250 aa, Escherichia coli; identical to SEQ ID NO: 3707

SEQ ID NO: 15622 - protein, 193 aa, Escherichia coli; identical to SEQ ID NO: 2246

SEQ ID NO: 15623 - protein, 686 aa, Escherichia coli; identical to SEQ ID NO: 3015

SEQ ID NO: 15624 - protein, 331 aa, Escherichia coli
MKKPVVIGLAVVVLAAVVAGGYWWYQSRQDNGLTLYGNVDIRTVNLSFRVGGRVESLAVGEGDAIKAGQVLGELDHKPYEIALMQAKAGVSVAQAQYDLMLAGYRDEEIAQAAAAVKQAQAAYDYAQNFYNRQQGLWKSRTISANDLENARSSRDQAQATLKSAQDKLRQYRSGNREQDIAQAKASLEQAQAQLAQAELNLQDSTLIAPSDGTLLTRAVEPGTVLNEGGTVFTVSLTRPVWVRAYVDERNLDQAQPGRKVLLYTDGRPDKPYHGQIGFVSPTAEFTPKTVETPDLRTDLVYRLRIVVTDADDALRQGMPVTVQFGDEAGHE

SEQ ID NO: 15625 - protein, 192 aa, Escherichia coli; identical to SEQ ID NO: 5348

SEQ ID NO: 15626 - protein, 304 aa, Escherichia coli; identical to SEQ ID NO: 14484

SEQ ID NO: 15627 - protein, 235 aa, Escherichia coli; identical to SEQ ID NO: 4365

SEQ ID NO: 15628 - protein, 122 aa, Escherichia coli; identical to SEQ ID NO: 2915

SEQ ID NO: 15629 - protein, 431 aa, Escherichia coli; identical to SEQ ID NO: 3408

SEQ ID NO: 15630 - protein, 242 aa, Escherichia coli; identical to SEQ ID NO: 2697

SEQ ID NO: 15631 - protein, 233 aa, Escherichia coli; identical to SEQ ID NO: 2006

SEQ ID NO: 15632 - protein, 362 aa, Escherichia coli; identical to SEQ ID NO: 2434

SEQ ID NO: 15633 - protein, 169 aa, Escherichia coli; identical to SEQ ID NO: 4636

SEQ ID NO: 15634 - protein, 250 aa, Escherichia coli; identical to SEQ ID NO: 2761

SEQ ID NO: 15635 - protein, 213 aa, Escherichia coli; identical to SEQ ID NO: 8226

SEQ ID NO: 15636 - protein, 517 aa, Escherichia coli; identical to SEQ ID NO: 3116

SEQ ID NO: 15637 - protein, 230 aa, Escherichia coli; identical to SEQ ID NO: 3222

SEQ ID NO: 15638 - protein, 732 aa, Escherichia coli; identical to SEQ ID NO: 3068

SEQ ID NO: 15639 - protein, 446 aa, Escherichia coli [sequence omitted]

SEQ ID NO: 15640 - protein, 204 aa, Escherichia coli; identical to SEQ ID NO: 2957

SEQ ID NO: 15641 - protein, 386 aa, Escherichia coli; identical to SEQ ID NO: 3072

SEQ ID NO: 15642 - protein, 208 aa, Escherichia coli; identical to SEQ ID NO: 1949

SEQ ID NO: 15643 - protein, 700 aa, Escherichia coli; identical to SEQ ID NO: 15325

SEQ ID NO: 15644 - protein, 239 aa, Escherichia coli; identical to SEQ ID NO: 2759

SEQ ID NO: 15645 - protein, 274 aa, Escherichia coli; identical to SEQ ID NO: 2309

SEQ ID NO: 15646 - protein, 236 aa, Escherichia coli; identical to SEQ ID NO: 2726

SEQ ID NO: 15647 - protein, 614 aa, Escherichia coli; identical to SEQ ID NO: 1888

SEQ ID NO: 15648 - protein, 230 aa, Escherichia coli; identical to SEQ ID NO: 2580

SEQ ID NO: 15649 - protein, 432 aa, Escherichia coli; identical to SEQ ID NO: 2026

SEQ ID NO: 15650 - protein, 554 aa, Escherichia coli; identical to SEQ ID NO: 3409

SEQ ID NO: 15651 - protein, 191 aa, Escherichia coli; identical to SEQ ID NO: 2727

SEQ ID NO: 15652 - protein, 774 aa, Escherichia coli; identical to SEQ ID NO: 3978

SEQ ID NO: 15653 - protein, 111 aa, Escherichia coli; identical to SEQ ID NO: 3153

SEQ ID NO: 15654 - protein, 231 aa, Escherichia coli; identical to SEQ ID NO: 2794

SEQ ID NO: 15655 - protein, 650 aa, Escherichia coli; identical to SEQ ID NO: 2146

SEQ ID NO: 15656 - protein, 784 aa, Escherichia coli; identical to SEQ ID NO: 8230

SEQ ID NO: 15657 - protein, 252 aa, Escherichia coli; identical to SEQ ID NO: 14514

SEQ ID NO: 15658 - protein, 760 aa, Escherichia coli; identical to SEQ ID NO: 2080

SEQ ID NO: 15659 - protein, 747 aa, Escherichia coli
MARSKTAQPKHSLRKIAVVVATAVSGMSVYAQAAVEPKEDTITVTAAPASQESAWGPAATIAARQSATGTKTDTPIQKVPQSISVVTAEEMALHQPKSVKEALSYTPGVSVGTRGASNTYDHLIIRGFAAEGQSQNNYLNGLKLQGNFYNDAVIDPYMLERAEIMRGPVSVLYGKSSPGGLLNMVSKRPTTEPLKEVQFKAGTDSLFQTGFDFSDSLDDDGVYSYRLTGLARSANAQQKGSEEQRYAIASAFTWRPDDKTNFTFLSYFQNEPETGYYGWLPKEGTVEPLPNGKRLPTDFNEGAKNNTYSRNEKMVGYSFDHEFNDTFTVRQNLRFAENKTSQNSVYGYGVCSDPANAYSKQCAALAPADKGHYLARKYVVDDEKLQNFSVDTQLQSKFATGDIDHTLLTGVDFMRMRNDINAWFGYDDSVPLLNLYNPVNTDFDFNAKDPANSGPYRILNKQKQTGVYVQDQAQWDKVLVTLGGRYDWADQESLNRVAGTTDKRDDKQFTWRGGVNYLFDNGVTPYFSYSESFEPSSQVGKDGNIFAPSKGKQYEVGVKYVPEDRPIVVTGAVYNLTKTNNLMADPEGSFFSVEGGEIRARGVEIEAKAALSASVNVVGSYTYTDAEYTTDTTYKGNTPAQVPKHMASLWADYTFFDGPLSGLTLGTGGRYTGSSYGDPANSFKVGSYTVVDALVRYDLARVGMAGSNVALHVNNLFDREYVASCFNTYGCFWGAERQVVATATFRF

SEQ ID NO: 15660 - protein, 478 aa, Escherichia coli; identical to SEQ ID NO: 2404

SEQ ID NO: 15661 - protein, 746 aa, Escherichia coli
MNKKIHSLALLVNLGIYGVAQAQEPTDTPVSHDDTIVVTAAEQNLQAPGVSTITADEIRKNPVARDVSEIIRTMPGVNLTGNSTSGQRGNNRQIDIRGMGPENTLILIDGKPVSSRNSVRQGWRGERDTRGDTSWVPPEMIERIEVLRGPAAARYGNGAAGGVVNIITKKGSGEWHGSWDAYFNAPEHKEEGATKRTNFSLTGPLGDEFSFRLYGNLDKTQADAWDINQGHQSARAGTYATTLPAGREGVINKDINGVVRWDFAPLQSLELEAGYSRQGNLYAGDTQNTNSDSYPRSKYGDETNRLYRQNYALTWNGGWDNGVTTSNWVQYEHTRNSRIPEGLAGGTEGKFNEKATQDFVDIDLDDVMLHSEVNLPIDFLVNQTLTLGTEWNQQRMKDLSSNTQALTGTNTGGAIDGVSTTDRSPYSKAEIFSLFAENNMELTDSTIVTPGLRFDHHSIVGNNWSPALNISQGLGDDFTLKMGIARAYKAPSLYQTNPNYILYSKGQGCYASAGGCYLQGNDDLKAETSINKEIGLEFKRDGWLAGVTWFRNDYRNKIEAGYVAVGQNAVGTDLYQWDNVPKAVVEGLEGSLNVPVSETVMWTNNITYMLKSENKTTGDRLSIIPEYTLNSTLSWQAREDLSMQTTFTWYGKQQPKKYNYKGQPAVGPETKEISPYSIVGLSATWDVTKNVSLTGGVDNLFDKRLWRAGNAQTTGDLAGANYIAGAGAYTYNEPGRTWYMSVNTHF

SEQ ID NO: 15662 - protein, 541 aa, Escherichia coli
MAMAAVCGTSGIASLFSQAAFAADSDIADGQTQRFDFSILQSMAHDLAQTAWRGAPRPLPDTLATMTPQAYNSIQYDAEKSLWHNVENRQLDAQFFHMGMGFRRRVRMFSVDPATHLAREIHFRPELFKYNDAGVDTKQLEGQSDLGFAGFRVFKAPELARRDVVSFLGASYFRAVDDTYQYGLSARGLAIDTYTDSKEEFPDFTAFWFDTVKPGATTFTVYALLDSASITGAYKFTIHCEKSQVIMDVGNHLYARKDIKQLGIAPMTSMFSCGTNERRMCDTIHPQIHDSDRLSMWRGNGEWICRPLNNPQKLQFNAYTDNNPKGFGLLQLDRDFSHYQDIMGWYNKRPSLWVEPRNKWGKGTIGLMEIPTTGETLDNIVCFWQPEKAVKAGDEFAFQYRLYWSAQPPVHCPLARVMATRTGMGGFSEGWAPGEHYPEKWARRFAVDFVGGDLKAAAPKGIEPVITLSSGEAKQIEILYIEPIDGYRIQFDWYPTSDSTDPVDMRMYLRCQGDAISETWLYQYFPPAPDKRQYVDDRVMS

SEQ ID NO: 15663 - protein, 353 aa, Escherichia coli
MKMKKSTLALVVMGIVASASVQAAEIYNKDGNKLDVYGKVKAMHYMSDNASKDGDQSYIRFGFKGETQINDQLTGYGRWEAEFAGNKAESDTAQQKTRLAFAGLKYKDLGSFDYGRNLGALYDVEAWTDMFPEFGGDSSAQTDNFMTKRASGLATYRNTDFFGVIDGLNLTLQYQGKNENRDVKKQNGDGFGTSLTYDFGGSDFSISGAYTNSDRTNEQNLQSRGTGKRAEAWATGLKYDANNIYLATFYSETRKMTPITGGFANKTQNFEAVAQYQFDFGLRPSLGYVLSKGKDIEGIGDEDLVNYIDVGATYYFNKNMSAFVDYKINQLDSDNKLNINNDDIVAVGMTYQF

SEQ ID NO: 15664 - protein, 367 aa, Escherichia coli; identical to SEQ ID NO: 2433

SEQ ID NO: 15665 - protein, 663 aa, Escherichia coli; identical to SEQ ID NO: 1910

SEQ ID NO: 15666 - protein, 729 aa, Escherichia coli; identical to SEQ ID NO: 2074

SEQ ID NO: 15667 - protein, 518 aa, Escherichia coli; identical to SEQ ID NO: 2349

SEQ ID NO: 15668 - protein, 729 aa, Escherichia coli; identical to SEQ ID NO: 5131

SEQ ID NO: 15669 - protein, 208 aa, Escherichia coli; identical to SEQ ID NO: 1948

SEQ ID NO: 15670 - protein, 862 aa, Escherichia coli
MTIKSTNHLTHIATFCALLYSNSALCAELVEYDHTFLMGNDASNIDLSRYTEGNPTLPGIYDVSVYINDQPIMSQSIAFTVIEGKKNAQACITQKNLLQFHISSPDKNSGKAILLKRDDDLGDCLNLAEMISQSSIRYDVNDQRLDIDVPQAWIMKNYQNYVDPSLWENGINAAMLSYNLNGYHSESPGRTNDSIYAAFNGGINLGAWRLRASGNYNWMTNVHSDYDFQNRYLQRDLASLRSQLVIGESYTTGETFDSVSIRGIRLYSDSRMLPPVLASFAPIIHGVANTNAKVTVMQNGYKIYETTVPPGAFAIDDLSPSGYGSDLIVTIEEADGTKRTFSQPFSSVVQMLRPGVGRWDISAGQVLKDSIQDEPNLFQASYYYGLNNYLTGYTGIQLTDNNYTAGLLGLGMNTPVGAFSVDVTHSNVSIPDDKTYQGQSYRISWNKLFENTSTSLNIAAYRYSTQHYLGLNDALTLIDEVEHPEQDLEPKSMRNYSRMKNQVTVSINQPLKFEKKDYGSFYLSGSWSDYWASGQNSTNYSIGYSNSASWGSYSISAQRSLNEDGQTDDSIYLSFTIPIENLLDTDHRSSGFQSIDTQLNSDFKGNNQLNISSSGYSDTNRISYSVNTGYMMNKSSDDLSYIGGHASYESPWGTLSGSASASSDNSRQFSLNTDGGFVLHSGGLTFSNDSFSDSDTLAVIQAPGAKGARINYGNSTVDRWSYGVTSALSPYHENRIALDINDLENDVELKSTSTVAIPRQGAVVFADFETVQGQSAIMNIVRSDGKNIPFAEDIYDEQNNIIGNVGQGGQAFVHGIEQEENIRITWIEEGKPVSCFAHYQQNTASEKIAQSIILNGLRCQIQ

SEQ ID NO: 15671 - protein, 731 aa, Escherichia coli; identical to SEQ ID NO: 6297

SEQ ID NO: 15672 - protein, 207 aa, Escherichia coli; identical to SEQ ID NO: 2212

SEQ ID NO: 15673 - protein, 165 aa, Escherichia coli; identical to SEQ ID NO: 5130

SEQ ID NO: 15674 - protein, 361 aa, Escherichia coli
MTVKISGVLKDGTGKPVQNCTIVLKARRTSSTVVVNTVASENPDEAGRYSMDVEHGQYSVTLLVEGFPPSHAGTITVYEGSRPGTLNDFLGAMTEDDVRPEALRRFELMVEEAARHAEEAKKNAGEAETSARNAGISASQAEESAANADTSAGDASESARQAAESAAAAKQSEEASSSSASAAAQKASESSQSAADAELSKKTAESAAGNAARDATTATEKARESAESAQSAEQSRIAAEEAVNRIPTVVGPPGPKGEPGPAGPQGPKGDKGERGDTGPAGATGERGPAGDAGPAGPQGPKGDRGERGETGLTGNAGPQGPKGDTGAAGPAGPQGPKGETGAAGPVGATGPQGPKGDPGET

SEQ ID NO: 15675 - protein, 774 aa, Escherichia coli; identical to SEQ ID NO: 3426

SEQ ID NO: 15676 - protein, 660 aa, Escherichia coli; identical to SEQ ID NO: 6291

SEQ ID NO: 15677 - protein, 170 aa, Escherichia coli; identical to SEQ ID NO: 2564

SEQ ID NO: 15678 - protein, 407 aa, Escherichia coli; identical to SEQ ID NO: 6407

SEQ ID NO: 15679 - protein, 711 aa, Escherichia coli; identical to SEQ ID NO: 5144

SEQ ID NO: 15680 - protein, 641 aa, Escherichia coli; identical to SEQ ID NO: 6206

SEQ ID NO: 15681 - protein, 266 aa, Escherichia coli; identical to SEQ ID NO: 5141

SEQ ID NO: 15682 - protein, 162 aa, Escherichia coli; identical to SEQ ID NO: 1965

SEQ ID NO: 15683 - protein, 191 aa, Escherichia coli; identical to SEQ ID NO: 2727

SEQ ID NO: 15684 - protein, 249 aa, Escherichia coli; identical to SEQ ID NO: 5120

SEQ ID NO: 15685 - protein, 879 aa, Escherichia coli; identical to SEQ ID NO: 5138

SEQ ID NO: 15686 - protein, 871 aa, Escherichia coli; identical to SEQ ID NO: 6388

SEQ ID NO: 15687 - protein, 241 aa, Escherichia coli; identical to SEQ ID NO: 2890

SEQ ID NO: 15688 - protein, 368 aa, Escherichia coli; identical to SEQ ID NO: 5102

SEQ ID NO: 15689 - protein, 161 aa, Escherichia coli; identical to SEQ ID NO: 2582

SEQ ID NO: 15690 - protein, 371 aa, Escherichia coli; identical to SEQ ID NO: 5126

SEQ ID NO: 15691 - protein, 200 aa, Escherichia coli; identical to SEQ ID NO: 1785

SEQ ID NO: 15692 - protein, 274 aa, Escherichia coli
MNKTAIALLALLASSASLAATPWQKITQPVPGSAQSIGSFSNGCIVGADTLPIQSEHYQVMHTDQRRYFGHPDLVMFIQRLSRQVSNLGMGTVLIGDMGMPAGGRFNGGHASHQTGLDVDIFLQLPKTRWTSAQLLRPQALDLVSRDGKHVVPALWKPEIFSLIKLAAQDKDVTRIFVNPAIKQQLCLDAGTDRDWLRKVRPWFQHRAHMHVRLRCPADSLECEDQPLPPPGDGCGAELQSWFEPPKPGTTKPEKKTPPPLPPSCQALLDEHVI

SEQ ID NO: 15693 - protein, 237 aa, Escherichia coli; identical to SEQ ID NO: 3793

SEQ ID NO: 15694 - protein, 193 aa, Escherichia coli; identical to SEQ ID NO: 2246

SEQ ID NO: 15695 - protein, 518 aa, Escherichia coli; identical to SEQ ID NO: 2350

SEQ ID NO: 15696 - protein, 331 aa, Escherichia coli; identical to SEQ ID NO: 5128

SEQ ID NO: 15697 - protein, 432 aa, Escherichia coli; identical to SEQ ID NO: 2026

SEQ ID NO: 15698 - protein, 203 aa, Escherichia coli; identical to SEQ ID NO: 2201

SEQ ID NO: 15699 - protein, 826 aa, Escherichia coli; identical to SEQ ID NO: 5098

SEQ ID NO: 15700 - protein, 213 aa, Escherichia coli; identical to SEQ ID NO: 2232

SEQ ID NO: 15701 - protein, 203 aa, Escherichia coli; identical to SEQ ID NO: 2007

SEQ ID NO: 15702 - protein, 565 aa, Escherichia coli; identical to SEQ ID NO: 5118

SEQ ID NO: 15703 - protein, 678 aa, Escherichia coli; identical to SEQ ID NO: 6376

SEQ ID NO: 15704 - protein, 700 aa, Escherichia coli; identical to SEQ ID NO: 5110

SEQ ID NO: 15705 - protein, 111 aa, Escherichia coli; identical to SEQ ID NO: 5097

SEQ ID NO: 15706 - protein, 118 aa, Escherichia coli [sequence omitted]

SEQ ID NO: 15707 - protein, 859 aa, Escherichia coli
MSWMVVSRTYTSFFPFSLSVLALTVAGSFSATAGKFNPRFLEDTAGINQHVDLSMYETDHGAQLPGTYRVSLIVNEQKMETRTLEFKAATESQRKEMGEFLIPCLSRTQLADMGVRVDSFSALNLIPAEACVAFNEIIPQATSHFDFSEQKLVMSFPQAAMQQVARGTVPESRWDDGVPALLLDYSFSGSNSSHDTKSYNRYIDENGNHHQDKNETSQTNDSYYLSMRSGLNLGAWRLRNYSNWSYSNGEKQWDNIGTYVTRAIVPLKAQLTLGDTATPSDIFDSVQMRGALLASDEEMLPDSQRGFAPVVRGIAKSNAEVSIEQNGYVIYRAFVQPGAFEINDLYPTANSGDLTVIVKEADGSEQRFIQPFSSVAVFQREGHLKYSLSAGEYRAGNYDSANPRFGQFNAMYGLPFGMTTYGGALISKDYNAFALGLGKNFGSIGAISVDITQAKSTLNNNATDQGQSYRFLYSKSFASGTDFRLLGYKYSTSGFYTFQEATDVRSGADSDYGRYHKRSEIQGNLTQQLGTYGSVYFNMTQQDYWNDDGKRLSLATGYNGRIGRVNYSIAYSWNKSPEWDENDQLWSFNISIPFGRAWSNYRVTTDQDGRTIQQLGVNGTLLEDRNLSYNVQEGYSSNGVGNSGNASLAYQGGAGNISVGYSYGKDYQQTNYSLRGGIVAHSEGISLSQPLGETIAIVSALGARGAKVLNNSGVSVDWQGNAVVPYLSIYRENDVSIRSETLNDSVDMNSAFQTIVPTRGAVVRAHFDTRVGYRVLMTLIRQNGVSVPFGATATLVSDTTEQISGIVGEDGQLYISGMPKTGNVKIVWGKDTSQQCVAKYELPVEEKNSGIISVTANCQ

SEQ ID NO: 15708 - protein, 138 aa, Escherichia coli
MNPSLPQDRESVYWVNVKAIPSQNEENEGKNVLQIAVRTRIKLFYRPAGLKGDIKSSPGELRFTRNGKQIKVDNPTVFNITFSDVFINGHEIEKSGMVPAKGALNIYLPAGVNSASQIKYNTINDFGSSGEYLTREIN

SEQ ID NO: 15709 - protein, 430 aa, Escherichia coli; identical to SEQ ID NO: 2617

SEQ ID NO: 15710 - protein, 512 aa, Escherichia coli; identical to SEQ ID NO: 2973

SEQ ID NO: 15711 - protein, 355 aa, Escherichia coli; identical to SEQ ID NO: 5115

SEQ ID NO: 15712 - protein, 386 aa, Escherichia coli; identical to SEQ ID NO: 5575

SEQ ID NO: 15713 - protein, 232 aa, Escherichia coli; identical to SEQ ID NO: 2087

SEQ ID NO: 15714 - protein, 200 aa, Escherichia coli; identical to SEQ ID NO: 5121

SEQ ID NO: 15715 - protein, 446 aa, Escherichia coli; identical to SEQ ID NO: 2177

SEQ ID NO: 15716 - protein, 856 aa, Escherichia coli; identical to SEQ ID NO: 5125

SEQ ID NO: 15717 - protein, 746 aa, Escherichia coli; identical to SEQ ID NO: 5132

SEQ ID NO: 15718 - protein, 539 aa, Escherichia coli; identical to SEQ ID NO: 5109

SEQ ID NO: 15719 - protein, 236 aa, Escherichia coli; identical to SEQ ID NO: 3482

SEQ ID NO: 15720 - protein, 359 aa, Escherichia coli; identical to SEQ ID NO: 2329

SEQ ID NO: 15721 - protein, 686 aa, Escherichia coli; identical to SEQ ID NO: 9611

SEQ ID NO: 15722 - protein, 351 aa, Escherichia coli; identical to SEQ ID NO: 4688

SEQ ID NO: 15723 - protein, 641 aa, Escherichia coli
MRGADTSNSIYIDGIRDIGSVSRDTFNTEQVEVIKGPSGTDYGRSAPTGSINMISKQPRNDSGIDASASIGSAWFRRGTLDVNQVIGDTTAVRLNVMGEKTHDAGRNKVKNERYGVAPSVAFGLGTANRLYLNYLHVTQHNTPDGGIPTIGLPGYSAPSAGTAALNHSGKVDTHNFYGTDSDYDDSTTDTATMRFEHDINDNTTIRNTTRWSRVKQDYLMTAIMGGASNITQPTSDVNSWTWSRTANTKDVSNKILTNQTNLTSTFYTGAIGHDVSTGVEFTRETQTNYGVNPVTLPAVNIYHPDSSIHPGGLTRNGANANGQTDTFAIYAFDTLQITRDFELNGGIRLDNYHTEYDSATACGGSGRGAITCPAGVAKGSPVTTVDTAKSGNLVNWKAGALYHLTENGNVYINYAVSQQPPGGNNFALAQSGSGNSANRTDFKPQKANTSEIGTKWQVLDKRLLLTAALFRTDIENEVEQNDDGTYSQYGKKRVEGYEISVAGNITPAWQMIGGYTQQKATIKNGKDVAQDGSSSLPYTPEHAFTLWSQYQATDDISVGAGARYIGSMHKGSDGAVGTPAFTEGYWVADAKLGYRVNRNLDFQLNVYNLFDTDYVASINKSGYRYHPGEPRTFLLTANMHF

SEQ ID NO: 15724 - protein, 656 aa, Escherichia coli
MRLKKRYLCTALSLAFTQQAVAAQESDTLTVWSSPVSSTTTTVLDQPTMKAQDKQNVAQALSVVPGVVLQKSGSRNEEQVKVRGFDSRQVPVYFDGVPIYVPYDGNLDLARILTNNLGAVEVSKGYSSLLQGPNQMGGAINITTQKPTKPLEASLGYRQGWSRSQDNAYDMHASFAVSSDLGYLQVSGSQLKQDFLGLPHGVNNDIAGKHGKMINSSADDKRGIVKLGFTPRENDEYTLTYIKQDGEKDNPPYSRNSGQKSRYWQWPEYDKESFYYQGTTQLNDRFTLKSRLYRDTFENTLMMYNSLADLKNKKGSYSHYSDYSDGAGLQLAADVRENDLLSFAVNWKDDVHREKGAPHAAYDRYEDRTWSLASEYQWAAADNVDVVAGISYDWRDSVEAKKHEKDGSITHYDDNNQSAFNWQVMGKYHFANEDTLALSYYDRTRFPTLKERYTTSKPAYNQIAIVNPQLKPERARGVDLTWNGAFTHDWGFEVSVYYNRVSDAILSHNIDADTIQNQNSGTVDYSGLDAGIKGKISNILDVGLSYALIHADAKRKDIGKINDLPTQTMTAWMTLKPWEPLSVTLSEEARSSSYSNSDGSQKAAGFAVTHIRADYTLGHGFSVNASVNNLFDTKYAYSEGFIEEGRNFWAGIEYTF

SEQ ID NO: 15725 - protein, 478 aa, Escherichia coli; identical to SEQ ID NO: 2405

SEQ ID NO: 15726 - protein, 816 aa, Escherichia coli; identical to SEQ ID NO: 3562

SEQ ID NO: 15727 - protein, 869 aa, Escherichia coli; identical to SEQ ID NO: 2903

SEQ ID NO: 15728 - protein, 367 aa, Escherichia coli; identical to SEQ ID NO: 6155

SEQ ID NO: 15729 - protein, 840 aa, Escherichia coli; identical to SEQ ID NO: 3591

SEQ ID NO: 15730 - protein, 532 aa, Escherichia coli
MPDHSLFRLRVLPCCVALAMSGSYVNAWAENEIQFDSRFLELKGDTKIDLKRFSSQGYVEPGKYNLQVQLNKQPLTEEYDIYWYASENDASKTYACLTPELVAQFGLKEDVAKNLQWIHDGKCLKPGQLEGIDIKADLSQSALVISLPQAYLEYTDINWDPPSRWDDGISGLIADYSITAQTRHEENGGDDSNEISGNGTVGVNLGAWRLRADWQTDYLHSKSNDDDVINGDDTQKNWEWSRYYAWRALPSLKAKLGLGEDYLNSDIFDGFNYVGGSISTDDQMLPPNLRGYAPDISGVAHTTAKVTVSQLGRVIYETQVPAGPFRIQDLGDSVSGTRLLIDADGVAGVPVEGNGAAVYTNMFGKAVVADVNNYYRNQAYIDLNNLPENAEATQSVVQATLTEGAIGYRKFSVISGQKAMAVLRLQDGSYPPFGAEVKNDSAQNVGLVDDDGNVYLAGVKPGEHMIVSWGGVAHCDIHLPDPLPADLFNGLLLPCQQTGAISPSMPHEIKPVIQEQTQQVMPTEAPVSVSAN

SEQ ID NO: 15731 - protein, 368 aa, Escherichia coli; identical to SEQ ID NO: 2370

SEQ ID NO: 15732 - protein, 161 aa, Escherichia coli; identical to SEQ ID NO: 2582

SEQ ID NO: 15733 - protein, 863 aa, Escherichia coli; identical to SEQ ID NO: 3959

SEQ ID NO: 15734 - protein, 826 aa, Escherichia coli; identical to SEQ ID NO: 3563

SEQ ID NO: 15735 - protein, 432 aa, Escherichia coli; identical to SEQ ID NO: 2026

SEQ ID NO: 15736 - protein, 230 aa, Escherichia coli; identical to SEQ ID NO: 2995

SEQ ID NO: 15737 - protein, 366 aa, Escherichia coli; identical to SEQ ID NO: 3520

SEQ ID NO: 15738 - protein, 209 aa, Escherichia coli; identical to SEQ ID NO: 3547

SEQ ID NO: 15739 - protein, 478 aa, Escherichia coli; identical to SEQ ID NO: 2404

SEQ ID NO: 15740 - protein, 689 aa, Escherichia coli; identical to SEQ ID NO: 5715

SEQ ID NO: 15741 - protein, 237 aa, Escherichia coli; identical to SEQ ID NO: 2816

SEQ ID NO: 15742 - protein, 125 aa, Escherichia coli; identical to SEQ ID NO: 6182

SEQ ID NO: 15743 - protein, 227 aa, Escherichia coli; identical to SEQ ID NO: 3570

SEQ ID NO: 15744 - protein, 512 aa, Escherichia coli; identical to SEQ ID NO: 2813

SEQ ID NO: 15745 - protein, 539 aa, Escherichia coli; identical to SEQ ID NO: 3050

SEQ ID NO: 15746 - protein, 863 aa, Escherichia coli; identical to SEQ ID NO: 3946

SEQ ID NO: 15747 - protein, 266 aa, Escherichia coli; identical to SEQ ID NO: 1892

SEQ ID NO: 15748 - protein, 236 aa, Escherichia coli; identical to SEQ ID NO: 3970

SEQ ID NO: 15749 - protein, 871 aa, Escherichia coli; identical to SEQ ID NO: 3519

SEQ ID NO: 15750 - protein, 669 aa, Escherichia coli; identical to SEQ ID NO: 3677

SEQ ID NO: 15751 - protein, 111 aa, Escherichia coli; identical to SEQ ID NO: 14970

SEQ ID NO: 15752 - protein, 660 aa, Escherichia coli; identical to SEQ ID NO: 4092

SEQ ID NO: 15753 - protein, 828 aa, Escherichia coli; identical to SEQ ID NO: 2381

SEQ ID NO: 15754 - protein, 367 aa, Escherichia coli; identical to SEQ ID NO: 2431

SEQ ID NO: 15755 - protein, 200 aa, Escherichia coli; identical to SEQ ID NO: 1788

SEQ ID NO: 15756 - protein, 252 aa, Escherichia coli; identical to SEQ ID NO: 3543

SEQ ID NO: 15757 - protein, 191 aa, Escherichia coli; identical to SEQ ID NO: 2727

SEQ ID NO: 15758 - protein, 213 aa, Escherichia coli; identical to SEQ ID NO: 2232

SEQ ID NO: 15759 - protein, 224 aa, Escherichia coli; identical to SEQ ID NO: 3604

SEQ ID NO: 15760 - protein, 715 aa, Escherichia coli; identical to SEQ ID NO: 3971

SEQ ID NO: 15761 - protein, 359 aa, Escherichia coli; identical to SEQ ID NO: 2332

SEQ ID NO: 15762 - protein, 170 aa, Escherichia coli; identical to SEQ ID NO: 3540

SEQ ID NO: 15763 - protein, 224 aa, Escherichia coli; identical to SEQ ID NO: 3578

SEQ ID NO: 15764 - protein, 362 aa, Escherichia coli; identical to SEQ ID NO: 2998

SEQ ID NO: 15765 - protein, 203 aa, Escherichia coli; identical to SEQ ID NO: 2009

SEQ ID NO: 15766 - protein, 243 aa, Escherichia coli; identical to SEQ ID NO: 3561

SEQ ID NO: 15767 - protein, 614 aa, Escherichia coli; identical to SEQ ID NO: 1883

SEQ ID NO: 15768 - protein, 331 aa, Escherichia coli; identical to SEQ ID NO: 2705

SEQ ID NO: 15769 - protein, 859 aa, Escherichia coli
MWNLLRRTRKNQKSGRDVREAGWTSLFQAVAEPFSGAWQQGVKADPEAVLSFHAVFACISLISQDIAKMRLRLMQTDAHGIRRETRRGDIARLCRRPNAQQNRIQFFELWLNAKLRHGNTVVLKIRNARWQIKELRILDWSRVEPLVADDGEVFYRITPDRNCGITEAVTVPAREVIHDRFNCFFHPLIGLPPVYAAGLAATQGHHIQENSTSFFRNGGRPSGVIEIPGSITEENAKKLKSNWDSGYTGENAGKTAILSNGAKYNPTTFSPVDAQTVEQLKMTAEIVCSVFRVPAYKIGVGQPPSSDNVEALEQQYYSQCLQTLIESIELLLDEALETGENESTEFDVTTLLRMDSERRMKTLGDAVKNTLLTPNEARKRENLPPLAGGDALYLQQQNYSLEALSRRDAREDPFASAGKTVSSQLPDGASDGNKAISETEHDAVKAMFRGDTEKMTERELSIIRALGEEFSTVLADLQRTFEEKIAAQAQTFEEKLASQSVVLQKHVTVDEVRPVLQAMVDDAVGAIPVPRDGRDYDPDVLQQAVNDAVANIPQPADGKSLTPDDVRPMLEQMVKEAVSHIPVPRDGRDYDPEVLQKAVNDAVANIPQPADGKSLTPDDVRPMLEQMVKEAVSHIPVPRDGRDYDPEVLQKAVNDAVANIPQPADGKSLTPDDVRPMLEQMVKEAVSHIPVPRDGRDYDPDVLQKAVLDAVSALPAPQDGRDATALEILPAIDDQKSFPRGTYATHQGGLWRAYEKTHGMRGWECLVDGVADIDVSMTGERLFSVVVRQSSGQRTEKTFSLPVMLYRGVFRAGETYHPGDTVTWGGSLWHCNSMTEDKPGEAHSSAWTLAAKRGRDAGG

SEQ ID NO: 15770 - protein, 816 aa, Escherichia coli; identical to SEQ ID NO: 4456

SEQ ID NO: 15771 - protein, 122 aa, Escherichia coli; identical to SEQ ID NO: 2915

SEQ ID NO: 15772 - protein, 208 aa, Escherichia coli; identical to SEQ ID NO: 1949

SEQ ID NO: 15773 - protein, 203 aa, Escherichia coli; identical to SEQ ID NO: 2201

SEQ ID NO: 15774 - protein, 207 aa, Escherichia coli; identical to SEQ ID NO: 2211

SEQ ID NO: 15775 - protein, 760 aa, Escherichia coli; identical to SEQ ID NO: 2078

SEQ ID NO: 15776 - protein, 229 aa, Escherichia coli; identical to SEQ ID NO: 3589

SEQ ID NO: 15777 - protein, 162 aa, Escherichia coli; identical to SEQ ID NO: 1969

SEQ ID NO: 15778 - protein, 998 aa, Escherichia coli; identical to SEQ ID NO: 3056

SEQ ID NO: 15779 - protein, 678 aa, Escherichia coli; identical to SEQ ID NO: 2902

SEQ ID NO: 15780 - protein, 241 aa, Escherichia coli; identical to SEQ ID NO: 3582

SEQ ID NO: 15781 - protein, 351 aa, Escherichia coli; identical to SEQ ID NO: 2872

SEQ ID NO: 15782 - protein, 746 aa, Escherichia coli; identical to SEQ ID NO: 2949

SEQ ID NO: 15783 - protein, 430 aa, Escherichia coli; identical to SEQ ID NO: 2617

SEQ ID NO: 15784 - protein, 245 aa, Escherichia coli; identical to SEQ ID NO: 3527

SEQ ID NO: 15785 - protein, 627 aa, Escherichia coli; identical to SEQ ID NO: 3529

SEQ ID NO: 15786 - protein, 446 aa, Escherichia coli; identical to SEQ ID NO: 2180

SEQ ID NO: 15787 - protein, 89 aa, Escherichia coli; identical to SEQ ID NO: 2810

SEQ ID NO: 15788 - protein, 700 aa, Escherichia coli; identical to SEQ ID NO: 2926

SEQ ID NO: 15789 - protein, 231 aa, Escherichia coli; identical to SEQ ID NO: 2868

SEQ ID NO: 15790 - protein, 274 aa, Escherichia coli; identical to SEQ ID NO: 2304

SEQ ID NO: 15791 - protein, 630 aa, Escherichia coli; identical to SEQ ID NO: 4909

SEQ ID NO: 15792 - protein, 656 aa, Escherichia coli; identical to SEQ ID NO: 4901

SEQ ID NO: 15793 - protein, 193 aa, Escherichia coli; identical to SEQ ID NO: 2250

SEQ ID NO: 15794 - protein, 233 aa, Escherichia coli; identical to SEQ ID NO: 3548

SEQ ID NO: 15795 - protein, 517 aa, Escherichia coli; identical to SEQ ID NO: 2462

SEQ ID NO: 15796 - protein, 729 aa, Escherichia coli; identical to SEQ ID NO: 2948

SEQ ID NO: 15797 - protein, 650 aa, Escherichia coli; identical to SEQ ID NO: 3057

SEQ ID NO: 15798 - protein, 386 aa, Escherichia coli; identical to SEQ ID NO: 3600

SEQ ID NO: 15799 - protein, 232 aa, Escherichia coli; identical to SEQ ID NO: 2087

SEQ ID NO: 15800 - protein, 241 aa, Escherichia coli; identical to SEQ ID NO: 2887

SEQ ID NO: 15801 - protein, 518 aa, Escherichia coli; identical to SEQ ID NO: 2351

SEQ ID NO: 15802 - protein, 747 aa, Escherichia coli; identical to SEQ ID NO: 2954

SEQ ID NO: 15803 - protein, 252 aa, Escherichia coli; identical to SEQ ID NO: 5502

SEQ ID NO: 15804 - protein, 512 aa, Escherichia coli; identical to SEQ ID NO: 2813

SEQ ID NO: 15805 - protein, 630 aa, Escherichia coli; identical to SEQ ID NO: 7127

SEQ ID NO: 15806 - protein, 209 aa, Escherichia coli; identical to SEQ ID NO: 3547

SEQ ID NO: 15807 - protein, 729 aa, Escherichia coli; identical to SEQ ID NO: 2948

SEQ ID NO: 15808 - protein, 111 aa, Escherichia coli; identical to SEQ ID NO: 2911

SEQ ID NO: 15809 - protein, 689 aa, Escherichia coli; identical to SEQ ID NO: 5715

SEQ ID NO: 15810 - protein, 351 aa, Escherichia coli; identical to SEQ ID NO: 6970

SEQ ID NO: 15811 - protein, 816 aa, Escherichia coli; identical to SEQ ID NO: 4456

SEQ ID NO: 15812 - protein, 865 aa, Escherichia coli; identical to SEQ ID NO: 3574

SEQ ID NO: 15813 - protein, 367 aa, Escherichia coli; identical to SEQ ID NO: 2431

SEQ ID NO: 15814 - protein, 162 aa, Escherichia coli; identical to SEQ ID NO: 1969

SEQ ID NO: 15815 - protein, 863 aa, Escherichia coli; identical to SEQ ID NO: 13565

SEQ ID NO: 15816 - protein, 816 aa, Escherichia coli
MNIYRLSFVSCLVVAMPCALAVEFNLNVLDKSMRDRIDISLLKEKGVIAPGEYFVSVAVNNNQISNGQKINWHKNDDKTIPCINDLLVDKFGLKPEVRQSLPLINQCVDFSSRPEMLFNFDQANQQLNISIPQAWLAWHSENWTPPSTWKEGVAGILMDYNLFASSYRPQDGSSSTNLNAYGTTGINAGAWRLRSDYQLNQTDSDDNHEQSGGISRTYLFRPLPQLGSKLTLGETDFSSNIFDGFSYTGAALASDERMLPWELRGYAPQISGIAQTNATVTISQSGRVIYQKKVPPGPFIIDDLNQSVQGTLDVKVTEEDGRVNNFQVSAASTPFLTRQGQVRYKLAAGQPRPSMSHQTENETFFSNEVSWGMLSNTSLYGGLLLSGDDYHSAAMGIGQNMLWLGALSFDVTWASSHFDTQQDERGLSYRFNYSKQVDATNSTISLAAYRFSDRHFHSYANYLDHKYNDSDAQDEKQTISLSVGQPITPLNLNLYANLLHQTWWNADASTTANITAGFNVDIGDWRDISISTSFNTTHYEDKDRDNQIYLSISLPFGNGGRVGYDMQNSSHSTTHRMSWNDTLDERNSWGMSAGLQSDRPDNGAQVSGNYQHLSSAGEWDISGTYAANDYSSVSSSWSGSFTATQYGAAFHRRSSTNEPRLMVSTDGVADIPVQGNLDYTNHFGIAVVPLISSYQPSTVAVNMNDLPDGVTVAENVIKETWIEGAIGYKSLASRSGKDVNVIIRNASGQFPPLGADIRQDDSGISVGMVGEEGHAWLSGVAENQKFTVVWGDSQHCSLHLPEHMEDTANRLILPCH

SEQ ID NO: 15817 - protein, 686 aa, Escherichia coli; identical to SEQ ID NO: 3015

SEQ ID NO: 15818 - protein, 366 aa, Escherichia coli; identical to SEQ ID NO: 5499

SEQ ID NO: 15819 - protein, 567 aa, Escherichia coli; identical to SEQ ID NO: 6969

SEQ ID NO: 15820 - protein, 614 aa, Escherichia coli; identical to SEQ ID NO: 4469

SEQ ID NO: 15821 - protein, 746 aa, Escherichia coli; identical to SEQ ID NO: 2949

SEQ ID NO: 15822 - protein, 207 aa, Escherichia coli; identical to SEQ ID NO: 2211

SEQ ID NO: 15823 - protein, 863 aa, Escherichia coli; identical to SEQ ID NO: 8945

SEQ ID NO: 15824 - protein, 241 aa, Escherichia coli; identical to SEQ ID NO: 5479

SEQ ID NO: 15825 - protein, 368 aa, Escherichia coli; identical to SEQ ID NO: 4616

SEQ ID NO: 15826 - protein, 518 aa, Escherichia coli; identical to SEQ ID NO: 2349

SEQ ID NO: 15827 - protein, 880 aa, Escherichia coli; identical to SEQ ID NO: 6424

SEQ ID NO: 15828 - protein, 229 aa, Escherichia coli; identical to SEQ ID NO: 8891

SEQ ID NO: 15829 - protein, 857 aa, Escherichia coli; identical to SEQ ID NO: 7004

SEQ ID NO: 15830 - protein, 368 aa, Escherichia coli; identical to SEQ ID NO: 2370

SEQ ID NO: 15831 - protein, 760 aa, Escherichia coli; identical to SEQ ID NO: 2078

SEQ ID NO: 15832 - protein, 203 aa, Escherichia coli; identical to SEQ ID NO: 2009

SEQ ID NO: 15833 - protein, 274 aa, Escherichia coli; identical to SEQ ID NO: 2891

SEQ ID NO: 15834 - protein, 232 aa, Escherichia coli; identical to SEQ ID NO: 2087

SEQ ID NO: 15835 - protein, 840 aa, Escherichia coli; identical to SEQ ID NO: 3591

SEQ ID NO: 15836 - protein, 565 aa, Escherichia coli
MKSPAPSRPQKMALIPACIFLCFAALSVQAEETPVTPQPPDILLGPLFNDVQNAKLFPDQKTFADAVPNSDPLMILADYRMQQNQSGFDLRHFVNVNFTLPKEGEKYVPPEGQSLREHIDGLWPVLTRSTENTEKWDSLLPLPEPYVVPGGRFREVYYWDSYFTMLGLAESGHWDKVADMVANFAHEIDTYGHIPNGNRSYYLSRSQPPFFALMVELLAQHEGDAALKQYLPQMQKEYAYWMDGVENLQAGQQEKRVVKLQDGTLLNRYWDDRDTPRPESWVEDIATAKSNPNRPATEIYRDLRSAAASGWDFSSRWMDNPHQLNTLRTTSIVPVDLNSLMFKMEKILARASKAAGDNAMANQYETLANARQKGIEKYLWNDQQGWYADYDLKSHKVRNQLTAAALFPLYVNAAAKDRANKMATATKTHLLQPGGLNTTSVKSGQQWDAPNGWAPLQWVATEGLQNYGQKEVAMDISWHFLTNVQHTYDREKKLVEKYDVSTTGTGGGGGEYPLQDGFGWTNGVTLKMLDLICPKEQPCDNVPATRPTVKSATTQPSTKEAQPTP

SEQ ID NO: 15837 - protein, 203 aa, Escherichia coli; identical to SEQ ID NO: 2009

SEQ ID NO: 15838 - protein, 869 aa, Escherichia coli
MKIPTTTDIPQRYTWCLAGICYSSLAILPSFLSYAESYFNPAFLLENGTSVADLSRFERGNHQPAGVYRVDLWRNDEFIGSQDIVFESTTENTGDKSGGLMSCFNQVLLERIGLNSSAFPELAQQQNNKCINLLKAVPDATINFDFAAMRLNITIPQIALLSSAHGYIPPEEWDEGIPALLLNYNFTGNRGNGNDSYFFSELSGINIGPWRLRNNGSWNYFRGNGYHSEQWNNIGTWVQRAIIPLKSELVMGDGNTGSDIFDGVGFRGVRLYSSDNMYPDSQQGFAPTVRGIARTAAQLTIRQNGFIIYQSYVSPGAFEITDLHPTSSNGDLDVTIDERDGNQQNYTIPYSTVPILQREGRFKFDLTAGDFRSGNSQQSSPFFFQGTALGGLPQEFTAYGGTQLSANYTAFLLGLGRNLGNWGAVSLDVTHARSQLADDSRHEGDSIRFLYAKSMNTFGTNFQLMGYRYSTQGFYTLDDVAYRRMEGYEYDYDYDGEHRDELIIVNYHNLRFSRKDRLQLNISQSLNDFGSLYISGTHQKYWNTSDSDTWYQVGYTSSWVGISYSLSFSWNESVGIPDNERIVGLNVSVPFNVLTKRRYTRENALDRAYASFNANRNSNGQNSWLAGVGGTLLEGHNLSYHVSQGDTSNNGYTGSATANWQATYGTLGVGYNYDRDQHDVNWQLSGGVVGHENGITLSQPLGDTNVLIKAPGAGGVRIENQTGILTDWRGYAVMPYATVYRYNRIALDTNTMGNSIDVEKNISSVVPTQGALVRANFDTRIGVRALITVTQGGKPVPFGSLVRENSTGITSMVGDDGQVYLSGAPLSGELLVQWGDGANSRCIAHYVLPKQSLQQAVTVISAVCTHPGS

SEQ ID NO: 15839 - protein, 230 aa, Escherichia coli; identical to SEQ ID NO: 4274

SEQ ID NO: 15840 - protein, 732 aa, Escherichia coli; identical to SEQ ID NO: 3068

SEQ ID NO: 15841 - protein, 678 aa, Escherichia coli
MVPSTFSRLKAARCLPVVLAALIFAGCGTHTPDQSTAYMQGTAQADSAFYLQQMQQSSDDTRINWQLLAIRALVKEGKTGQAVELFNQLPQELNDSQRREKTLLAVEIKLAQKDFAGAQNLLAKITPADLEQNQQARYWQAKIDASQGRPSIDLLRALIAQEPLLGAKEKQQNIDATWQALSSMTQEQANTLVINADENILQGWLDLQRVWFDNRNDPDMMKAGIADWQKRYPNNPGAKMLPTQLVNVKAFKPASTNKIALLLPLNGQAAVFGRTIQQGFEAAKNIGTQPVAAQVAAAPAADVAEQPQPQTVDGVASPAQASVSDLTGEQPAAQPAPVSTPAATTTAVSAPANPSAELKIYDTSSQPLSQILSQVQQDGASIVVGPLLKNNVEELLKSNTPLNVLALNQPENIENRVNICYFALSPEDEARDAARHIRDQGKQAPLVLIPRSSLGDRVANAFAQEWQKLGGGTVLQQKFGSTSELRAGVNGGSGIALTGTPITPRATTDSGMTTNNPTLQTTPTDDQFTNNGGRVDAVYIVATPGEIAFIKPMIAMRNGSQSGAMLYASSRSAQGTAGPDFRLEMEGLQYSEIPMLAGGNLPLMQQALSAVNNDYSLARMYAMGVDAWSLANHFSQMRQVQGFEINGNTGSLTANPDCVINRKLSWLQYQQGQVVPVS

SEQ ID NO: 15842 - protein, 241 aa, Escherichia coli; identical to SEQ ID NO: 14984

SEQ ID NO: 15843 - protein, 213 aa, Escherichia coli; identical to SEQ ID NO: 2232

SEQ ID NO: 15844 - protein, 746 aa, Escherichia coli; identical to SEQ ID NO: 3031

SEQ ID NO: 15845 - protein, 828 aa, Escherichia coli
MKLSRRSFMKANAVAAAAAAAGLSVPGVARAVVGQQEAIKWDKAPCRFCGTGCGVLVGTQQGRVVACQGDPDAPVNRGLNCIKGYFLPKIMYGKDRLTQPLLRMKNGQYDKEGEFTPITWDQAFDVMEEKFKTALKEKGPESIGMFGSGQWTIWEGYAASKLFKAGFRSNNIDPNARHCMASAVVGFMRTFGMDEPMGCYDDIEQADAFVLWGANMAEMHPILWSRITNRRLSNQNVTVAVLSTYQHRSFELADNGIIFTPQSDLVILNYIANYIIQNNAINQDFFSKHVNLRKGATDIGYGLRPTHPLEKAAKNPGSDASEPMSFEDYKAFVAEYTLEKTAEMTGVPKDQLEQLAQLYADPNKKVISYWTMGFNQHTRGVWANNLVYNLHLLTGKISQPGCGPFSLTGQPSACGTAREVGTFAHRLPADMVVTNEKHRDICEKKWNIPSGTIPAKIGLHAVAQDRALKDGKLNVYWTMCTNNMQAGPNINEERMPGWRDPRNFIIVSDPYPTVSALAADLILPTAMWVEKEGAYGNAERRTQFWRQQVQAPGEAKSDLWQLVQFSRRFKTEEVWPEELLAKKPELRGKTLYEVLYATPEVSKFPVSELAEEQLNDESRELGFYLQKGLFEEYAWFGRGHGHDLAPFDDYHKARGLRWPVVNGKETQWRYSEGNDPYVKAGEGYKFYGKPDGKAVIFALPFEPAAEAPDEEYDLWLSTGRVLEHWHTGSMTRRVPELHRAFPEAVLFIHPLDAKARDLRRGDKVKVVSRRGEVISIVETRGRNRPPQGLVYMPFFDAAQLVNKLTLDATDPLSKETDFKKCAVKLEKV

SEQ ID NO: 15846 - protein, 162 aa, Escherichia coli; identical to SEQ ID NO: 13727

SEQ ID NO: 15847 - protein, 837 aa, Escherichia coli
MEQMYKKLKLTTISELIKNIYCSLSVLIIGCASAYAVEFNKDLIEAEDRENVNLSQFETDGQLPVGKYSLNALINNKRTPIHLDLQWVLIDNQTAVCLTPEQLTLLGFTDEIIEEAQQNLIDGCYPIEKEKQITTYLDKGKMQLSISAPQAWLKYKDANWTPPELWDHGIAGAFLDYNLYASHYAPHQGDNSQNISSYGQAGVNLGAWRLRTDYQYDQSFNNGKSQANNLDFPRIYLFRPIPAMNAKLTIGQYDTESSIFDSFHFSGVSLKSDENMLPPDLRGYAPQITGVAQTNAKVTVSQNNRIIYQENVPPGPFAITNLFNTLQGQLDVKVEEEDGQVTQWQVASNSIPYLTRKGQIRYTTAMGKPTSVGGDSLQQPFFWTGEFSWGWLNNVSLYGGSVLTNRDYQSLAAGVGFNLNSLGSLSFDVTRSDAQLHNQDKETGYSYRANYSKRFESTGSQLTFAGYRFSDKNFVTMNEYINDTNHYTNYQNEKESYIVTFNQYLESLRLNTYVSLARNTYWGASSNVNYSLSLSRDFDIGPLKNVSTSLTFSRINWEEDNQDQLYLNISIPWGTSRTLSYGMQRNQDNKISHTASWYDSSDRNNSWSVSASGDNDEFKDMKASLRASYQHNTENGRLYLSGTSQRDSYYSLNASWNGSFTATRHGAAFHDYSGSADSRFMIDADGAEDIPLNNKRAVTNRYGIGVIPSVSSYITTSLSVDTRNLPENVDIENSVITTTLTEGAIGYAKLDTRKGYQIMGVIRLADGSHPPLGISVKDKTSHKELGLVADGGFVYLNGIQDDSKLTLRWGDKSCFIQPPNSSNLTTGTVILPCISQN

SEQ ID NO: 15848 - protein, 826 aa, Escherichia coli
MLRMPPLASAIVALLLGIEAYAAEETFDTHFMIGGMKDQQVANIRLDDNQPLPGQYDIDIYVNKQWRGKYEIIVKDNPQETCLSREVIKRLGINSDNFASGKQCLTFEQLVQGGSYTWDIGVFRLDFSVPQAWVEELESGYVPPENWERGINAFYTSYYVSQYYSDYKASGNSKSTYVRFNSGLNLLGWQLHSDASFSKTNNNPGVWKSNTLYLERGFAQLLGTLRVGDMYTSSDIFDSVRFRGVRLFRDMQMLPNSKQNFTPRVQGIAQSNALVTIEQNGFVVYQKEVPPGPFAITDLQLAGGGADLDVSVKEADGSVTTYLVPYAAVPNMLQPGVSKYDFAAGRSHIEGASKHSDFVQAGYQYGFNNLLTLYGGSMVANNYYAFTLGTGWNTRIGAISVDATKSHSKQDNGDVFDGQSYQIAYNKFVSQTSTRFGLAAWRYSSRDYRTFNDHVWANNKDNYRRDENDVYDIADYYQNDFGRKNSFSANMSQSLPEGWGSVSLSTLWRDYWGRSGSSKDYQLSYSNNLRRISYTLAASQAYDENHHEEKRFNIFISIPFDWGDDVSTPRRQIYMSNSTTFDDQGFASNNTGLSGTVGSRDQFNYGVNLSHQHQGNETTAGANLTWNAPVATVNGSYSQSSTYRQAGASVSGGIVAWSGGVNLANRLSETFAVMNAPGIKDAYVNGQKYRTTNRNGVVVYDGMTPYRENHLMLDVSQSDSEAELRGNRKIAAPYRGAVVLVNFDTDQRKPWFIKALRADGQPLTFGYEVNDIHGHNIGVVGQGSQLFIRTNEIPPSVNVAIDKQQGLSCTITFGKEIDESRNYICQ

SEQ ID NO: 15849 - protein, 239 aa, Escherichia coli
MAAIPWRPFNLRGIKMKGLLSLLIFSMVLPAHAGIVIYGTRIIYPAENKEVMVQLMNQGNRSSLLQAWIDDGDTSLPPEKIQVPFMLTPPVAKIGANSGQQVKIKIMPNKLPINKESIFYLNVLDIPPNSPEQEGKNALKFAMQNRIKLFYRPAGIAPVNKATFKKLLVNRSGNGLVIKNDSANWVTISDVKANNVKVNYETIMIAPLESQSVNVKSNNANNWYLTIIDDHGNYISDKI

SEQ ID NO: 15850 - protein, 111 aa, Escherichia coli; identical to SEQ ID NO: 3096

SEQ ID NO: 15851 - protein, 478 aa, Escherichia coli
MTRIKINARRIFSLLIPFFFFTSVHAEQTAAPAKPVTVEAKNETFAPQHPDQYLSWKATSEQSERVDALAEDPRLVILWAGYPFSRDYNKPRGHAFAVTDVRETLRTGAPKNAEDGPLPMACWSCKSPDVARLIQKDGEDGYFHGKWARGGPEIVNNLGCADCHNTASPEFAKGKPELTLSRPYAARAMEAIGKPFEKAGRFDQQSMVCGQCHVEYYFDGKNKAVKFPWDDGMKVENMEQYYDKIAFSDWTNSLSKTPMLKAQHPEYETWTAGIHGKNNVTCIDCHMPKVQNAEGKLYTDHKIGNPFENFAQTCANCHTQDKAALQKVVAERKQSINDLKIKVEDQLVHAHFEAKAALDAGATEAEMKPIQDDIRHAQWRWDLAIASHGIHMHAPEEGLRMLGTAMDKAADARTKLARLLATKGITHEIQIPDISTKEKAQQAIGLNMEQIKAEKQDFIKTVIPQWEEQARKNGLLSQ

SEQ ID NO: 15852 - protein, 250 aa, Escherichia coli; identical to SEQ ID NO: 3048

SEQ ID NO: 15853 - protein, 224 aa, Escherichia coli; identical to SEQ ID NO: 3165

SEQ ID NO: 15854 - protein, 208 aa, Escherichia coli; identical to SEQ ID NO: 1949

SEQ ID NO: 15855 - protein, 226 aa, Escherichia coli; identical to SEQ ID NO: 6247

SEQ ID NO: 15856 - protein, 700 aa, Escherichia coli
MKIVSVRQTVLPALLVLSPVVFAADEQTMIVSAAPQVVSELDTPAAVSVVDGEEMRLATPRINLSESLTGVPGLQVQNRQNYAQDLQLSIRGFGSRSTYGIRGIRLYVDGIPATMPDGQGQTSNIDLSSVQNVEVLRGPFSALYGNASGGVMNVTTQTGQQPPTIEASSYYGSFGSWRYGLKATGATGDGTQPGDVDYTVSTTRFTTHGYRDHSGAQKNLANAKLGVRIDEASKLSLIFNSVDIKADDPGGLTKAEWKANPQQAPRAEQYDTRKTIKQTQAGLRYERSLSAQDDMSVMMYAGERETTQYQSIPMAPQLNPSHAGGVITLQRHYQGIDSRWTHRGELGVPVTFTTGLNYENMSENRKGYNNFRLNSGMPEYGQKGELRRDERNLMWNIDPYLQTQWQLSEKLSLDAGVRYSSVWFDSNDHYVTPGNGDDSGDASYHKWLPAGSLKYAMTDAWNIYLAAGRGFETPTINELSYRADGQSGMNFGLKPSTNDTIEIGSKTRIGDGLLSLALFQTDTDDEIVVDSSSGGRTTYKNAGKTRRQGAELAWDQRFAGDFRVNASWTWLDATYRSNVCNEQDCNGNRMPGIARNMGFASIGYVPEDGWYAGTEARYMGDIMADDENTAKAPSYTLVGLFTGYKYNYHNLTVDLFGRVDNLFDKEYVGSVIVNESNGRYYEPSPGRNYGVGMNIAWRFE

SEQ ID NO: 15857 - protein, 331 aa, Escherichia coli; identical to SEQ ID NO: 2700

SEQ ID NO: 15858 - protein, 1024 aa, Escherichia coli
MPTITTAQIKSTLQSAKQSAENKLHSAGQSTKDALKKAAEKTRNAGNRLILLIPKDYKGQGSSLNDLVRTADELGIEVQYDEKNGTAITKQVFGTAEKLIGLTERGVTIFAPKLDKLLQKYQKAGNKLGGSAENIGDNLGKAGGILSTFQNFLGTALSSMKIDELIKKQKSGGNVSSSEMAEASIELINQLVDTAASLNNNVNSFSQQLNTLGSVLSNTKHLNGVGNKLQNLPNLDNIGAGLDTVSGILSTISASFILSNADADTRTKAAAGVELTTKVLGNVGKGISQYIIAQRAAQGLSTSAAAAGLIASAVILAISPLSFLSIADKFKRANKIEEYSQRFKKLGYDGDSLLAAFHKATGAIDASLTTISTVLASVSSGISAAATTSLVGAPVSALVGAVTGIISGILEASKQAMFEHVASKMADVIAEWEKKHGKNYFENGYDARHAAFLEDNFKILSQYNKKYSVERSVLITQQHWDTLIGELAGVTRNGDKTLSGKSYIDYYEEGKRLEKKTDEFQKQVFDPLKGNIDLSDSKSSTLLKFVTPLLTPGEEIRERRQSGKYEYITELLVKGVDKWTVKGVQDKGAVYDYSNLIQHASVGNNQYRGIRIESHLGDGDDKVFLSAGSANIYAGKGHDVVYYDKTDTGYLTIDGTKATEAGNYTVTRVLGGDVKVLQEVAKEQEVSVGKRTEKTQYRSYEFTHINGKNLTETDNLYSVEELIGTTRADKFFGSKFTDIFHGADGDDLIEGNDGNDRLYGDKGNDTLSGGNGDDQLYGGDGNDKLIGGAGNNYLNGGDGDDELQVQGNSLAKNVLSGGKGNDKLYGSEGADLLDGGEGNDLLKGGYGNDIYRYLSGYGHHIIDDDGGKEDKLSLADIDFRDVAFKREGNDLIMYKAEGNVLSIGHENGITFRNWFEKESGDISNHQIEQIFDKGGRIITPDSLKKALEYQQRNNKASYVYGNDALAYGSQDNLNLLINEISKIISAAGNFDVKEERTAASLLQLSGNASDFSYGRNSITLTTSA

SEQ ID NO: 15859 - protein, 193 aa, Escherichia coli; identical to SEQ ID NO: 2250

SEQ ID NO: 15860 - protein, 660 aa, Escherichia coli; identical to SEQ ID NO: 6993

SEQ ID NO: 15861 - protein, 700 aa, Escherichia coli; identical to SEQ ID NO: 2926

SEQ ID NO: 15862 - protein, 651 aa, Escherichia coli; identical to SEQ ID NO: 6992

SEQ ID NO: 15863 - protein, 747 aa, Escherichia coli; identical to SEQ ID NO: 2954

SEQ ID NO: 15864 - protein, 266 aa, Escherichia coli; identical to SEQ ID NO: 1894

SEQ ID NO: 15865 - protein, 108 aa, Escherichia coli; identical to SEQ ID NO: 3602

SEQ ID NO: 15866 - protein, 161 aa, Escherichia coli; identical to SEQ ID NO: 2582

SEQ ID NO: 15867 - protein, 715 aa, Escherichia coli; identical to SEQ ID NO: 6954

SEQ ID NO: 15868 - protein, 232 aa, Escherichia coli; identical to SEQ ID NO: 2087

SEQ ID NO: 15869 - protein, 143 aa, Escherichia coli; identical to SEQ ID NO: 8874

SEQ ID NO: 15870 - protein, 627 aa, Escherichia coli; identical to SEQ ID NO: 3529

SEQ ID NO: 15871 - protein, 241 aa, Escherichia coli; identical to SEQ ID NO: 6961

SEQ ID NO: 15872 - protein, 236 aa, Escherichia coli; identical to SEQ ID NO: 3970

SEQ ID NO: 15873 - protein, 446 aa, Escherichia coli; identical to SEQ ID NO: 2180

SEQ ID NO: 15874 - protein, 237 aa, Escherichia coli; identical to SEQ ID NO: 2816

SEQ ID NO: 15875 - protein, 478 aa, Escherichia coli; identical to SEQ ID NO: 2404

SEQ ID NO: 15876 - protein, 816 aa, Escherichia coli; identical to SEQ ID NO: 3562

SEQ ID NO: 15877 - protein, 430 aa, Escherichia coli; identical to SEQ ID NO: 6998

SEQ ID NO: 15878 - protein, 869 aa, Escherichia coli; identical to SEQ ID NO: 6956

SEQ ID NO: 15879 - protein, 229 aa, Escherichia coli; identical to SEQ ID NO: 8878

SEQ ID NO: 15880 - protein, 203 aa, Escherichia coli; identical to SEQ ID NO: 2201

SEQ ID NO: 15881 - protein, 226 aa, Escherichia coli; identical to SEQ ID NO: 7160

SEQ ID NO: 15882 - protein, 233 aa, Escherichia coli; identical to SEQ ID NO: 3548

SEQ ID NO: 15883 - protein, 191 aa, Escherichia coli; identical to SEQ ID NO: 2727

SEQ ID NO: 15884 - protein, 224 aa, Escherichia coli; identical to SEQ ID NO: 6030

SEQ ID NO: 15885 - protein, 446 aa, Escherichia coli; identical to SEQ ID NO: 2182

SEQ ID NO: 15886 - protein, 617 aa, Escherichia coli
MAEDRALYYSRGFQIDNYMVDGIPTYFESRWNLGDALSDMALFERVEVVRGATGLMTGTGNPSAAINMVRKHATSREFKGDVSAEYGSWNKERYVADLQSPLTEDGKIRARIVGGYQNNDSWLDRYNSEKTFFSGIVDADLGDLTTFSAGYEYQRIDVNSPTWGGLPRWNTDGSSNSYDRARSTAPDWAYNDKEINKVFMTLKQRFADTWQATLNATHSEVEFDSKMMYVDAYVNKADGMLVGPYSNYGPGFDYVGGTGWNSGKRKVDALDLFADGIYELFGRQHNLMFGGSYSKQNNRYFSSWANIFPDEIGSFYNFNGNFPQTDWSPQSLAQDDTTHMKSLYAATRVTLADPLHLILGARYTNWRVDTLTYSMEKNHTTPYAGLVFDINDNWSTYASYTSIFQPQNDRDSSGKYLAPITGNNYELGLKSDWMNSRLTTTLAIFRIEQDNVAQSTGTPIPGSNGETAYKAVDGTVSKGVEFELNGAITDNWQLTFGATRYIAEDNEGNAVNPNLPRTTVKMFTSYRLPVMPELTVGGGVNWQNRVYTDTVTPYGTFRAEQGSYALVDLFTRYQVTKNFSLQGNVNNLFDKTYDTNVEGSIVYGTPRNFSITGTYQF

SEQ ID NO: 15887 - protein, 170 aa, Escherichia coli; identical to SEQ ID NO: 2565

SEQ ID NO: 15888 - protein, 200 aa, Escherichia coli; identical to SEQ ID NO: 1788

SEQ ID NO: 15889 - protein, 838 aa, Escherichia coli; identical to SEQ ID NO: 2916

SEQ ID NO: 15890 - protein, 539 aa, Escherichia coli
MAAVCGTSGIASLFSQAAFAADSDIADGQTQRFDFAILQSMAHDLAQTAWRGAPRPLPDTLATMTPQAYNSIQYDAEKSLWHNVENRQLDAQFFHMGMGFRRRVRMFSVDPATHLAREIHFRPELFKYNDAGVDTKQLEGQSDLGFAGFRVFKAPELARRDVVSFLGASYFRAVDDTYQYGLSARGLAIDTYTDSKEEFPDFTAFWFDTVKPGATTFTVYALLDSASITGAYKFTIHCEKSQVIMDVENHLYARKDIKQLGIAPMTSMFSCGTNERRMCDTIHPQIHDSDRLSMWRGNGEWICRPLNNPQKLQFNAYTDNNPKGFGLLQLDRDFSHYQDIMGWYNKRPSLWVEPRNKWGKGTIGLMEIPTTGETLDNIVCFWQPEKAVKAGDEFAFQYRLYWSAQPPVHCPLARVMATRTGMGGFPEGWAPGEHYPEKWARRFAVDFVGGDLKAAAPKGIEPVITLSSGEAKQIEILYIEPIDGYRIQFDWYPTSDSTDPVDMRMYLRCQGDAISETWLYQYFPPAPDKRQYVDDRVMS

SEQ ID NO: 15891 - protein, 361 aa, Escherichia coli; identical to SEQ ID NO: 3601

SEQ ID NO: 15892 - protein, 120 aa, Escherichia coli; identical to SEQ ID NO: 4197

SEQ ID NO: 15893 - protein, 359 aa, Escherichia coli
MKKYLALALIAPLLISCSTTKKGDTYNEAWVKDTNGFDILMGQFAHNIENIWGFKEVVIAGPKDYVKYTDQYQTRSHINFDDGTITIETIAGTEPAAHLRRAIIKTLLMGDDPSSVDLYSDVDDITISKEPFLYGQVVDNTGQPIRWEGRASNFADYLLKNRLQSRSNGLRIIYSVTINMVPNHLDKRAHKYLGMVRQASRKYGVDESLILAIMQTESSFNPYAVSRSDALGLMQVVQHTAGKDVFRSQGKSGTPSRSFLFDPASNIDTGTAYLAMLNNVYLGGIDNPTSRRYAVITAYNGGAGSVLRVFSNDKIQASNIINTMTPGDVYQTLTTRHPSAESRRYLYKVNTAQKSYRRR

SEQ ID NO: 15894 - protein, 266 aa, Escherichia coli; identical to SEQ ID NO: 1894

SEQ ID NO: 15895 - protein, 191 aa, Escherichia coli; identical to SEQ ID NO: 2727

SEQ ID NO: 15896 - protein, 243 aa, Escherichia coli; identical to SEQ ID NO: 4409

SEQ ID NO: 15897 - protein, 656 aa, Escherichia coli; identical to SEQ ID NO: 6982

SEQ ID NO: 15898 - protein, 407 aa, Escherichia coli; identical to SEQ ID NO: 5515

SEQ ID NO: 15899 - protein, 230 aa, Escherichia coli
MRKAILLAGLLLSTGHSWANIVINGTRVLYPENNKEVIVQLMNTGDAPALVQSWIDDGDINSTPETANVPFLLSPPVIKVNEHNGQQLRIKKLPSSLPADRESVFFLNVLDIPPRPENLQNQNTVQLAIKSRIKLFYRPAALKGTLDDAVAKLTLAAEGDRFRITNNSPFHITVANISLGKTKLLQESPMVSPFGQLTVAAKNTVKRGQTFQLMYVDDLGAYKTRTFTSQ

SEQ ID NO: 15900 - protein, 747 aa, Escherichia coli
MARSKTAQPKHSLRKIAVVVATAVSGMSVYAQAAVEPKEDTITVTAAPAPQESAWGPAATIAARQSATGTKTDTPIQKVPQSISVVTAEEMALHQPKSVKEALSYTPGVSVGTRGASNTYDHLIIRGFAAEGQSQNNYLNGLKLQGNFYNDAVIDPYMLERAEIMRGPVSVLYGKSSPGGLLNMVSKRPTTEPLKEVQFKAGTDSLFQTGFDFSDSLDDDGVYSYRLTGLARSANAQQKGSEEQRYAIAPAFTWRPDDKTNFTFLSYFQNEPETGYYGWLPKEGTVEPLPNGKRLPTDFNEGAKNNTYSRNEKMVGYSFDHEFNDTFTVRQNLRFAENKTSQNSVYGYGVCSDPANAYSKQCAALAPADKGHYLARKYVVDDEKLQNFSVDTQLQSKFATGDIDHTLLTGVDFMRMRNDINAWFGYDDSVPLLNLYNPVNTDFDFNAKDPANSGPYRILNKQKQTGVYVQDQAQWDKVLVTLGGRYDWADQESLNRVAGTTDKRDDKQFTWRGGVNYLFDNGVTPYFSYSESFEPSSQVGKDGNIFAPSKGKQYEVGVKYVPEDRPIVVTGAVYNLTKTNNLMADPEGSFFSVEGGEIRARGVEIEAKAALSASVNVVGSYTYTDAEYTTDTTYKGNSPAQVPKHMASLWAGYTFFDGPLSGLTLGTGGRYTGSSYGDPANSFKVGSYTVVDALVRYDLARVGMAGSNVALHVNNLFDREYVASCFNTYGCFWGAERQVVATATFRF

SEQ ID NO: 15901 - protein, 94 aa, Escherichia coli; identical to SEQ ID NO: 7120

SEQ ID NO: 15902 - protein, 118 aa, Escherichia coli [sequence omitted]

SEQ ID NO: 15903 - protein, 678 aa, Escherichia coli; identical to SEQ ID NO: 2902

SEQ ID NO: 15904 - protein, 539 aa, Escherichia coli; identical to SEQ ID NO: 3050

SEQ ID NO: 15905 - protein, 224 aa, Escherichia coli; identical to SEQ ID NO: 8899

SEQ ID NO: 15906 - protein, 614 aa, Escherichia coli; identical to SEQ ID NO: 1884

SEQ ID NO: 15907 - protein, 243 aa, Escherichia coli
MSRKSCLIRLFKTTVSCKLFTAIILSVFLGQPALTYAGVVIGGTRVVYLSNDADKSISVFSKEEKIPYLIQAWVDPFNKEDKSKAPFTVIPPVSRLEPSQEKILRIIHTKGVSLPDDRESVFWLNIKNIPPSASNKATNSLEIAVKTRIKLFWRPANIRLIPEDAAPKVKWRREGRNLIAENPNPIHISVMDVIVDGHDVPLNMIRPFETLTLPLPANSAGGQMTWRFINDYGAVSDPIKMTL

SEQ ID NO: 15908 - protein, 696 aa, Escherichia coli; identical to SEQ ID NO: 4038

SEQ ID NO: 15909 - protein, 161 aa, Escherichia coli; identical to SEQ ID NO: 2582

SEQ ID NO: 15910 - protein, 686 aa, Escherichia coli
MFWRDITLSVWRKKTTGLKTKKRLLPLVLAAALCSSSVWAEEATFTANFKDTDLKSFIETVGANLNKTIIMGPGVQGKVSIRTMTPLNERQYYQLFLNLLEAQGYAVVPMENDVLKVVKSSAAKVEPLPLVGEGSDNYAGDEMVTKVVPVRNVSVRELAPILRQMIDSAGSGNVVNYDPSNVIMLTGRASVVERLTEVIQRVDHAGNRTEEVIPLDNASASEIARVLESLTKNSGENQPATLKSQIVADERTNSVIVSGDPATRDKMRRLIRRLDSEMERSGNSQVFYLKYSKAEDLVDVLKQVSGTLTAAKEEAEGTVGSGREIVSIAASKHSNALIVTAPQDIMQSLQSVIEQLDIRRAQVHVEALIVEVAEGSNINFGVQWASKDAGLMQFANGTQIPIGTLGAAISQAKPQKGSTVISENGATTINPDTNGDLSTLAQLLSGFSGTAVGVVKGDWMALVQAVKNDSSSNVLSTPSITTLDNQEAFFMVGQDVPVLTGSTVGSNNSNPFNTVERKKVGIMLKVTPQINEGNAVQMVIEQEVSKVEGQTSLDVVFGERKLKTTVLANDGELIVLGGLMDDQAGESVAKVPLLGDIPLIGNLFKSTADKKEKRNLMVFIRPTILRDGMAADGVSQRKYNYMRAEQIYRDEQGLSLMPHTAQPVLPAQNQALPPEVRAFLNAGRTR

SEQ ID NO: 15911 - protein, 866 aa, Escherichia coli
MTIKPTKNYHNHLTRIATFCALLYCNSAFCAELVEYDHTFLMGQNASNIDLSRYSEGNPAIPGMYDVSVYVNDQPIINQSITFIEIEGKKNAQACITLKNLLQFHINSPDINNEKAVLLARDETLGNCLNLTEIIPQASVRYDVNEQRLDIDVPQAWVMKNYQNYVDPSLWENGINAAMLSYNLNGYHSETPGRRNDSIYAAFNGGMNLGEWRLRASGNYNWMTDSGSNYDFKNRYIQRDIASLRSQLILGESYTTGETFDSVSIRGIRLYSDSRMLPPTLASFAPIIHGVANTNAKVTITQGGYKIYETTVPPGAFVIDDLSPSGYGSDLIVTVEESDGSKRTFSQPFSSVVQMLRPGVGRWDISGGQVLKDDIQDEPNLFQASYYYGLNNYLTGYTGIQITDNNYTAGLLGLGLNTSVGAFSFDVTHSNVRIPDDKTYQGQSYRVSWNKLFEETSTSLNIAAYRYSTQNYLGLNDALTLIDEVKHPEQDLEPKSMRNYSRMKNQVTVSINQPLKFEKKDYGSFYLSGSWSDYWASGQNRSNYSIGYSNSASWGSYSVSAQRSWNEDGDTDDSVYLSFTIPIEKLLGTEQRTSGFQSIDTQMSSDFKGNNQLNVSSSGYSDNARVSYSVNTGYTMNKASKDLSYVGGYASYESPWGSLAGSVSANSDNSRQVSLSTDGGFVLHSGGLTFSNDSFSDSDTLAVVQAPGAQGARINYGNSTIDRWGYGVTSALSPYHENRIALDINDLENDVELKSTSAVAVPRQGSVVFADFETVQGQSAIMNITRSDGKNIPFAADIYDEQGNVIGNVGQGGQAFVRGIEQQGNISIKWLEESKPVSCLAHYQQSSEAEKIAQSIILNGIRCQIQ

SEQ ID NO: 15912 - protein, 517 aa, Escherichia coli; identical to SEQ ID NO: 2462

SEQ ID NO: 15913 - protein, 243 aa, Escherichia coli
MTFMKGLPLLLLVASLCSHAALQPDRTRIVFNANDKATSLRVDNRSDKLPYLAYSWLENEKGEKSDDLLVALPPIQRLEPKATTQVRIVKQASTTKLPGDRETLFFYNMREIPPAPEKNSDHAVLQVAIQSRIKVFWRPAALRKKAGEKVELQLQVSQQGNQLPLKNPTAYYLTIAYLGRNEKGVLPGFKTVMVAPFSTVNTNTGNYSGSQFYLGYMDDYGALRMTTLNCSGQCHLQAVEAKK

SEQ ID NO: 15914 - protein, 860 aa, Escherichia coli; identical to SEQ ID NO: 7103

SEQ ID NO: 15915 - protein, 806 aa, Escherichia coli
MLCTTANAEEYYFDPIMLETTKSGMQTTDLSRFSKKYAQLPGTYQVDIWLNKKKVSQKKITFTANAEQLLQPQFTVEQLRELGIKVDEIPALAEKDDDSVINSLEQIIPGTAAEFDFNHQRLNLSIPQIALYRDARGYVSPSRWDDGIPTLFTNYSFTGSDNRYRQGNRSQRQYLNMQNGANFGPWRLRNYSTWTRNDQASSWNTISSYLQRDIKALKSQLLLGESATSGSIFSSYTFTGVQLASDDNMLPNSQRGFAPTVRGIANSSAIVTIRQNGYVIYQSNVPAGAFEINDLYPSSNSGDLEVTIEESDGTQRRFIQPYSSLPMMQRPGHLKYSATAGRYRADANSDSKEPEFAEATAIYGLNNTFTLYGGLLGSEDYYALGIGIGGTLGALGALSMDINRADTQFDNRHSFHGYQWRTQYIKDIPETNTNIAVSYYRYTNDGYFSFDEANTRNWDYNSRQKSEIQFNISQTIFDGVSLYASGSQQDYWGNNDKNRNISVGVSGQQWGIGYSLNYQYSRYTDQNNDRALSLNLSIPLERWLPRSRVSYQMTSQKDRPTQHEMRLDGSLLDDGRLSYSLEQSLDDDNNHNSSLNASYRSPYGTFSAGYSYGNDSSQYNYGVTGGVVIHPHGVTLSQYLGNAFALIDANGASGVRIQNYPGIATDPFGYAVVPYLTTYQENRLSVDTTQLPDNVDLEQTTQFVVPNRGAMVAARFNANIGYRVLVTVSDRNGKPLPFGALASNDETGQQSIVDEGGILYLSGISSKSQSWTVRWGNQADQQCQFAFSTPDSEPTTSVLQGTAQCH

SEQ ID NO: 15916 - protein, 193 aa, Escherichia coli; identical to SEQ ID NO: 2246

SEQ ID NO: 15917 - protein, 351 aa, Escherichia coli
MKKSTLALVVMGIVASASVQAAEIYNKDGNKLDVYGKVKAMHYMSDNDSKDGDQSYIRFGFKGETQINDQLTGYGRWEAEFAGNKAESDTAQQKTRLAFAGLKYKDLGSFDYGRNLGALYDVEAWTDMFPEFGGDSSAQTDNFMTKRASGLATYRNTDFFGVIDGLNLTLQYQGKNENRDVKKQNGDGFGTSLTYDFGGSDFAISGAYTNSDRTNEQNLQSRGTGKRAKAWATGLKYDANNIYLATFYSETRKMTPITGGFANKTQNFEAVAQYQFDFGLRPSLGYVLSKGKDIEGIGDEDLVNYIDVGATYYFNKNMSAFVDYKINQLDSDNKLNINNDDIVAVGMTYQF

SEQ ID NO: 15918 - protein, 208 aa, Escherichia coli; identical to SEQ ID NO: 1949

SEQ ID NO: 15919 - protein, 871 aa, Escherichia coli
MHQVLLLPRFARLTIALSLATAVFPVDAEYYFNPRFLSNDLAESVDLSAFTKGREAPPGTYRVDIYLNDEFMTSRDITFITDDNNADLIPCLSTDLLVSLGIKKSALLDNKEHSAEKHVPDNSACTPLQDRLVDASTEFDVGQQHLSLSVPQIYVGRMARGYVSPDLWEEGINAGLLNYSFNGNSINNRSNHNAGKSNYAYLNLQSGINIGSWRLRDNSTWSYNSGSSNSSDSNKWQHINTSAERDIIPLRSRLTVGDSYTDGDIFDSVNFRGLKINSTEAMLPDSQHGFAPVIHGIARGTAQVSVKQNGYDVYQTTVPPGPFTIDDINSAANGGDLQVTIKEADGSIQTLYVPYSSVPVLQRAGYTRYALAMGEYRSGNNLQSSPRFIQGSLMHGLEGNWTPYGGMQIAEDYQAFNLGIGKDLGLFGAFSFDITQANTTLADGTRHSGQSVKSVYSKSFYQTGTNIQVAGYRYSTQGFYNLSDSAYSRMSGYTVKPPTGDSNEQTQFIDYFNLFYSKRGQEQISISQQLGNYGTTFFSASRQSYWNTSRSDQQISFGLNLPFGDITTSLNYSYSNNIWQNDRDHLLAFTLNVPFSHWMRTDSQSAFRNSNASYSMSNDLKGGMTNLSGVYGTLLPDNNLNYSVQVGNTHGGNTSSGTSGYSTLNYRGAYGNTNVGYSRSGDSSQIYYGMSGGIIAHADGITFGQPLGDTMVLVKAPGADNVKIENQTGIHTDWRGYAILPFATEYRENRVALNANSLADNVELDETVVTVIPTHGAIARATFNAQIGGKVLMTLKYGNKSVPFGAIVTHGENKNGSIVAENGQVYLTGLPQSGKLQVSWGNDKNSNCIVDYKLPEVSPGTLLNQQTAICR

SEQ ID NO: 15920 - protein, 432 aa, Escherichia coli; identical to SEQ ID NO: 2026

SEQ ID NO: 15921 - protein, 249 aa, Escherichia coli
MRYLNTKNLIAAGVLLACMSSIAWGAIIPDRTRIIMNESDKGEALKLTNQSKNLPYLAQTWIEDTKGNKSRDFIVTVPPMVRLNPSEQIQIRMISQEKIAQLPNDRETLFYFNVREIPPKTDKKNVMQVTMQHALKLFWRPKAIELEDDGVMSYEKVEIIRRNDGSIRFNNKMPYHVTLGYIGTNGITMLPQTQSLMVTPYSHADTQFKNVPSAFQVGYINDFGGLSFYEINCPTVNNSCNVYVAKRDK

SEQ ID NO: 15922 - protein, 274 aa, Escherichia coli; identical to SEQ ID NO: 3471

SEQ ID NO: 15923 - protein, 227 aa, Escherichia coli; identical to SEQ ID NO: 3570

SEQ ID NO: 15924 - protein, 359 aa, Escherichia coli; identical to SEQ ID NO: 6995

SEQ ID NO: 15925 - protein, 395 aa, Escherichia coli; identical to SEQ ID NO: 6994

SEQ ID NO: 15926 - protein, 386 aa, Escherichia coli; identical to SEQ ID NO: 3600

SEQ ID NO: 15927 - protein, 118 aa, Escherichia coli [sequence omitted]

SEQ ID NO: 15928 - protein, 641 aa, Escherichia coli; identical to SEQ ID NO: 3774

SEQ ID NO: 15929 - protein, 673 aa, Escherichia coli; identical to SEQ ID NO: 2919

SEQ ID NO: 15930 - protein, 246 aa, Escherichia coli; identical to SEQ ID NO: 3021

SEQ ID NO: 15931 - protein, 331 aa, Escherichia coli; identical to SEQ ID NO: 2705

SEQ ID NO: 15932 - protein, 213 aa, Escherichia coli; identical to SEQ ID NO: 2232

SEQ ID NO: 15933 - protein, 362 aa, Escherichia coli; identical to SEQ ID NO: 2434

SEQ ID NO: 15934 - protein, 760 aa, Escherichia coli; identical to SEQ ID NO: 3026

SEQ ID NO: 15935 - protein, 412 aa, Escherichia coli; identical to SEQ ID NO: 4058

SEQ ID NO: 15936 - protein, 231 aa, Escherichia coli; identical to SEQ ID NO: 3055

SEQ ID NO: 15937 - protein, 367 aa, Escherichia coli; identical to SEQ ID NO: 3105

SEQ ID NO: 15938 - protein, 518 aa, Escherichia coli; identical to SEQ ID NO: 2350

SEQ ID NO: 15939 - protein, 200 aa, Escherichia coli; identical to SEQ ID NO: 1784

SEQ ID NO: 15940 - protein, 203 aa, Escherichia coli; identical to SEQ ID NO: 2201

SEQ ID NO: 15941 - protein, 774 aa, Escherichia coli; identical to SEQ ID NO: 3648

SEQ ID NO: 15942 - protein, 512 aa, Escherichia coli
MKKISFFIFTALFCCSAQAAPSSLEKRLGKNEYFIITKSSPVRAILNDFAANYSIPVFISSSVNDDFSGEIKNEKPVKVLEKLSKLYHLTWYYDENILYIYKTNEISRSIITPTYLDIDSLLKYLSDTISVNKNSCNVRKITTFNSIEVRGVPECIKYITSLSESLDKEAQSKAKNKDVVKVFKLNYASATDITYKYRDQNVVVPGVVSILKTMASNGSLPSTGKGAVERSGNLFDNSVTISADPRLNAVVVKDREITMDIYQQLISELDIEQRQIEISVSIIDVDANDLQQLGVNWSGTLNAGQGTIAFNSSTAQANISSSVISNASNFMIRVNALQQNSKAKILSQPSIITLNNMQAILDKNVTFYTKVSGEKVASLESITSGTLLRVTPRILDGSSNSLTGKRRERVRLLLDIQDGNQSTNQSNAQDASSTLPEVQNSEMTTEATLSAGESLLLGGFIQDKESSSKDGIPLLSDIPVIGSLFSSTVKQKHSVVRLFLIKATPIKSASSE

SEQ ID NO: 15943 - protein, 236 aa, Escherichia coli; identical to SEQ ID NO: 3286

SEQ ID NO: 15944 - protein, 193 aa, Escherichia coli; identical to SEQ ID NO: 2246

SEQ ID NO: 15945 - protein, 359 aa, Escherichia coli; identical to SEQ ID NO: 2328

SEQ ID NO: 15946 - protein, 696 aa, Escherichia coli; identical to SEQ ID NO: 12094

SEQ ID NO: 15947 - protein, 878 aa, Escherichia coli
MSYLNLRLYQRNTQCLHIRRHRLAGFFVRLFVACAFTAQAPLSSAELYFNPRFLADDPQAVADLSRFENGQELPPGTYRVDIYLNNGYMATRDVTFNTGDSEQGIVPCLTRAQLASMGLNTASVSGMNLLADDACVPLTSMIHDATAQLDVGQQRLNLTIPQAFMSNRARGYIPPELWDPGINAGLLNYNFSGNSVQNRIGGNSHYAYLNLQSGLNIGAWRLRDNTTWSYNSSDSSSGSKNKWQHINTWLERDIIPLRSRLTLGDGYTQGDIFDGINFRGAQLASDDNMLPDSQRGFAPVIHGIARGTAQVTIKQNGYDIYNSTVPPGPFTINDIYAAGNSGDLQVTIKEADGSTQIFTVPYSSVPLLQREGHTRYSITAGEYRSGNAQQEKPRFFQSTLLHGLPAGWTIYGGTQLADRYRAFNFGIGKNMGALGALSVDMTQANSTLPDDSQHDGQSVRFLYNKSLNESGTNIQLVGYRYSTSGYFNFADTTYSRMNGYNIETQDGVIQVKPKFTDYYNLAYNKRGKLQLTVTQQLGRTSTLYLSGSHQTYWGTSNVDEQFQAGLNTAFEDINWTLSYSLTKNAWQKGRDQMLALNVNIPFSHWLRSDSKSQWRHASASYSMSHDLNGRMTNLAGVYGTLLADNNLSYSVQTGYAGGGDGNSGSTGYATLNYRGGYGNANIGYSHSDDIKQLYYGVSGGVLAHANGVTLGQPLNDTVVLVKAPGAKDAKVENQTGVRTDWRGYAVLPYATEYRENRVALDTNTLADNVDLDNAVANVVPTRGAIVRAEFKARVGIKLLMTLTHNNKPLPFGAMVTSESSQSSGIVADNGQVYLSGMPLAGKVQVKWGEEENAHCVANYQLPPESQQQLLTQLSAECR

SEQ ID NO: 15948 - protein, 879 aa, Escherichia coli; identical to SEQ ID NO: 4479

SEQ ID NO: 15949 - protein, 213 aa, Escherichia coli
MVLPAHAGIVIYGMRIIYPAENKEVMVQLMNQGNRSSLLQAWIDDGDTSLPPEKIQVPFMLTPPVAKIGANSGQQVKIKIMPNKLPTNKESIFYLNVLDIPPNSPEQEGKNALKFAMQNRIKLFYRPAGIAPVNKATFKKLLVNRSGNGLVIKNDSANWVTISDVKANNVKVNYETIMIAPLESQSVNVKSNNANNWYLTIIDDHGNYISDKI

SEQ ID NO: 15950 - protein, 230 aa, Escherichia coli; identical to SEQ ID NO: 3348

SEQ ID NO: 15951 - protein, 351 aa, Escherichia coli; identical to SEQ ID NO: 9352

SEQ ID NO: 15952 - protein, 826 aa, Escherichia coli; identical to SEQ ID NO: 3078

SEQ ID NO: 15953 - protein, 231 aa, Escherichia coli; identical to SEQ ID NO: 3055

SEQ ID NO: 15954 - protein, 840 aa, Escherichia coli; identical to SEQ ID NO: 15485

SEQ ID NO: 15955 - protein, 863 aa, Escherichia coli; identical to SEQ ID NO: 3959

SEQ ID NO: 15956 - protein, 228 aa, Escherichia coli; identical to SEQ ID NO: 4179

SEQ ID NO: 15957 - protein, 863 aa, Escherichia coli; identical to SEQ ID NO: 3946

SEQ ID NO: 15958 - protein, 207 aa, Escherichia coli; identical to SEQ ID NO: 2211

SEQ ID NO: 15959 - protein, 900 aa, Escherichia coli
MKLNIFTKSMIGMGLVCSSLPALAMEAWNNQQGGNKYQVIFDGKIYENAWWVSSTNCPGKAKANDATNPWRLKRTATAAEISQFGNTLSCEKSGSSSSSTSNTPASNTPANGGSATPAQGTVPSNSSVVAWNKQQGGQTWYVVFNGAVYKNAWWVASSNCPGDAKGNDASNPWRYVRAATATEISETSNPQSCTSAPQPAPDVKPAPDVKPAPDVQPAPADKSNDNYAVVAWKGQEGSSTWYVIYNGGIYKNAWWVGAANCPGDAKENDASNPWRYVRAATATEITQYGNPGSCSVKPDNNGGAVTPVDPTPETPETPVTPTPDNNEPSTPADSSNDYSLQAWSGQEGSEIYHVIFNGNVYQNAWWVGSEDCPRGTSVENSNNPWRLVRTATAAEMSQYGNPTTCEIDNGGVIIADGFQASKAYSANSIVDYNDAHYKTSVDQDAWGFVPGGDNPWKKYEPAKAWSASTVYVKGDRVVVDGQAYEALFWTQSDNPALVANQNATGSNSRPWKPLGKTQSYSNEELNNAPQFNPETLYASDTLIRFNGENYISQSKVQKVSPSDSNPWRVFVDWTGTKERVGTPKKAWPKHVYAPYVDFTLNTIPDLAALAKNHNVNHFTLAFVVSKDANTCLPTWGTAYGMQNYAQYSKIKALREAGGDVMLSIGGANNAPLAASCKNVDDLMQHYYDIVDNLNLRVLDFDIEGTWVADQASIERRNLAVKKVQDKWKSEGKDIAIWYTLPILPTGLTPEGMNVLSDAKAKGVELAGVNVMTMDYGNAICQSANTEGQNIHGKCATSAIANLHAQLKGLYGNKSDAEIDAMMGTTPMVGVNDVQGEVFYLSDARLVMQDAQKRNLGMVGIWSIARDLPGGTNLSPEFHGLTKEQAPKYAFSEIFAPFTKQ

SEQ ID NO: 15960 - protein, 368 aa, Escherichia coli; identical to SEQ ID NO: 2370

SEQ ID NO: 15961 - protein, 816 aa, Escherichia coli; identical to SEQ ID NO: 3562

SEQ ID NO: 15962 - protein, 233 aa, Escherichia coli; identical to SEQ ID NO: 3276

SEQ ID NO: 15963 - protein, 445 aa, Escherichia coli
MITLRKLPLAVAVAAGVMSAQAMAVDFHGYARSGIGWTGSGGEQQCFQTTGAQSKYRLGNECETYAELKLGQEVWKEGDKSFYFDTNVAYSVAQQNDWEATDPAFREANVQGKNLIEWLPGSTIWAGKRFYQRHDVHMIDFYYWDISGPGAGLENIDVGFGKLSLAATRSSEAGGSSSFASNNIYDYTNETANDVFDVRLAQMEINPGGTLELGVDYGRANLRDKYRLVDGASKDGWLFTAEHTQSVLKGFNKFVVQYATDSMTSQGKGLSQGSGVAFDNEKFAYNINNNGHMLRILDHGAISMGDNWDMMYVGMYQDINWDNDNGTKWWTVGIRPMYKWTPIMSTVMEIGYDNVESQRTGDKNNQYKITLAQQWQAGDSIWSRPAIRVFATYAKWDEKWGYDYNGDSKVNPNYGKAVPADFNGGSFGRGDSDEWTFGAQMEIWW

SEQ ID NO: 15964 - protein, 826 aa, Escherichia coli
MLRMTPLASAIVALLIGIEAYAAEETFDTHFMIGGMKDQQVANIRLDDNQPLPGQYDIDIYVNKQWRGKYEIIVKDNPQETCLSREMIKRLGINTDNFASGKQCLTFKQLIQGGSYTWDIGVFRLDFSVPQAWVEELESGYVPPENWERGINAFYTSYYMSQYYSDYKASGNSKSTYVRFNSGLNLLGWQLHSDASFSKTNNNPGVWKSNTLYLERGFAQLLGTLRVGDMYTSSDIFDSVRFSGVRLFRDMQMLPNSKQNFTPRVQGIAQSNALVTIEQNGFVVYQKEVPPGPFAITDLQLAGGGADLDVSVKEADGSVTTYLVPYAAVPNMLQPGVSKYDFAAGRSHIEGASKQSDFVQAGYQYGFNNLLTLYGGSMVANNYYAFTLGTGWNTRFGAISVDATKSHSKQDNGDVFDGQSYQIAYNKFVSQTSTRFGLAAWRYSSRDYRTFNDHVWANNKDNYRRDENDIYDIADYYQNDFGRKNSFSANMSQSLPEGWGSVSLSTLWRDYWGRSGSSKDYQLSYSNNLRRISYTLAASHAYDENHHEEKRFNIFISIPFDWGDDVTTPRRQIYMSNSTTFDDQGFASNNTGLSGTVGSRDQFNYGVNLSYQYQGNETTAGANLTWNAPVATVNGSYSQSSAYRQAGASVSGGIVAWSGGVNLANRLSETFAVMNAPGIKDAYVNGQKYRTTNRNGVVVYDGMTPYRENYLMLDVSQSDSEAELRGNRKIAAPYRGAVVLVNFDTDQRKPWFIKALRADGQPLTFGYEVNDIHGHNIGVVGQGSQLFIRTNEVPPSVNVAIDKQQGLSCTITFGKEIDESKNYICQ

SEQ ID NO: 15965 - protein, 826 aa, Escherichia coli; identical to SEQ ID NO: 3563

SEQ ID NO: 15966 - protein, 765 aa, Escherichia coli; identical to SEQ ID NO: 9275

SEQ ID NO: 15967 - protein, 260 aa, Escherichia coli; identical to SEQ ID NO: 4546

SEQ ID NO: 15968 - protein, 884 aa, Escherichia coli
MCMPNHSNFRLRGIACYIALAISGGSVNAWADDSIQFDPRFLELKGDTKIDLGKFSKKGYVDAGKYNLRVFINKQSLSDEYDINWYVSENDPTKTYACLTPELVAALGLKEGIAKSLQWTHNDECLKPGQLDGMEVENDLSQSALLLTVPQAYLEYTSSDWDPPSRWDDGISGLIADYSLNAQTRHQEQGGEDSHDISGNGTVGANLGAWRFRADWQSDYQHTRSNDDEDDSSNSTTSKNWDWSRYYAWRALPSLKAKLSLGEDYLNSDIFDGFNYIGSSVSTDDQMLPPNLRGYAPDVSGVAHSSAKVTISQMGRVLYETQVPAGPFRIQDIGDSVSGTLHVRVEEQNGQVQEYDVTTASMPFLTRQGQVRYKVMMGRPEDWNHKTEGGFFSGGEASWGVADGWSLYGGALADEHYQSAAMGVGRDLAQFGALAFDVTHSHVNLDHDSAHGKGKLDGNSFRVSYAKDFDELNSRVTFAGYRFSEKNFMTMSEYLDASQSDMARTGNDKEMYTITYNQNFAAAGVSVYLNYSHRTYWDRPEQTNYNLMFSHYFNMGSIRNMSISVTGYRYEYDDNTDKGMYLSMSIPWSDSSTVTYNGSYGSGSDSSQVGYFNRIDDATHYQINVGTSEQHGSVDGYLSHDGTLAKVDLSANYHEGEYRSAGIALQGGATLTAHGGALHRTQNMGGTRLLIDADGIANVPVESNGAPVYTNMFGKAVVADINNYYRNQAYIDLNNLPEDAEATQSVVQATLTEGAIGYRKFKVISGQKAMAVLRLRDGSYPPFGAEVKNDEQQQVGIVDDEGNVYLAGINAGEHMMVFWEGSAQCEIVLPKPLPADLFRGLLLPCEQKGTTAPDSLAPEIKPVIQDQTRQVTPSEAPTSISATQ

SEQ ID NO: 15969 - protein, 385 aa, Escherichia coli; identical to SEQ ID NO: 13775

SEQ ID NO: 15970 - protein, 229 aa, Escherichia coli
MANGNASIKGYNCNVSQGLVIIMPLPDFRLIRLLPLAALVLTACSVTTPKGPGKSPDSPQWRQHQQDVRNLNQYQTRGAFAYISDQQKVYARFFWQQTGQDRYRLLLTNPLGSTELELNAQPGNVQLVDNKGQRYTADDAEEMIGKLTGMPIPLNSLRQWILGLPGDATDYKLDDQYRLSEITYSQNGKNWKVVYGGYDTKTQPAMPANMELTDGGQRIKLKMDNWIVK

SEQ ID NO: 15971 - protein, 232 aa, Escherichia coli; identical to SEQ ID NO: 2087

SEQ ID NO: 15972 - protein, 207 aa, Escherichia coli; identical to SEQ ID NO: 2211

SEQ ID NO: 15973 - protein, 871 aa, Escherichia coli; identical to SEQ ID NO: 3519

SEQ ID NO: 15974 - protein, 243 aa, Escherichia coli; identical to SEQ ID NO: 3561

SEQ ID NO: 15975 - protein, 122 aa, Escherichia coli; identical to SEQ ID NO: 2915

SEQ ID NO: 15976 - protein, 359 aa, Escherichia coli; identical to SEQ ID NO: 2332

SEQ ID NO: 15977 - protein, 412 aa, Escherichia coli; identical to SEQ ID NO: 2908

SEQ ID NO: 15978 - protein, 191 aa, Escherichia coli; identical to SEQ ID NO: 2727

SEQ ID NO: 15979 - protein, 231 aa, Escherichia coli; identical to SEQ ID NO: 2868

SEQ ID NO: 15980 - protein, 678 aa, Escherichia coli; identical to SEQ ID NO: 2902

SEQ ID NO: 15981 - protein, 331 aa, Escherichia coli; identical to SEQ ID NO: 2705

SEQ ID NO: 15982 - protein, 233 aa, Escherichia coli; identical to SEQ ID NO: 3548

SEQ ID NO: 15983 - protein, 203 aa, Escherichia coli; identical to SEQ ID NO: 2009

SEQ ID NO: 15984 - protein, 567 aa, Escherichia coli; identical to SEQ ID NO: 3518

SEQ ID NO: 15985 - protein, 208 aa, Escherichia coli; identical to SEQ ID NO: 1949

SEQ ID NO: 15986 - protein, 232 aa, Escherichia coli; identical to SEQ ID NO: 2087

SEQ ID NO: 15987 - protein, 660 aa, Escherichia coli; identical to SEQ ID NO: 4092

SEQ ID NO: 15988 - protein, 478 aa, Escherichia coli; identical to SEQ ID NO: 2409

SEQ ID NO: 15989 - protein, 236 aa, Escherichia coli; identical to SEQ ID NO: 3970

SEQ ID NO: 15990 - protein, 224 aa, Escherichia coli; identical to SEQ ID NO: 3578

SEQ ID NO: 15991 - protein, 266 aa, Escherichia coli; identical to SEQ ID NO: 1892

SEQ ID NO: 15992 - protein, 241 aa, Escherichia coli; identical to SEQ ID NO: 2887

SEQ ID NO: 15993 - protein, 203 aa, Escherichia coli; identical to SEQ ID NO: 2201

SEQ ID NO: 15994 - protein, 213 aa, Escherichia coli; identical to SEQ ID NO: 2232

SEQ ID NO: 15995 - protein, 518 aa, Escherichia coli; identical to SEQ ID NO: 15527

SEQ ID NO: 15996 - protein, 446 aa, Escherichia coli; identical to SEQ ID NO: 2177

SEQ ID NO: 15997 - protein, 224 aa, Escherichia coli; identical to SEQ ID NO: 3792

SEQ ID NO: 15998 - protein, 249 aa, Escherichia coli
MNIMKSPLITTGMICLLGICNFAQATVSPDRTRIIFNASNKSATVRLTNQSKIDPYLAQSWIEDASGKKTRDYISTLPPMERIEPDEQVQIRLMALASLNNLPQDRETLFYYNVREIPPRTKEQNVMQIAMQSRLKLFWRPKAIELKEGQMVPLQKVTITRTAAGLTLNNPTPYHITVGYIGTNGKTLMPGADSIMVTPFASATQYLNNLPSTFQLGFVADYGGLEMFKVECNSVQSLCQSSPAKKGKI

SEQ ID NO: 15999 - protein, 866 aa, Escherichia coli
MTIKPTKNYHNHLTRIATFCALLYCNGAFCAELVEYDHTFLMGQNASNIDLSRYSEGNPAIPGVYDVSVYVNDQPVINQSITFVAIEGKKNARACITLKNLLQFHINSPDINSEKAVLLARDEALGNCLNLTEIIPQASVRYDVNDQRLDIDVPQAWVMKNYQNYVDPSLWENGINAAMLSYNLNGYHSETPGRKNDSIYAAFNGGMNLGAWRLRASGNYNWMTDSGGNYDFKNRYIQRDIASLRSQFIIGESYTTGETFDSVSIRGIRLYSDSRMLPPTLASFAPIIHGVANTNAKVTITQGGYKIYETTVPPGAFVIDDLSPSGYGSDLIVTIEESDGSKRTFSQPFSSVVQMLRPGVGRWDISGGQVLKDDIQDEPNLFQASYYYGLNNYLTGYTGIQITDNNYTAGLLGLGLNTSVGAFSFDVTHSNVRIPDDKTYQGQSYRVSWNKLFEETSTSLNIAAYRYSTQNYLGLNDALTLIDEVKHPEQDLEPKSMRNYSRMKNQVTVSINQPLKFEKKDYGSFYLSGSWSDYWASGQNRSNYSIGYSNSASWGSYSISAQRSWNEDGDADDSVYLSFTIPIEKLLGTEQRTSGFQSIDTQMSSDFKGNNQLNVSSSGYSDNARVSYSVNTGYTMNKASKDLSYVGGYASYESPWGTLAGSVSANSDNSRQVSLSTDGGFVLHSGGLTFSNDSFSDSDTLAVVQAPGAQGARINYGNSTIDRWGYGVTSALSPYHENRIALDINDLENDVELKSTSAVAVPRQGSVVFADFETVQGQSAIMNITRSDGKNIPFAADIYDDQGNVIGNVGQGGQAFVRGIEQQGNINIKWLEESKPVSCLAHYQQSSEAEKIAQSIILNGIRCQIQ

SEQ ID NO: 16000 - protein, 749 aa, Escherichia coli; identical to SEQ ID NO: 15506

SEQ ID NO: 16001 - protein, 266 aa, Escherichia coli; identical to SEQ ID NO: 8481

SEQ ID NO: 16002 - protein, 332 aa, Escherichia coli; identical to SEQ ID NO: 2701

SEQ ID NO: 16003 - protein, 690 aa, Escherichia coli
MLPYARGRKEDVSDTHFIFVVTSWRYGMFRLNPFVRVGLCLSAISCAWPVLAVDDDGETMVVTASSVEQNLKDAPASISVITQEDLQRKPVQNLKDVLKEVPGVQLTNEGDNRKGVSIRGLDSSYTLILVDGKRVNSRNAVFRHNDFDLNWIPVDSIERIEVVRGPMSSLYGSDALGGVVNIITKKIGQKWSGTVTVDTTVQEHRDRGDTYNGQFFTSGPLIDGVLGMKAYGSLAKREKDDPQNSTTTDTGETPRIEGFSSRDGNVEFAWTPNQNHDFTAGYGFDRQDRDSDSLDKNRLERQNYSVSHNGRWDYGTSELKYYGEKVENKNPGNSSPITSESNTVDGKYTLPLTAINQFLTVGGEWRHDKLSDAVNLTGGTSSKTSASQYALFVEDEWRIFEPLALTTGVRMDDHETYGEHWSPRAYLVYNATDTVTVKGGWATAFKAPSLLQLSPDWTSNSCRGACKIVGSPDLKPETSESWELGLYYMGEEGWLEGVESSVTVFRNDVKDRISISRTSDVNAAPGYQNFVGFETGANGRRIPVFSYYNVNKARIQGVETELKIPFNDEWKLSINYTYNDGRDVSNGENKPLSDLPFHTANGTLDWKPLALEDWSFYVSGHYTGQKRADSATAKTPGGYTIWNTGAAWQVTKNVKLRAGVLNLGDKDLSRDDYSYNEDGRRYFMAVDYRF

SEQ ID NO: 16004 - protein, 371 aa, Escherichia coli
MKVKVLSLLVPALLVAGAANAAEVYNKDGNKLDLYGKVDGLHYFSDNKSEDGDQTYMRLGFKGETQVTDQLTGYGQWEYQIQGNSAENENNSWTRVAFAGLKFQDVGSFDYGRNYGVVYDVTSWTDVLPEFGGDTYGSDNFMQQRGNGFATYRNTDFFGLVDGLNFAVQYQGKNGSVDGEGMTNNGRGALRQNGDGVGGSITYDYEGFGIGAAVSSSKRTDDQNFGLNGYGERYLGNGDRAETYTGGLKYDANNIYLAAQYTQTYNATRVGSLGWANKAQNFEAVAQYQFDFGLRPSVAYLQSKGKNLGVGRNYDDEDILKYVDVGATYYFNKNMSTYVDYKINLLDDNRFTRDAGINTDDIVALGLVYQF

SEQ ID NO: 16005 - protein, 274 aa, Escherichia coli; identical to SEQ ID NO: 5566

SEQ ID NO: 16006 - protein, 193 aa, Escherichia coli; identical to SEQ ID NO: 2246

SEQ ID NO: 16007 - protein, 656 aa, Escherichia coli; identical to SEQ ID NO: 5574

SEQ ID NO: 16008 - protein, 565 aa, Escherichia coli; identical to SEQ ID NO: 15501

SEQ ID NO: 16009 - protein, 256 aa, Escherichia coli
MIKEQSMFYKLSCSMVVSTTLAVLLTTTNLAAHASVTPDRTRLVFNESDKSISVTLRNNNEKLPYLAQSWLEDEKGNKITSPLAVLPPVQRIDAMMNGQVKIQALPDIHTLPSDRESLFYYNVREIPPKSGKANTLQIALQTRIKLFWRPKALEKIDMRKPWQFKVTLTRSGQDYIVNNPTPYHVIISDASTQKKGLTAAGFKPLVMPPKTSQPLKAKMNSAPVLTYINDYGARLPLVFRCEGDTCKVDEAQSLKG

SEQ ID NO: 16010 - protein, 715 aa, Escherichia coli; identical to SEQ ID NO: 5610

SEQ ID NO: 16011 - protein, 721 aa, Escherichia coli; identical to SEQ ID NO: 9824

SEQ ID NO: 16012 - protein, 686 aa, Escherichia coli; identical to SEQ ID NO: 14004

SEQ ID NO: 16013 - protein, 412 aa, Escherichia coli; identical to SEQ ID NO: 13668

SEQ ID NO: 16014 - protein, 654 aa, Escherichia coli; identical to SEQ ID NO: 5571

SEQ ID NO: 16015 - protein, 241 aa, Escherichia coli; identical to SEQ ID NO: 2075

SEQ ID NO: 16016 - protein, 227 aa, Escherichia coli; identical to SEQ ID NO: 3570

SEQ ID NO: 16017 - protein, 760 aa, Escherichia coli; identical to SEQ ID NO: 15502

SEQ ID NO: 16018 - protein, 746 aa, Escherichia coli; identical to SEQ ID NO: 3031

SEQ ID NO: 16019 - protein, 673 aa, Escherichia coli; identical to SEQ ID NO: 2919

SEQ ID NO: 16020 - protein, 243 aa, Escherichia coli; identical to SEQ ID NO: 3483

SEQ ID NO: 16021 - protein, 170 aa, Escherichia coli [sequence omitted]

SEQ ID NO: 16022 - protein, 367 aa, Escherichia coli; identical to SEQ ID NO: 4158

SEQ ID NO: 16023 - protein, 231 aa, Escherichia coli; identical to SEQ ID NO: 7365

SEQ ID NO: 16024 - protein, 747 aa, Escherichia coli; identical to SEQ ID NO: 2072

SEQ ID NO: 16025 - protein, 161 aa, Escherichia coli; identical to SEQ ID NO: 2582

SEQ ID NO: 16026 - protein, 204 aa, Escherichia coli
MMKKIAITCALLSSLVASSVWADAASDLKSRLDKVSSFQASFTQKVTDGSGAAVQEGQGDLWVKRPNLFNWHMTQPDESILVSDGKTLWFYNPFVEQATATWLKDATGNTPFMLIARNQSSDWQQYNIKQNGDDFVLTPKASNGNLKQFTINVGRDGTIHQFSAVEQDDQRSSYQLKSQQNGAVDAAKFTFTPPQGVTVDDQRK

SEQ ID NO: 16027 - protein, 478 aa, Escherichia coli; identical to SEQ ID NO: 2405

SEQ ID NO: 16028 - protein, 816 aa, Escherichia coli; identical to SEQ ID NO: 9317

SEQ ID NO: 16029 - protein, 361 aa, Escherichia coli; identical to SEQ ID NO: 3061

SEQ ID NO: 16030 - protein, 565 aa, Escherichia coli; identical to SEQ ID NO: 2662

SEQ ID NO: 16031 - protein, 230 aa, Escherichia coli; identical to SEQ ID NO: 3019

SEQ ID NO: 16032 - protein, 331 aa, Escherichia coli; identical to SEQ ID NO: 2700

SEQ ID NO: 16033 - protein, 760 aa, Escherichia coli; identical to SEQ ID NO: 9343

SEQ ID NO: 16034 - protein, 760 aa, Escherichia coli; identical to SEQ ID NO: 2078

SEQ ID NO: 16035 - protein, 678 aa, Escherichia coli; identical to SEQ ID NO: 4148

SEQ ID NO: 16036 - protein, 729 aa, Escherichia coli; identical to SEQ ID NO: 4170

SEQ ID NO: 16037 - protein, 213 aa, Escherichia coli; identical to SEQ ID NO: 4186

SEQ ID NO: 16038 - protein, 111 aa, Escherichia coli; identical to SEQ ID NO: 3370

SEQ ID NO: 16039 - protein, 840 aa, Escherichia coli; identical to SEQ ID NO: 6560

SEQ ID NO: 16040 - protein, 198 aa, Escherichia coli; identical to SEQ ID NO: 3645

SEQ ID NO: 16041 - protein, 118 aa, Escherichia coli [sequence omitted]

SEQ ID NO: 16042 - protein, 208 aa, Escherichia coli; identical to SEQ ID NO: 1949

SEQ ID NO: 16043 - protein, 387 aa, Escherichia coli; identical to SEQ ID NO: 3101

SEQ ID NO: 16044 - protein, 614 aa, Escherichia coli; identical to SEQ ID NO: 9373

SEQ ID NO: 16045 - protein, 162 aa, Escherichia coli; identical to SEQ ID NO: 1973

SEQ ID NO: 16046 - protein, 237 aa, Escherichia coli; identical to SEQ ID NO: 3022

SEQ ID NO: 16047 - protein, 784 aa, Escherichia coli; identical to SEQ ID NO: 2244

SEQ ID NO: 16048 - protein, 863 aa, Escherichia coli; identical to SEQ ID NO: 9259

SEQ ID NO: 16049 - protein, 274 aa, Escherichia coli; identical to SEQ ID NO: 3160

SEQ ID NO: 16050 - protein, 861 aa, Escherichia coli
MSGSYSSVWAEDDIQFDSRFLELKGDTKIDLKRFSSQGYVEPGKYNLQVQLNKQPLAEEYDIYWYAGEDDASKSYACLTQELVAQFGLKEDVAKNLQWSHDAKCLKSGQLEGMEIKADLSQSALVISLPQAYLEYTYPDWDPPSRWDDGISGIVADYSINAQTRHEENGGDDSNEISGNGTVGVNLGPWRMRADWQTNYQHTRSNDDDEFSGDETQKKWEWSRYYAWRALPSLKAKLALGEDYLRSDIFDGFNYVGGSVSTDDQMLPPNLRGYAPDISGVAHTTAKVTVSQMGRVIYETQVPAGPFRIQDLGDSVSGTLHIRIEEQNGQVQEYDISTASMPYLTRPGQVRYKIMMGRPQEWGHHVEGEFFSGAEASWGIANGWSLYGGALGDENYQSAALGVGRDLSTFGAVAFDVTHSHTKLDKDTAYGKGSLDGNSFRVSYSKDFDQLNSRVTFAGYRFSEENFMTMSEYLDASDSGMVRTGNDKEMYTATYNQNFRDAGVSVYLNYTRHTYWDREEQTNYNIMLSHYFNMGSIRNVSISMTGYRYEYDNQADKGMYISLSMPWGDNSTVSYNGNYGSGTDSSQVGYFSRVDDATHYQLNVGTSDKHTSVDGYYSHDGSLAQVDLSANYHEGQYTSAGLSLQGGATLTAHGGALHRTQNMGGTRLLIDADGVADVPVEGNGAAVYTNMFGKAVVSDVNNYYRNQAYIDLNKLPENAEATQSVVQATLTEGAIGYRKFAVISGQKAMAVLRLQDGSHPPFGAEVKNDNEQTVGLVDDDGNVYLAGVKPGEHMSVFWSGVAHCDINLPDPLPADLFNGLLLPCQHKGNVAPVVPDDIKPVIQEQTQQVTPTNPPVSVSANQ

SEQ ID NO: 16051 - protein, 169 aa, Escherichia coli; identical to SEQ ID NO: 3373

SEQ ID NO: 16052 - protein, 203 aa, Escherichia coli; identical to SEQ ID NO: 2201

SEQ ID NO: 16053 - protein, 478 aa, Escherichia coli; identical to SEQ ID NO: 3436

SEQ ID NO: 16054 - protein, 111 aa, Escherichia coli; identical to SEQ ID NO: 3419

SEQ ID NO: 16055 - protein, 150 aa, Escherichia coli
MLPTRKEASLRIMFLGKTNLPTDRETLYWMNVKAIPPTDEKNTQKNTLQLALQNKIKLFYRPENLPVQPGKARNMLRFKYEGKQLKVINPSPYYLTLTGIKVQGSKLPNTFVPPKSDITVSSPVTLAGEITYQTINDFGATTERQKGIMQ

SEQ ID NO: 16056 - protein, 784 aa, Escherichia coli; identical to SEQ ID NO: 2240

SEQ ID NO: 16057 - protein, 659 aa, Escherichia coli; identical to SEQ ID NO: 2942

SEQ ID NO: 16058 - protein, 746 aa, Escherichia coli; identical to SEQ ID NO: 2949

SEQ ID NO: 16059 - protein, 241 aa, Escherichia coli; identical to SEQ ID NO: 3582

SEQ ID NO: 16060 - protein, 512 aa, Escherichia coli; identical to SEQ ID NO: 2813

SEQ ID NO: 16061 - protein, 362 aa, Escherichia coli; identical to SEQ ID NO: 2998

SEQ ID NO: 16062 - protein, 713 aa, Escherichia coli; identical to SEQ ID NO: 3523

SEQ ID NO: 16063 - protein, 121 aa, Escherichia coli
MDAVLSVQGASAPIKKKSFFSKFTRLNMLRLARAVIPAAVLMMFFPQLAMAAGSSGQDLMASGNTTVKATFGKDSSIVKWVILAEVLVGAVMYMMTKNVKFLAGFAIISVFIAVGMAVVGL

SEQ ID NO: 16064 - protein, 430 aa, Escherichia coli; identical to SEQ ID NO: 2617

SEQ ID NO: 16065 - protein, 200 aa, Escherichia coli; identical to SEQ ID NO: 1784

SEQ ID NO: 16066 - protein, 237 aa, Escherichia coli; identical to SEQ ID NO: 2816

SEQ ID NO: 16067 - protein, 191 aa, Escherichia coli; identical to SEQ ID NO: 15494

SEQ ID NO: 16068 - protein, 729 aa, Escherichia coli; identical to SEQ ID NO: 15497

SEQ ID NO: 16069 - protein, 430 aa, Escherichia coli; identical to SEQ ID NO: 2617

SEQ ID NO: 16070 - protein, 229 aa, Escherichia coli; identical to SEQ ID NO: 4047

SEQ ID NO: 16071 - protein, 239 aa, Escherichia coli
MHQMQTTRTPYSVSFMATVLLLFLFACHSTIANAAVALGATRVIYPANQKQVLLPVTNNDPASVYLIQSWIENAGDQKDTQFVITPPLFSMQGKKENTLRIINATNHQLPGDRESLFWVNVKAIPAMEKDQKNENTLQLAIISRIKMFYRPTHLAMAPEEAPAMLRFRRSGSILTLINPTPYFITVTNMKAGNSNLPNTMVPPKGEVSVDIPHAVTGDISFQTINDYGALTPRIKATMQ

SEQ ID NO: 16072 - protein, 700 aa, Escherichia coli; identical to SEQ ID NO: 15519

SEQ ID NO: 16073 - protein, 191 aa, Escherichia coli; identical to SEQ ID NO: 4195

SEQ ID NO: 16074 - protein, 517 aa, Escherichia coli
MKHKLQMMKMRWLSAAVMLTLYTSSSWAFSIDDVAKQAQSLAGKGYEAPKSNLPSVFRDMKYADYQQIQFNHDKAYWNNLKTPFKLEFYHQGMYFDTPVKINEVTATAVKRIKYSPDYFTFGDVQHDKDTVKDLGFAGFKVLYPINSKDKNDEIVSMLGASYFRVIGAGQVYGLSARGLAIDTALPSGEEFPRFKEFWIERPKPTDKRLTIYALLDSPRATGAYKFVVMPGRDTVVDVQSKIYLRDKVGKLGVAPLTSMFLFGPNQPSPANNYRPELHDSNGLSIHAGNGEWIWRPLNNPKHLAVSSFSMENPQGFGLLQRGRDFSRFEDLDDRYDLRPSAWVTPKGEWGKGSVELVEIPTNDETNDNIVAYWTPDKLPEPGKEMNFKYTITFSRDEDKLHAPDNAWVQQTRRSTGDVKQSNLIRQPDGTIAFVVDFTGAEMKKLPEDTPVTAQTSIGDNGEIVESTVRYNPVTKGWRLVMRVKVKDAKKTTEMRAALVNADQTLSETWSYQLPANE

SEQ ID NO: 16075 - protein, 111 aa, Escherichia coli; identical to SEQ ID NO: 2911

SEQ ID NO: 16076 - protein, 828 aa, Escherichia coli; identical to SEQ ID NO: 2381

SEQ ID NO: 16077 - protein, 230 aa, Escherichia coli; identical to SEQ ID NO: 2995

SEQ ID NO: 16078 - protein, 246 aa, Escherichia coli; identical to SEQ ID NO: 15514

SEQ ID NO: 16079 - protein, 193 aa, Escherichia coli; identical to SEQ ID NO: 2250

SEQ ID NO: 16080 - protein, 851 aa, Escherichia coli
MPSFIGGLVVFVSAAFNAQAETWFDPAFFKDDPSMVADLSRFEKGQKITPGVYRVDIVLNQTIVDTRNVNFVEITPEKGIAACLTTESLDAMGVNTDAFPAFKQLDKQACVPLAEIIPDASVTFNVNKLRLEISVPQIAIKSNARGYVPPERWDEGINALLLGYSFSGANSIHSSADSDSGDSYFLNLNSGVNLGPWRLRNNSTWSRSSGQTAEWKNLSSYLQRAVIPLKGELTVGDDYTAGDFFDSVSFRGVQLASDDNMLPDSLKGFAPVVRGIAKSNAQITIKQNGYTIYQTYVSPGAFEISDLYSTSSSGDLLVEIKEADGSVNSYSVPFSSVPLLQRQGRIKYAVTLAKYRINSNEQQESKFAQATLQWGGPWGTTWYGGGQYAEYYRAAMFGLGFNLGDFGAISFDATQAKSTLADQSEHKGQSYRFLYAKTLNQLGTNFQLMGYRYSTSGFYTLSDTMYKHMDGYEFNDGDDEDTPMWSRYYNLFYTKRGKLQVNISQQLGEYGSFYLSGSQQTYWHTDQQDRLLQFGYNTQIKDLSLGVSWNYSKSRGQPDADQVFALNFSLPLNLLLPRSNDSYTRKKNYAWMTSNTSIDNEGHITQNLGLTETLLDDGNLSYSVQQGYNSEGKTANGSASMDYKGAFADARVGYNYSDNGSQQQLNYALSGSLVAHSQGITLGQSLGETNVLIAAPGAENTRVANSTGLKTDWRGYTVVPYATSYRENRIALDAASLKRNVDLENAVVNVVPTKGALVLAEFNAHAGARVLMKTSKQGIPLRFGAIATLDGIQTNSGIIDDDGSLYMSGLPAQGAITVRWGEAPDQICHISYQLTEQQINSAITRMDAICR

SEQ ID NO: 16081 - protein, 523 aa, Escherichia coli; identical to SEQ ID NO: 3879

SEQ ID NO: 16082 - protein, 353 aa, Escherichia coli; identical to SEQ ID NO: 6704

SEQ ID NO: 16083 - protein, 432 aa, Escherichia coli
MSKIVKIIGREIIDSRGNPTVEAEVHLEGGFVGMAAAPSGASTGSREALELRDGDKSRFLGKGVTKAVAAVNGPIAQALIGKDAKDQAGIDKIMIDLDGTENKSKFGANAILAVSLANAKAAAAAKGMPLYEHIAELNGTPGKYSMPVPMMNIINGGEHADNNVDIQEFMIQPVGAKTVKEAIRMGSEVFHHLAKVLKAKGMNTAVGDEGGYAPNLGSNAEALAVIAEAVKAAGYELGKDITLAMDCAASEFYKDGKYVLAGEGNKAFTSEEFTHFLEELTKQYPIVSIEDGLDESDWDGFAYQTKVLGDKIQLVGDDLFVTNTRILKEGIEKGIANSILIKFNQIGSLTETLAAIKMAKDAGYTAVISHRSGETEDATIADLAVGTAAGQIKTGSMSRSDRVAKYNQLIRIEEALGEKAPYNGRKEIKGQA

SEQ ID NO: 16084 - protein, 216 aa, Escherichia coli; identical to SEQ ID NO: 3919

SEQ ID NO: 16085 - protein, 274 aa, Escherichia coli; identical to SEQ ID NO: 2304

SEQ ID NO: 16086 - protein, 362 aa, Escherichia coli; identical to SEQ ID NO: 15493

SEQ ID NO: 16087 - protein, 869 aa, Escherichia coli; identical to SEQ ID NO: 10435

SEQ ID NO: 16088 - protein, 432 aa, Escherichia coli; identical to SEQ ID NO: 2026

SEQ ID NO: 16089 - protein, 250 aa, Escherichia coli; identical to SEQ ID NO: 3048

SEQ ID NO: 16090 - protein, 266 aa, Escherichia coli; identical to SEQ ID NO: 1894

SEQ ID NO: 16091 - protein, 229 aa, Escherichia coli; identical to SEQ ID NO: 3277

SEQ ID NO: 16092 - protein, 517 aa, Escherichia coli; identical to SEQ ID NO: 2462

SEQ ID NO: 16093 - protein, 89 aa, Escherichia coli; identical to SEQ ID NO: 2812

SEQ ID NO: 16094 - protein, 869 aa, Escherichia coli; identical to SEQ ID NO: 2903

SEQ ID NO: 16095 - protein, 729 aa, Escherichia coli; identical to SEQ ID NO: 2948

SEQ ID NO: 16096 - protein, 252 aa, Escherichia coli; identical to SEQ ID NO: 3543

SEQ ID NO: 16097 - protein, 631 aa, Escherichia coli
MVVTASSVEQNLKDAPASISVITQEDLQRKPVQNLKDVLKKVPGVQLTNEGDNRKGVSIRGLDSSYTLILVDGKRVNSRNAVFRHNDFDLNWIPVDSIERIEVVRGPMSSLYGSDALGGVVNIITKKIGQKWSGTVTVDTTIQEHRDRGDTYNGQFFTSGPLIDGVLGMKAYGSLAKREKDDPQNSTTTDTGETPRIEGFSSRDGNVEFAWTPNQNHDFTAGYGFDRQDRDSDSLDKNRLERQNYSVSHNGRWDYGTSELKYYGEKVENKNPGNSSPITSESNTVDGKYTLPLTAINQFLTVGGEWRHDKLSDAVNLTGGTSSKTSASQYALFVEDEWRIFEPLALTTGVRMDDHETYGEHWSPRAYLVYNATDTVTVKGGWATAFKAPSLLQLSPDWTSNSCRGACKIVGSPDLKPETSESWELGLYYMGEEGWLEGVESSVTVFRNDVKDRISISRTSDVNAAPGYQNFVGFETGANGRRIPVFSYYNVNKARIQGVETELKIPFNDEWKLSINYTYNDGRDVSNGENKPLSDLPFHTANGTLDWKPLALEDWSFYVSGHYTGQKRADSATAKTPGGYTIWNTGAAWQVTKDVKLRAGVLNLGDKDLSRDDYSYNEDGRRYFMAVDYRF

SEQ ID NO: 16098 - protein, 161 aa, Escherichia coli; identical to SEQ ID NO: 2582

SEQ ID NO: 16099 - protein, 740 aa, Escherichia coli
MADASSEFDVGQQHLSLSVPQIYVGRMARGYVSPDLWEEGINAGLLNYSFNGNSINNRSNHNAGKSNYAYLNLQSGINIGSWRLRDNSTWSYNSGSSNSSDSNKWQHINTSAERDIIPLRSRLTVGDSYTDGDIFDSVNFRGLKINSTEAMLPDSQHGFAPVIHGIARGTAQVSVKQNGYDVYQTTVPPGPFTIDDINSAANGGDLQVTIKEADGSIQTLYVPYSSVPVLQRAGYTRYALAMGEYRSGNNLQSSPKFVQASLMHGLKGNWTPYGGMQIAEDYQAFNLGIGKDLGLFGAFSFDITQANTTLADDTRHSGQSVKSVYSKSFYQTGTNIQVAGYRYSTQGFYNLSDSAYSRMSGYTVKPPTGDTSEQTLFIDYFNLFYSKRGQEQISISQQLGNYGTTFFSASRQSYWNTSRSDQQISFGLNVPFGDITTSLNYSYSNNIWQNDRDHLLAFTLNVPFSHWMRTDSQSAFRNSNASYSMSNDLKGSMTNLSGVYGTLLLDNNLNYSVQVGNTQGGNTSSGTSGYSSLNYRGAYGNTNVGYSRSGDSSQIYYGMSGGIIAHADGITFGQPLGDTMVLVKAPGADNVKIENQIGIHTDWRGYAILPFATEYRENRVALNANSLADNVELDETVVTVIPTHGAIARATFNAQIGGKVLMTLKYGNKSIPFGAIVTHGENKNGSIVAENGQVYLTGLQQSGKLQVSWGNDKNSNCIVDYKLPAVSPGTLLNQQTAICR

SEQ ID NO: 16100 - protein, 234 aa, Escherichia coli
MRKKILYTFLLLLSSPVVAHDLEGINLDLTRVIFDSQQNSASIKVNNFNENKSWLLRSWISNYSDDGKSKSFIITPILYRVLPNESIQLKIEKTDDLLPTDRESVFRINVLAIPPKEISNDKTSSKPSDLQFAINSRIKLIYRPHKLNETDKVNAAFKSLKILKKNEYISIENATPYYITMDNVKINNKKVTSIEDFMVAPYSEFKIPTQNAKSFSYTTINDYGGKNPIIDIKF

SEQ ID NO: 16101 - protein, 200 aa, Escherichia coli; identical to SEQ ID NO: 1789

SEQ ID NO: 16102 - protein, 518 aa, Escherichia coli; identical to SEQ ID NO: 2349

SEQ ID NO: 16103 - protein, 200 aa, Escherichia coli; identical to SEQ ID NO: 15522

SEQ ID NO: 16104 - protein, 222 aa, Escherichia coli
MSKLGISSLFKTILLTAALAVSFTASAFTEGTDYMVLEKPIPNADKTLIKVFSYACPFCYKYDKAVTGPVSEKVKDIVAFTPFHLETKGEYGKQASEVFAILINKDKAAGISLFDANSQFKKAKFAYYAAYHDKKERWSDGKDPAAFIKTGLDAAGMSQADFEAALKEPAVQETLEKWKASYEVAKIQGVPAYVVNGKYLIYTKSIKSIDAMADLIRELASK

SEQ ID NO: 16105 - protein, 446 aa, Escherichia coli; identical to SEQ ID NO: 2180

SEQ ID NO: 16106 - protein, 238 aa, Escherichia coli
MSVFSRVCLGFTFLLTASQVQASIVLGGIRIIYPSNQNEVQITLKNKDAYARYLVQSWVSNIDGSKAPFLITPPVYKLEENRQTLLHIVFTGDKNKLPQDRESLFLANIKSVSAMPEELKDKNTLQFAMKARLKLFWRPASLDNSDALTAWEKLKFHKEAGKLIVKNPTPFYISFSDLTVSGKNIVPTESKSEPGALLMMVGPFSEQRFSLPVGAGSIVEWSVITDYGSSSGKRQQKL

SEQ ID NO: 16107 - protein, 366 aa, Escherichia coli; identical to SEQ ID NO: 3520

SEQ ID NO: 16108 - protein, 551 aa, Escherichia coli; identical to SEQ ID NO: 2452

SEQ ID NO: 16109 - protein, 678 aa, Escherichia coli; identical to SEQ ID NO: 15524

SEQ ID NO: 16110 - protein, 784 aa, Escherichia coli; identical to SEQ ID NO: 2242

SEQ ID NO: 16111 - protein, 122 aa, Escherichia coli
MEKNMKKRGAFLGLLLVSACASVFAANNETSKSVTFPKCEGLDAAGIAASVKRDYQQNRVARWADDQKIVGQADPVAWVSLQDIQGKDDKWSVPLNVRGKSADIHYQVSVDCKSGMAEYQRR

SEQ ID NO: 16112 - protein, 518 aa, Escherichia coli; identical to SEQ ID NO: 2351

SEQ ID NO: 16113 - protein, 351 aa, Escherichia coli; identical to SEQ ID NO: 2872

SEQ ID NO: 16114 - protein, 747 aa, Escherichia coli; identical to SEQ ID NO: 2954

SEQ ID NO: 16115 - protein, 213 aa, Escherichia coli; identical to SEQ ID NO: 2232

SEQ ID NO: 16116 - protein, 766 aa, Escherichia coli
MLMTTMPDSCNSWQKCRNKTMNKKIHSLALLVNLGIYGVAQAQEPTDTPVSHDDTIVVTAAEQNLQAPGVSTITADEIRKNPVARDVSEIIRTMPGVNLTGNSTSGQRGNNRQIDIRGMGPENTLILIDGKPVSSRNSVRQGWRGERDTRGDTSWVPPEMIERIEVLRGPAAARYGNGAAGGVVNIITKKGSGEWHGSWDAYFNAPEHKEEGATKRTNFSLTGPLGDEFSFRLYGNLDKTQADAWDINQGHQSARAGTYATTLPAGREGVINKDINGVVRWDFAPLQSLELEAGYSRQGNLYAGDTQNTNSDAYTRSKYGDETNRLYRQNYSLTWNGGWDNGVTTSNWVQYEHTRNSRIPEGLAGGTEGKFNEKAAQDFVDIDLDDVMLHSEVNLPIDFLVNQTLTLGTEWNQQRMKDLSSNTQALTGTNTGGAIDGVSATDRSPYSKAEIFSLFAENNMELTDSTIVTPGLRFDHHSIVGNNWSPALNISQGLGDDFTLKMGIARAYKAPSLYQTNPNYILYSKGQGCYASAGGCYLQGNDDLKAETSINKEIGLEFKRDGWLAGVTWFRNDYRNKIEAGYVAVGKNAVGTDLYQWDNVPKAVVEGLEGSLNVPVSETVMWTNNITYMLKSENKTTGDRLSIIPEYTLNSTLSWQAREDLSMQTTFTWYGKQQPKKYNYKGQPAVGPETKEISPYSIVGLSATWDVTKNVSLTGGVDNLFDKRLWRAGNAQTTGDLAGANYIAGAGAYTYNEPGRTWYMSINTHF

SEQ ID NO: 16117 - protein, 235 aa, Escherichia coli
MIAMQKNAAHTYAISSLLALSLTGCAWIPSTPLVQGATSAQPVPGPTPVANGSIFQSAQPINYGYQPLFEDRRPRNIGDTLTIVLQENVSASKSSSANASRDGKTNFGFDTVPRYLQGLFGNARADVEASGGNTFNGKGGANASNTFSGTLTVTVDQVLVNGNLHVVGEKQIAINQGTEFIRFSGVVNPRTISGSNTVPSTQVADARIEYVGNGYINEAQNMGWLQRFFLNLSPM

SEQ ID NO: 16118 - protein, 713 aa, Escherichia coli; identical to SEQ ID NO: 6243

SEQ ID NO: 16119 - protein, 367 aa, Escherichia coli; identical to SEQ ID NO: 2431

SEQ ID NO: 16120 - protein, 162 aa, Escherichia coli; identical to SEQ ID NO: 1969

SEQ ID NO: 16121 - protein, 696 aa, Escherichia coli; identical to SEQ ID NO: 4038

SEQ ID NO: 16122 - protein, 700 aa, Escherichia coli; identical to SEQ ID NO: 2926

SEQ ID NO: 16123 - protein, 240 aa, Escherichia coli; identical to SEQ ID NO: 4020

SEQ ID NO: 16124 - protein, 828 aa, Escherichia coli
MKLSRRSFMKANAVAAAAAAAGLSVPGVARAVVGQQEAIKWDKAPCRFCGTGCGVLVGTQQGRVVACQGDPDAPVNRGLNCIKGYFLPKIMYGKDRLTQPLLRMKNGKYDKEGEFTPITWDQAFDVMEEKFKTALKEKGPESIGMFGSGQWTIWEGYAASKLFKAGFRSNNIDPNARHCMASAVVGFMRTFGMDEPMGCYDDIEQADAFVLWGANMAEMHPILWSRITNRRLSNQNVTVAVLSTYQHRSFELADNGIIFTPQSDLVILNYIANYIIQNNAINQDFFSKHVNLRKGATDIGYGLRPTHPLEKAAKNPGSDASEPMSFEDYKAFVAEYTLEKTAEMTGVPKDQLEQLAQLYADPNKKVISYWTMGFNQHTRGVWANNLVYNLHLLTGKISQPGCGPFSLTGQPSACGTAREVGTFAYRLPADMVVTNEKHRDICEKKWNIPSGTIPAKIGLHAVAQDRALKDGKLNVYWTMCTNNMQAGPNINEERMPGWRDPRNFIIVSDPYPTVSALAADLILPTAMWVEKEGAYGNAERRTQFWRQQVQAPGEAKSDLWQLVQFSRRFKTEEVWPEELLAKKPELRGKTLYEVLYATPEVSKFPVSELAEDQLNDESRELGFYLQKGLFEEYAWFGRGHGHDLAPFDDYHKARGLRWPVVNGKETQWRYSEGNDPYVKAGEGYKFYGKPDGKAVIFALPFEPAAEAPDEEYDLWLSTGRVLEHWHTGSMTRRVPELHRAFPEAVLFIHPLDAKARDLRRGDKVKVVSRRGEVISIVETRGRNRPPQGLVYMPFFDAAQLVNKLTLDATDPLSKETDFKKCAVKLEKV

SEQ ID NO: 16125 - protein, 360 aa, Escherichia coli; identical to SEQ ID NO: 3354

SEQ ID NO: 16126 - protein, 505 aa, Escherichia coli; identical to SEQ ID NO: 5681

SEQ ID NO: 16127 - protein, 660 aa, Escherichia coli; identical to SEQ ID NO: 5588

SEQ ID NO: 16128 - protein, 614 aa, Escherichia coli; identical to SEQ ID NO: 13197

SEQ ID NO: 16129 - protein, 430 aa, Escherichia coli; identical to SEQ ID NO: 2617

SEQ ID NO: 16130 - protein, 229 aa, Escherichia coli; identical to SEQ ID NO: 3589

SEQ ID NO: 16131 - protein, 208 aa, Escherichia coli; identical to SEQ ID NO: 1948

SEQ ID NO: 16132 - protein, 628 aa, Escherichia coli
MKPAASFFYCGCFTMIKKASLLTACSVTAFSAWAQDTSPDTLVVTANRFEQPRSTVLAPTTVVTRQDIDRWQSTSVNDVLRRLPGVDITQNGGSGQLSSIFIRGTNASHVLVLIDGVRLNLAGVSGSADLSQFPIALVQRVEYIRGPRSAVYGSDAIGGVVNIITTRDHPGTEISAGWGSNSYQNYDVSTQQQLGDKTRVTLLGDYAHTHGYDVVAYGNTGTQAQPDNDGFLSKTLYGALEHNFTDVWSGFVRGYGYDNRTNYDAFYSPGLPLVDTRKLYSQSWDAGLRYNGELIKSQLITSYSHSKDYNYDPHYGRYDSSATLDEMKQYTVQWANNIIIGHGNIGAGVDWQKQSTAPGTAYVEDGYDQRNTGIYLTGLQQVGDFTFEGAARSDDNSQFGRHGTWQTSAGWEFIEGYRFIASYGTSYKAPNLGQLYGFYGNPNLDPEKSKQWEGAFEGLTAGVNWRISGYRNDVSDLIDYDDHTLKYYNEGKARIKGVEATANFDTGPLTHTVSYDYVDARNAITDTPLLRRAKQQVKYQLDWQLYDFDWGITYQYLGSRYDKDYSSYPYQTVKMGGVSLWDLAVAYPVTSHLTVRGKIANLFDKDYETVYGYQTAGREYTLSGSYTF

SEQ ID NO: 16133 - protein, 89 aa, Escherichia coli; identical to SEQ ID NO: 2810

SEQ ID NO: 16134 - protein, 715 aa, Escherichia coli; identical to SEQ ID NO: 3971

SEQ ID NO: 16135 - protein, 266 aa, Escherichia coli; identical to SEQ ID NO: 3745

SEQ ID NO: 16136 - protein, 539 aa, Escherichia coli; identical to SEQ ID NO: 7908

SEQ ID NO: 16137 - protein, 700 aa, Escherichia coli; identical to SEQ ID NO: 3128

SEQ ID NO: 16138 - protein, 678 aa, Escherichia coli; identical to SEQ ID NO: 3014

SEQ ID NO: 16139 - protein, 518 aa, Escherichia coli; identical to SEQ ID NO: 2349

SEQ ID NO: 16140 - protein, 120 aa, Escherichia coli; identical to SEQ ID NO: 3147

SEQ ID NO: 16141 - protein, 331 aa, Escherichia coli; identical to SEQ ID NO: 2700

SEQ ID NO: 16142 - protein, 432 aa, Escherichia coli; identical to SEQ ID NO: 2026

SEQ ID NO: 16143 - protein, 760 aa, Escherichia coli; identical to SEQ ID NO: 3114

SEQ ID NO: 16144 - protein, 361 aa, Escherichia coli; identical to SEQ ID NO: 3135

SEQ ID NO: 16145 - protein, 236 aa, Escherichia coli; identical to SEQ ID NO: 3093

SEQ ID NO: 16146 - protein, 386 aa, Escherichia coli; identical to SEQ ID NO: 3094

SEQ ID NO: 16147 - protein, 208 aa, Escherichia coli; identical to SEQ ID NO: 1949

SEQ ID NO: 16148 - protein, 118 aa, Escherichia coli [sequence omitted]

SEQ ID NO: 16149 - protein, 232 aa, Escherichia coli; identical to SEQ ID NO: 2087

SEQ ID NO: 16150 - protein, 836 aa, Escherichia coli; identical to SEQ ID NO: 10553

SEQ ID NO: 16151 - protein, 161 aa, Escherichia coli; identical to SEQ ID NO: 2582

SEQ ID NO: 16152 - protein, 784 aa, Escherichia coli; identical to SEQ ID NO: 2244

SEQ ID NO: 16153 - protein, 266 aa, Escherichia coli; identical to SEQ ID NO: 3102

SEQ ID NO: 16154 - protein, 351 aa, Escherichia coli; identical to SEQ ID NO: 3103

SEQ ID NO: 16155 - protein, 826 aa, Escherichia coli; identical to SEQ ID NO: 3078

SEQ ID NO: 16156 - protein, 641 aa, Escherichia coli; identical to SEQ ID NO: 3104

SEQ ID NO: 16157 - protein, 856 aa, Escherichia coli; identical to SEQ ID NO: 14693

SEQ ID NO: 16158 - protein, 229 aa, Escherichia coli; identical to SEQ ID NO: 6623

SEQ ID NO: 16159 - protein, 368 aa, Escherichia coli; identical to SEQ ID NO: 2372

SEQ ID NO: 16160 - protein, 880 aa, Escherichia coli; identical to SEQ ID NO: 3110

SEQ ID NO: 16161 - protein, 368 aa, Escherichia coli; identical to SEQ ID NO: 3177

SEQ ID NO: 16162 - protein, 746 aa, Escherichia coli
MNKKIHSLALLVNLGIYGVAQAQEPTDTPVSHDDTIVVTAAEQNLQAPGVSTITADEIRKNPVARDVSEIIRTMPGVNLTGNSTSGQRGNNRQIDIRGMGPENTLILIDGKPVSSRNSVRQGWRGERDTRGDTSWVPPEMIERIEVLRGPAAARYGNGAAGGVVNIITKKGSGEWHGSWDAYFNAPEHKEEGATKRTNFSLTGPLGDEFSFRLYGNLDKTQADAWDINQDHQSARAGTYATTLPAGREGVINKDINGVVRWDFAPLQSLELEAGYSRQGNLYAGDTQNTNSDAYTRSKYGDETNRLYRQNYALTWNGGWDNGVTTSNWVQYEHTRNSRIPEGLAGGTEGKFNEKATQDFVDIDLDDVMLHSEVNLPIDFLVNQTLTLGTEWNQQRMKDLSSNTQALTGANTGGAIDGVSATDRSPYSKAEIFSLFAENNMELTDSTIVTPGLRFDHHSIVGNNWSPALNISQGLGDDFTLKMGIARAYKAPSLYQTNPNYILYSKGQGCYASAGGCYLQGNDDLKAETSINKEIGLEFKRDGWLAGVTWFRNDYRNKIEAGYVAVGQNAVGTDLYQWDNVPKAVVEGLEGSLNVPVSETVMWTNNITYMLKSENKTTGDRLSIIPEYTLNSTLSWQAREDLSMQTTFTWYGKQQPKKYNYKGQPAVGPETKEISPYSIVGLSATWDVTKNVSLTGGVDNLFDKRLWRAGNAQTTGDLAGANYIAGAGAYTYNEPGRTWYMSVNTNF

SEQ ID NO: 16163 - protein, 260 aa, Escherichia coli; identical to SEQ ID NO: 4546

SEQ ID NO: 16164 - protein, 861 aa, Escherichia coli; identical to SEQ ID NO: 10561

SEQ ID NO: 16165 - protein, 237 aa, Escherichia coli; identical to SEQ ID NO: 3022

SEQ ID NO: 16166 - protein, 230 aa, Escherichia coli; identical to SEQ ID NO: 3019

SEQ ID NO: 16167 - protein, 878 aa, Escherichia coli
MSYLNLRLYQRNTQCLHIRKHRLAGFFVRLFVACAFAAQAPLSSAELYFNPRFLADDPQAVADLSRFENGQELPPGTYRVDIYLNNGYMATRDVTFNTGDSEQGIVPCLTRAQLASMGLNTASVAGMNLLADDACVPLTTMLQDATAHLDVGQQRLNLTIPQAFMSNRARGYIPPELWDPGINAGLLNYNFSGNSVQNRIGGNSHYAYLNLQSGLNIGAWRLRDNTTWSYNSSDRSSGSKNKWQHINTWLERDIIPLRSRLALGDGYTQGDIFDGINFRGAQLASDDNMLPDSQRGFAPVIHGIARGTAQVTIKQNGYDIYNSTVPPGPFTINDIYAAGNSGDLQVTIKEADGSTQIFTVPYSSVPLLQREGHTRYSITAGEYRSGNAQQEKPRFFQSTLLHGLPAGWTIYGGTQLADRYRAFNFGIGKNMGALGALSVDMTQANSTLPDDSQHDGQSVRFLYNKSLNESGTNIQLVGYRYSTSGYFNFADTTYSRMNGYNIETQDGVIQVKPKFTDYYNLAYNKRGKLQLTVTQQLGRTSTLYLSGSHQTYWGTSNVDEQFQAGLNTAFEDINWTLSYSLTKNAWQKGRDQMLALNVNIPFSHWLRSDSKSQWRHASASYSMSHDLNGRMTNLAGVYGTLLEDNNLSYSVQTGYAGGGDGNSGSTGYATLNYRGGYGNANIGYSHSDDIKQLYYGVSGGVLAHANGVTLGQPLNETVVLVKAPGAKDAKVENQTGVRTDWRGYAVLPYATEYRENRVALDTNTLADNVDLDNAVANVVPTRGAIVRAEFKARVGIKLLMTLTHNNKPLPFGAMVTSESSQSSGIVADNGQVYLSGMPLAGKVQVKWGEEENAHCIANYQLPPESQQQLLTQLSAECR

SEQ ID NO: 16168 - protein, 207 aa, Escherichia coli
MRNNDEKIAITCALLSSLVASSVWADAASDLKSRLDKVSSFHASFTQKVTDGSGAAVQEGQGDLWVKRPNLFNWHMTQPDESILVSDGKTLWFYNPFVEQATATWLKDATGNTPFMLIARNQSSDWQQYNIKQNGDDFVLTPKASNGNLKQFTINVGRDGTIHQFSAVEQDDQRSSYQLKSQQNGAVDAAKFTFTPPQGVTVDDQRK

SEQ ID NO: 16169 - protein, 193 aa, Escherichia coli; identical to SEQ ID NO: 2246

SEQ ID NO: 16170 - protein, 241 aa, Escherichia coli; identical to SEQ ID NO: 2922

SEQ ID NO: 16171 - protein, 831 aa, Escherichia coli; identical to SEQ ID NO: 10573

SEQ ID NO: 16172 - protein, 822 aa, Escherichia coli; identical to SEQ ID NO: 11208

SEQ ID NO: 16173 - protein, 130 aa, Escherichia coli; identical to SEQ ID NO: 3706

SEQ ID NO: 16174 - protein, 765 aa, Escherichia coli; identical to SEQ ID NO: 7818

SEQ ID NO: 16175 - protein, 446 aa, Escherichia coli; identical to SEQ ID NO: 2176

SEQ ID NO: 16176 - protein, 243 aa, Escherichia coli; identical to SEQ ID NO: 3159

SEQ ID NO: 16177 - protein, 876 aa, Escherichia coli; identical to SEQ ID NO: 10563

SEQ ID NO: 16178 - protein, 900 aa, Escherichia coli; identical to SEQ ID NO: 14707

SEQ ID NO: 16179 - protein, 162 aa, Escherichia coli; identical to SEQ ID NO: 1973

SEQ ID NO: 16180 - protein, 170 aa, Escherichia coli [sequence omitted]

SEQ ID NO: 16181 - protein, 816 aa, Escherichia coli; identical to SEQ ID NO: 3172

SEQ ID NO: 16182 - protein, 111 aa, Escherichia coli; identical to SEQ ID NO: 3096

SEQ ID NO: 16183 - protein, 729 aa, Escherichia coli; identical to SEQ ID NO: 2948

SEQ ID NO: 16184 - protein, 224 aa, Escherichia coli; identical to SEQ ID NO: 3115

SEQ ID NO: 16185 - protein, 377 aa, Escherichia coli; identical to SEQ ID NO: 3237

SEQ ID NO: 16186 - protein, 274 aa, Escherichia coli; identical to SEQ ID NO: 3160

SEQ ID NO: 16187 - protein, 387 aa, Escherichia coli; identical to SEQ ID NO: 11214

SEQ ID NO: 16188 - protein, 161 aa, Escherichia coli; identical to SEQ ID NO: 2582

SEQ ID NO: 16189 - protein, 591 aa, Escherichia coli; identical to SEQ ID NO: 3668

SEQ ID NO: 16190 - protein, 207 aa, Escherichia coli; identical to SEQ ID NO: 2211

SEQ ID NO: 16191 - protein, 107 aa, Escherichia coli; identical to SEQ ID NO: 6556

SEQ ID NO: 16192 - protein, 869 aa, Escherichia coli; identical to SEQ ID NO: 3166

SEQ ID NO: 16193 - protein, 203 aa, Escherichia coli; identical to SEQ ID NO: 2009

SEQ ID NO: 16194 - protein, 230 aa, Escherichia coli; identical to SEQ ID NO: 3348

SEQ ID NO: 16195 - protein, 250 aa, Escherichia coli; identical to SEQ ID NO: 3048

SEQ ID NO: 16196 - protein, 565 aa, Escherichia coli; identical to SEQ ID NO: 3091

SEQ ID NO: 16197 - protein, 408 aa, Escherichia coli; identical to SEQ ID NO: 7869

SEQ ID NO: 16198 - protein, 747 aa, Escherichia coli; identical to SEQ ID NO: 2072

SEQ ID NO: 16199 - protein, 365 aa, Escherichia coli; identical to SEQ ID NO: 3084

SEQ ID NO: 16200 - protein, 359 aa, Escherichia coli; identical to SEQ ID NO: 2328

SEQ ID NO: 16201 - protein, 878 aa, Escherichia coli; identical to SEQ ID NO: 10560

SEQ ID NO: 16202 - protein, 883 aa, Escherichia coli; identical to SEQ ID NO: 10579

SEQ ID NO: 16203 - protein, 825 aa, Escherichia coli; identical to SEQ ID NO: 10571

SEQ ID NO: 16204 - protein, 523 aa, Escherichia coli; identical to SEQ ID NO: 3879

SEQ ID NO: 16205 - protein, 243 aa, Escherichia coli; identical to SEQ ID NO: 2910

SEQ ID NO: 16206 - protein, 430 aa, Escherichia coli; identical to SEQ ID NO: 2617

SEQ ID NO: 16207 - protein, 721 aa, Escherichia coli; identical to SEQ ID NO: 6558

SEQ ID NO: 16208 - protein, 224 aa, Escherichia coli; identical to SEQ ID NO: 3165

SEQ ID NO: 16209 - protein, 213 aa, Escherichia coli; identical to SEQ ID NO: 2232

SEQ ID NO: 16210 - protein, 843 aa, Escherichia coli; identical to SEQ ID NO: 3163

SEQ ID NO: 16211 - protein, 231 aa, Escherichia coli; identical to SEQ ID NO: 3055

SEQ ID NO: 16212 - protein, 200 aa, Escherichia coli; identical to SEQ ID NO: 1784

SEQ ID NO: 16213 - protein, 781 aa, Escherichia coli
MAALGLKEGIAKSLQWTHNDECLKPGQLDGMEVENDLSQSALLLTVPQAYLEYTSSDWDPPSRWDDGIPGLIADYSLNAQTRHQEQGGEDSHDISGNGTVGANLGAWRFRADWQSDYQPTRSNDDDDDSSNSTTSKHWDWSRYYAWRALPSLKAKLSLGEDYLNSDIFDGFNYIGSSVSTDDQMLPPNLRGYAPDVSGVAHSSAKVTISQMGRVLYETQVPAGPFRIQDIGDSVSGTLHVRVEEQNGQVQEYDVTTASMPFLTRQGQVRYKVMMGRPEDWNHKTEGGFFSGGEASWGVADGWSLYGGALADKHYQSAAMGGGRDLAQFGALAFDVTHSHVNLDHDSAYGKGKLDGNSFRVSYAKDFDELNSRVTFAGYRFSEKNFMTMSEYLDANQSDMARTGNDKEMYTITYNQNFAAAGVSIYLNYSHRTYWDRPEQTNYNLMFSHYFNMGSIRNMSISVTGYRYEYDDNADKGMYLSMSIPWSDSSTVTYNGSYGSGSDSSQVGYFKRVDDATHYQVNVGTSEQHGSVDGYLSHDGSLAKVDLSANYHEGEYRSAGIALQGGATLTAHGGALHRTQNMGGTRLLIDADGIANVPVESNGAPVYTNMFGKAVVADINNYYRNQAYIDLNNLPEDAEATQSVVQATLTEGAIGYRKFKVISGQKAMAVLRLRDGSYPPFGAEVKNDEQQQVGIVDDEGNVYLAGVNAGEHMMVFWEGSAQCEIVLPKPLPADLFSGLLLPCEQKGTAAPDSSAPEIKPVIQDQTRQVTPTEAPTSISATQ

SEQ ID NO: 16214 - protein, 367 aa, Escherichia coli; identical to SEQ ID NO: 3105

SEQ ID NO: 16215 - protein, 230 aa, Escherichia coli; identical to SEQ ID NO: 10743

SEQ ID NO: 16216 - protein, 267 aa, Escherichia coli; identical to SEQ ID NO: 5971

SEQ ID NO: 16217 - protein, 353 aa, Escherichia coli; identical to SEQ ID NO: 10696

SEQ ID NO: 16218 - protein, 432 aa, Escherichia coli; identical to SEQ ID NO: 2026

SEQ ID NO: 16219 - protein, 191 aa, Escherichia coli; identical to SEQ ID NO: 6650

SEQ ID NO: 16220 - protein, 753 aa, Escherichia coli; identical to SEQ ID NO: 6655

SEQ ID NO: 16221 - protein, 242 aa, Escherichia coli; identical to SEQ ID NO: 10693

SEQ ID NO: 16222 - protein, 241 aa, Escherichia coli
MSNKNVNVRKSQEITFCLLAGILMFMAMMVAGRAEAGVALGATRVIYPAGQKQVQLAVTNNDENSTYLIQSWVENADGVKDGRFIVTPPLFAMKGKKENTLRILDATNNQLPQDRESLFWMNVKAIPSMDKSKLTENTLQLAIISRIKLYYRPAKLALSPDQAAEKLRFRRSANSLTLINPTPYYLTVTELNAGTRVLENALVPPMGESAVKLPSDAGSNITYRTINDYGALTPKMTGVME

SEQ ID NO: 16223 - protein, 122 aa, Escherichia coli; identical to SEQ ID NO: 2915

SEQ ID NO: 16224 - protein, 111 aa, Escherichia coli; identical to SEQ ID NO: 3419

SEQ ID NO: 16225 - protein, 431 aa, Escherichia coli; identical to SEQ ID NO: 3408

SEQ ID NO: 16226 - protein, 119 aa, Escherichia coli; identical to SEQ ID NO: 5512

SEQ ID NO: 16227 - protein, 250 aa, Escherichia coli; identical to SEQ ID NO: 10640

SEQ ID NO: 16228 - protein, 614 aa, Escherichia coli; identical to SEQ ID NO: 14470

SEQ ID NO: 16229 - protein, 554 aa, Escherichia coli; identical to SEQ ID NO: 6649

SEQ ID NO: 16230 - protein, 250 aa, Escherichia coli; identical to SEQ ID NO: 9497

SEQ ID NO: 16231 - protein, 204 aa, Escherichia coli; identical to SEQ ID NO: 2957

SEQ ID NO: 16232 - protein, 784 aa, Escherichia coli; identical to SEQ ID NO: 2242

SEQ ID NO: 16233 - protein, 713 aa, Escherichia coli; identical to SEQ ID NO: 10689

SEQ ID NO: 16234 - protein, 446 aa, Escherichia coli; identical to SEQ ID NO: 2189

SEQ ID NO: 16235 - protein, 222 aa, Escherichia coli; identical to SEQ ID NO: 1956

SEQ ID NO: 16236 - protein, 386 aa, Escherichia coli; identical to SEQ ID NO: 5575

SEQ ID NO: 16237 - protein, 208 aa, Escherichia coli; identical to SEQ ID NO: 10749

SEQ ID NO: 16238 - protein, 760 aa, Escherichia coli; identical to SEQ ID NO: 10632

SEQ ID NO: 16239 - protein, 771 aa, Escherichia coli; identical to SEQ ID NO: 10700

SEQ ID NO: 16240 - protein, 654 aa, Escherichia coli; identical to SEQ ID NO: 5571

SEQ ID NO: 16241 - protein, 673 aa, Escherichia coli; identical to SEQ ID NO: 2919

SEQ ID NO: 16242 - protein, 1024 aa, Escherichia coli; identical to SEQ ID NO: 10694

SEQ ID NO: 16243 - protein, 505 aa, Escherichia coli; identical to SEQ ID NO: 10600

SEQ ID NO: 16244 - protein, 360 aa, Escherichia coli; identical to SEQ ID NO: 3862

SEQ ID NO: 16245 - protein, 213 aa, Escherichia coli; identical to SEQ ID NO: 2232

SEQ ID NO: 16246 - protein, 721 aa, Escherichia coli; identical to SEQ ID NO: 4575

SEQ ID NO: 16247 - protein, 360 aa, Escherichia coli
MMKKYLALALIAPLLISCSTTKKGDTYNEAWVKDTNGFDILMGQFAHNIENIWGFKKVVIAGPKDYVKYTDQYQTRSHINFDDGTITIETIAGTEPAAHLRRAIIKTLLMGDDPSSVDLYSDVDDITISKEPFLYGQVVDNTGQPIRWEGRASNFADYLLKNRLKSRSNGLRIIYSVTINMVPNHLDKRAHKYLGMVRQASRKYGVDESLILAIMQTESSFNPYAVSRSDALGLMQVVQHTAGKDVFRSQGKSGTPSRSFLFDPASNIDTGTAYLAMLNNVYLGGIDNPTSRRYAVITAYNGGAGSVLRVFSNDKIQAANIINTMTPGDVYQTLTTRHPSAESRRYLYKVNTAQKSYRRR

SEQ ID NO: 16248 - protein, 274 aa, Escherichia coli; identical to SEQ ID NO: 2313

SEQ ID NO: 16249 - protein, 725 aa, Escherichia coli; identical to SEQ ID NO: 10741

SEQ ID NO: 16250 - protein, 518 aa, Escherichia coli; identical to SEQ ID NO: 2350

SEQ ID NO: 16251 - protein, 362 aa, Escherichia coli; identical to SEQ ID NO: 4554

SEQ ID NO: 16252 - protein, 517 aa, Escherichia coli; identical to SEQ ID NO: 2462

SEQ ID NO: 16253 - protein, 578 aa, Escherichia coli; identical to SEQ ID NO: 10601

SEQ ID NO: 16254 - protein, 719 aa, Escherichia coli; identical to SEQ ID NO: 4573

SEQ ID NO: 16255 - protein, 541 aa, Escherichia coli; identical to SEQ ID NO: 4576

SEQ ID NO: 16256 - protein, 224 aa, Escherichia coli; identical to SEQ ID NO: 10746

SEQ ID NO: 16257 - protein, 244 aa, Escherichia coli; identical to SEQ ID NO: 10740

SEQ ID NO: 16258 - protein, 367 aa, Escherichia coli; identical to SEQ ID NO: 10627

SEQ ID NO: 16259 - protein, 192 aa, Escherichia coli; identical to SEQ ID NO: 6643

SEQ ID NO: 16260 - protein, 331 aa, Escherichia coli; identical to SEQ ID NO: 2713

SEQ ID NO: 16261 - protein, 656 aa, Escherichia coli; identical to SEQ ID NO: 10750

SEQ ID NO: 16262 - protein, 231 aa, Escherichia coli; identical to SEQ ID NO: 10692

SEQ ID NO: 16263 - protein, 478 aa, Escherichia coli; identical to SEQ ID NO: 2405

SEQ ID NO: 16264 - protein, 728 aa, Escherichia coli; identical to SEQ ID NO: 10661

SEQ ID NO: 16265 - protein, 224 aa, Escherichia coli; identical to SEQ ID NO: 3792

SEQ ID NO: 16266 - protein, 700 aa, Escherichia coli; identical to SEQ ID NO: 10597

SEQ ID NO: 16267 - protein, 169 aa, Escherichia coli; identical to SEQ ID NO: 3373

SEQ ID NO: 16268 - protein, 681 aa, Escherichia coli; identical to SEQ ID NO: 6654

SEQ ID NO: 16269 - protein, 103 aa, Escherichia coli; identical to SEQ ID NO: 10639

SEQ ID NO: 16270 - protein, 192 aa, Escherichia coli; identical to SEQ ID NO: 10630

SEQ ID NO: 16271 - protein, 629 aa, Escherichia coli; identical to SEQ ID NO: 10725

SEQ ID NO: 16272 - protein, 241 aa, Escherichia coli; identical to SEQ ID NO: 12195

SEQ ID NO: 16273 - protein, 721 aa, Escherichia coli; identical to SEQ ID NO: 9824

SEQ ID NO: 16274 - protein, 243 aa, Escherichia coli; identical to SEQ ID NO: 3483

SEQ ID NO: 16275 - protein, 230 aa, Escherichia coli; identical to SEQ ID NO: 3348

SEQ ID NO: 16276 - protein, 119 aa, Escherichia coli; identical to SEQ ID NO: 2526

SEQ ID NO: 16277 - protein, 226 aa, Escherichia coli; identical to SEQ ID NO: 3085

SEQ ID NO: 16278 - protein, 118 aa, Escherichia coli [sequence omitted]

SEQ ID NO: 16279 - protein, 662 aa, Escherichia coli; identical to SEQ ID NO: 8124

SEQ ID NO: 16280 - protein, 203 aa, Escherichia coli; identical to SEQ ID NO: 2009

SEQ ID NO: 16281 - protein, 659 aa, Escherichia coli
MRFFAGENGNSTTGDAIYMRGADTSNSIYIDGIRDIGSVSRDTFNTEQVEVIKGPSGTDYGRSAPTGSINMISKQPRNDSGIDASASIGSAWFRRGTLDVNQVIGDTTAVRLNVMGEKTHDAGRDKVKNERYGVAPSIAFGLGTANRLYLNYLHVTQHNTPDGGIPTIGLPGYSAPSAGTAALNHSGKVDTHNFYGTDSDYDDSTTDTATMRFEHDINDNTTIRNTTRWSRVKQDYLMTAIMGGASNITQPTSDVNSWTWSRTANTKDVSNKILTNQTNLTSTFYTGSIGHDVSTGVEFTRETQTNYGVNPVTLPAVNIYHPDSSIHPGGLTRNGANANGQTDTFAIYAFDTLQITRDFELNGGIRLDNYHTEYDSATACGGSGRGAITCPAGVAKGSPVTTVDTAKSGNLVNWKAGALYHLTENGNVYINYAVSQQPPGGNNFALAQSGSGNSANRTDFKPQKANTSEIGTKWQVLDKRLLLTAALFRTDIENEVEQNDDGTYSQYGKKRVEGYEISVAGNITPAWQVIGGYTQQKATIKNGKDVAQDGSSSLPYTPEHAFTLWSQYQATDDISVGAGARYIGSMHKGSDGAVGTPAFTEGYWVADAKLGYRVNRNLDFQLNVYNLFDTDYVASINKSGYRYHPGEPRTFLLTANMHF

SEQ ID NO: 16282 - protein, 258 aa, Escherichia coli
MNKRSAVTKFFTNRVTKVLGMTLALMMASQSAMASLAADQTRYVFRGDKDALTITVTNNDKTHTFGGQAWVDNIVEKDTRPTFVVTPSFFKVKPNGQQTLRIIMASDHLPKDKESVYWLNLQDIPPALEGSGLAIALRTKLKLFYRPKALLEGRKGAEEGISLQSRPDGRTMLVNTTPYIYAIGGLLDANGKKITTDSETTQKLLMFMPGDEVQVKGNVVKVESLDDYGDLKTWTINQKKSTAGTNVDENVQPQKSAA

SEQ ID NO: 16283 - protein, 351 aa, Escherichia coli; identical to SEQ ID NO: 2872

SEQ ID NO: 16284 - protein, 203 aa, Escherichia coli; identical to SEQ ID NO: 2201

SEQ ID NO: 16285 - protein, 170 aa, Escherichia coli [sequence omitted]

SEQ ID NO: 16286 - protein, 826 aa, Escherichia coli; identical to SEQ ID NO: 7491

SEQ ID NO: 16287 - protein, 367 aa, Escherichia coli; identical to SEQ ID NO: 4285

SEQ ID NO: 16288 - protein, 386 aa, Escherichia coli; identical to SEQ ID NO: 3094

SEQ ID NO: 16289 - protein, 361 aa, Escherichia coli; identical to SEQ ID NO: 3061

SEQ ID NO: 16290 - protein, 241 aa, Escherichia coli; identical to SEQ ID NO: 2922

SEQ ID NO: 16291 - protein, 851 aa, Escherichia coli; identical to SEQ ID NO: 6877

SEQ ID NO: 16292 - protein, 866 aa, Escherichia coli; identical to SEQ ID NO: 8338

SEQ ID NO: 16293 - protein, 472 aa, Escherichia coli; identical to SEQ ID NO: 7769

SEQ ID NO: 16294 - protein, 512 aa, Escherichia coli; identical to SEQ ID NO: 2974

SEQ ID NO: 16295 - protein, 274 aa, Escherichia coli; identical to SEQ ID NO: 3471

SEQ ID NO: 16296 - protein, 539 aa, Escherichia coli; identical to SEQ ID NO: 3050

SEQ ID NO: 16297 - protein, 747 aa, Escherichia coli; identical to SEQ ID NO: 2072

SEQ ID NO: 16298 - protein, 213 aa, Escherichia coli; identical to SEQ ID NO: 2232

SEQ ID NO: 16299 - protein, 838 aa, Escherichia coli; identical to SEQ ID NO: 8135

SEQ ID NO: 16300 - protein, 72 aa, Escherichia coli; identical to SEQ ID NO: 2162

SEQ ID NO: 16301 - protein, 331 aa, Escherichia coli; identical to SEQ ID NO: 11403

SEQ ID NO: 16302 - protein, 432 aa, Escherichia coli; identical to SEQ ID NO: 2026

SEQ ID NO: 16303 - protein, 784 aa, Escherichia coli; identical to SEQ ID NO: 2244

SEQ ID NO: 16304 - protein, 659 aa, Escherichia coli; identical to SEQ ID NO: 8368

SEQ ID NO: 16305 - protein, 614 aa, Escherichia coli; identical to SEQ ID NO: 1884

SEQ ID NO: 16306 - protein, 162 aa, Escherichia coli; identical to SEQ ID NO: 1973

SEQ ID NO: 16307 - protein, 161 aa, Escherichia coli; identical to SEQ ID NO: 2582

SEQ ID NO: 16308 - protein, 565 aa, Escherichia coli; identical to SEQ ID NO: 2678

SEQ ID NO: 16309 - protein, 700 aa, Escherichia coli; identical to SEQ ID NO: 8081

SEQ ID NO: 16310 - protein, 871 aa, Escherichia coli; identical to SEQ ID NO: 11588

SEQ ID NO: 16311 - protein, 236 aa, Escherichia coli; identical to SEQ ID NO: 3482

SEQ ID NO: 16312 - protein, 843 aa, Escherichia coli; identical to SEQ ID NO: 3163

SEQ ID NO: 16313 - protein, 228 aa, Escherichia coli; identical to SEQ ID NO: 11258

SEQ ID NO: 16314 - protein, 121 aa, Escherichia coli; identical to SEQ ID NO: 2523

SEQ ID NO: 16315 - protein, 266 aa, Escherichia coli; identical to SEQ ID NO: 1894

SEQ ID NO: 16316 - protein, 208 aa, Escherichia coli; identical to SEQ ID NO: 1949

SEQ ID NO: 16317 - protein, 368 aa, Escherichia coli; identical to SEQ ID NO: 3872

SEQ ID NO: 16318 - protein, 863 aa, Escherichia coli; identical to SEQ ID NO: 11340

SEQ ID NO: 16319 - protein, 230 aa, Escherichia coli; identical to SEQ ID NO: 3019

SEQ ID NO: 16320 - protein, 820 aa, Escherichia coli; identical to SEQ ID NO: 8131

SEQ ID NO: 16321 - protein, 446 aa, Escherichia coli; identical to SEQ ID NO: 5547

SEQ ID NO: 16322 - protein, 193 aa, Escherichia coli; identical to SEQ ID NO: 2246

SEQ ID NO: 16323 - protein, 250 aa, Escherichia coli; identical to SEQ ID NO: 3048

SEQ ID NO: 16324 - protein, 880 aa, Escherichia coli; identical to SEQ ID NO: 3110

SEQ ID NO: 16325 - protein, 365 aa, Escherichia coli; identical to SEQ ID NO: 3878

SEQ ID NO: 16326 - protein, 729 aa, Escherichia coli; identical to SEQ ID NO: 2948

SEQ ID NO: 16327 - protein, 359 aa, Escherichia coli; identical to SEQ ID NO: 2328

SEQ ID NO: 16328 - protein, 111 aa, Escherichia coli; identical to SEQ ID NO: 7471

SEQ ID NO: 16329 - protein, 430 aa, Escherichia coli; identical to SEQ ID NO: 2617

SEQ ID NO: 16330 - protein, 207 aa, Escherichia coli; identical to SEQ ID NO: 2211

SEQ ID NO: 16331 - protein, 353 aa, Escherichia coli; identical to SEQ ID NO: 10905

SEQ ID NO: 16332 - protein, 249 aa, Escherichia coli; identical to SEQ ID NO: 3492

SEQ ID NO: 16333 - protein, 641 aa, Escherichia coli; identical to SEQ ID NO: 3774

SEQ ID NO: 16334 - protein, 224 aa, Escherichia coli; identical to SEQ ID NO: 3165

SEQ ID NO: 16335 - protein, 200 aa, Escherichia coli; identical to SEQ ID NO: 1784

SEQ ID NO: 16336 - protein, 232 aa, Escherichia coli; identical to SEQ ID NO: 2087

SEQ ID NO: 16337 - protein, 224 aa, Escherichia coli; identical to SEQ ID NO: 3115

SEQ ID NO: 16338 - protein, 787 aa, Escherichia coli
MAALESGASYAGEKLDMSFIQGGAGTNPDVWAALNSNYAPGRYLVELSLNGKILGKHILDVTPEDSNELCLTEEWLTKAGVYISTDYFREGYDATRKCYALSKAQAVKVDFDVSTQSLVLTIPQKGLVKVPENVDWDYGTSAFRVNYSANANTGRHNTSAFGSADLKANIGHWVVSSSATASTGDSGDNNASINMFTATRAIRSLSADLAVGKTSTGDSLLGSTGTYGISLSRNNSMKPGNLGYSPVFSGIANGPSRVTLIQNGRILHSEMVPAGPFSITDVQLYTSGDVTMKITGEDGREQTQVFPLSVVNGQLNPGQHEFNIAAGLPDDDSHLKGGVFAASYGYGLNNLTLRAGGVFNHDWLGGSAGVVAGLSYLGAVSVDGAYATAKYRDGNHAGNKVQVAWNKQLEITNTGLRVSWAHQSEEYEDMSSFDPSKLWGEENHGRHTKDEWNMGISQPVGGLFNLSVSGWQRSYYPISGAGYSSLYSDGKDTGLTGTLSTQIKGVSLNFGVSGSRNSQGNDNWSASASVSVPFTLFDRRYSSSTSVSTSKSGGVAFSTGVSGSLNDRFSYGLGGGRDGDGGASGYFNASYSGDRAYLSGALNYSQSGGTSGSVSASGSVLAVPAARDIMFSRTSADTVAVVNVKNTPGVKVMSGNGETDKDGNLVVPLNSYDWNTVTVDAGTLPLDTELGNTSQKVVPTDKAVVWMPFDALKVHRYLLQVKQRNGEFVPGGTWARDSKKTPLGFVANNGVLMINAVDAPGDITLGQCRIPATKLRDTEKLQEITCE

SEQ ID NO: 16339 - protein, 478 aa, Escherichia coli; identical to SEQ ID NO: 7448

SEQ ID NO: 16340 - protein, 746 aa, Escherichia coli; identical to SEQ ID NO: 11087

SEQ ID NO: 16341 - protein, 231 aa, Escherichia coli; identical to SEQ ID NO: 3055

SEQ ID NO: 16342 - protein, 834 aa, Escherichia coli; identical to SEQ ID NO: 3095

SEQ ID NO: 16343 - protein, 686 aa, Escherichia coli; identical to SEQ ID NO: 3129

SEQ ID NO: 16344 - protein, 866 aa, Escherichia coli; identical to SEQ ID NO: 3025

SEQ ID NO: 16345 - protein, 161 aa, Escherichia coli; identical to SEQ ID NO: 2582

SEQ ID NO: 16346 - protein, 237 aa, Escherichia coli; identical to SEQ ID NO: 3022

SEQ ID NO: 16347 - protein, 883 aa, Escherichia coli; identical to SEQ ID NO: 4713

SEQ ID NO: 16348 - protein, 869 aa, Escherichia coli; identical to SEQ ID NO: 3012

SEQ ID NO: 16349 - protein, 834 aa, Escherichia coli; identical to SEQ ID NO: 3207

SEQ ID NO: 16350 - protein, 838 aa, Escherichia coli; identical to SEQ ID NO: 3041

SEQ ID NO: 16351 - protein, 266 aa, Escherichia coli; identical to SEQ ID NO: 1894

SEQ ID NO: 16352 - protein, 866 aa, Escherichia coli; identical to SEQ ID NO: 4866

SEQ ID NO: 16353 - protein, 880 aa, Escherichia coli; identical to SEQ ID NO: 3008

SEQ ID NO: 16354 - protein, 207 aa, Escherichia coli; identical to SEQ ID NO: 2211

SEQ ID NO: 16355 - protein, 826 aa, Escherichia coli; identical to SEQ ID NO: 3256

SEQ ID NO: 16356 - protein, 843 aa, Escherichia coli; identical to SEQ ID NO: 3042

SEQ ID NO: 16357 - protein, 794 aa, Escherichia coli; identical to SEQ ID NO: 4850

SEQ ID NO: 16358 - protein, 360 aa, Escherichia coli; identical to SEQ ID NO: 3032

SEQ ID NO: 16359 - protein, 331 aa, Escherichia coli; identical to SEQ ID NO: 2700

SEQ ID NO: 16360 - protein, 760 aa, Escherichia coli; identical to SEQ ID NO: 3026

SEQ ID NO: 16361 - protein, 246 aa, Escherichia coli; identical to SEQ ID NO: 3021

SEQ ID NO: 16362 - protein, 747 aa, Escherichia coli; identical to SEQ ID NO: 2072

SEQ ID NO: 16363 - protein, 696 aa, Escherichia coli; identical to SEQ ID NO: 3314

SEQ ID NO: 16364 - protein, 432 aa, Escherichia coli; identical to SEQ ID NO: 2026

SEQ ID NO: 16365 - protein, 232 aa, Escherichia coli; identical to SEQ ID NO: 2087

SEQ ID NO: 16366 - protein, 213 aa, Escherichia coli; identical to SEQ ID NO: 2232

SEQ ID NO: 16367 - protein, 565 aa, Escherichia coli; identical to SEQ ID NO: 2669

SEQ ID NO: 16368 - protein, 193 aa, Escherichia coli; identical to SEQ ID NO: 2246

SEQ ID NO: 16369 - protein, 351 aa, Escherichia coli; identical to SEQ ID NO: 3010

SEQ ID NO: 16370 - protein, 539 aa, Escherichia coli; identical to SEQ ID NO: 3050

SEQ ID NO: 16371 - protein, 686 aa, Escherichia coli; identical to SEQ ID NO: 3015

SEQ ID NO: 16372 - protein, 203 aa, Escherichia coli; identical to SEQ ID NO: 2201

SEQ ID NO: 16373 - protein, 362 aa, Escherichia coli; identical to SEQ ID NO: 2434

SEQ ID NO: 16374 - protein, 229 aa, Escherichia coli; identical to SEQ ID NO: 3277

SEQ ID NO: 16375 - protein, 231 aa, Escherichia coli; identical to SEQ ID NO: 3055

SEQ ID NO: 16376 - protein, 402 aa, Escherichia coli; identical to SEQ ID NO: 4768

SEQ ID NO: 16377 - protein, 118 aa, Escherichia coli [sequence omitted]

SEQ ID NO: 16378 - protein, 673 aa, Escherichia coli; identical to SEQ ID NO: 3295

SEQ ID NO: 16379 - protein, 614 aa, Escherichia coli; identical to SEQ ID NO: 3301

SEQ ID NO: 16380 - protein, 663 aa, Escherichia coli; identical to SEQ ID NO: 1910

SEQ ID NO: 16381 - protein, 162 aa, Escherichia coli; identical to SEQ ID NO: 1965

SEQ ID NO: 16382 - protein, 518 aa, Escherichia coli; identical to SEQ ID NO: 2349

SEQ ID NO: 16383 - protein, 224 aa, Escherichia coli; identical to SEQ ID NO: 3035

SEQ ID NO: 16384 - protein, 774 aa, Escherichia coli; identical to SEQ ID NO: 3018

SEQ ID NO: 16385 - protein, 230 aa, Escherichia coli; identical to SEQ ID NO: 3019

SEQ ID NO: 16386 - protein, 274 aa, Escherichia coli; identical to SEQ ID NO: 2303

SEQ ID NO: 16387 - protein, 430 aa, Escherichia coli; identical to SEQ ID NO: 2617

SEQ ID NO: 16388 - protein, 209 aa, Escherichia coli; identical to SEQ ID NO: 4977

SEQ ID NO: 16389 - protein, 784 aa, Escherichia coli; identical to SEQ ID NO: 2244

SEQ ID NO: 16390 - protein, 249 aa, Escherichia coli; identical to SEQ ID NO: 3028

SEQ ID NO: 16391 - protein, 446 aa, Escherichia coli; identical to SEQ ID NO: 2179

SEQ ID NO: 16392 - protein, 746 aa, Escherichia coli; identical to SEQ ID NO: 3031

SEQ ID NO: 16393 - protein, 243 aa, Escherichia coli; identical to SEQ ID NO: 2910

SEQ ID NO: 16394 - protein, 359 aa, Escherichia coli; identical to SEQ ID NO: 2328

SEQ ID NO: 16395 - protein, 250 aa, Escherichia coli; identical to SEQ ID NO: 3048

SEQ ID NO: 16396 - protein, 828 aa, Escherichia coli; identical to SEQ ID NO: 2380

SEQ ID NO: 16397 - protein, 200 aa, Escherichia coli; identical to SEQ ID NO: 1784

SEQ ID NO: 16398 - protein, 89 aa, Escherichia coli; identical to SEQ ID NO: 2810

SEQ ID NO: 16399 - protein, 678 aa, Escherichia coli; identical to SEQ ID NO: 3014

SEQ ID NO: 16400 - protein, 233 aa, Escherichia coli; identical to SEQ ID NO: 3276

SEQ ID NO: 16401 - protein, 191 aa, Escherichia coli; identical to SEQ ID NO: 2727

SEQ ID NO: 16402 - protein, 729 aa, Escherichia coli; identical to SEQ ID NO: 3052

SEQ ID NO: 16403 - protein, 208 aa, Escherichia coli; identical to SEQ ID NO: 1949

SEQ ID NO: 16404 - protein, 478 aa, Escherichia coli; identical to SEQ ID NO: 2404

SEQ ID NO: 16405 - protein, 228 aa, Escherichia coli; identical to SEQ ID NO: 3034

SEQ ID NO: 16406 - protein, 700 aa, Escherichia coli; identical to SEQ ID NO: 3047

SEQ ID NO: 16407 - protein, 732 aa, Escherichia coli; identical to SEQ ID NO: 4926

SEQ ID NO: 16408 - protein, 102 aa, Escherichia coli; identical to SEQ ID NO: 1824

SEQ ID NO: 16409 - protein, 203 aa, Escherichia coli; identical to SEQ ID NO: 2009

SEQ ID NO: 16410 - protein, 236 aa, Escherichia coli; identical to SEQ ID NO: 3286

SEQ ID NO: 16411 - protein, 367 aa, Escherichia coli; identical to SEQ ID NO: 3016

SEQ ID NO: 16412 - protein, 161 aa, Escherichia coli; identical to SEQ ID NO: 2582

SEQ ID NO: 16413 - protein, 207 aa, Escherichia coli; identical to SEQ ID NO: 2212

SEQ ID NO: 16414 - protein, 853 aa, Escherichia coli
MSWMVVSRTYTSFFPFSLSVLALTVAGSFSATAGKFNPRFLEDTAGINQHVDLSMYETDHGAQLPGTYRVSLIVNEQKMETRTLEFKAATESQRKEMGEFLIPCLSRTQLADMGVRVDSFSALNLIPAEACVAFNEIIPQATSHFDFSEQKLVMSFPQAAMQQVARGTVPESRWDDGVPALLLDYSFSGSNSSHDTKSYNRYIDENGNHHQDKNETSQTNDSYYLSMRSGLNLGAWRLRNYSNWSYSNGEKQWDNIGTYVTRAIVPLKAQLTLGDTATPSDIFDSVQMRGALLASDEEMLPDSQRGFAPVVRGIAKSNAEVSIEQNGYVIYRAFVQPGAFEINDLYPTANSGDLTVIVKEADGSEQRFIQPFSSVAVFQREGHLKYSLSAGEYRAGNYDSANPRFGQFNAMYGLPFGMTTYGGALISKDYNAFALGLGKNFGSIGAISVDITQAKSTLNNNATDQGQSYRFLYSKSFASGTDFRLLGYKYSTSGFYTFQEATDVRSGADSDYGRYHKRSEIQGNLTQQLGTYGSVYFNMTQQDYWNDDGKRLSLATGYNGRIGRVNYSIAYSWNKSPEWDENDQLWSFNISIPFGRAWSNYRVTTDQDGRTIQQLGVNGTLLEDRNLSYNVQEGYSSNGVGNSGNASLAYQGGAGNISVGYSYGKDYQQTNYSLRGGIVAHSEGISLSQPLGETIAIVSAPGARGAKVLNNSGVSVDWQGNAVVPYLSIYRENDVSIRSETLNDSVDMNSAFQTIVPTRGAVVRAHFDTRVGYRVLMTLIRQNGVSVPFGATATLVSDTTEQISGIVGEDGQLYISGMPKTGNVKIVWGKDTSQQCVAKYELPVEEKIPVLFP

SEQ ID NO: 16415 - protein, 266 aa, Escherichia coli; identical to SEQ ID NO: 5141

SEQ ID NO: 16416 - protein, 368 aa, Escherichia coli; identical to SEQ ID NO: 3872

SEQ ID NO: 16417 - protein, 866 aa, Escherichia coli
MYRTHRQHSLLSSGGVPSFIGGLVVFVSAAFNAQAETWFDPAFFKDDPSMVADLSRFEKGQKITPGVYRVDIVLNQTIVDTRNVNFVEITPEKGIAACLTTESLDAMGVNTDAFPAFKQLDKQACVPLAEIIPDASVTFNVNKLRLEISVPQIAIKSNARGYVPPERWDEGINALLLGYSFSGANSIHSSADSDSGDSYFLNLNSGVNLGPWRLRNNSTWSRSSGQTAEWKNLSSYLQRAVIPLKGELTVGDDYTAGDFFDSVSFRGVQLASDDNMLPDSLKGFAPVVRGIAKSNAQITIKQNGYTIYQTYVSPGAFEISDLYSTSSSGDLLVEIKEADGSVNSYSVPFSSVPLLQRQGRIKYAVTLAKYRTNSNEQQESKFAQATLQWGGPWGTTWYGGGQYAEYYRAAMFGLGFNLGDFGAISFDVTQAKSTLADQSEHKGQSYRFLYAKTLNQLGTNFQLMGYRYSTSGFYTLSDTMYKHMDGYEFNDGDDEDTPMWSRYYNLFYTKRGKLQVNISQQLGEYGSFYLSGSQQTYWHTDQQDRLLQFGYNTQIKDLSLGVSWNYSKSRGQPDADQVFALNFSLPLNLLLPRSNDSYTRKKNYAWMTSNTSIDNEGHITQNLGLTETLLDDGNLSYSVQQGYNSEGKTANGSASMDYKGAFADARVGYNYSDNGSQQQLNYALSGSLVAHSLGITLGQSLGETNVLIAAPGAENTRVANSTGLKTDWRGYTVVPYATSYRENRIALDAASLKRNVDLENAVVNVVPTKGALVLAEFNAHAGARVLMKTSKQGIPLRFGAIATLDGIQTNSGIIDDDGSLYMSGLPAQGAITVRWGEAPDQICHISYQLTEQQINSAITRMDAICR

SEQ ID NO: 16418 - protein, 826 aa, Escherichia coli; identical to SEQ ID NO: 3772

SEQ ID NO: 16419 - protein, 790 aa, Escherichia coli; identical to SEQ ID NO: 5114

SEQ ID NO: 16420 - protein, 207 aa, Escherichia coli; identical to SEQ ID NO: 2211

SEQ ID NO: 16421 - protein, 881 aa, Escherichia coli; identical to SEQ ID NO: 11528

SEQ ID NO: 16422 - protein, 266 aa, Escherichia coli; identical to SEQ ID NO: 1894

SEQ ID NO: 16423 - protein, 840 aa, Escherichia coli
MHLPLYHYRAHFSFSLLALTIASSLPAYGGKFNPKFLENVQGIDQHIDLSVYDSPVGQQIPGKYRVSVFVNEEKMASRTLDFSTASEAKRKASGESLMPCLSRVQLEEMGVRVDSFPALKMSPPEACVAFDEIIPQATSRFDFNTQTLHLSFPQAAMMMTARGTVDPSRWDEGIPALLLDYSFSGSNGRNEGTGSSSDSTSDSYYLNLRSGLNVGPWRLRNNSIWNRTDGKNQWDNVGTSLNRAIIPLKSQITLGDTATPGEIFDSVQMRGALLASDDEMLPDSQRGFAPVVRGIAKSNAEVSIEQNGYVIYRTFVQPGAFEINDLYATSGSGDLTVIIKEADGSEQRFIQPFSAVAIFQREGYLKYSLAAGEYRAGNYDSDKPHFGQFTAMYGLPWGMTAYGGALLSADYSALALGLGKNFGTIGAVSVDVTQAKSQLRNNEKEEGQSYRFLYSKSFEGGTDLRLLGYKYSTSGYYTFQEATDVRSDADSDYRRYHKRSQIQGNITQQLGDYGSVYFNMTQQDYWNVDGKENSLSAGYHGHIGRVNYSVAYTWTRSPEWEEDDRLWSFSVSIPLGGAWSSYRMTTDQNGKTSQQASVSGTLLEDRNLSYNVQQGYTSNGVGYSGSVNMGYMGGSGNIDVGYNYSKDNQQVNYGVRGGVIVHSEGITLSQPLGESLAIVSAPGARGGHVVNSSGVEVDWMGNAVVPYLTPYRETIVELRSDTLGQNVELQEAFQKVVPTRGAVVRSRFDTRVGYRVLMSLKQANGNAVPFGATAALIDESKPASSIVGEEGQLYISGMPEEGELQVSWGNEQAQRCRVPFRLPENKDNAAIVMVNAVCEK

SEQ ID NO: 16424 - protein, 826 aa, Escherichia coli; identical to SEQ ID NO: 5098

SEQ ID NO: 16425 - protein, 203 aa, Escherichia coli; identical to SEQ ID NO: 2201

SEQ ID NO: 16426 - protein, 193 aa, Escherichia coli; identical to SEQ ID NO: 2246

SEQ ID NO: 16427 - protein, 819 aa, Escherichia coli
MDTVNIYRLSFVSCLVVAMPCALAVEFNLNVLDKSMRDRIDISLLKEKGVIAPGEYFVSVAVNNNQISNGQKINWHKNDDKTIPCINDLLVDKFGLKPEVRQSLPLINQCVDFSSRPEMLFNFDQANQQLNITIPQAWLAWHSENWTPPSTWKEGVAGVLMDYNLFASSYRPQDGSSSTNLNAYGTAGINTGAWRLRSDYQLNQTDSDDNHEQSGEISRTYLFRPLPQLGSKLTLGETDFSSNIFDGFSYTGAALASDDRMLPWELRGYAPQISGIAQTNATVTISQSGRVIYQKKVPPGPFIIDDLNQSVQGTLDVKVTEEDGRVNNFQVSAASTPFLTRQGQVRYKLAAGQPRPSMSHQTENETFFSNEVSWGMLSNTSLYGGLLLSGDDYHSAAIGIGQNMLWLGALSFDVTWASSHFDTQQDERGLSYRFNYSKQVDATNSTISLAAYRFSDRHFHSYANYLDHKYNDSDAQDEKQTISLSVGQPITPLNLNLYANLLHQTWWNADASTTANITAGFNVDIGDWRDISISTSFNTTHYEDKDRDNQIYLSISLPFGNGGRVGYDMQNSSHSTTHRMSWNDTLDERNSWGMSAGLQSDRPDNGAQVSGNYQHLSSAGEWDISGTYAANDYSSVSSSWSGSFTATQYGAAFHRRSSTNEPRLMVSTDGVADIPVQGNLDYTNHFGIAVVPVISSYQPSTVAVNMNDLPDGVTVAENVIKETWIEGAIGYKSLASRSGKDVNVIIRNASGQFPPLGADIRQDDSGISVGMVGEKGHAWLSGVAENQKFTVVWGDSQHCSLHLPEHMEDTANRLILPCH

SEQ ID NO: 16428 - protein, 331 aa, Escherichia coli; identical to SEQ ID NO: 2700

SEQ ID NO: 16429 - protein, 361 aa, Escherichia coli; identical to SEQ ID NO: 3061

SEQ ID NO: 16430 - protein, 191 aa, Escherichia coli; identical to SEQ ID NO: 2727

SEQ ID NO: 16431 - protein, 834 aa, Escherichia coli; identical to SEQ ID NO: 3095

SEQ ID NO: 16432 - protein, 249 aa, Escherichia coli; identical to SEQ ID NO: 3492

SEQ ID NO: 16433 - protein, 232 aa, Escherichia coli; identical to SEQ ID NO: 2087

SEQ ID NO: 16434 - protein, 565 aa, Escherichia coli; identical to SEQ ID NO: 2678

SEQ ID NO: 16435 - protein, 700 aa, Escherichia coli; identical to SEQ ID NO: 3128

SEQ ID NO: 16436 - protein, 422 aa, Escherichia coli
MTVKISGVLKDGAGKPVPGCTIELKARRTTETVIVTTVAYGQPGETGSYSMDVEPGLYRVTLNTEGYAPSYVGDILVKADSAPGTLNKFLMDLEDAQYYPKALAELEAVAAEILKRAEASAASAEEAKKRAENARGPKGDKGDTGPQGIPGPKGDTGERGPKGERGEAGPQGVQGPRGETGPVGPQGEAGIQGPAGPAGPRGETGARGEKGEPGDPGGPPGPKGDTGPRGEPGPQGPAGPRGPAGERGPQGLQGVAGERGDTGPAGPQGIPGPPGPTGSVGPKGEKGEPGDRGPQGATGPRGPQGEKGDKGDPGPAGPAGERGPKGDTGPTGPAGKDGADSQANRVRISEKTEVTSSTVVFPSFYGGAQGENAAPDGAVILNIRTAPVSLTNGNLGAACVTAVTYGFLQVHDGSQWVTVEHE

SEQ ID NO: 16437 - protein, 102 aa, Escherichia coli
MKKVLALVVAAAMGLSSTAFAAETATTPAPTATTTKAAPAKTTHHKKQHKAAPAQKAQAAKKHHKNTKAEQKAPEQKAQAAKKHAGKHSHQQPAKPAAQPAA

SEQ ID NO: 16438 - protein, 613 aa, Escherichia coli; identical to SEQ ID NO: 5116

SEQ ID NO: 16439 - protein, 689 aa, Escherichia coli
MIHATDSVTTKDGETITVTADANTATEATDGYQPLSTSTATLTDMPMLDIPQVVNTVSDQVLENQNATTLDEALYNVSNVVQTNTLGGTQDAFVRRGFGANRDGSIMTNGLRTVLPRSFNAATERVEVLKGPASTLYGILDPGGLINVVTKRPEKTFHGSVSATSSSFGGGTGQLDITGPIEGTQLAYRLTGEVQDEDYWRNFGKERSTFIAPSLTWFGDNATVTMLYSHRDYKTPFDRGTIFDLTTKQPVNVDRKIRFDEPFNITDGQSDLAQLNAEYHLNSQWTARFDYSYSQDKYSDNQARVTAYDATTGTLTRRVDATQGSTQRMHATRADLQGNVDIAGFYNEILGGVSYEYYDLLRTDMIRCKKAKDFNIYNPVYGNTSKCTTVSASDSDQTIKQESYSAYAQDALYLTDNWIAVAGIRYQYYTQYAGKGRPFNVNTDSRDEQWTPKLGLVYKLTPSVSLFANYSQTFMPQSSIASYIGDLPPESSNAYEVGAKFELFDGITADIALFDIHKRNVLYTESVGDETIAKTAGRVRSRGVEVDLAGALTENINIIASYGYTDAKVLEDPDYAGKPLPNVPRHTGSLFLTYDIHNMPGNNTLTFGGGGHGVSRRSATNGADYYLPGYFVADAFAAYKMKLQYPVTLQLNVKNLFDKTYYTSSIATNNLGNQIGDPREVQFTVKMEF

SEQ ID NO: 16440 - protein, 386 aa, Escherichia coli; identical to SEQ ID NO: 5143

SEQ ID NO: 16441 - protein, 307 aa, Escherichia coli
MVNTVASENPDEAGRYSMDVEYGQYSVILLVEGFPPSHAGTITVYEDSQPGTLNDFLGAMSEDDVRPEALRRFELMVEEVARHAEEAKKNAGEAETSARNAGISASQAEESAANADTSAGEASESARQAAESAASAKQSEDASSSSASAAAQKASESSQSAAEAELSRKTAESAAGNAARDATTATEKARESAESAQSAEQSRIAAEEAVNRIPTVVGPPGPKGEPGPAGPQGPKGDKGERGDTGPAGATGERGPAGDAGPAGPQGPKGDRGERGETGLTGNAGPQGPKGDTGAAGPAGPQGPKGET

SEQ ID NO: 16442 - protein, 746 aa, Escherichia coli; identical to SEQ ID NO: 5132

SEQ ID NO: 16443 - protein, 118 aa, Escherichia coli [sequence omitted]

SEQ ID NO: 16444 - protein, 208 aa, Escherichia coli; identical to SEQ ID NO: 1949

SEQ ID NO: 16445 - protein, 351 aa, Escherichia coli; identical to SEQ ID NO: 2519

SEQ ID NO: 16446 - protein, 218 aa, Escherichia coli
MFMAMMVAGRAEAGVALGATRVIYPAGQKQVQLAVTNNDENSTYLIQSWVENADGVKDGRFIVTPPLFAMKGKRENTLRILDATNNQLPQDRESLFWMNVKAIPSMDKSKLTENTLQLAIISRIKLYYRPAKLALPPDQAAEKLRFRRSANSLTLINPTPYYLTVTELNAGTRVLENALVPPMGESTVKFPSDAGSNITYRTINDYGALTPKMTGVME

SEQ ID NO: 16447 - protein, 430 aa, Escherichia coli; identical to SEQ ID NO: 2617

SEQ ID NO: 16448 - protein, 236 aa, Escherichia coli; identical to SEQ ID NO: 3482

SEQ ID NO: 16449 - protein, 551 aa, Escherichia coli; identical to SEQ ID NO: 2447

SEQ ID NO: 16450 - protein, 191 aa, Escherichia coli; identical to SEQ ID NO: 2727

SEQ ID NO: 16451 - protein, 518 aa, Escherichia coli; identical to SEQ ID NO: 2350

SEQ ID NO: 16452 - protein, 360 aa, Escherichia coli; identical to SEQ ID NO: 3354

SEQ ID NO: 16453 - protein, 355 aa, Escherichia coli; identical to SEQ ID NO: 5115

SEQ ID NO: 16454 - protein, 208 aa, Escherichia coli; identical to SEQ ID NO: 1948

SEQ ID NO: 16455 - protein, 828 aa, Escherichia coli; identical to SEQ ID NO: 2378

SEQ ID NO: 16456 - protein, 371 aa, Escherichia coli; identical to SEQ ID NO: 5126

SEQ ID NO: 16457 - protein, 856 aa, Escherichia coli; identical to SEQ ID NO: 3366

SEQ ID NO: 16458 - protein, 250 aa, Escherichia coli; identical to SEQ ID NO: 3048

SEQ ID NO: 16459 - protein, 170 aa, Escherichia coli [sequence omitted]

SEQ ID NO: 16460 - protein, 222 aa, Escherichia coli; identical to SEQ ID NO: 7372

SEQ ID NO: 16461 - protein, 869 aa, Escherichia coli; identical to SEQ ID NO: 3166

SEQ ID NO: 16462 - protein, 866 aa, Escherichia coli; identical to SEQ ID NO: 3688

SEQ ID NO: 16463 - protein, 230 aa, Escherichia coli; identical to SEQ ID NO: 3348

SEQ ID NO: 16464 - protein, 746 aa, Escherichia coli
MNKKIHSLALLVNLGIYGVAQAQEPTDTPVSHDDTIVVTAAEQNLQAPGVSTITADEIRKNPVARDVSEIIRTMPGVNLTGNSTSGQRGNNRQIDIRGMGPENTLILIDGKPVSSRNSVRQGWRGERDTRGDTSWVPPEMIERIEVLRGPAAARYGNGAAGGVVNIITKKGSGEWHGSWDAYFNAPEHKEEGATKRTNFSLTGPLGDEFSFRLYGNLDKTQADAWDINLGHQSARAGTYATTLPAGREGVINKDINGVVRWDFAPLQSLELEAGYSRQGNLYAGDTQNTNSDAYTRSKYGDETNRLYRQNYSLTWNGGWDNGVTTSNWVQYEHTRNSRIPEGLAGGTEGKFNEKATQDFVDIDLDDVMLHSEVNLPLDFLVNQTLTLGTEWNQQRMKDLSSNTQALTGTNTGGAIDGVSATDRSPYSKAEIFSLFAENNMELTDSTIVTPGLRFDHHSIVGNNWSPALNISQGLGDDFTLKMGIARAYKAPSLYQTNPNYILYSKGQGCYASAGGCYLQGNDDLKAETSINKEIGLEFKRDGWLAGVTWFRNDYRNKIEAGYVAVGQNAVGTDLYQWDNVPKAVVEGLEGSLNVPVSETVMWTNNITYMLKSENKTTGDRLSIIPEYTLNSTLSWQAREDLSMQTTFTWYGKQQPKKYNYKGQPAVGPETKEISPYSIVGLSATWDVTKNVSLTGGVDNLFDKRLWRAGNAQTTGDLAGANYIAGAGAYTYNEPGRTWYMSVNTHF

SEQ ID NO: 16465 - protein, 432 aa, Escherichia coli; identical to SEQ ID NO: 2026

SEQ ID NO: 16466 - protein, 539 aa, Escherichia coli; identical to SEQ ID NO: 3050

SEQ ID NO: 16467 - protein, 224 aa, Escherichia coli; identical to SEQ ID NO: 3035

SEQ ID NO: 16468 - protein, 162 aa, Escherichia coli; identical to SEQ ID NO: 1965

SEQ ID NO: 16469 - protein, 203 aa, Escherichia coli; identical to SEQ ID NO: 2007

SEQ ID NO: 16470 - protein, 660 aa, Escherichia coli; identical to SEQ ID NO: 8805

SEQ ID NO: 16471 - protein, 162 aa, Escherichia coli; identical to SEQ ID NO: 1965

SEQ ID NO: 16472 - protein, 879 aa, Escherichia coli; identical to SEQ ID NO: 5138

SEQ ID NO: 16473 - protein, 192 aa, Escherichia coli; identical to SEQ ID NO: 4587

SEQ ID NO: 16474 - protein, 368 aa, Escherichia coli; identical to SEQ ID NO: 5102

SEQ ID NO: 16475 - protein, 806 aa, Escherichia coli; identical to SEQ ID NO: 14023

SEQ ID NO: 16476 - protein, 856 aa, Escherichia coli; identical to SEQ ID NO: 5125

SEQ ID NO: 16477 - protein, 274 aa, Escherichia coli; identical to SEQ ID NO: 3471

SEQ ID NO: 16478 - protein, 161 aa, Escherichia coli; identical to SEQ ID NO: 2582

SEQ ID NO: 16479 - protein, 365 aa, Escherichia coli; identical to SEQ ID NO: 3878

SEQ ID NO: 16480 - protein, 432 aa, Escherichia coli; identical to SEQ ID NO: 2026

SEQ ID NO: 16481 - protein, 784 aa, Escherichia coli; identical to SEQ ID NO: 6295

SEQ ID NO: 16482 - protein, 656 aa, Escherichia coli; identical to SEQ ID NO: 5108

SEQ ID NO: 16483 - protein, 213 aa, Escherichia coli; identical to SEQ ID NO: 2232

SEQ ID NO: 16484 - protein, 203 aa, Escherichia coli; identical to SEQ ID NO: 2201

SEQ ID NO: 16485 - protein, 386 aa, Escherichia coli; identical to SEQ ID NO: 3072

SEQ ID NO: 16486 - protein, 243 aa, Escherichia coli; identical to SEQ ID NO: 2910

SEQ ID NO: 16487 - protein, 631 aa, Escherichia coli
MVVTASSVEQNLKDAPASISVITQEDLQRKPVQNLKDVLKEVPGVQLTNEGDNRKGVSIRGLDSSYTLILVDGKRVNSRNAVFRHNDFDLNWIPVDSIERIEVVRGPMSSLYGSDALGGVVNIITKKIGQKWSGTVTVDTTIQEHRDRGDTYNGQFFTSGPLIDGVLGMKAYGSLAKREKDDPQNSTTTDTGETPRIEGFSSRDGNVEFAWTPNQNHDFTAGYGFDRQDRDSDSLDKNRLERQNYSVSHNGRWDYGTSELKYYGEKVENKNPGNSSPITSESNTVDGKYTLPLTVINQFLTVGGEWRHDKLSDAVNLTGGTSSKTSASQYALFVEDEWRIFEPLALTTGVRMDDHETYGEHWSPRAYLVYNATDTVTVKGGWATAFKAPSLLQLSPDWTSNSCRGACKIVGSPDLKPETSESWELGLYYMGEEGWLEGVESSVTVFRNDVKDRISISRTSDVNAAPGYQNFVGFETGANGRRIPVFSYYNVNKARIQGVETELKIPFNDEWKLSINYTYNDGRDVSNGENKPLSDLPFHTANGTLDWKPLALEDWSFYVSGHYTGQKRADSATAKTPGGYTIWNTGAAWQVTKDVKLRAGVLNLGDKDLSRDDYSYNEDGRRYFMAVDYRF

SEQ ID NO: 16488 - protein, 228 aa, Escherichia coli; identical to SEQ ID NO: 3034

SEQ ID NO: 16489 - protein, 200 aa, Escherichia coli; identical to SEQ ID NO: 1784

SEQ ID NO: 16490 - protein, 614 aa, Escherichia coli; identical to SEQ ID NO: 1884

SEQ ID NO: 16491 - protein, 729 aa, Escherichia coli; identical to SEQ ID NO: 5131

SEQ ID NO: 16492 - protein, 747 aa, Escherichia coli; identical to SEQ ID NO: 2072

SEQ ID NO: 16493 - protein, 678 aa, Escherichia coli; identical to SEQ ID NO: 6376

SEQ ID NO: 16494 - protein, 249 aa, Escherichia coli; identical to SEQ ID NO: 5120

SEQ ID NO: 16495 - protein, 828 aa, Escherichia coli; identical to SEQ ID NO: 2388

SEQ ID NO: 16496 - protein, 241 aa, Escherichia coli; identical to SEQ ID NO: 2890

SEQ ID NO: 16497 - protein, 430 aa, Escherichia coli; identical to SEQ ID NO: 2617

SEQ ID NO: 16498 - protein, 165 aa, Escherichia coli; identical to SEQ ID NO: 5130

SEQ ID NO: 16499 - protein, 641 aa, Escherichia coli; identical to SEQ ID NO: 6206

SEQ ID NO: 16500 - protein, 170 aa, Escherichia coli; identical to SEQ ID NO: 2564

SEQ ID NO: 16501 - protein, 237 aa, Escherichia coli; identical to SEQ ID NO: 3022

SEQ ID NO: 16502 - protein, 238 aa, Escherichia coli; identical to SEQ ID NO: 8905

SEQ ID NO: 16503 - protein, 774 aa, Escherichia coli; identical to SEQ ID NO: 3426

SEQ ID NO: 16504 - protein, 229 aa, Escherichia coli; identical to SEQ ID NO: 3277

SEQ ID NO: 16505 - protein, 731 aa, Escherichia coli; identical to SEQ ID NO: 6297

SEQ ID NO: 16506 - protein, 675 aa, Escherichia coli
MAAEDVMIVSASGYEKKLTNAAASVSVISQEELLSSQYHDLAEALRAVEGVDVESGTGKTGGLEISIRGMPASYTLILIDGVRQGGSGDVTPNGFSAMNTGFMPPLAAIERIEVIRGPMSTLYGSDAMGGVVNIITKKNADKWLSSVNAGLNLQESNKWGNSSQFNFWSSGPLVDDSVSLQIRGSTQQRQGSSVTSLSDTSATRIPYPTESQNYNLGARIDWKATEQDVLWFDMDTTRQRYDNQDGQLGSLTGGYDHTLRYERNKISAGYDHTFTFGTWKSYLNWNETENKGRELVRSVLKSDKWGLAGKPRELKESNLILNSLLLTPLGESHLLTVGGEYQSSSMKDGVVLASTGETFRQKSWSLFAEDEWHLTDVLALTAGSRYEHHDQFGGHFSPRAYLVWDVTDAWTLKGGVTTGYKAPTMGQLHKGISGVSGQGRTNLLGNPELKPEESVSYEAGVYYDNLSGLNANITGFITDFSNKIVSYSIDDNTNSYTNSGKARLHGVEFAGTLPLWSEDVTLSLNYTWTQSEQRDGDNKGAPLSYTPEHMVNAKLNWQITEEVASWLGARYRGKTPRFTRNYSSLSAVQKKVYDEKGEYLKAWTVVDAGLSWKVTDALTLNAAVNNLLNKDYSDVSLYSAGKSTLYAGDYFQTGSSTTGYVIPERNYWMSLNYQF

SEQ ID NO: 16507 - protein, 678 aa, Escherichia coli; identical to SEQ ID NO: 4148

SEQ ID NO: 16508 - protein, 760 aa, Escherichia coli; identical to SEQ ID NO: 3026

SEQ ID NO: 16509 - protein, 353 aa, Escherichia coli
MNERELSIIRALGEEFSAVLADLQRTFEGKIAAQAQTFEEKLASLSVVLQKCVTGDDVRPMLEQMVKEAVSHIPVPRDGRDYDPDVLQKAVNDAVGKIPVPANGKSITPDDVRPMIEQMVKEAVSHIPVPRDGRDYDPDVLQKAVNDAVANIPLPADGKSITPDDVHPMLEQMVKVAVSHIPVPRDGRDYDPDVLQKAVLDAVSALPAPQDGRDATALEILPAIDDQKSFPRGTYATHQGGLWRAYEKTHGMRGWECLVDGVADIDVSMTGERLFSVVVRQSSGQRTEKTFSLPVMLYRGVFRAGETYHPGDTVTWGGSLWHCNSMTGDKPGEAHSSAWTLAAKRGRDAGGGK

SEQ ID NO: 16510 - protein, 367 aa, Escherichia coli; identical to SEQ ID NO: 3105

SEQ ID NO: 16511 - protein, 518 aa, Escherichia coli; identical to SEQ ID NO: 2349

SEQ ID NO: 16512 - protein, 360 aa, Escherichia coli
MMKKYLALALIAPLLISCSTTKKGDTYNEAWVKDTNGFDILMGQFAHNIENIWGFKEVVIAGPKDYVKYTDQYQTRSHINFDDGTITIETIAGAEPAAHLRRAIIKTLLMGDDPSSVDLYSDVDDITISKEPFLYGQVVDNTGQPIRWEGRASNFADYLLKNRLQSRSNGLRIIYSVTINMVPNHLDKRAHKYLGMVRQASRKYGVDESLILAIMQTESSFNPYAVSRSDALGLMQVVQHTAGKDVFRSQGKSGTPSRSFLFDPASNIDTGTAYLAMLNNVYLGGIDNPTSRRYAVITAYNGGAGSVLRVFSNDKIQAANIINTMTPGDVYQTLTTRHPSAESRRYLYKVNTAQKSYRRR

SEQ ID NO: 16513 - protein, 512 aa, Escherichia coli; identical to SEQ ID NO: 2973

SEQ ID NO: 16514 - protein, 686 aa, Escherichia coli; identical to SEQ ID NO: 3015

SEQ ID NO: 16515 - protein, 686 aa, Escherichia coli; identical to SEQ ID NO: 9611

SEQ ID NO: 16516 - protein, 784 aa, Escherichia coli; identical to SEQ ID NO: 2244

SEQ ID NO: 16517 - protein, 193 aa, Escherichia coli; identical to SEQ ID NO: 2246

SEQ ID NO: 16518 - protein, 237 aa, Escherichia coli; identical to SEQ ID NO: 3793

SEQ ID NO: 16519 - protein, 118 aa, Escherichia coli [sequence omitted]

SEQ ID NO: 16520 - protein, 224 aa, Escherichia coli; identical to SEQ ID NO: 3165

SEQ ID NO: 16521 - protein, 552 aa, Escherichia coli
MTVKISGVLKDGAGKPVPGCTIELKARRTTETVIVTTVAYGQPGETGSYSMDVEPGLYRVTLNTEGYAPSYVGDILVKAESAPGTLNKFLMDLEDAQYYPKALAELEAVAAEILKRAEASAASAEEAKKRAENARGPKGDKGDTGPQGIPGPKGDTGERGPKGERGEAGPQGVQGPRGETGPVGPQGEAGIQGPAGPAGPRGETGARGEKGEPGDPGGPPGPKGDTGPRGVPGPQGPAGPRGPAGERGPQGLQGVAGERGDTGPAGPQGATGPRGPQGEKGGKGDPGPAGPAGERGPQGERGATGPVGPQGPAGPAGKSASLDDIADKEAFIRKLGVARAYGRDLKTGEGEWTTEEFINWLKSQGAFEGPYWVMTTTRLLNSNRVITDVDTDLGKKKITLRGCAIEVMGSWENAIVRINAGDDRPWDMFYGTDCTCVVSGSIKSYEWRFNYTSIRRPSTAKLDVNGWERDEATGRIRQWGQKQVVRPTSEGDTHTIYFPIAFPSAALNVIVSPVGSPGNFTGYALSEPLLKSVILTVSKDTYGLFYWEAIGY

SEQ ID NO: 16522 - protein, 213 aa, Escherichia coli; identical to SEQ ID NO: 2232

SEQ ID NO: 16523 - protein, 445 aa, Escherichia coli; identical to SEQ ID NO: 9353

SEQ ID NO: 16524 - protein, 199 aa, Escherichia coli; identical to SEQ ID NO: 5136

SEQ ID NO: 16525 - protein, 232 aa, Escherichia coli; identical to SEQ ID NO: 2087

SEQ ID NO: 16526 - protein, 729 aa, Escherichia coli; identical to SEQ ID NO: 2948

SEQ ID NO: 16527 - protein, 351 aa, Escherichia coli; identical to SEQ ID NO: 4688

SEQ ID NO: 16528 - protein, 274 aa, Escherichia coli; identical to SEQ ID NO: 2301

SEQ ID NO: 16529 - protein, 446 aa, Escherichia coli; identical to SEQ ID NO: 2176

SEQ ID NO: 16530 - protein, 565 aa, Escherichia coli; identical to SEQ ID NO: 5118

SEQ ID NO: 16531 - protein, 199 aa, Escherichia coli; identical to SEQ ID NO: 3906

SEQ ID NO: 16532 - protein, 331 aa, Escherichia coli; identical to SEQ ID NO: 5128

SEQ ID NO: 16533 - protein, 200 aa, Escherichia coli; identical to SEQ ID NO: 5121

SEQ ID NO: 16534 - protein, 243 aa, Escherichia coli; identical to SEQ ID NO: 3159

SEQ ID NO: 16535 - protein, 236 aa, Escherichia coli; identical to SEQ ID NO: 3286

SEQ ID NO: 16536 - protein, 102 aa, Escherichia coli; identical to SEQ ID NO: 1822

SEQ ID NO: 16537 - protein, 646 aa, Escherichia coli; identical to SEQ ID NO: 13574

SEQ ID NO: 16538 - protein, 539 aa, Escherichia coli; identical to SEQ ID NO: 7779

SEQ ID NO: 16539 - protein, 228 aa, Escherichia coli; identical to SEQ ID NO: 3034

SEQ ID NO: 16540 - protein, 747 aa, Escherichia coli; identical to SEQ ID NO: 2072

SEQ ID NO: 16541 - protein, 843 aa, Escherichia coli; identical to SEQ ID NO: 3954

SEQ ID NO: 16542 - protein, 732 aa, Escherichia coli
MMRKKYMPRALGPLLLVVLSPAVAQQNDDNEIIVSASRSNRTVAEMAQTTWVIENAELEQQIQGGKELKDALAQLIPGLDVSSQSRTNYGMNMRGRPLVVLIDGVRLNSSRSDSRQLDSVDPFNIDHIEVISGATALYGGGSTGGLINIVTKKGQPETMMEFEAGTKSGFNSSKDHDERIAGAVSGGNDHISGRLSVAYQKFGGWFDGNGDATLLDNTQTGLQHSNRLDIMGTGTLNIDESRQLQLITQYYKSQGDDNYGLNLGKGFSAISGSSTPYVSKGLNSDRIPGTERHLISLQYSDSDFLGQELVGQVYYRDESLRYYPFPTVNANKQATAFSSSQQDTDQYGMKLTLNSQLMDGWQITWGLDAEHERFTSNQMFFDLAQASASGGLNNHKIYTTGRYPSYDITNLAAFLQSSYDINDIFTVSGGVRYQYTENRVDDFIDYTQQQKIAAGKAISADAIPGGSVDYDNFLFNAGLLMHITERQQAWFNFSQGVALPDPGKYYGRGIYGAAVNGHLPLTKSVNVSDSKLEGVKVDSYELGWRFIGDNLRTQIAAYYSLSNKSVERNKDLTISVKDDRRRIYGVEGAVDYLIPDTDWSTGVNFNVLKTESKVNGQWQKYDVKESSPSKATAYINWAPEPWSLRVQSTTSFDVSDAEGNDINGYTTVDFISSWQLPVGTLSFSVENLFDRDYTTVWGQRAPLYYSPGYGPASLYDYKGRGRTFGLNYSVLF

SEQ ID NO: 16543 - protein, 851 aa, Escherichia coli; identical to SEQ ID NO: 4440

SEQ ID NO: 16544 - protein, 878 aa, Escherichia coli; identical to SEQ ID NO: 12633

SEQ ID NO: 16545 - protein, 843 aa, Escherichia coli; identical to SEQ ID NO: 3163

SEQ ID NO: 16546 - protein, 732 aa, Escherichia coli; identical to SEQ ID NO: 3068

SEQ ID NO: 16547 - protein, 250 aa, Escherichia coli; identical to SEQ ID NO: 3427

SEQ ID NO: 16548 - protein, 746 aa, Escherichia coli; identical to SEQ ID NO: 3031

SEQ ID NO: 16549 - protein, 207 aa, Escherichia coli; identical to SEQ ID NO: 2211

SEQ ID NO: 16550 - protein, 678 aa, Escherichia coli
MVPSTFSRLKAARCLPVVLAALIFAGCGTHTPEQSTAYMQGTAQADSAFYLQQMQQSSDDTRINWQLLAIRALVKEGKTGQAVELFNQLPQELNDSQRREKTLLAVEIKLAQKDFAGAQNLLAKITPADLEQNQQARYWQAKIDASQGRPSIDLLRALIAQEPLLGAKEKQQNIDATWQALSSMTQEQANTLVINADENILQGWLDLQRVWFDNRNDPDMMKAGIADWQKRYPNNPGAKMLPTQLVNVKAFKPASTNKIALLLPLNGQAAVFGRTIQQGFEAAKNIGTQPVAAQVAAAPAADVAEQPQPQTVDGVASPAQASVSDLTGEQPAAQPAPVSTPAATTTAVSAPANPSAELKIYDTSSQPLSQILSQVQQDGASIVVGPLLKNNVEELLKSNTPLNVLALNQPENIENRVNICYFALSPEDEARDAARHIRDQGKQAPLVLIPRSSLGDRVANAFAQEWQKLGGGTVLQQKFGSTSELRAGVNGGSGIALTGTPITPRATTDSGMTTNNPTLQTTPTDDQFTNNGGRVDAVYIVATPGEIAFIKPMIAMRNGSQSGATLYASSRSAQGTAGPDFRLEMEGLQYSEIPMLAGGNLPLMQQALSAVNNDYSLARMYAMGVDAWSLANHFSQMRQVQGFEINGNTGSLTANPDCVINRKLSWLQYQQGQVVPAS

SEQ ID NO: 16551 - protein, 700 aa, Escherichia coli
MLFNFDQANQQLNISIPQAWLAWHSENWAPPSTWKEGVAGVLMDYNLFASSYRPQDGSSSTNLNAYGTAGINAGAWRLRSDYQLNKTDSEDNHDQSGGISRTYLFRPLPQLGSKLTLGETDFSSNIFDGFSYTGAALASDDRMLPWELRGYAPQISGIAQTNATVTISQSGRVIYQKKVPPGPFIIDDLNQSVQGTLDVKVTEEDGRVNNFQVSAASTPFLTRQGQVRYKLAAGQPRPSMSHQTENETFFSNEVSWGMLSNTSLYGGLLISDDDYHSAAMGIGQNMLWLGALSFDVTWASSHFDTQQDERGLSYRFNYSKQVDATNSTISLAAYRFSDRHFHSYANYLDHKYNDSDAQDEKQTISLSVGQPITPLNLNLYANLLHQTWWNADASTTANITAGFNVDIGDWRDISISTSFNTTHYEDKDRDNQIYLSISLPFGNGGRVGYDMQNSSHSTIHRMSWNDTLDERNSWGMSAGLQSDRPDNGAQVSGNYQHLSSAGEWDISGTYAASDYSSVSSSWSGSFTATQYGAAFHRRSSTNEPRLMVSTDGVADIPVQGNLDYTNHFGIAVVPLISSYQPSTVAVNMNDLPDGVTVAENVIKETWIEGAIGYKSLASRSGKDVNVIIRNASGQFPPLGADIRQDDSGISVGMVGEEGHAWLSGVAENQLFTVVWGEQSCIIHLPERLEDTTKRLILPCH

SEQ ID NO: 16552 - protein, 191 aa, Escherichia coli; identical to SEQ ID NO: 2727

SEQ ID NO: 16553 - protein, 230 aa, Escherichia coli; identical to SEQ ID NO: 3348

SEQ ID NO: 16554 - protein, 221 aa, Escherichia coli; identical to SEQ ID NO: 3743

SEQ ID NO: 16555 - protein, 331 aa, Escherichia coli
MKKPVVIGLAVVVLAAVVAGGYWWYQSRQDNGLTLYGNVDIRTVNLSFRVGGRVESLAVDEGDAIKAGQVLGELDHKPYEIALMQAKAGVSVAQAQYDLMLAGYRDEEIAQAAAAVKQAQAAYDYAQNFYNRQQGLWKSRTISANDLENARSSRDQAQATLKSAQDKLRQYRSGNREQDIAQAKASLEQAQAQLAQADLNLQDSTLIAPSDGTLLTRAVEPGTVLNEGGTVFTVSLTRPVWVRAYVDERNLDQAQPGRKVLLYTDGRPDKPYHGQIGFVSPTAEFTPKTVETPDLRTDLVYRLRIVVTDADDALRQGMPVTVQFGNEAGHE

SEQ ID NO: 16556 - protein, 200 aa, Escherichia coli; identical to SEQ ID NO: 1784

SEQ ID NO: 16557 - protein, 278 aa, Escherichia coli
MKSLYAATRVTLADPLHLILGARYTNWRVDTLTYSMEKNHTTPYAGLVFDINDNWSTYASYTSIFQPQNDRDSSGKYLAPITGNNYELGLKSDWMNSRLTTTLAIFRIEQDNVAQSTGTPIPGSNGETAYKAVDGTVSKGVEFELNGAITDNWQLTFGATRYIAEDNEGNAVNPNLPRTTVKMFTSYRLPVMPELTVGGGVNWQNRVYTDTVTPYGTFRAEQGSYALVDLFTRYQVTKNFSLQGNVNNLFDKTYDTNVEGSIVYGTPRNFSITGTYQF

SEQ ID NO: 16558 - protein, 650 aa, Escherichia coli; identical to SEQ ID NO: 2146

SEQ ID NO: 16559 - protein, 863 aa, Escherichia coli
MHIRKHRLAGFFVRLFVACAFAAQAPLSSAELYFNPRFLADDPQAVADLSRFENGQELPPGTYRVDIYLNNGYMATRDVTFNTGDSEQGIVPCLTRAQLASMGLNTASVSGMNLLADDACVPLTSMIHDATAHLDVGQQRLNLTIPQAFMSNRARGYIPPELWDPGINAGLLNYNFSGNSVQNRIGGNSHYAYLNLQSGLNIGAWRLRDNTTWSYNSSDSSSGSKNKWQHINTWLERDIIPLRSRLTLGDGYTQGDIFDGINFRGAQLASDDNMLPDSQRGFAPVIHGIARGTAQVTIKQNGYDIYNSTVPPGPFTINDIYAAGNSGDLQVTIKEADGSTQIFTVPYSSVPLLQREGHTRYSITAGEYRSGNAQQEKPRFFQSTLLHGLPAGWTIYGGTQLADRYRAFNFGIGKNMGALGALSVDMTQANSTLPDDSQHDGQSVRFLYNKSLNESGTNIQLVGYRYSTSGYFNFADTTYSRMNGYNIETQDGVIQVKPKFTDYYNLAYNKRGKLQLTVTQQLGRTSTLYLSGSHQTYWGTSNVDEQFQAGLNTAFEDINWTLSYSLTKNAWQKGRDQMLALNVNIPFSHWLRSDSKSQWRHASASYSMSHDLNGRMTNLVGVYGTLLEDNNLSYSVQTGYAGGGDGNSGSTGYATLNYRGGYGNANIGYSHSDDIKQLYYGVSGGVLAHANGVTLGQPLNDTVVLVKAPGAKDAKVENQTGVRTDWRGYAVLPYATEYRENRVALDTNTLADNVDLDNAVANVVPTRGAIVRAEFKARVGIKLLMTLTHNNKPLPFGAMVTSESSQSSGIVADNGQVYLSGMPLAGKVQVKWGEEENAHCVANYQLPPESQQQLLTQLSAECR

SEQ ID NO: 16560 - protein, 869 aa, Escherichia coli; identical to SEQ ID NO: 8419

SEQ ID NO: 16561 - protein, 851 aa, Escherichia coli; identical to SEQ ID NO: 3458

SEQ ID NO: 16562 - protein, 368 aa, Escherichia coli; identical to SEQ ID NO: 2374

SEQ ID NO: 16563 - protein, 162 aa, Escherichia coli; identical to SEQ ID NO: 1965

SEQ ID NO: 16564 - protein, 213 aa, Escherichia coli; identical to SEQ ID NO: 2232

SEQ ID NO: 16565 - protein, 226 aa, Escherichia coli; identical to SEQ ID NO: 3085

SEQ ID NO: 16566 - protein, 249 aa, Escherichia coli; identical to SEQ ID NO: 3492

SEQ ID NO: 16567 - protein, 227 aa, Escherichia coli; identical to SEQ ID NO: 6371

SEQ ID NO: 16568 - protein, 518 aa, Escherichia coli; identical to SEQ ID NO: 2349

SEQ ID NO: 16569 - protein, 367 aa, Escherichia coli; identical to SEQ ID NO: 3255

SEQ ID NO: 16570 - protein, 614 aa, Escherichia coli; identical to SEQ ID NO: 1888

SEQ ID NO: 16571 - protein, 130 aa, Escherichia coli; identical to SEQ ID NO: 7391

SEQ ID NO: 16572 - protein, 826 aa, Escherichia coli; identical to SEQ ID NO: 3951

SEQ ID NO: 16573 - protein, 897 aa, Escherichia coli; identical to SEQ ID NO: 1908

SEQ ID NO: 16574 - protein, 430 aa, Escherichia coli; identical to SEQ ID NO: 2617

SEQ ID NO: 16575 - protein, 673 aa, Escherichia coli; identical to SEQ ID NO: 2919

SEQ ID NO: 16576 - protein, 881 aa, Escherichia coli
MPDHSLFRLRILPWCIALAMSGSYSSVWAEDDIQFDSRFLELKGDTKIDLKRFSSQGYVEPGKYNLQVQLNKQPLAEEYDIYWYAGEDDASKSYACLTPELVAQFGLKEDVAKNLQWSHDAKCLKSGQLEGMEIKADLSQSALVISLPQAYLEYTYPDWDPPSRWDDGISGIVADYSINAQTRHEENGGDDSNEISGNGTVGVNLGPWRMRADWQTNYQHTRSNDDDDEFSGDETQKKWEWSRYYAWRALPSLKAKLALGEDYLRSDIFDGFNYVGGSVSTDDQMLPPNLRGYAPDISGVAHTTAKVTVSQMGRVIYETQVPAGPFRIQDLGDSVSGTLHIRIEEQNGQVQEYDISTASMPYLTRPGQVRYKIMMGRPQEWGHHVEGEFFSGAEASWGIANGWSLYGGALGDENYQSAALGVGRDLSTFGAVAFDVTHSHTKLDKDTAYGKGSLDGNSFRVSYSKDFDQLNSRVTFAGYRFSEENFMTMSEYLDASDSGMVRTGNDKEMYTATYNQNFRDAGVSVYLNYTRHTYWDREEQTNYNIMLSHYFNMGSIRNVSISMTGYRYEYDNQADKGMYISLSMPWGDNSTVSYNGNYGSGTDSSQVGYFSRVDDATHYQLNVGTSDKHTSVDGYYSHDGSLAQVDLSANYHEGQYTSAGLSLQGGATLTAHGGALHRTQNMGGTRLLIDADGVADVPVEGNGAAVYTNMFGKAVVSDVNNYYRNQAYIDLNRLPENAEATQSVVQATLTEGAIGYRKFAVISGQKAMAVLRLSDGSHPPFGAEVKNDNEQTVGLVDDDGNVYLAGVKPGEHMSVFWSGVAHCDINLPDPLPADLFNGLLLPCQHKGNVAPITSPAVKPAIQEQTQRVTPTEPPTSISVNQ

SEQ ID NO: 16577 - protein, 673 aa, Escherichia coli; identical to SEQ ID NO: 2919

SEQ ID NO: 16578 - protein, 236 aa, Escherichia coli; identical to SEQ ID NO: 3286

SEQ ID NO: 16579 - protein, 111 aa, Escherichia coli; identical to SEQ ID NO: 3153

SEQ ID NO: 16580 - protein, 700 aa, Escherichia coli; identical to SEQ ID NO: 3128

SEQ ID NO: 16581 - protein, 363 aa, Escherichia coli; identical to SEQ ID NO: 3347

SEQ ID NO: 16582 - protein, 191 aa, Escherichia coli; identical to SEQ ID NO: 2727

SEQ ID NO: 16583 - protein, 539 aa, Escherichia coli; identical to SEQ ID NO: 3146

SEQ ID NO: 16584 - protein, 237 aa, Escherichia coli; identical to SEQ ID NO: 1814

SEQ ID NO: 16585 - protein, 232 aa, Escherichia coli; identical to SEQ ID NO: 2087

SEQ ID NO: 16586 - protein, 784 aa, Escherichia coli; identical to SEQ ID NO: 2244

SEQ ID NO: 16587 - protein, 430 aa, Escherichia coli; identical to SEQ ID NO: 2617

SEQ ID NO: 16588 - protein, 351 aa, Escherichia coli
MKKSTLALVVMGIVASASVQAAEIYNKDGNKLDVYGKVKAMHYMSDNASKDSDQSYIRFGFKGETQINDQLTGYGRWEAEFAGNKAESDTAQQKTRLAFAGLKYKDLGSFDYGRNLGALYDVEAWTDMFPEFGGDSSAQTDNFMTKRASGLATYRNTDFFGVIDGLNLTLQYQGKNENRDVKKQNGDGFGTSLTYDFGGSDFAISGAYTNSDRTNEQNLQSRGTGKRAEAWATGLKYDANNFYLATFYSETRKMTPITGGFANKTQNFEAVAQYQFDFGLRPSLGYVLSKGKDIEGIGDEDLVNYIDVGATYYFNKNMSAFVDYKINQLDSDNKLNINNDDIVAVGMTYQF

SEQ ID NO: 16589 - protein, 432 aa, Escherichia coli; identical to SEQ ID NO: 2026

SEQ ID NO: 16590 - protein, 631 aa, Escherichia coli; identical to SEQ ID NO: 3058

SEQ ID NO: 16591 - protein, 276 aa, Escherichia coli
MTLIEFLMRRNSIFGLHLLVPGILVLSGQELLRRTLIFHLNGTNTTFMKKLLIALLYLCLLPDTLAGIRLNKTRVIMNEDESSGSITFVNTGEDNYLVQAYILDTEKNVTSDDFLVVPPVFRSDGGRNNVLKILKRKEPVVKDRESVYKLVFNAIPGTTRTSEKDRAKVSFSLGFVIKMFYRPDALKSAPDEAYGKLSFLNRDNGIVQIYNDSEYNLSFSELKFDNKSIDINKQPSMIRPFDSVFIKVDRVPSKVLWKFINDYGGETPEYLYTFKR

SEQ ID NO: 16592 - protein, 230 aa, Escherichia coli; identical to SEQ ID NO: 3222

SEQ ID NO: 16593 - protein, 266 aa, Escherichia coli; identical to SEQ ID NO: 1894

SEQ ID NO: 16594 - protein, 816 aa, Escherichia coli; identical to SEQ ID NO: 7726

SEQ ID NO: 16595 - protein, 631 aa, Escherichia coli; identical to SEQ ID NO: 3058

SEQ ID NO: 16596 - protein, 231 aa, Escherichia coli; identical to SEQ ID NO: 3055

SEQ ID NO: 16597 - protein, 232 aa, Escherichia coli; identical to SEQ ID NO: 2087

SEQ ID NO: 16598 - protein, 266 aa, Escherichia coli; identical to SEQ ID NO: 1894

SEQ ID NO: 16599 - protein, 883 aa, Escherichia coli
MDTPMPEHSFLRLRGLSWWIALAISGSPFNALADDTIQFDGRFLDLKGNTKIDLGRFSQKGYVEPGKYNLRVHVNNQPLPDDYDIYWYATENDPNKSYACLSPELVAQFGLKEDIAKNLQWIRDGQCLNMALLAGTEISGDLGQSALLVSLPQAYLEYTDSEWDPPSRWDDGIPGLIADYSINAQTRHENGGDDTNDISGNGTVGVNVGPWRLRADWQSDYQHTRSNDDGDTDDSGTQKNWEWSRYYAWRALPSLKAKLSLGEDYLNSDIFDGFSYIGGSISTDDQMLPPNLRGYAPDISGVAHTTAKVTVTQMGRVIYETQVPAGPFRIQDIGDSVSGTLHVRIEEQNGQVQEYDVSTASMPFLTRPGQVRYKVTMGRPQNWDHQVAGSFFSGGEASWGIANGWSLYGGALADENYQSAALGLGRDLALLGALAFDVTHSRVQLDDNSVYGNKTLDGNSYRVSYAKDFDELNSRVTFAGYRFSEKNYMTMSEYLDANDDDRARTGNDKEMYTVTYNQNFTDARVSVYLNYSHHTYWDRQDQTNYNMMLSHYFNLGSLRNLSVSLTGYRYEYDKSADKGVYLSLSLPWGDNSTISYNGNYGSGADSNQVSLYHRIDDASHYTLSAGTSENHSSVDGYYSHDGTLAKVDLSANYHEGQYTSAGISLQGGATLTAHGGALHRTQNMGGTRLLIDADGVANVPVEGNGSAVYTNMFGKAVVADVNDYYRNQAYIDLNKLPENAEATKSVVQATLTEGAIGYRKFAVISGEKAMAVLRLQDGSHPPFGAEVKNDNQQQVGLVDDEGNVYLAGVKPGEHMTVFWEGESHCDISLPDPLPNDLFNGLLLPCQQKGGSSSVIPHDIQPVIQEQTQQVAPMEPPMSVSSNQ

SEQ ID NO: 16600 - protein, 869 aa, Escherichia coli; identical to SEQ ID NO: 3352

SEQ ID NO: 16601 - protein, 368 aa, Escherichia coli; identical to SEQ ID NO: 2371

SEQ ID NO: 16602 - protein, 614 aa, Escherichia coli; identical to SEQ ID NO: 3301

SEQ ID NO: 16603 - protein, 478 aa, Escherichia coli; identical to SEQ ID NO: 2404

SEQ ID NO: 16604 - protein, 170 aa, Escherichia coli [sequence omitted]

SEQ ID NO: 16605 - protein, 221 aa, Escherichia coli; identical to SEQ ID NO: 3141

SEQ ID NO: 16606 - protein, 242 aa, Escherichia coli; identical to SEQ ID NO: 2697

SEQ ID NO: 16607 - protein, 208 aa, Escherichia coli; identical to SEQ ID NO: 1949

SEQ ID NO: 16608 - protein, 230 aa, Escherichia coli; identical to SEQ ID NO: 3723

SEQ ID NO: 16609 - protein, 224 aa, Escherichia coli; identical to SEQ ID NO: 3115

SEQ ID NO: 16610 - protein, 614 aa, Escherichia coli; identical to SEQ ID NO: 3301

SEQ ID NO: 16611 - protein, 359 aa, Escherichia coli; identical to SEQ ID NO: 2329

SEQ ID NO: 16612 - protein, 834 aa, Escherichia coli; identical to SEQ ID NO: 3118

SEQ ID NO: 16613 - protein, 161 aa, Escherichia coli; identical to SEQ ID NO: 2582

SEQ ID NO: 16614 - protein, 747 aa, Escherichia coli; identical to SEQ ID NO: 3670

SEQ ID NO: 16615 - protein, 760 aa, Escherichia coli; identical to SEQ ID NO: 3026

SEQ ID NO: 16616 - protein, 729 aa, Escherichia coli; identical to SEQ ID NO: 3778

SEQ ID NO: 16617 - protein, 361 aa, Escherichia coli; identical to SEQ ID NO: 3061

SEQ ID NO: 16618 - protein, 207 aa, Escherichia coli
MPLPDFRLIRLLPLAALVLTACSVTTPKGPGKSPDSPQWRQHQQDVRNLNQYQTRGAFAYISDQQKVYARFFWQQTGQDRYRLLLTNPLGSTELELNAQPGNVQLVDNKGQRYTADDAEEMIGKLTGMPIPLNSLRQWILGLPGDATDYKLDDQYRLSEITYSQNGKKWKVVYGGYDTKTQPAMPANMELTDGGQRIKLKMDNWIVK

SEQ ID NO: 16619 - protein, 219 aa, Escherichia coli; identical to SEQ ID NO: 13413

SEQ ID NO: 16620 - protein, 673 aa, Escherichia coli; identical to SEQ ID NO: 7780

SEQ ID NO: 16621 - protein, 266 aa, Escherichia coli; identical to SEQ ID NO: 1894

SEQ ID NO: 16622 - protein, 359 aa, Escherichia coli; identical to SEQ ID NO: 2329

SEQ ID NO: 16623 - protein, 774 aa, Escherichia coli; identical to SEQ ID NO: 6365

SEQ ID NO: 16624 - protein, 386 aa, Escherichia coli; identical to SEQ ID NO: 3094

SEQ ID NO: 16625 - protein, 192 aa, Escherichia coli; identical to SEQ ID NO: 5348

SEQ ID NO: 16626 - protein, 118 aa, Escherichia coli [sequence omitted]

SEQ ID NO: 16627 - protein, 193 aa, Escherichia coli; identical to SEQ ID NO: 2246

SEQ ID NO: 16628 - protein, 161 aa, Escherichia coli; identical to SEQ ID NO: 2582

SEQ ID NO: 16629 - protein, 274 aa, Escherichia coli; identical to SEQ ID NO: 2309

SEQ ID NO: 16630 - protein, 170 aa, Escherichia coli [sequence omitted]

SEQ ID NO: 16631 - protein, 224 aa, Escherichia coli; identical to SEQ ID NO: 3165

SEQ ID NO: 16632 - protein, 232 aa, Escherichia coli; identical to SEQ ID NO: 2087

SEQ ID NO: 16633 - protein, 565 aa, Escherichia coli; identical to SEQ ID NO: 2678

SEQ ID NO: 16634 - protein, 838 aa, Escherichia coli; identical to SEQ ID NO: 7717

SEQ ID NO: 16635 - protein, 700 aa, Escherichia coli
MKIFSVRQTVLPALLVLSPVVFAADEQTMIVSAAPQVVSELDTPAAVSVVDGEEMRLATPRINLSESLTGVPGLQVQNRQNYAQDLQLSIRGFGSRSTYGIRGIRLYVDGIPATMPDGQGQTSNIDLSSVQNVEVLRGPFSALYGNASGGVMNVTTQTGQQPPTIEASSYYGSFGSWRYGLKATGATGDGTQPGDVDYTVSTTRFTTHGYRDHSGAQKNLANAKLGVRIDEASKLSLIFNSVDIKADDPGGLTKAEWKANPQQAPRAEQYDTRKTINQTQAGLRYERSLSSRDDMSVMMYAGERETTQYQSIPMAPQLNPSHAGGVITLQRHYQGIDSRWTHRGELGVPVTFTTGLNYENMSENRKGYNNFRLNSGMPEYGQKGELRRDERNLMWNIDPYLQTQWQLSEKLSLDAGVRYSSVWFDSNDHYVTPGNGDDSGDASYHKWLPAGSLKYAMTDAWNIYLAAGRGFETPTINELSYRADGQSGMNLGLKPSTNDTIEIGSKTRIGDGLLSLALFQTDTDDEIVVDSSSGGRTTYKNAGKTRRQGAELAWDQRFAGDFRVNASWTWLDATYRSNVCNEQDCNGNRMPGIARNMGFASIGYVPEDGWYAGTEARYMGDIMADDENTAKAPSYTLVGLFTGYKYNYHNLTVDLFGRVDNLFDKEYVGSVIVNESNGRYYEPSPGRNYGVGMNIAWRFE

SEQ ID NO: 16636 - protein, 776 aa, Escherichia coli; identical to SEQ ID NO: 7663

SEQ ID NO: 16637 - protein, 816 aa, Escherichia coli; identical to SEQ ID NO: 12597

SEQ ID NO: 16638 - protein, 765 aa, Escherichia coli; identical to SEQ ID NO: 4323

SEQ ID NO: 16639 - protein, 878 aa, Escherichia coli; identical to SEQ ID NO: 3957

SEQ ID NO: 16640 - protein, 891 aa, Escherichia coli
MILAAQLKAMSICKTRDLMQQEANVMKTTTSTKRHNLTRIAMYCSIMYSGATIGAESVEYDPTFLMGGNASSIDVSRYSDGNPTLPGVYDVSIYVNEQPVANLEIPFIAIPDKKNAQACITLKNLLQLHIKTPPADEENTILLPRDETLGNCLDLSLAIPKSSVNYDPSEQRLDINVPQAWVMKNYQNYVDPSLWENGINAAMLSYNINAYRSENSNYTNDSVYTSFNGGVNLGAWRLRSSGNYSWRNDAGSDVEFMNRYVQRDITAIRSQLIMGESYTTGETFDSVSIRGIRLYSDSRMLPPVLANFAPTIRGVANTNAKVSITQSGYKIYETTVPPGPFVIDDLSPSGYGSDLIVTIEEADGSKRTFSQPFSSVIQMLRPGVSRWDISGGQINKDDLHHEPNLLQATYYRGLSNLFTGYTGFQVTDNHYAAGLLGIGMNTSVGAISFDVTHSSVDIPDDKRYQGQSYRISWNKFFDLTDTSLNIAAYRYSTQDYLGLNDALTLIDEVEHPTQDLDPKTMRNYGHMKNQFTVSINQPLRFGKDDYGSFYTSGSWSDYWGGGKSRSNYSIGYSNSASWGSYSISAQRSWDEYSQTENSIYLSFSIPIEKLMGTEHRDSGFQSIDTQLSTNMDGNNQFNMSSSGYSNDNRVSYSVNAGYGMNKTGKDLSNIGGYASYESPWGTLAGSVSATSDNNRQYSVNTDGGFVLHSGGLTFSNDSFSDNDTIALVKAPGAKGARINYGNNTVDRWGYGVTSALSPYQENKIALDTENLENDIEMKSTSTVAVPRQGSVIFAGFETNQGQSAIMNIKRSDGKGIPFAADIHDETNAIIGNVGQGGQAFVRGIQQQGTIKITWLEASMPKTCIAQYQQPNVTSEKIQQTIILNNILCQLQ

SEQ ID NO: 16641 - protein, 224 aa, Escherichia coli; identical to SEQ ID NO: 3115

SEQ ID NO: 16642 - protein, 478 aa, Escherichia coli; identical to SEQ ID NO: 2404

SEQ ID NO: 16643 - protein, 881 aa, Escherichia coli; identical to SEQ ID NO: 2762

SEQ ID NO: 16644 - protein, 221 aa, Escherichia coli; identical to SEQ ID NO: 3743

SEQ ID NO: 16645 - protein, 170 aa, Escherichia coli [sequence omitted]

SEQ ID NO: 16646 - protein, 746 aa, Escherichia coli; identical to SEQ ID NO: 3031

SEQ ID NO: 16647 - protein, 865 aa, Escherichia coli; identical to SEQ ID NO: 2167

SEQ ID NO: 16648 - protein, 405 aa, Escherichia coli; identical to SEQ ID NO: 7666

SEQ ID NO: 16649 - protein, 210 aa, Escherichia coli; identical to SEQ ID NO: 3228

SEQ ID NO: 16650 - protein, 243 aa, Escherichia coli; identical to SEQ ID NO: 7668

SEQ ID NO: 16651 - protein, 774 aa, Escherichia coli; identical to SEQ ID NO: 3895

SEQ ID NO: 16652 - protein, 161 aa, Escherichia coli; identical to SEQ ID NO: 2582

SEQ ID NO: 16653 - protein, 883 aa, Escherichia coli; identical to SEQ ID NO: 13884

SEQ ID NO: 16654 - protein, 208 aa, Escherichia coli; identical to SEQ ID NO: 1949

SEQ ID NO: 16655 - protein, 203 aa, Escherichia coli; identical to SEQ ID NO: 2009

SEQ ID NO: 16656 - protein, 205 aa, Escherichia coli; identical to SEQ ID NO: 3940

SEQ ID NO: 16657 - protein, 224 aa, Escherichia coli; identical to SEQ ID NO: 4063

SEQ ID NO: 16658 - protein, 359 aa, Escherichia coli; identical to SEQ ID NO: 2328

SEQ ID NO: 16659 - protein, 816 aa, Escherichia coli; identical to SEQ ID NO: 3948

SEQ ID NO: 16660 - protein, 879 aa, Escherichia coli; identical to SEQ ID NO: 3956

SEQ ID NO: 16661 - protein, 567 aa, Escherichia coli; identical to SEQ ID NO: 4028

SEQ ID NO: 16662 - protein, 656 aa, Escherichia coli; identical to SEQ ID NO: 6715

SEQ ID NO: 16663 - protein, 816 aa, Escherichia coli; identical to SEQ ID NO: 3939

SEQ ID NO: 16664 - protein, 259 aa, Escherichia coli; identical to SEQ ID NO: 4010

SEQ ID NO: 16665 - protein, 866 aa, Escherichia coli; identical to SEQ ID NO: 3945

SEQ ID NO: 16666 - protein, 266 aa, Escherichia coli; identical to SEQ ID NO: 3338

SEQ ID NO: 16667 - protein, 366 aa, Escherichia coli; identical to SEQ ID NO: 4014

SEQ ID NO: 16668 - protein, 430 aa, Escherichia coli; identical to SEQ ID NO: 2617

SEQ ID NO: 16669 - protein, 236 aa, Escherichia coli; identical to SEQ ID NO: 4069

SEQ ID NO: 16670 - protein, 230 aa, Escherichia coli; identical to SEQ ID NO: 4004

SEQ ID NO: 16671 - protein, 869 aa, Escherichia coli; identical to SEQ ID NO: 3938

SEQ ID NO: 16672 - protein, 700 aa, Escherichia coli; identical to SEQ ID NO: 4029

SEQ ID NO: 16673 - protein, 679 aa, Escherichia coli
MSVWRKKTTGLKTKKRLLPLVLAAALCSSPVWAEEATFTANFKDTDLKSFIETVGANLNKTIIMGPGVQGKVSIRTMTPLNERQYYQLFLNLLEAQGYAVVPMENDVLKVVKSSAAKVEPLPLVGEGSDNYAGDEMVTKVVPVRNVSVRELAPILRQMIDSAGSGNVVNYDPSNVIMLTGRASVVERLTEVIQRVDHAGNRTEEVIPLDNASASEIARVLESLTKNSGENQPATLKSQIVADERTNSVIVSGDPATRDKMRRLIRRLDSEMERSGNSQVFYLKYSKAEDLVDVLKQVSGTLTAAKEEAEGTVGSGREVVSIAASKHSNALIVTAPQDIMQSLQSVIEQLDIRRAQVHVEALIVEVAEGSNINFGVQWASKDAGLMQFANGTQIPIGTLGAAISQAKPQKGSTVISENGATTINPDTNGDLSTLAQLLSGFSGTAVGVVKGDWMALVQAVKNDSSSNVLSTPSITTLDNQEAFFMVGQDVPVLTGSTVGSNNSNPFNTVERKKVGIMLKVTPQINEGNAVQMVIEQEVSKVEGQTSLDVVFGERKLKTTVLANDGELIVLGGLMDDQAGESVAKVPLLGDIPLIGNLFKSTADKKEKRNLMVFIRPTILRDGMAADGVSQRKYNYMRAEQIYRDEQGLSLMPNTAQPVLPAQNQALPPEVRAFLNAGRTR

SEQ ID NO: 16674 - protein, 232 aa, Escherichia coli; identical to SEQ ID NO: 2087

SEQ ID NO: 16675 - protein, 241 aa, Escherichia coli; identical to SEQ ID NO: 2922

SEQ ID NO: 16676 - protein, 203 aa, Escherichia coli; identical to SEQ ID NO: 2201

SEQ ID NO: 16677 - protein, 222 aa, Escherichia coli; identical to SEQ ID NO: 4102

SEQ ID NO: 16678 - protein, 162 aa, Escherichia coli; identical to SEQ ID NO: 1965

SEQ ID NO: 16679 - protein, 446 aa, Escherichia coli; identical to SEQ ID NO: 2176

SEQ ID NO: 16680 - protein, 617 aa, Escherichia coli
MHQVLIMPRFARLTIALGLATAVFPVDAEYYFNPRFLSNDLAESVDLSAFTKGREAPPGTYRVDIYLNDEFMTSRDITFIADDNNAELIPCLSTDLLVSLGIKKIALLDNKEHSAEKHVPDNSACTPLQDRLADASTEFDVGQQHLSLSVPQIYVGRMARGYVSPDLWEEGINAGLLNYSFNGNSINNRSNHNAGKSNYAYLNLQSGINIGSWRLRDNSTWSYNSGSSNSSDSNKWQHINTSAERDIIPLRSRLTVGDSYTDGDIFDSVNFRGLKINSTEAMLPDSQHGFAPVIHGIARGTAQVSVKQNGYDVYQTTVPPGPFTIDDINSAANGGDLQVTIKEADGSIQTLYVPYSSVPVLQRAGYTRYALAMGEYRSGNNLQSSPKFIQGSLMHGLEGNWTPYGGMQIAEDYQAFNLGIGKDLGLFGAFSFDITQANTTLADGTRHSGQSVKSDKRFLLATFCALFTATLQAADVTITVNGRVVAKPCTIQTKEANVNLGDLYTRNLQQPGSASGWHNITLSLTDCPVETSAVTAIVTGSTDNTGYYKNEGTAENIQIELRDDQDAALKNGDSKTVIVDEITRNAQFPLKARAITVNGNASQGTIEALINVIYTWQ

SEQ ID NO: 16681 - protein, 826 aa, Escherichia coli; identical to SEQ ID NO: 3700

SEQ ID NO: 16682 - protein, 869 aa, Escherichia coli; identical to SEQ ID NO: 8419

SEQ ID NO: 16683 - protein, 193 aa, Escherichia coli; identical to SEQ ID NO: 2246

SEQ ID NO: 16684 - protein, 243 aa, Escherichia coli; identical to SEQ ID NO: 7668

SEQ ID NO: 16685 - protein, 450 aa, Escherichia coli; identical to SEQ ID NO: 3703

SEQ ID NO: 16686 - protein, 881 aa, Escherichia coli; identical to SEQ ID NO: 7756

SEQ ID NO: 16687 - protein, 512 aa, Escherichia coli; identical to SEQ ID NO: 2974

SEQ ID NO: 16688 - protein, 193 aa, Escherichia coli; identical to SEQ ID NO: 2246

SEQ ID NO: 16689 - protein, 363 aa, Escherichia coli; identical to SEQ ID NO: 3347

SEQ ID NO: 16690 - protein, 446 aa, Escherichia coli; identical to SEQ ID NO: 2176

SEQ ID NO: 16691 - protein, 241 aa, Escherichia coli; identical to SEQ ID NO: 2884

SEQ ID NO: 16692 - protein, 274 aa, Escherichia coli; identical to SEQ ID NO: 3721

SEQ ID NO: 16693 - protein, 249 aa, Escherichia coli
MRMVWNRFVCCLTLWIIVIYSLLTSFAHADGGISLDTTRVVYHANGKYATLRVRNSDEKSSYLIQPSVSGSLDENNQQSLDFVVSPSLFRPGKISEGVIKIMVVAPERMKKDRESLYWVNVKAIPASSKGDLNSDFNQVSGGVKIAVGNTIKLLFRPEGLAGTPQEGARNLRFTREKSGKLKVINNSPFYISIGALKVNGATVKSKNMMMVAPFSGFIFDDVPLSSEVKNVSWKAINDNGGLDEYFYKK

SEQ ID NO: 16694 - protein, 784 aa, Escherichia coli; identical to SEQ ID NO: 2244

SEQ ID NO: 16695 - protein, 170 aa, Escherichia coli [sequence omitted]

SEQ ID NO: 16696 - protein, 747 aa, Escherichia coli; identical to SEQ ID NO: 2072

SEQ ID NO: 16697 - protein, 446 aa, Escherichia coli
MMITLRKLPLAVAVAAGVMSAQAMAVDFHGYARSGIGWTGSGGEQQCFQTTGAQSKYRLGNECETYAELKLGQEVWKEGDKSFYFDTNVAYSVAQQNDWEATDPAFREANVQGKNLIEWLPGSTIWAGKRFYQRHDVHMIDFYYWDISGPGAGLENIDVGFGKLSLAATRSSEAGGSSSFASNNIYDYTNETANDVFDVRLAQMEINPGGTLELGVDYGRANLRDNYRLVDGASKDGWLFTAEHTQSVLKGFNKFVVQYATDSMTSQGKGLSQGSGVAFDNEKFAYNINNNGHMLRILDHGAISMGDNWDMMYVGMYQDINWDNDNGTKWWTVGIRPMFKWTPIMSTVMEIGYDNVESQRTGDKNNQYKITLAQQWQAGDSIWSRPAIRVFATYAKWDEKWGYDYTGNADNNANFGKAVPADFNGGSFGRGDSDEWTFGAQMEIWW

SEQ ID NO: 16698 - protein, 237 aa, Escherichia coli; identical to SEQ ID NO: 1814

SEQ ID NO: 16699 - protein, 203 aa, Escherichia coli; identical to SEQ ID NO: 2201

SEQ ID NO: 16700 - protein, 518 aa, Escherichia coli; identical to SEQ ID NO: 2349

SEQ ID NO: 16701 - protein, 203 aa, Escherichia coli; identical to SEQ ID NO: 2201

SEQ ID NO: 16702 - protein, 224 aa, Escherichia coli; identical to SEQ ID NO: 3165

SEQ ID NO: 16703 - protein, 130 aa, Escherichia coli; identical to SEQ ID NO: 3706

SEQ ID NO: 16704 - protein, 119 aa, Escherichia coli
MDAVLSVQGASAPVKKKSFFSKFTRLNMLRLARAVIPAAVLMMFFPQLAMAAGSQDLMASGNSTVKATFGKDSSVVKWVVLAEVLVGAVMYMMTKNVKFLAGFAIISVFIAVGMAVVGL

SEQ ID NO: 16705 - protein, 351 aa, Escherichia coli; identical to SEQ ID NO: 2519

SEQ ID NO: 16706 - protein, 230 aa, Escherichia coli; identical to SEQ ID NO: 2580

SEQ ID NO: 16707 - protein, 869 aa, Escherichia coli; identical to SEQ ID NO: 3173

SEQ ID NO: 16708 - protein, 746 aa, Escherichia coli; identical to SEQ ID NO: 4083

SEQ ID NO: 16709 - protein, 193 aa, Escherichia coli; identical to SEQ ID NO: 2246

SEQ ID NO: 16710 - protein, 851 aa, Escherichia coli
MPSFIGGLVVFVSAAFNAQAETWFDPAFFKDDPSMVADLSRFEKGQKITPGVYRVDIVLNQTIVDTRNVNFVEITPEKGIAACLTTESLDAMGVNTDAFPAFKQLDKQACVPLAEIIPDASVTFNVNKLRLEISVPQIAIKSNARGYVPPERWDEGINALLLGYSFSGANSIHSSADSDSGDSYFLNLNSGVNLGPWRLRNNSTWSRSSGQTAEWKNLSSYLQRAVIPLKGELTVGDDYTAGDFFDSVSFRGVQLASDDNMLPDSLKGFAPVVRGIAKSNAQITIKQNGYTIYQTYVSPGAFEISDLYSTSSSGDLLVEIKEADGSVNSYSVPFSSVPLLQRQGRIKYAVTLAKYRTNSNEQQESKFAQATLQWGGPWGTTWYGGGQYAEYYRAAMFGLGFNLGDFGAISFDATQAKSTLADQSEHKGQSYRFLYAKTLNQLGTNFQLMGYCYSTSGFYTLSDTMYKHMDGYEFNDGDDEDTPMWSRYYNLFYTKRGKLQVNISQQLGEYGSFYLSGSQQTYWHTDQQDRLLQFGYNTQIKDLSLGVSWNYSKSRGQPDADQVFALNFSLPLNLLLPRSNDSYTRKKNYAWMTSNTSIDNEGHITQNLGLTETLLDDGNLSYSVQQGYNSEGKTANGSASMDYKGAFADARVGYNYSDNGSQQQLNYALSGSLVAHSQGITLGQSLGETNVLIAAPGAENTRVANSTGLKTDWRGYTVVPYATSYRENRIALDAASLKRNVDLENAVVNVVPTKGALVLAEFNAHAGARVLMKTSKQGIPLRFGAIATLDGIQTNSGIIDDDGSLYMSGLPAQGAITVRWGEAPDQICHISYQLTEQQINSAITRMDAICR

SEQ ID NO: 16711 - protein, 518 aa, Escherichia coli
MKKLKINYLFIGILALLLAVALWPSIPWFGKADNRIAAIQARGELRVSTIHTPLTYNEINGKPFGLDYELAKQFADYLGVKLKVTVRQNISQLFDDLDNGNADLLAAGLVYNSERVKNYQPGPTYYSVSQQLVYKVGQYRPRTLGNLTAEQLTVAPGHVVVNDLQTLKETKFPELSWKVDDKKGSAELMEDVIEGKLDYTIADSVAISLFQRVHPELAVALDITDEQPVTWFSPLDGDNTLSAALLDFFNEMNEDGTLARIEEKYLGHGDDFDYVDTRTFLRAVDAVLPQLKPLFEKYAEEIDWRLLAAIAYQESHWDAQATSPTGVRGMMMLTKNTAQSLGITDRTDAEQSISGGVRYLQDMMSKVPESVPENERIWFALAAYNMGYAHMLDARALTAKTKGNPDSWADVKQRLPLLSQKPYYSKLIYGYARGHEAYAYVENIRKYQISLVGYLQEKEKQATEAAMQLAQDYPAVSPTELGKEKFPFLSFLSQSSSNYLTHSPSLLFSRKGSEEKQN

SEQ ID NO: 16712 - protein, 213 aa, Escherichia coli; identical to SEQ ID NO: 2232

SEQ ID NO: 16713 - protein, 432 aa, Escherichia coli; identical to SEQ ID NO: 2026

SEQ ID NO: 16714 - protein, 121 aa, Escherichia coli; identical to SEQ ID NO: 2522

SEQ ID NO: 16715 - protein, 763 aa, Escherichia coli
MPSVLKPGLALPAGQYYIDVVVNNENTGKARLIITPEEEKAGMLCLSSEWLKNANVPIRLDGYVGEYNEKAGCYQLARSPYTRVDFNYGNQALIFSVPQTNIISQTDPSRWDYGVNAFRLQYDGNVMGQSSSGTSANGSADLDINLGRWVLSSSMNGSRDSDGKTDFAVRDATLSTALSSVRGDLKLGKSWTRNDQFSDFGFYGVSLRSNSNMTPGEYRGYAPLISGVATTTSRITITQNGYTVYSRVVQPGPYELNDVRPVGNGDLEVTVEDASGRKTVTRYPVTTLPTLLRPGEVQYDFSVGRRSSGSDIGHPFTDGDKGVFWLGSLAYGLGSTTLSSATILHNRYRAGGITLTQSLGVLGAMSVGGSMSHAEYDNKEVKRGHSISAKYAKSFANTTNLHLMAYRYQSKGYVEFANFAPQDRYARYNQKSRYEMQVTQRLPWNANLGVSAWREDYWSQPGQAVGANLNTGFTLFDYVSFTVNAGFNRYPYKEKDDYTVSLSATVPFTVAGVRHYTSSSVSHSSVSGTQFRTSASAMPNDRLGYSVSAAASDKGARSASASMNYGFDAIQTNAGISQSRNNTSYNAGFSGSVVATAESGLLFTRDQSDTMGVVHIPDVPGVRFNGSPETNSKGYTVVGLSDYSQNRIDIDMENVPDNLDLDVTSYSVVPTEKAVVYREFRANYVKRYFLQVKDRQGRILNGGDAKTEQGLNAGFITRNGVLSMSLLSEPKEVKVSLDGGKTCRISMAGIKPGTERVQEVFCE

SEQ ID NO: 16716 - protein, 228 aa, Escherichia coli
MVKWGLSALLAFTLSGQALAAFTVSGTRFIYGEGKKNISFEVTNNANDTYGGQVWVDNVSEGGGVYMVPTPPFFKVSPKQKQIVRIMKTDGGALPSDRESLFWLNIQEIPPKPKTDGNVLSVAINTRVKLFYRPKALMAGRKGAEKKIEVIRRNGTTYLKNPTPYYFAVAKVKVNGKDVALKSDEEQKLAILAPFGEVAVSQVPVTAKNISVDTINDWGGVENHVLKG

SEQ ID NO: 16717 - protein, 230 aa, Escherichia coli; identical to SEQ ID NO: 14779

SEQ ID NO: 16718 - protein, 805 aa, Escherichia coli; identical to SEQ ID NO: 14689

SEQ ID NO: 16719 - protein, 203 aa, Escherichia coli; identical to SEQ ID NO: 2201

SEQ ID NO: 16720 - protein, 518 aa, Escherichia coli
MKKLKINYLFIGILALLLAVALWPSIPWFGKADNRIAAIQARGELRVSTIHTPLTYNEINGKPFGLDYELAKQFADYLGVKLKVTVRQNISQLFDDLDNGNADLLAAGLVYNSERVKNYQPGPTYYSVSQQLVYKVGQYRPRTLGNLTAEQLTVAPGHVVVNDLQTLKETKFPELSWKVDDKKGSAELMEDVIEGKLDYTIADSVAISLFQRVHPELAVALDITDEQPVTWFSPLDGDNTLSAALLDFFNEMNEDGTLARIEEKYLGHGDDFDYVDTRTFLRAVDAVLPQLKPLFEKYAEEIDWRLLAAIAYQESHWDAQATSPTGVRGMMMLTKNTAQSLGITDRTDAEQSISGGVRYLQDMMSKVPESVPENERIWFALAAYNMGYAHMLDARALTAKTKGNPDSWADVKQRLPLLSQKPYYSKLTYGYARGHEAYAYVENIRKYQISLVGYLQEKEKQATEAAVQLAQDYPAVSPTELGKEKFPFLSFLSQSSSNYLTHSPSLLFSRKGSEEKQN

SEQ ID NO: 16721 - protein, 432 aa, Escherichia coli; identical to SEQ ID NO: 2026

SEQ ID NO: 16722 - protein, 242 aa, Escherichia coli; identical to SEQ ID NO: 2697

SEQ ID NO: 16723 - protein, 815 aa, Escherichia coli
MNIYRLSFVSCLVMAMPCAMAVEFNLNVLDKSMRDRIDISLLKEKGVIAPGEYFVSVAVNNNKISNGQKINWQKKGDKTIPCINDSLVDKFGLKPDIRQSLPQIDRCIDFSSRPEMLFNFDQANQQLNISIPQAWLAWHSENWAPPSTWKEGVAGVLMDYNLFASSYRPQDGSSSTNLNAYGTAGINAGAWRLRSDYQLNKTDSEDNHDQSGGISRTYLFRPLPQLGSKLTLGETDFSSNIFDGFSYTGAALASDDRMLPWELRGYAPQISGIAQTNATVTISQSGRVIYQKKVPPGPFIIDDLNQSVQGTLDVKVTEEDGRVNNFQVSAASTPFLTRQGQVRYKLAAGQPRPSMSHQTENETFFSNEVSWGMLSNTSLYGGLLISDDDYHSAAMGIGQNMLWLGALSFDVTWASSHFDTQQDERGLSYRFNYSKQVDATNSTISLAAYRFSDRHFHSYANYLDHKYNDSDAQDEKQTISLSVGQPITPLNLNLYANLLHQTWWNADASTTANITAGFNVGIGDWRDISISTSFNTTHYEDKDRDNQIYLSISLPFGNGGRVGYDMQNSSHSTIHRMSWNDTLDERNSWGMSAGLQSDRPDNGAQVSGNYQHLSSAGEWDISGTYAASDYSSVSSSWSGSFTATQYGAAFHRRSSTNEPRLMVSTDGVADIPVQGNLDYTNHFGIAVVPLISSYQPSTVAVNMNDLPDGVTVAENVIKETWIEGAIGYKSLASRSGKDVNVIIRNASGQFPPLGADIRQDDSGISVGMVGEEGHAWLSGVAENQLFTVVWGEQSCIIHLPERLEDTTKRLILPCH

SEQ ID NO: 16724 - protein, 774 aa, Escherichia coli; identical to SEQ ID NO: 7708

SEQ ID NO: 16725 - protein, 686 aa, Escherichia coli
MIVEGSATAPDDGENDYSVTSTSAGTKMQMTQRDIPQSVTIVSQQRMEDQQLQTLGEVMENTLGISKSQADSDRALYYSRGFQIDNYMVDGIPTYFESRWNLGDALSDMALFERVEVVRGATGLMTGTGNPSAAINMVRKHATSREFKGDVSAEYGSWNKERYVADLQSPLTEDGKIRARIVGGYQNNDSWLDRYNSEKTFFSGIVDADLGDLTTLSAGYEYQHIDVNSPTWGGLPRWNTDGSSNSYDRARSTAPDWAYNDKEINKVFMTLKQRFADTWQATLNATHSEVEFDSKMMYVDAYVNKADGMLIGPYSNYGPGFDYVGGTGWNSGKRKVDALDLFADGSYELFGRQHNLMFGGSYSKQNNRYFSSWANIFPDEIGSFYNFNGNFPQTDWSPQSLAQDDTTHMKSLYAATRVTLADPLHLILGARYTNWRVDTLTYSMEKNHTTPYAGLVFDINDNWSTYASYTSIFQPQNDRDSSGKYLAPITGNNYELGLKSDWMNSRLTTTLAIFRIEQDNVAQSTGTPIPGSNGETAYKAVDGTVSKGVEFELNGAITDNWQLTFGATRYIAEDNEGNAVNPNLPRTTVKMFTSYRLPVMPELTVGGGVNWQNRVYTDTVTPYGTFRAEQGSYALVDLFTRYQVTKNFSLQGNVNNLFDKTYDTNVEGSIVYGAPRNFSITGTYQF

SEQ ID NO: 16726 - protein, 359 aa, Escherichia coli; identical to SEQ ID NO: 2329

SEQ ID NO: 16727 - protein, 696 aa, Escherichia coli; identical to SEQ ID NO: 4038

SEQ ID NO: 16728 - protein, 834 aa, Escherichia coli; identical to SEQ ID NO: 3692

SEQ ID NO: 16729 - protein, 249 aa, Escherichia coli; identical to SEQ ID NO: 3492

SEQ ID NO: 16730 - protein, 551 aa, Escherichia coli; identical to SEQ ID NO: 2446

SEQ ID NO: 16731 - protein, 871 aa, Escherichia coli
MHQVLLLPRFARLTIALGLATAVFPVDAEYYFNPRFLSNDLAESVDLSAFTKGREAPPGTYRVDIYLNDEFMTSRDITFIAGDNNADLIPCLSTDLLVSLGIKKSALLDNKEHSAEKHVPDNSACTPLQDRLADASTEFDVGQQHLSLSVPQIYVGRMARGYVSPDLWEEGINAGLLNYSFNGNSINNRSNHNAGKSNYAYLNLQSGINIGSWRLRDNSTWSYNSGSSNSSDSNKWQHINTSAERDIIPLRSRLTVGDSYTDGDIFDSVNFRGLKINSTEAMLPDSQHGFAPVIHGIARGTAQVSVKQNGYDVYQTTVPPGPFTIDDINSAANGGDLQVTIKEADGSIQTLYVPYSSVPVLQRAGYTRYALAMGEYRSGNNLQSSPKFIQGSLMHGLEGNWTPYGGMQIAEDYQAFNLGIGKDLGLFGAFSFDITQANTTLADGTRHSGQSIKSVYSKSFYQTGTNIQVAGYRYSTQGFYNLSDSAYSRMSGYTVKPPTGDSNEQTQFIDYFNLFYSKRGQEQISISQQLGNYGTTFFSASRQSYWNTSRSDQQISFGLNVPFGDITTSLNYSYSNNIWQNDRDHLLAFTLNVPFSHWMRTDSQSAFRNSNASYSMSNDLKGGMTNLSGVYGTLLPDNNLNYSVQVGNTHGGNTSSGTSGYSSLNYRGAYGNTNVGYSRSGDSSQIYYGMNGGIIAHADGITFGQPLGDTMVLVKAPGADNVKIENQTGIHTDWRGYAILPFATEYRENRVALNANSLADNVELDETVVTVIPTHGAIARATFNAQIGGKVLMTLKYGNKSVPFGAIVTHGENKNSSIVAENGQVYLTGLPQSGKLQVSWGKDKNSNCIVEYKLPEVSPGTLLNQQTAICR

SEQ ID NO: 16732 - protein, 191 aa, Escherichia coli; identical to SEQ ID NO: 2727

SEQ ID NO: 16733 - protein, 359 aa, Escherichia coli; identical to SEQ ID NO: 2329

SEQ ID NO: 16734 - protein, 729 aa, Escherichia coli; identical to SEQ ID NO: 2074

SEQ ID NO: 16735 - protein, 249 aa, Escherichia coli; identical to SEQ ID NO: 2793

SEQ ID NO: 16736 - protein, 565 aa, Escherichia coli; identical to SEQ ID NO: 3088

SEQ ID NO: 16737 - protein, 207 aa, Escherichia coli; identical to SEQ ID NO: 2211

SEQ ID NO: 16738 - protein, 838 aa, Escherichia coli
MPQRHHQGHKRTPKQLALIIKRCLPMVLTGSGMLCTTANAEEYYFDPIMLETTKSGMQTTDLSRFSKKYAQLPGTYQVDIWLNKKKVSQKKITFTANAEQLLQPQFTVEQLRELGIKVDEIPALAEKDDDSVINSLEQIIPGTAAEFDFNHQQLNLSIPQIALYRDARGYVSPSRWDDGIPTLFTNYSFTGSDNRYRQGNRSQRQYLNMQNGANFGPWRLRNYSTWTRNDQTSSWNTISSYLQRDIKALKSQLLLGESATSGSIFSSYTFTGVQLASDDNMLPNSQRGFAPTVRGIANSSAIVTIRQNGYVIYQSNVSAGAFEINDLYPSSNSGDLEVTIEESDGTQRRFIQPYSSLPMMQRPGHLKYSATAGRYRADANSDSKEPEFAEATAINGLNNTFTLYGGLLGSEDYYALGIGIGGTLGALGALSMDINRADTQFDNQHSFHGYQWRTQYIKDIPETNTNIAVSYYRYTNDGYFSFNEANTRNWDYNSRQKSEIQFNISQTIFDGVSLYASGSQQDYWGNNDKNRNISVGVSGQQWGVGYSLNYQYSRYTDQNNDRALSLNLSIPLERWLPRSRVSYQMTSQKDRPTQHEMRLDGSLLDDGRLSYSLEQSLDDDNNHNSSLNASYRSPYGTFSAGYSYGNDSSQYNYGVTGGVVIHPHGVTLSQYLGNAFALIDANGASGVRIQNYPGIATDPFGYAVVPYLTTYQENRLSVDTTQLPDNVDLEQTTQFVVPNRGAMVAARFNANIGYRVLVTVSDRNGKPLPFGALASNDDTGQQSIVDEGGILYLSGISSKSQSWTVRWGNQADQQCQFAFSTPDSEPTTSVLQGTAQCH

SEQ ID NO: 16739 - protein, 678 aa, Escherichia coli; identical to SEQ ID NO: 2231

SEQ ID NO: 16740 - protein, 793 aa, Escherichia coli; identical to SEQ ID NO: 2768

SEQ ID NO: 16741 - protein, 686 aa, Escherichia coli; identical to SEQ ID NO: 3129

SEQ ID NO: 16742 - protein, 539 aa, Escherichia coli; identical to SEQ ID NO: 3050

SEQ ID NO: 16743 - protein, 700 aa, Escherichia coli; identical to SEQ ID NO: 3128

SEQ ID NO: 16744 - protein, 111 aa, Escherichia coli; identical to SEQ ID NO: 3096

SEQ ID NO: 16745 - protein, 628 aa, Escherichia coli
MKPAASFFYCGCFTMIKKASLLTACSVTAFSAWAQDTSPDTLVVTANRFEQPRSTVLAPTTVVTRQDIDRWQSTSVNDVLRRLPGVDITQNGGSGQLSSIFIRGTNASHVLVLIDGVRLNLAGVSGSADLSQFPIALVQRVEYIRGPRSAVYGSDAIGGVVNIITTRDEPGTEISAGWGSNSYQNYDVSTQQQLGDKTRVTLLGDYAHTHGYDVVAYGNTGTQAQTDNDGFLSKTLYGALEHNFTDAWSGFVRGYGYDNRTNYDAYYSPGSPLLDTRKLYSQSWDAGLRYNGELIKSQLITSYSHSKDYNYDPHYGRYDSSATLDEMKQYTVQWANNIIIGHGNIGAGVDWQKQSTAPGTAYVKDGYDQRNTGIYLTGLQQVGDFTFEGAARSDDNSQFGRHGTWQTSAGWEFIEGYRFIASYGTSYKAPNLGQLYGFYGNPNLNPEKSKQWEGAFEGLTAGVNWRISGYRNDVSDLIDYDDHTLKYYNEGKARIKGVEATANFDTGPLTHTVSYDYVDARNAITDVPLLRRAKQQVKYQLDWQLYDFDWGITYQYLGTRYDKDYSSYPYQTVKMGGVSLWDLAVAYPVTSHLTVRGKIANLFDKDYETVYGYQTAGREYTLSGSYTF

SEQ ID NO: 16746 - protein, 122 aa, Escherichia coli; identical to SEQ ID NO: 2915

SEQ ID NO: 16747 - protein, 241 aa, Escherichia coli; identical to SEQ ID NO: 2851

SEQ ID NO: 16748 - protein, 224 aa, Escherichia coli
MKGLLALLISSMVLPAHAGIVIYGTRIIYPAENKEVMVQLMNQGNRSSLLQAWIDDGDTSLPPEKIQVPFMLTPPVAKIGANSGQQVKIKIMPNKLPTNKESIFYLNVLDIPPNSPEQEGKNALKFAMQNRIKLFYRPSGIAPVNKATFKKLLVNRSGNGLVIKNDSANWVTISDVKANNVKVNYETIMIAPLESQSINVKSNNANNWYLTIIDDHGNYISDKI

SEQ ID NO: 16749 - protein, 897 aa, Escherichia coli; identical to SEQ ID NO: 1908

SEQ ID NO: 16750 - protein, 386 aa, Escherichia coli; identical to SEQ ID NO: 3072

SEQ ID NO: 16751 - protein, 368 aa, Escherichia coli; identical to SEQ ID NO: 2371

SEQ ID NO: 16752 - protein, 121 aa, Escherichia coli; identical to SEQ ID NO: 9982

SEQ ID NO: 16753 - protein, 111 aa, Escherichia coli; identical to SEQ ID NO: 3096

SEQ ID NO: 16754 - protein, 385 aa, Escherichia coli; identical to SEQ ID NO: 13775

SEQ ID NO: 16755 - protein, 784 aa, Escherichia coli; identical to SEQ ID NO: 2244

SEQ ID NO: 16756 - protein, 360 aa, Escherichia coli
MMKKYLALALIAPLLISCSTTKKGDTYNEAWVKDTNGFDILMGQFAHNIENIWGFKEVVIAGPKDYVKYTDQYQTRSHINFDDGTITIETIAGTEPAAHLRRAIIKTLLMGDDPGSVDLYSDVDDITISKEPFLYGQVVDNTGQPIRWEGRASNFADYLLKNRLQSRSNGLRIIYSVTINMVPNHLDKRAHKYLGMVRQASRKYGIDESLILAIMQTESSFNPYAVSRSDALGLMQVVQHTAGKDVFRSQGKSGTPSRSFLFDPASNIDTGTAYLAMLNNVYLGGIDNPTSRRYAVITAYNGGAGSVLRVFSNDKIQAANIINTMTPGDVYQTLTTRHPSAESRRYLYKVNTAQKSYRRR

SEQ ID NO: 16757 - protein, 518 aa, Escherichia coli; identical to SEQ ID NO: 2349

SEQ ID NO: 16758 - protein, 266 aa, Escherichia coli; identical to SEQ ID NO: 1894

SEQ ID NO: 16759 - protein, 828 aa, Escherichia coli
MKLSRRSFMKANAVAAAAAAAGLSVPGVARAVVGQQEAIKWDKAPCRFCGTGCGVLVGTQQGRVVACQGDPDAPVNRGLNCIKGYFLPKIMYGKDRLTQPLLRMKNGKYDKEGEFTPITWEQAFDVMEDKFKTALKEKGPESIGMFGSGQWTIWEGYAASKLFKAGFRSNNIDPNARHCMASAVVGFMRTFGMDEPMGCYDDIEQADAFVLWGANMAEMHPILWSRITNRRLSNQNVTVAVLSTYQHRSFELADNGIIFTPQSDLVILNYIANYIIQNNAINQDFFSKHVNLRKGATDIGYGLRPTHPLEKAAKNPGSDASEPMSFEDYKAFVAEYTLEKTAEMTGVPKDQLEQLAQLYADPNKKVISYWTMGFNQHTRGVWANNLVYNLHLLTGKISQPGCGPFSLTGQPSACGTAREVGTFAHRLPADMVVTNEKHRDICEKKWNIPSGTIPAKIGLHAVAQDRALKDGKLNVYWTMCTNNMQAGPNINEERMPGWRDPRNFIIVSDPYPTVSALAADLILPTAMWVEKEGAYGNAERRTQFWRQQVQAPGEAKSDLWQLVQFSRRFKTEEVWPEDLLAKKPELRGKTLYEVLYATPEVSKYPVSELAEDQLNDESRELGFYLQKGLFEEYAWFGRGHGHDLAPFDDYHKARGLRWPVVNGKETQWRYSEGNDPYVKAGEGYKFYGKPDGKAVIFALPFEPAAEAPDEEYDLWLSTGRVLEHWHTGSMTRRVPELHRAFPEAVLFIHPLDAKARDLRRGDKVKVVSRRGEVISIVETRGRNRPPQGLVYMPFFDAAQLVNKLTLDATDPLSKETDFKKCAVKLEKV

SEQ ID NO: 16760 - protein, 162 aa, Escherichia coli
MKTILPAVLFAAFATTSAWAADSVQPLEKIAPYPQAEKGMKRQVIQLTPQEDESTLKVELLIGQTLEVDCNLHRLGGKLESKTLEGWGYDYYVFDKVSSPVSTMMACPDGKKEKKFVTAYLGDAGMLRYNSKLPIVVYTPDNVDVKYRIWKAEEKIDNAVVR

SEQ ID NO: 16761 - protein, 274 aa, Escherichia coli; identical to SEQ ID NO: 9502

SEQ ID NO: 16762 - protein, 102 aa, Escherichia coli; identical to SEQ ID NO: 1829

SEQ ID NO: 16763 - protein, 866 aa, Escherichia coli; identical to SEQ ID NO: 3688

SEQ ID NO: 16764 - protein, 193 aa, Escherichia coli; identical to SEQ ID NO: 2246

SEQ ID NO: 16765 - protein, 430 aa, Escherichia coli
MKQALRVAFGFLILWASVLHAEVRIVIDSGVDSGRPIGVVPFQWAGPGAAPEDIGGIVAADLRNSGKFNPLDRARLPQQPGSAQEVQPAAWSALGIDAVVVGQVTPNPDGSYNVAYQLVDTGGAPGTVLAQNSYKVNKQWLRYAGHTASDEVFEKLTGIKGAFRTRIAYVVQTNGGQFPYELRVSDYDGYNQFVVHRSPQPLMSPAWSPDGSKLAYVTFESGRSALVIQTLANGAVRQVASFPRHNGAPAFSPDGSKLAFALSKTGSLNLYVMDLASGQIRQVTDGRSNNTEPTWFPDSQNLAFTSDQAGRPQVYKVNVNGGAPQRITWEGSQNQDADVSSDGKFMVMVSSNGGQQHIAKQDLATGGVQVLSSTFLDETPSLAPNGTMVIYSSSQGMGSVLNLVSTDGRFKARLPATDGQVKFPAWSPYL

SEQ ID NO: 16766 - protein, 368 aa, Escherichia coli; identical to SEQ ID NO: 3171

SEQ ID NO: 16767 - protein, 230 aa, Escherichia coli; identical to SEQ ID NO: 3348

SEQ ID NO: 16768 - protein, 266 aa, Escherichia coli; identical to SEQ ID NO: 1894

SEQ ID NO: 16769 - protein, 243 aa, Escherichia coli; identical to SEQ ID NO: 8454

SEQ ID NO: 16770 - protein, 616 aa, Escherichia coli
MGPDVQGKVSIRTITPLNERQYYQLFLNLLEAQGYAVVPVENNVLKVVKSGEAKTEPLPLTGEGHENYVGDEMVTRIVPVRNVSVRELAPVLQQMTDLDGSGSIVNYEPSNVIMLTGRASVVKRLTEVIQRIDREGNRTEEVIPLGNASASEIVRVLESLTRNSSENQPATLKSQIVADERTNSVIVSADPATRDKIRRLIRRLDSEMERSGNSQVFYLKYSKAEDLVDVLKQVSGTLTSAKEEAEGTTGSRREVVSIAASKHSNALIVTAPQDVMQSLQSVIEQLDIRRAQVHVEALIAEVAEGSNINFGVQWMSKDTGFMQFANGTQIPIGSLSMAVSQAKPQKGSTVISENGATTINPDTEGDLSRLSQLLSGFSGTAVGVVKGDWAALVQAVKNDSGTNVLSMPSITTLDNQEAFFMVGQDVPVLTGSAVGENNSNPFNTVERKKVGIMLKVTPQINEGNAVQMVIEQEVSKVEGQTSLDVVFGERKLKTTVLANDGELIVLGGLMDDQAGESVAKVPLLGDIPLIGNLFKSTADKKEKRNLMVFIRPTILRDGMAADGVSQRKYNYMRAEQIYRDEQGLSLMPHTAQPVLPAQNQALPPEVRAFLNAGRTR

SEQ ID NO: 16771 - protein, 395 aa, Escherichia coli; identical to SEQ ID NO: 3220

SEQ ID NO: 16772 - protein, 162 aa, Escherichia coli; identical to SEQ ID NO: 1965

SEQ ID NO: 16773 - protein, 660 aa, Escherichia coli; identical to SEQ ID NO: 4097

SEQ ID NO: 16774 - protein, 204 aa, Escherichia coli
MMKKIAITCALLSSLVASRVWADAASDLKSRLDKVSSFHASFTQKVTDGSGAAVQEGQGDLWVKRPNLFNWHMTQPDESILVSDGKTLWFYNPFVEQATATWLKDATGNTPFMLIARNQSSDWQQYNIKQNGDDFVLTPKASNGNLKQFTINVGRDGTIHQFSAVEQDDQRSSYQLKSQQNGAVDAAKFTFTPPQGVTVDDQRK

SEQ ID NO: 16775 - protein, 213 aa, Escherichia coli; identical to SEQ ID NO: 2232

SEQ ID NO: 16776 - protein, 235 aa, Escherichia coli
MIAMQKNAAHTYAISSLLVLSLTSCAWIPSTPLVQGATSAQPVPGPTPVANGSIFQSAQPINYGYQPLFEDRRPRNIGDTLTIVLQENVSASKSSSANASRDGKTNFGFDTVPRYLQGLFGNARADVEASGGNTFNGKGGANASNTFSGTLTVTVDQVLVNGNLHVVGEKQIAINQGTEFIRFSGVVNPRTISGSNTVPSTQVADARIEYVGNGYINEAQNMGWLQRFFLNLSPM

SEQ ID NO: 16777 - protein, 869 aa, Escherichia coli; identical to SEQ ID NO: 3173

SEQ ID NO: 16778 - protein, 746 aa, Escherichia coli; identical to SEQ ID NO: 6428

SEQ ID NO: 16779 - protein, 823 aa, Escherichia coli; identical to SEQ ID NO: 3266

SEQ ID NO: 16780 - protein, 224 aa, Escherichia coli; identical to SEQ ID NO: 3115

SEQ ID NO: 16781 - protein, 360 aa, Escherichia coli; identical to SEQ ID NO: 3062

SEQ ID NO: 16782 - protein, 331 aa, Escherichia coli; identical to SEQ ID NO: 6212

SEQ ID NO: 16783 - protein, 760 aa, Escherichia coli; identical to SEQ ID NO: 2080

SEQ ID NO: 16784 - protein, 203 aa, Escherichia coli; identical to SEQ ID NO: 2201

SEQ ID NO: 16785 - protein, 216 aa, Escherichia coli; identical to SEQ ID NO: 3112

SEQ ID NO: 16786 - protein, 696 aa, Escherichia coli; identical to SEQ ID NO: 3314

SEQ ID NO: 16787 - protein, 224 aa, Escherichia coli; identical to SEQ ID NO: 4053

SEQ ID NO: 16788 - protein, 606 aa, Escherichia coli
MYRTHRQHSLLSSGGVPSFIGGLVVFVSAAFNAQAETWFDPAFFKDDPSMVADLSRFEKGQKITPGVYRVDIVLNQTIVDTRNVNFVELTPEKGIAACLTTESLDAMGVNTDAFPAFKQLDKQACALLAEIIPDASVTFNVNKLRLEISVPQIAIKSNARGYVPPERWDEGINALLLGYSFSGANSIHSSADSDSGDSYFLNLNSGVNLGPWRLRNNSTWSRSSGQTAEWKNLSSYLQRAVIPLKGELTVGDDYTAGDFFDSVSFRGVQLASDDNMLPDSLKGFAPVVRGIAKSNAQITIKQNGYTIYQTYVSPGAFEISDLYSTSSSGDLLVEIKEADGSVNSYSVPFSSVPLLQRQGRIKYAVTLAKYRTNSNEQQESKFAQATLQWGGPWGTTWYGGGQYAEYYRAAMFGLGFNLGDFGAISFDATQAKSTLADQSEHKGQSYRFLYAKTLNQLGTNFQLMGYRYSTSGFYTLSDTMYKHMDGYEFNDGDDEDTPMWSRYYNLFYTKRGKLQVNISQQLGEYGSFYLSGSQQTYWHTDQQDRLLQFGYNTQIKDLSLGGSWNYSKSRGQPDADQVFALNFSLPLNLLLPRSNDSYTRKKITPG

SEQ ID NO: 16789 - protein, 793 aa, Escherichia coli
MLKKTLLAYTIGFAFSPPANADGIEIAAVDFDRETLKSLGVDPNISHYFSRSARFLPGEYSLIVSVNGEKKGNIATRFDENGDICLDQAFLQQAGLKIPSEEKNGCYDYILSYPGTTITPLPNQEALDIIVSPQAIIPIGLDLTNAATGGTAALLNYSLMSSRAEFSNGSSDYSQAALEGGININDWMLRSHQFLTQTNGTFSNQNSSTYLQRTFTDLKTLMRAGEVNLNNSVLEGASIYGIEIAPDNALQTSGSGVQVTGIANTSQARVEIRQQGVLIHSILVPAGAFTIPDVPVRNGNSDLNVTVVETDGSSHNYIVPSTLFNQHVESFQGYRFAIGRVDDDYDESPWVISASSGWNLTRWSAMNGGVIVAENYQAASIRSSLVPLPDLTVSSQISTSQDTKDSLQGQKYRLDANYNLPFSLGLTTSLTRSDRHYRELSEAIDDDYTDPTKSTYALGLNWSNSILGGFNISGYKTYSYDGDNDSSNLNINWNKAFKHATVSVNWQHQLSASENNEDDGDLFYVNISIPFGRSNTATLYTRHDDHKTHYGTGVMGVVSDEMSYYVNAERDHDERETSLNGSISSNLHYTQVSLAAGASGSDSRTYNGTMSGGIAVHDQGVTFSPWTINDTFAIAKMDNNIAGVRITSQAGPVWTDFRGNAVIPSIQPWRTSGVEIDTASLPKNVDIGNGTKMIKQGRGAVGKVGFSAITQRRALLSITLSDGKKLPRGVAIEDSEGNYLTTSVDDGVVFLNNIKPDMVLDIKDEQQSCRIHLTFPEDAPKDVFYETATGECQ

SEQ ID NO: 16790 - protein, 191 aa, Escherichia coli; identical to SEQ ID NO: 2727

SEQ ID NO: 16791 - protein, 432 aa, Escherichia coli; identical to SEQ ID NO: 2026

SEQ ID NO: 16792 - protein, 203 aa, Escherichia coli; identical to SEQ ID NO: 2015

SEQ ID NO: 16793 - protein, 545 aa, Escherichia coli
MGPGVQGKVSIRTMTPLNERQYYQLFLNLLEAQGYAVVPMENDVLKVVKSSAAKVEPLPLVGEGSDNYAGDEMVTKVVPVRNVSVRELAPILRQMIDSAGSGNVVNYDPSNVIMLTGRASVVERLTEVIQRVDHAGNRTEEVIPLDNASASEIARVLESLTKNSGENQPATLKSQIVADERTNSVIVSGDPATRDKMRRLIRRLDSEMERSGNSQVFYLKYSKAEDLVDVLKQVSGTLTAAKEEAEGTVGSGREVVSIAASKHSNALIVTAPQDIMQSLQSVIEQLDIRRAQVHVEALIVEVAEGSNINFGVQWASKDAGLMQFANGTQIPIGTLGAAISQAKPQKGSTVISENGATTINPDTNGDLSTLAQLLSGFSGTAVGVVKGDWMALVQAVKNDSSSNVLSTPSITTLDNQEAFFMVGQDVPVLTGSTVGSNNSNPFNTVERKKVGIMLKVTPQINEGNAVQMVIEQEVSKVEGQTSLDVVFGERKLKTTVLANDGELIVLGGLMDDQAGESVAKVPLLGDIPLIGNLFKSTADKKENVT

SEQ ID NO: 16794 - protein, 249 aa, Escherichia coli
MRYLNTKNIIAAGVLLSCMSSIAWGAIIPDRTRIIMNESDKGEALKLTNQSKNLPYLAQTWIEDTKGNKSRDFIVTVPPMVRLNPSEQIQIRMITQEKIAQLPKDRETLFYFNVRETPPKTDKKNVMQVTMQHALKLFWRPKAIELEDDGVMTYEKVEIIRRNDGSIRFNNKMPYHVTLGYIGTNGVTMLPQTQSLMVTPFSYANTQFKNVPSTFQVGYINDFGGLSFYEINCPVVNNICNISVANRDQ

SEQ ID NO: 16795 - protein, 430 aa, Escherichia coli; identical to SEQ ID NO: 2617

SEQ ID NO: 16796 - protein, 199 aa, Escherichia coli; identical to SEQ ID NO: 3190

SEQ ID NO: 16797 - protein, 838 aa, Escherichia coli; identical to SEQ ID NO: 2795

SEQ ID NO: 16798 - protein, 386 aa, Escherichia coli; identical to SEQ ID NO: 3072

SEQ ID NO: 16799 - protein, 865 aa, Escherichia coli; identical to SEQ ID NO: 2167

SEQ ID NO: 16800 - protein, 161 aa, Escherichia coli; identical to SEQ ID NO: 2582

SEQ ID NO: 16801 - protein, 351 aa, Escherichia coli; identical to SEQ ID NO: 2519

SEQ ID NO: 16802 - protein, 130 aa, Escherichia coli; identical to SEQ ID NO: 3184

SEQ ID NO: 16803 - protein, 208 aa, Escherichia coli; identical to SEQ ID NO: 1949

SEQ ID NO: 16804 - protein, 826 aa, Escherichia coli; identical to SEQ ID NO: 3700

SEQ ID NO: 16805 - protein, 843 aa, Escherichia coli; identical to SEQ ID NO: 3163

SEQ ID NO: 16806 - protein, 641 aa, Escherichia coli; identical to SEQ ID NO: 3774

SEQ ID NO: 16807 - protein, 162 aa, Escherichia coli; identical to SEQ ID NO: 1973

SEQ ID NO: 16808 - protein, 686 aa, Escherichia coli; identical to SEQ ID NO: 3129

SEQ ID NO: 16809 - protein, 752 aa, Escherichia coli; identical to SEQ ID NO: 4012

SEQ ID NO: 16810 - protein, 753 aa, Escherichia coli; identical to SEQ ID NO: 6655

SEQ ID NO: 16811 - protein, 208 aa, Escherichia coli; identical to SEQ ID NO: 1949

SEQ ID NO: 16812 - protein, 230 aa, Escherichia coli; identical to SEQ ID NO: 3723

SEQ ID NO: 16813 - protein, 229 aa, Escherichia coli
MALLIFAVLSLLVAGELRAGVVVGGTRFIFPADRESISILLTNTSQESWLINSKINRPTRWAGGEASTVPAPLLAAPPLILLKPGTTGTLRLLRTESDILPVDRETLFELSIASVPSGKVENQSVKVAMRSVFKLFWRPEGLPGDPLEAYQQLRWTRNSQGVQLTNPTPYYINLIQVSVNGKALSNAGVVPPKSQRQTSWCQAIAPCHVAWRAINDYGGLSAKKEQNLP

SEQ ID NO: 16814 - protein, 747 aa, Escherichia coli; identical to SEQ ID NO: 3670

SEQ ID NO: 16815 - protein, 678 aa, Escherichia coli; identical to SEQ ID NO: 6346

SEQ ID NO: 16816 - protein, 161 aa, Escherichia coli; identical to SEQ ID NO: 2582

SEQ ID NO: 16817 - protein, 224 aa, Escherichia coli
MTVSLTAILLSCSSAWAAGKGGIGLAATRLVYSEGEEQISLGVHNTSPDVPYLIQSWVMTPDNKKSADFIITPPLFVLNPANENLLRIMYIGAPLAKDRETLFFTSVRAVPSTTKRKEGNTLKIATQSVIKLFWRPKGLAYPLGEAPAKLRCTSSADMVTVSNPTPYFITLTDLKIGGKVVKNQMISPFDKYQFSLPKGAKNSSVTYRTINDYGAETPQLNCKS

SEQ ID NO: 16818 - protein, 351 aa, Escherichia coli; identical to SEQ ID NO: 3691

SEQ ID NO: 16819 - protein, 760 aa, Escherichia coli
MENNRNFPARQFHSLTFFAGLCIGITPVAQALAAEGQANADDTLVVEASTPSLYAPQQSADPKFSRPVADTTRTMTVISEQVIKDQGATNLTDALKNVPGVGAFFAGENGNSTTGDAIYMRGADTSNSIYIDGIRDIGSVSRDTFNTEQVEVIKGPSGTDYGRSAPTGSINMISKQPRNDSGIDASASIGSAWFRRGTLDVNQAIGDTTAVRLNVMGEKTHDAGRDKIKNERYGVAPSVAFGLGTANRLYLNYLHVTQHNTPDGGIPTIGLPGYSAPSAGTVALNHSGKVDTHNFYGTDSDYDDSTTDTATMRFEHDINDNTTIRNTTRWSRVKQDYLMTAIMGGASNITQPTSDVNSWTWSRTANTKDVSNKILTNQTNLTSTFYTGSIGHDVSTGVEFTRETQTNYGVNPVTLPAVNIYHPDSSIHPGGLTRNGANANGQTDTFAIYAFDTLQITRDFELNGGIRLDNYHTEYDSATACGGSGRGAITCPAGVAKGSPVTTVDTAKSGNLVNWKAGALYHLTENGNVYINYAVSQQPPGGNNFALAQSGSGNSANRTDFKPQKANTSEIGTKWQVLDKRLLLTAALFRTDIENEVEQNDDGTYSQYGKKRVEGYEISVAGNITPAWQVIGGYTQQKATIKNGKDVAQDGSSSLPYTPEHAFTLWSQYQATDDISVGAGARYIGSMHKGSDGAVGTPAFTEGYWVADAKLGYRVNRNLDFQLNVYNLFDTDYVASINKSGYRYHPGEPRTFLLTANMHF

SEQ ID NO: 16820 - protein, 678 aa, Escherichia coli; identical to SEQ ID NO: 7674

SEQ ID NO: 16821 - protein, 878 aa, Escherichia coli
MSYLNLRLYQRNTQCLHIRKHLLAGFFVRLFVACAFAAQAPLSSAELYFNPRFLADDPQAVADLSRFENGQELPPGTYRVDIYLNNGYMATRDVTFNTGDSEQGIVPCLTRAQLAGMGLNTASVSGMNLLADDACVPLTTMIHDATAHLDVGQQRLNLTIPQAFMSNRARGYIPPELWDPGINAGLLNYNFSGNSVQNRIGGNSHYAYLNLQSGLNIGAWRLRDNTTWSYNSSDSSSGSKNKWQHINTWLERDIIPLRSRLTLGDGYTQGDIFDGINFRGAQLASDDNMLPDSQRGFAPVIHGIARGTAQVTIKQNGYDIYNSTVPPGPFTINDIYAAGNSGDLQVTIKEADGSTQIFTVPYSSVPLLQREGHTRYSITAGEYRSGNAQQEKPRFFQSTLLHGLPAGWTIYGGTQLADRYRAFNFGIGKNMGALGALSVDMTQANSTLPDDSQHDGQSVRFLYNKSLNESGTNIQLVGYRYSTSGYFNFADTTYSRMNGYNIVTQDGVIQVKPKFTDYYNLAYNKRGKLQLTVTQQLGRSSTLYLSGSHQTYWGTNNVDEQFQAGLNTAFEDINWTLSYSLTKNAWQKGRDQMLALNVNIPFSHWLRSDSKSQWRHASASYSMSHDLNGRMTNLAGVYGTLLEDNNLSYSVQTGYAGGGDGNSGSTGYATLNYRGGYGNANIGYSHSDDIKQLYYGVSGGVLAHANGVTLGQPLNDTVVLVKAPGAKDAKVENQTGVRTDWRGYAVLPYATEYRENRVALDTNTLADNVDLDNAVANVVPTRGAIVRAEFKARVGIKLLMTLTHNNKPLPFGAMVTSESSQSSGIVADNGQVYLSGMPLAGKVQVKWGEEENAHCVANYQLPPESQQQLLTQLSAECR

SEQ ID NO: 16822 - protein, 373 aa, Escherichia coli; identical to SEQ ID NO: 9626

SEQ ID NO: 16823 - protein, 826 aa, Escherichia coli
MLRMTPLASAIVALLLGIEAYAAEETFDTHFMIGGMKDQQVANIRLDDNQPLPGQYDIDIYVNKQWRGKYEIIVKDNPQETCLSREVIKRLGINSDNFASGKQCLTFEQLVQGGSYSWDIGVFRLDFSVPQAWVEELESGYVPPENWERGINAFYTSYYVSQYYSDYKASGNNKSTYVRFNSGLNLLGWQLHSDASFSKTNNNPGVWKSNTLYLERGFAQLLGTLRVGDMYTSSDIFDSVRFSGVRLFRDMQMLPNSKQNFTPRVQGIAQSNALVTIEQNGFVVYQKEVPPGPFAITDLQLAGGGADLDVSVKEADGSVTTYLVPYAAVPNMLQPGVSKYDFAAGRSHIEGASKQSDFVQAGYQYGFNNLLTLYGGSMVANNYYAFTLGTGWNTRIGAISVDATKSHSKQDNGDVFDGQSYQIAYNKFVSQTSTRFGLAAWRYLSRDYRTFNDHVWANNKDNYRRDKNDIYDIADYYQNDFGRKNSFSANMSQSLPEGWGSVSLSTLWRDYWGRSGSSKDYQLSYSNNWRRISYTLAASQAYDENHHEEKRFNIFISIPFDWGDDVTTPRRQIYMSNSTTFDDQGGASNNTGLSGTVGSRDQFNYGVNLSYQHQENETTAGANLTWNAPVATVNGSYSQSSTYRQAGASVSGGIVAWSGGVNLANRLSETFAVMNAPGIKDAYVNGQKYRTTNRNGVVIYDGMTPYRENHLMLDVSQSDSEAELRGNRKIAAPYRGAVVLVNFDTDQRKPWFIKALRADGQPLMFGYEVNDIHGHNIGVVGQGSQLFIRTNEVPPSVNVAIDKQQGLSCTITFGKEIDESRNYICQ

SEQ ID NO: 16824 - protein, 367 aa, Escherichia coli; identical to SEQ ID NO: 2433

SEQ ID NO: 16825 - protein, 207 aa, Escherichia coli; identical to SEQ ID NO: 2211

SEQ ID NO: 16826 - protein, 361 aa, Escherichia coli; identical to SEQ ID NO: 3061

SEQ ID NO: 16827 - protein, 806 aa, Escherichia coli
MLCTTANAEEYYFDPIMLETTKSGMQTTDLSRFSKKYAQLPGTYQVDIWLNKKKVSQKKITFTANAEQLLQPQFTVEQLRELGIKVDEIPALAEKDDDSVINSLEQIIPGTAAEFDFNHQRLNLSIPQIALYRDARGYVSPSRWDDGIPTLFTNYSFTGSDNRYRQGNRSQRQYLNMQNGANFGPWRLRNYSTWTRNDQASSWNTISSYLQRDIKALKSQLLLGESATSGSIFSSYTFTGVQLASDDNMLPNSQRGFAPTVRGIANSSAIVTIRQNGYVIYQSNVPAGAFEINDLYPSSNSGDLEVTIEESDGTQRRFIQPYSSLPMMQRPGHLKYSATAGRYRADANSDSKEPEFAEATAIYGLNNTFTLYGGLLGSEDYYALGIGIGGTLGALGALSMDINRADTQFDNRHSFHGYQWRTQYIKDIPETNTNIAVSYYRYTNDGYFSFDEANTRNWDYNSRQKSEIQFNISQTIFDGVSLYASGSQQDYWGNNDKNRNISVGVSGQQWGIGYSLNYQYSRYTDQNNDRALSLNLSIPLERWLPRSRVSYQMTSQKDRPTQHEMRLDGSLLDDGRLSYSLEQNLDDDNNHNSSLNASYRSPYGTFSAGYSYGNDSSQYNYGVTGGVVIHPHGVTLSQYLGNAFALIDANGASGVRIQNYPGIATDPFGYAVVPYLTTYQENRLSVDTTQLPDNVDLEQTTQFVVPNRGAMVAARFNANIGYRVLVTVSDRNGKPLPFGALASNDETGQQSIVDEGGILYLSGISSKSQSWTVRWGNQADQQCQFAFSTPDSEPTTSVLQGTAQCH

SEQ ID NO: 16828 - protein, 232 aa, Escherichia coli; identical to SEQ ID NO: 2087

SEQ ID NO: 16829 - protein, 760 aa, Escherichia coli; identical to SEQ ID NO: 3026

SEQ ID NO: 16830 - protein, 446 aa, Escherichia coli [sequence omitted]

SEQ ID NO: 16831 - protein, 331 aa, Escherichia coli
MKKPVVIGLAVVVLAAVVAGGYWWYQSRQDNGLTLYGNVDIRTVNLSFRVGGRVESLAVDEGDAIKAGQVLGELDHKPYEIALMQAKAGVSVAQAQYDLMLSGYRDEEIAQAAAAVKQAQAAYDYAQNFYNRQQGLWKSRTISANDLENARSSRDQAQATLKSAQDKLRQYRSGNREQDIAQAKASLEQAQAQLAQAELNLQDSTLIAPSDGTLLTRAVEPGTVLNEGGTVFTVSLTRPVWVRAYVDERNLDQAQPGRKVLLYTDGRPDKPYHGQIGFVSPTAEFTPKTVETPDLRTDLVYRLRIVVTDADDALRQGMPVTVQFGNEAGHE

SEQ ID NO: 16832 - protein, 834 aa, Escherichia coli; identical to SEQ ID NO: 3118

SEQ ID NO: 16833 - protein, 200 aa, Escherichia coli; identical to SEQ ID NO: 1784

SEQ ID NO: 16834 - protein, 478 aa, Escherichia coli; identical to SEQ ID NO: 2404

SEQ ID NO: 16835 - protein, 161 aa, Escherichia coli; identical to SEQ ID NO: 2582

SEQ ID NO: 16836 - protein, 432 aa, Escherichia coli; identical to SEQ ID NO: 2026

SEQ ID NO: 16837 - protein, 746 aa, Escherichia coli; identical to SEQ ID NO: 4130

SEQ ID NO: 16838 - protein, 402 aa, Escherichia coli; identical to SEQ ID NO: 4017

SEQ ID NO: 16839 - protein, 828 aa, Escherichia coli; identical to SEQ ID NO: 2388

SEQ ID NO: 16840 - protein, 244 aa, Escherichia coli; identical to SEQ ID NO: 4064

SEQ ID NO: 16841 - protein, 231 aa, Escherichia coli; identical to SEQ ID NO: 3055

SEQ ID NO: 16842 - protein, 243 aa, Escherichia coli
MTFMKGLPLLLLIASLCSYAALQPDRTRIVFNANDKATSLRVDNRSDKLPYLAYSWLENEKGEKSDDLLVALPPIQRLEPKATTQVRIVKQASTTKLPGDRETLFFYNMREIPPAPEKNSDHAVLQVAIQSRIKVFWRPSALRKKAGEKVELQLQVSQQGNQLNLKNPTGYYLTIAYLGRNEQGVLPGFKTVMVAPFSTVITNTGSYSGSQFYLGYMDDYGALRMTTLNCNGHCRLQAVEAKK

SEQ ID NO: 16843 - protein, 784 aa, Escherichia coli
MKKRIPTLLATMIATALYSQQGLAADLASQCMLGVPSYDRPLLQGDTNDLPVTINADHAKGDYPDDAVFTGSVDIMQGNSRLQADEVQLHQKEAPGQPEPVRTVDALGNVHYDDNQVILKGPKGWANLNTKDTNVWEGDYQMVGRQGRGKADLMKQRGENRYTILDNGSFTSCLPGSDTWSVVGSEIIHDREEQVAEIWNARFKVGPVPIFYSPYLQLPVGDKRRSGFLIPNAKYTTTNYFEFYLPYYWNIAPNMDATITPHYMHRRGNIMWENEFRYLSQAGAGLMELDYLPSDKVYEDEHPNDDSSRRWLFYWNHSGVMDQVWRFNVDYTKVSDPSYFNDFDNKYGSSTDGYATQKFSVGYAVQNFNATVSTKQFQVFSEQNTSSYSAEPQLDVNYYQNDVGPFDTRIYGQAVHFVNTRDDMPEATRVHLEPTINLPLSNNWGSINTEAKLLATHYQQTNLDWYNSRNTTKLDESVNRVMPQFKVDGKMVFERDMEMLAPGYTQTLEPRAQYLYVPYRDQSDIYNYDSSLLQSDYSGLFRDRTYGGLDRIASANQVTTGVTSRIYDDAAVERFNISVGQIYYFTESRTGDDNITWENDDKTGSLVWAGDTYWRISERWGLRGGIQYDTRLDNVATSNSSIEYRRDEDRLVQLNYRYASPEYIQATLPKYYSTAEQYKNGISQVGAVASWPIADRWSIVGAYYYDTNANKQADSMLGVQYSSCCYAIRVGYERKLNGWDNDKQHAVYDNAIGFNIELRGLSSNYGLGTQEMLRSNILPYQNTL

SEQ ID NO: 16844 - protein, 900 aa, Escherichia coli
MKLNIFTKSMIGMGLVCSALPALAMEAWNNQQGGNKYQVIFDGKIYENAWWVSSTNCPGKAKANDATNPWRLKRTATAAEISQFGNTLSCEKSGSSSSSNSNTPASNTPANGGSATPAQGTVPSNSSVVAWNKQQGGQTWYVVFNGAVYKNAWWVASSNCPGDAKGNDASNPWRYVRAATATEISETSNPQSCTSAPQPAPDVKPAPDVKPAPDVQPAPADKSNDNYAVVAWKGQEGSSTWYVIYNGGIYKNAWWVGAANCPGDAKENDASNPWRYVRAATATEISQYGNPGSCSVKPDNNGDAVTPVDPTPETPETPVTPTPDNNEPSTPADSGNDYSLQAWSGQEGSEIYHVIFNGNIYQNAWWVGSEDCPRGTSAENSNNPWRLVRTATAAELSQYGNPTTCEIDNGGVIVADGFQASKAYSANSIVDYNDAHYKTSVDQDAWGFVPGGDNPWKKYEPAKAWSASTVYVKGDRVVVDGQAYEALFWTQSDNPALVANQNATGSNSRPWKPLGKAQSYSNEELNNAPQFNPETLYASDTLIRFNGANYISQSKVQKVSPSDSNPWRVFVDWTGTKERVGTPKKAWPKHVYAPYVDFTLNTIPDLAALAKNHNVNHFTLAFVVSKDANTCLPTWGTAYGMQNYAQYSKIKALREAGGDVMLSIGGANNAPLAASCKNVDDLMQHYYDIVDNLNLRVLDFDIEGTWVADQASIERRNLAVKKVQDKWKSEGKDIAIWYTLSILPTGLTPEGMNVLSDAKAKGVELAGVNVMTMDYGNAICQSANTEGQNIHGKCATSAITNLHSQLKGLHPNKSDAEIDAMMGTTPMVGVNDVQGEVFYLSDARLVMQDAQKRNLGMVGIWSIARDLPGGTNLSPEFHGLTKEQAPKYAFSEIFAPFTKQ

SEQ ID NO: 16845 - protein, 840 aa, Escherichia coli
MNNKNTFTGDKLSHAIKIALSGVVCSLLFVLPVHAVEFNVDMVDAEDRENIDISRFEKKGYIPPGRYLVRVQINKNMLPQTLILEWVKADNESGSLLCLTKENLTNFGLNTEFIESLQNIAGSECLDLSQRQELTTRLDKATMILSLSVPQAWLKYQATNWTPPEFWDAGIAGFILDYNLYASQYAPHHGDSTQNVSSYGTLGFNLGAWRLRSDYQYNQNFADGRSVNHDSEFARTYLFRPIPSWSSKFTMGQYDLSSNLYDTFHFTGASLESDESMLPPDLQGYAPQITGIAQTNAKVTVAQNGRVLYQTTVAPGPFTISDLGQSFQGQLDVTVEEEDGRTSTFQVGSASIPYLTRKGQVRYKTSLGKPTSVGHNDINNPFFWTAEASWGWLNNVSLYGGGMFTADDYQAITTGIGFNLNQFGSLSFDVTGADASLQQQNSDNLRGYSYRFNYAKHFESTGSQITFAGYRFSDKDYVSMSEYLSSRNGDESIDNEKESYVISLNQYFETLELNSYLNVTRNTYWDSASNTNYSVSVSKNFDIGDFKGISASLAVSRIRWDDDEENQYYFSFSLPLQQNRNISYSMQRTGSSNTSQMISWYDSSDRNNIWNISASATDDNIRDGEPTLRGSYQHYSPWGRLNINGSVQPNQYNSVTAGWYGSLTATRHGVALHDYSYGDNARMMVDTDGISGVEINSNRTVTNGLGIAVIPSLSNYTTSMLRVNNNDLPEGVDVENSVIRTTLTQGAIGYAKLNATTGYQIVGVIRQENGRFPPLGVNVTDKATGKDVGLVAEDGFVYLSGIQENSILHLTWGDNTCEVTPPNQSNISESAIILPCKTVK

SEQ ID NO: 16846 - protein, 646 aa, Escherichia coli; identical to SEQ ID NO: 5677

SEQ ID NO: 16847 - protein, 863 aa, Escherichia coli
MHIRKHRLAGFFVRLFVACAFAAQTPLSSAELYFNPRFLADDPQAVADLSRFENGQELPPGTYRVDIYLNNGYMATRDVTFNTGDSEQGIVPCLTRAQLASMGLNTASVSGMNLLADDACVPLTSMIHDATAHLDVGQQRLNLTIPQAFMSNRARGYIPPELWDPGINAGLLNYNFSGNSVQNRIGGNSHYAYLNLQSGLNIGAWRLRDNTTWSYNRSDRSSGSKNKWQHINTWLERDIIPLRSRLTLGDGYTQGDIFDGINFRGAQLASDDNMLPDSQRGFAPVIHGIARGTAQVTIKQNGYDIYNSTVPPGPFTINDIYAAGNSGDLQVTIKEADGSTQIFTVPYSSVPLLQREGHTRYSITAGEYRSGNAQQEKPRFFQSTLLHGLPAGWTIYGGTQLADRYRAFNFGIGKNMGALGALSVDMTQANSTLPDDSQHDGQSVRFLYNKSLNESGTNIQLVGYRYSTSGYFNFADTTYSRMNGYNIETQDGVIQVKPKFTDYYNLAYNKRGKLQLTVTQQLGRTSTLYLSGSHQTYWGTSNVDEQFQAGLNTAFEDINWTLSYSLTKNVWQKGRDQMLALNVNIPFSHWLRSDSKSQWRHASASYSMSHDLNGRMTNLAGVYGTLLEDNNLSYSVQTGYAGGGDGNSGSTGYATLNYRGGYGNANIGYSHSDDIKQLYYGVSGGVLAHANGVTLGQPLNETVVLVKAPGAKDAKVENQTGVRTDWRGYAVLPYATEYRENRVALDTNTLADNVDLDNAVANVVPTRGAIVRAEFKARVGIKLLMTLTHNNKPLPFGAMVTSESSQSSGIVADNGQVYLSGMPLAGKVQVKWGEEENAHCVANYQLPPESQQQLLTQLSAECR

SEQ ID NO: 16848 - protein, 331 aa, Escherichia coli; identical to SEQ ID NO: 2705

SEQ ID NO: 16849 - protein, 118 aa, Escherichia coli [sequence omitted]

SEQ ID NO: 16850 - protein, 360 aa, Escherichia coli; identical to SEQ ID NO: 3694

SEQ ID NO: 16851 - protein, 162 aa, Escherichia coli; identical to SEQ ID NO: 1973

SEQ ID NO: 16852 - protein, 517 aa, Escherichia coli; identical to SEQ ID NO: 2462

SEQ ID NO: 16853 - protein, 696 aa, Escherichia coli; identical to SEQ ID NO: 4065

SEQ ID NO: 16854 - protein, 119 aa, Escherichia coli; identical to SEQ ID NO: 5512

SEQ ID NO: 16855 - protein, 208 aa, Escherichia coli; identical to SEQ ID NO: 1949

SEQ ID NO: 16856 - protein, 660 aa, Escherichia coli; identical to SEQ ID NO: 5588

SEQ ID NO: 16857 - protein, 208 aa, Escherichia coli; identical to SEQ ID NO: 1949

SEQ ID NO: 16858 - protein, 250 aa, Escherichia coli
MRWISKNKCFTNRNINSLQKTQYVIRAGALFLLSAISINAIAAGGFGLGSTRLVYPSDSQQITLSVQNGGANTSYLIQSWIDDNQSSKKSQDFVVTPPLFMLPTRKEASLRIMFIGKSQLPTDRETLFWMNVKAIPPTDEKNTQKNTLQLALQNRIKLFYRPTNLPVQAGKARDMLRFKYEGKQLRVINPSPYYLTVTGIRVQGAKLPNAFVPPKSDVTVSSPVTLAGEITYQTINDYGATTARQKGTMQ

SEQ ID NO: 16859 - protein, 505 aa, Escherichia coli
MSAAVMLTLYTSSSWAFSIDDVAKQAQSLAGKGYETPKSNLPSVFRDMKYADYQQIQFNHDKAYWNNLKTPFKLEFYHQGMYFDTPVKINEVTATAVKRIKYSPDYFTFGDVQHDKDTVKDLGFAGFKVLYPINSKDKNDEIVSMLGASYFRVIGAGQVYGLSARGLAIDTALPSGEEFPRFKEFWIERPKPTDKRLTIYALLDSPRATGAYKFVVMPGRDTVVDVQSKIYLRDKVGKLGVAPLTSMFLFGPNQPSPANNYRPELHDSNGLSIHAGNGEWIWRPLNNPKHLAVSSFSMENPQGFGLLQRGRDFSRFEDLDDRYDLRPSAWVTPKGEWGKGSVELVEIPTNDETNDNIVAYWTPDQLPEPGKEMNFKYTITFSRDEDKLHAPDNAWVQQTRRSTGDVKQSNLIRQPDGTIAFVVDFTGAEMKKLPEDTPVTAQTSIGDNGEIVESTVRYNPVTKGWRLVMRVKVKDAKKTTEMRAALVNADQTLSETWSYQLPANE

SEQ ID NO: 16860 - protein, 774 aa, Escherichia coli; identical to SEQ ID NO: 3122

SEQ ID NO: 16861 - protein, 241 aa, Escherichia coli; identical to SEQ ID NO: 2922

SEQ ID NO: 16862 - protein, 274 aa, Escherichia coli; identical to SEQ ID NO: 3721

SEQ ID NO: 16863 - protein, 200 aa, Escherichia coli; identical to SEQ ID NO: 1793

SEQ ID NO: 16864 - protein, 250 aa, Escherichia coli; identical to SEQ ID NO: 3427

SEQ ID NO: 16865 - protein, 223 aa, Escherichia coli
MMLIIFYLIISASAHAAGGIALGATRIIYPADAKQTAVWIRNSHTNERFLVNSWIENSSGVKEKSFIITPPLFVSEPKSENTLRIIYTGPPLAADRESLFWMNVKTIPSVDKNALNGRNVLQLAILSRMKLFLRPIQLQELPAEAPDTLKFSRSGNYINVHNPSPFYVTLVNLQVGSQKLGNAMAAPRVNSQIPLPSGVQGKLKFQTVNDYGSVTPVREVNLN

SEQ ID NO: 16866 - protein, 361 aa, Escherichia coli; identical to SEQ ID NO: 3061

SEQ ID NO: 16867 - protein, 834 aa, Escherichia coli
MYKKLKLTTISELIKNIYCSLSVLIIGCASAYAVEFNKDLIEAEDRENVNLSQFETDGQLPVGKYSLNALINNKRTPIHLDLQWVLIDNQTAVCLTPEQLTLLGFTDEIIEEAQQNLIDGCYPIEKEKQITTYLDKGKMQLSISAPQAWLKYKDANWTPPELWDHGIAGAFLDYNLYASHYAPHQGDNSQNISSYGQAGVNLGAWRLRTDYQYDQSFNNGKSQANNLDFPRIYLFRPIPAINAKLTIGQYDTESSIFDSFHFSGVSLKSDENMLPPDLRGYAPQITGVAQTNAKVTVSQNNRIIYQENVPPGPFAITNLFNTLQGQLDVKVEEEDGQVTQWQVASNSIPYLTRKGQIRYTTAMGKPTSVGGDSLQQPFFWTGEFSWGWLNNVSLYGGSVLTNRDYQSLAAGVGFNLNSLGSLSFDVTRSDAQLHNQDKETGYSYRANYSKRFESTGSQLTFAGYRFSDKNFVTINEYINDTNHYTNYQNEKESYIVTFNQYLESLRLNTYVSLARNTYWDASSNVNYSLSLSRDFDIGPLKNVSTSLTFSRINWEEDNQDQLYLNISIPWGTSRTLSYGMQRNQDNKISHTASWYDSSDRNNSWSVSASGDNDEFKDMKASLRASYQHNTENGRLYLSGTSQRDSYYSLNASWNGSFTATRHGAAFHDYSGSADSRFMIDADGAEDIPLNNKRAVTNRYGIGVIPSVSSYITTSLSVDTRNLPENVDIENSVITTTLTEGAIGYAKLDTRKGYQIMGVIRLADGSHPPLGISVKDKTSHKELGLVADGGFVYLNGIQDDSKLTLRWGDKSCFIQPPNSSNLTTGTVILPCISQN

SEQ ID NO: 16868 - protein, 203 aa, Escherichia coli; identical to SEQ ID NO: 2009

SEQ ID NO: 16869 - protein, 243 aa, Escherichia coli; identical to SEQ ID NO: 4044

SEQ ID NO: 16870 - protein, 551 aa, Escherichia coli; identical to SEQ ID NO: 2446

SEQ ID NO: 16871 - protein, 367 aa, Escherichia coli; identical to SEQ ID NO: 3998

SEQ ID NO: 16872 - protein, 353 aa, Escherichia coli; identical to SEQ ID NO: 4626

SEQ ID NO: 16873 - protein, 258 aa, Escherichia coli
MLQFPLSSLMINVLICILMCCTNAQAGVVVGGTRFVYPEKQSSISVELKNTASKDMLVKISVTPDDGRQLKGTLESQPLLPDKAFIATPPLLVLKQDKNTKIRINRVGGQLPIDRESLFILNVAALPAQEQNSQLKNENQLQVAVRNRMKIFYRPETLSGNPLDAYQQLRWSRKNEAVTVFNPTPWYVTLYNLSIDGKSINGGMVAPFSHRQQDWCQRQGYCEINWQTLDLYNNALPVWSVKLNVLQNNVMSAVAIHG

SEQ ID NO: 16874 - protein, 193 aa, Escherichia coli; identical to SEQ ID NO: 2246

SEQ ID NO: 16875 - protein, 274 aa, Escherichia coli; identical to SEQ ID NO: 2317

SEQ ID NO: 16876 - protein, 747 aa, Escherichia coli
MARSKTAQPKHSLRKIAVVVATAVSGMSVYAQAAVEPKEDTITVTAAPAPQESAWGPAATIAARQSATGTKTDTPIQKVPQSISVVTAEEMALHQPKSVKEALSYTPGVSVGTRGASNTYDHLIIRGFAAEGQSQNNYLNGLKLQGNFYNDAVIDPYMLERAEIMRGPVSVLYGKSSPGGLLNMVSKRPTTEPLKEVQFKAGTDSLFQTGFDFSDALDDDGVYSYRLTGLARSANAQQKGSEEQRYAIAPAFSWRPDDKTNFTFLSYFQNEPETGYYGWLPKEGTVEPLPNGKRLPTDFNEGAKNNTYSRNEKMVGYSFDHEFNDTFTVRQNLRFAENKTSQNSVYGYGVCSDPANAYSKQCAALAPADKGHYLARKYVVDDEKLQNFSVDTQLQSQFATGDIDHTLLTGVDFMRMRNDINAWFGYDDSIPLLDLYNPVNTDFDFNAKDPANSGPYRILNKQKQTGVYVQDQAQWDKVLVTLGGRYDWADQESLNRVAGTTDKRDDKQFTWRGGVNYLFDNGVTPYFSYSESFEPSSQVGKDGNIFAPSKGKQYEVGVKYVPEDRPIVVTGAVYNLTKTNNLMADPEGSFFSVEGGEIRARGVEIEAKAALSASVNVVGSYTYTDAEYTTDTTYKGNTPAQVPKHMASLWADYTFFDGPLSGLTLGTGGRYTGSSYGDPANSFKVGSYTVVDALVRYDLARVGMAGSNVALHVNNLFDREYVASCFNTYGCFWGAERQVVATATFRF

SEQ ID NO: 16877 - protein, 678 aa, Escherichia coli
MVPSTFSRLKAARCLPVVLAALIFAGCGTHTPDQSTAYMQGTAQADSAFYLQQMQQSSDDTRINWQLLAIRALVKEGKTGQAVELFNQLPQELNDSQRREKTLLAAEIKLAQKDFAGAQNLLAKITPADLEQNQQARYWQAKIDASQGRPSIDLLRALIAQEPLLGAKEKQQNIDATWQALSSMTQEQANTLVINADENILQGWLDLQRIWFDNRNDPDMMKAGIADWQKRYPNNPGAKMLPTQLVNVKAFKPASTNKIALLLPLNGQAAVFGRTIQQGFEAAKNIGTQPVAAQVAAAPAADVAEQPQPQTVDGVASPAQASVSDLTGEQPAAQPVPVSAPAATTAAVSAPANPSAELKIYDTSSQPLSQILNQVQQDGASIVVGPLLKNNVEELLKSNTPLNVLALNQPENIENRVNICYFALSPEDEARDAARHIRDQGKQAPLVLIPRSSLGDRVANAFAQEWQKLGGGTVLQQKFGSTSELRAGVNGGSGIALTGSPITPRATTDSGMTTNNPTLQTTPTDDQFTNNGGRVDAVYIVATPGEIAFIKPMIAMRNGSQSGATLYASSRSAQGTAGPDFRLEMEGLQYSEIPMLAGGNLPLMQQALSAVNNDYSLARMYAMGVDAWSLANHFSQMRQVQGFEINGNTGSLTANPDCVINRKLSWLQYQQGQVVPAS

SEQ ID NO: 16878 - protein, 96 aa, Escherichia coli
MAWRGVCNPKALSRLAAFSPLLLLGMGQMAHATDLLAGGKDDVKATFGADSFVIMCIYIAEIVIGVATYIRTKNLLILLGLVVVIVFTTVGLTFVS

SEQ ID NO: 16879 - protein, 229 aa, Escherichia coli
MAFLIFAVLSLLVAGELQAGVVVGGTRFIFPADRESISILLTNTSQESWLINSKINRPTRWAGGEASTVPAPLLAAPPLILLKPGTTGTLRLLRTESDILPVDRETLFELSIASVPSGKVENQSVKVAMRSVFKLFWRPEGLPGDPLEAYQQLRWTRNSQGVQLTNPTPYYINLIQVSVNGKALSNVGVVPPKSQRQTSWCQAIAPCHVAWRAINDYGGLSAKKEQNLP

SEQ ID NO: 16880 - protein, 170 aa, Escherichia coli; identical to SEQ ID NO: 2565

SEQ ID NO: 16881 - protein, 191 aa, Escherichia coli; identical to SEQ ID NO: 2730

SEQ ID NO: 16882 - protein, 274 aa, Escherichia coli; identical to SEQ ID NO: 2309

SEQ ID NO: 16883 - protein, 412 aa, Escherichia coli; identical to SEQ ID NO: 4002

SEQ ID NO: 16884 - protein, 565 aa, Escherichia coli; identical to SEQ ID NO: 2677

SEQ ID NO: 16885 - protein, 760 aa, Escherichia coli; identical to SEQ ID NO: 4114

SEQ ID NO: 16886 - protein, 360 aa, Escherichia coli; identical to SEQ ID NO: 4018

SEQ ID NO: 16887 - protein, 766 aa, Escherichia coli
MLMTTMPDSCNSWQKCRNKTMNKKIHSLALLVNLGIYGVAQAQEPTDTPVSHDDTIVVTAAEQNLQAPGVSTITADEIRKNPVARDVSEIIRTMPGVNLTGNSTSGQRGNNRQIDIRGMGPENTLILIDGKPVSSRNSVRQGWRGERDTRGDTSWVPPEMIERIEVLRGPAAARYGNGAAGGVVNIITKKGSGEWHGSWDAYFNAPEHKEEGATKRTNFSLTGPLGDEFSFRLYGNLDKTQADAWDINQGHQSARAGTYATTLPAGREGVINKDINGVVRWDLAPLQSLELEAGYSRQGNLYAGDTQNTNSDSYTRSKYGDETNRLYRQNYSLTWNGGWDNGVTTSNWVQYEHTRNSRIPEGLAGGTEGKFNEKATQDFVDIDLDDVMLHSEVNLPIDFLVNQTLTLGTEWNQQRMKDLSSNTQALTGTNTGGAIDGVSATDRSPYSKAEIFSLFAENNMELTDSTIVTPGLRFDHHSIVGNNWSPALNISQGLGDDFTLKMGIARAYKAPSLYQTNPNYILYSKGQGCYASAGGCYLQGNDDLKAETSINKEIGLEFKRDGWLAGITWFRNDYRNKIEAGYVAVGQNAVGTDLYQWDNVPKAVVEGLEGSLNVPVSETVMWTNNITYMLKSENKTTGDRLSIIPEYTLNSTLSWQAREDLSMQTTFTWYGKQQPKKYNYKGQPAVGPETKEISPYSIVGLSATWDVTKNVSLTGGVDNLFDKRLWRAGNAQTTGDLAGANYIAGAGAYTYNEPGRTWYMSINTHF

SEQ ID NO: 16888 - protein, 753 aa, Escherichia coli
MGMVIIIFSNVEHFLPLRLQFSQLLNVSCRFVFHKFTILLPWRRFPILNLVFFMKIFSVRQTVLPALLVLSPVVFAADEQTMIVSAAPQVVSELDTPAAVSVVDGEEMRLATPRINLSESLTGVPGLQVQNRQNYAQDLQLSIRGFGSRSTYGIRGIRLYVDGIPATMPDGQGQTSNIDLSSVQNVEVLRGPFSALYGNASGGVMNVITQTGQQPPTIEASSYYGSFGSWRYGLKATGAMGDGTQPGDVDYTVSTTRFTTHGYRDHSGAQKNLANAKLGVRIDDASKLSLIFNSVDIKADDPGGLTEAEWKANPQQAPRAEQYDTRKTIKQTQAGLRYERSLSAQDDMSVMMYAGERETTQYQSIPMAPQLNPSHAGGVITLQRHYQGIDSRWTHRGELGVPLTFTTGLNYENMSENRKGYNNFRLNSGVPEYGQKGELRRDERNLMWNVDPYLQTQWQLSEKLSLDAGVRYSSVWFDSNDHYITPGNGDDSGDASYHKWLPAGSLKYAMTDAWNIYLAAGRGFETPTINELSYRADGQSGMNFGLKPSTNDTIEIGSKTRIGDGLLSLALFQTDTDDEIVVDSSSGGRTTYKNAGKTRRQGAELAWEQRFAGDFRVNASWTWLDATYRSNVCNEQDCNGNRMPGIARNMGFASIGYVPEDGWYAGTEARYMGDIMADDENTAKAPSYTLVGLFTGYKYNYHNLTVDLFGRVDNLFDKGYVGSVIVNESNGRYYEPAPGRNYGVGMNIAWRFE

SEQ ID NO: 16889 - protein, 517 aa, Escherichia coli
MKHKLQMMKMRWLSAAVMLTLYTSSSWAFSIDDVAKQAQSLAGKGYEAPKSNLPSVFRDMKYADYQQIQFNHDKAYWNNLKTPFKLEFYHQGMYFDTPVKINEVTATAVKRIKYSPDYFTFGDVQHDKDTVKDLGFAGFKVLYPINSKDKNDEIVSMLGASYFRVIGAGQVYGLSARGLAIDTALPSGEEFPRFKEFWIERPKPTDKRLTIYALLDSPRATGAYKFVVMPGRDTVVDVQSKIYLRDKVGKLGVVPLTSMFLFGPNQPSPANNYRPELHDSNGLSIHAGNGEWIWRPLNNPKHLAVSSFSMENPQGFGLLQRGRDFSRFEDLDDRYDLRPSAWVTPKGEWGKGSVELVEIPTNDETNDNIVAYWTPDQLPEPGKEMNFKYTITFSRDEDKLHAPDNAWVQQTRRSTGDVKQSNLIRQPDGTIAFVVDFTGAEMKKLPEDTPVTAQTSIGDNGEIVESTVRYNPVTKGWRLVMRVKVKDAKKTTEMRAALVNADQTLSETWSYQLPANE

SEQ ID NO: 16890 - protein, 690 aa, Escherichia coli
MLPYARGRKEDVSDTHFIFVVTSWRYGMFRLNPFVRVGLCLSAISCAWPVLAVDDDGETMVVTASSVEQNLKDAPASISVITQEDLQRKPVQNLKDVLKEVPGVQLTNEGDNRKGVSIRGLDSSYTLILVDGKRVNSRNAVFRHNDFDLNWIPVDSIERIEVVRGPMSSLYGSDALGGVVNIITKKIGQKWSGTVTVDTTIQEHRDRGDTYNGQFFTSGPLIDGVLGMKAYGSLAKREKDDPQNSTTTDTGETPRIEGFSSRDGNVEFAWTPNQNHDFTAGYGFDRQDRDSDSLDKNRLERQNYSISHNGRWDYGTSELKYYGEKVENKNPGNSSPITSESNTVDGKYTLPLTAINQFLTVGGEWRHDKLSDAVNLTGGTSSKTSASQYALFVEDEWRIFEPLALTTGVRMDDHETYGEHWSPRAYLVYNATDTVTVKGGWATAFKAPSLLQLSPDWTSNSCRGACKIVGSPDLKPETSESWELGLYYMGEEGWLEGVESSVTVFRNDVKDRISISRTSDVNAAPGYQNFVGFETGANGRRIPVFSYYNVNKARIQGVETELKIPFNDEWKLSINYTYNDGRDVSNGENKPLSDLPFHTANGTLDWKPLALEDWSFYVSGHYTGQKRADSATAKTPGGYTIWNTGAAWQVTKDVKLRAGVLNLGDKDLSRDDYSYNEDGRRYFMAVDYRF

SEQ ID NO: 16891 - protein, 224 aa, Escherichia coli
MKGLLSLLISSMIFPVHAGMVIFGTRIIYPAEQKEVMVQLMNQGNRSSLMQAWIDDGDTSLPPEKIQVPFMLTPPVVKVAANSGQQIKIKIMPNKLPSNKESIFYLNVLDIPPNSPEQEGKNALKFAMQNRIKLFYRPAGIAPVNKATFKKLLINRSGNGLVIKNDSANWVTISDVKANNVKVNYETIMIAPLESQSVNVKSNNANNWYLTIIDDHGNYISDKI

SEQ ID NO: 16892 - protein, 729 aa, Escherichia coli; identical to SEQ ID NO: 4015

SEQ ID NO: 16893 - protein, 118 aa, Escherichia coli [sequence omitted]

SEQ ID NO: 16894 - protein, 249 aa, Escherichia coli; identical to SEQ ID NO: 4132

SEQ ID NO: 16895 - protein, 213 aa, Escherichia coli; identical to SEQ ID NO: 2232

SEQ ID NO: 16896 - protein, 784 aa, Escherichia coli; identical to SEQ ID NO: 2244

SEQ ID NO: 16897 - protein, 234 aa, Escherichia coli
MKVSVPGMPATLLNMSNNDIYKMVSGDKMDMKMNIFQRLWETLRHLFWSDKQPEAYKLLFDFVNNQTGNINASKYFTGAVDENEKEKFIHSLELFNELKTCAKNPDEMVAKGKMRWVAEIYGDIELSVTFLIENNEICTLTLQLCKGLGSLGVDLRNAYLPGVDMRNCYLGKKTIIDNNVLYLEPGWNANLEGAILDSTDAIIINKITTKKIATEEITTQQSTAEEIIANAIIE

SEQ ID NO: 16898 - protein, 191 aa, Escherichia coli; identical to SEQ ID NO: 3639

SEQ ID NO: 16899 - protein, 696 aa, Escherichia coli; identical to SEQ ID NO: 4038

SEQ ID NO: 16900 - protein, 828 aa, Escherichia coli; identical to SEQ ID NO: 2386

SEQ ID NO: 16901 - protein, 118 aa, Escherichia coli [sequence omitted]

SEQ ID NO: 16902 - protein, 351 aa, Escherichia coli; identical to SEQ ID NO: 2872

SEQ ID NO: 16903 - protein, 478 aa, Escherichia coli; identical to SEQ ID NO: 13192

SEQ ID NO: 16904 - protein, 230 aa, Escherichia coli; identical to SEQ ID NO: 2580

SEQ ID NO: 16905 - protein, 430 aa, Escherichia coli; identical to SEQ ID NO: 2617

SEQ ID NO: 16906 - protein, 199 aa, Escherichia coli; identical to SEQ ID NO: 3190

SEQ ID NO: 16907 - protein, 732 aa, Escherichia coli; identical to SEQ ID NO: 4057

SEQ ID NO: 16908 - protein, 108 aa, Escherichia coli
MDAVLSVQGASAPIKKKSFFSKFTRLNMLRLARAVIPAAVLMMFFPQLAMASGGQDLMQSGNSTVKATFGKDSSVVKWVVLAEVLVGAVMYMMTKNVKFLAGFAIISV

SEQ ID NO: 16909 - protein, 686 aa, Escherichia coli; identical to SEQ ID NO: 3015

SEQ ID NO: 16910 - protein, 729 aa, Escherichia coli
MLSTQFNRDNQYQAITKPSLLAGCIVLALLPSAAFAAPATEETVIVEGSATAPDDGKNDYSVTSTSAGTKMQMTQRDIPQSVTIVSQQRMEDQQLQTLGEVMENTLGISKSQADSDRALYYSRGFQIDNYMVDGIPTYFESRWNLGDALSDMALFERVEVVRGATGLMTGTGNPSAAINMVRKHATSREFKGDVSAEYGSWNKERYVADLQSPLTEDGKIRARIVGGYQNNDSWLDRYNSEKTFFSGIVDADLGDLTTLSAGYEYQRIDVNSPTWGGLPRWNTDGSGNSYDRARSTAPDWAYNDKEINKVFMTLKQRFADTWQATLNATHSEVEFDSKMMYVDAYVNKADGMLVGPYSNYGPGFDYVGGTGWNSGKRKVDALDLFADGSYELFGRQHNLMFGGSYSKQNNRYFSSWANIFPDEIGSFYNFNGNFPQTDWSPQSLAQDDTTHMKSLYAATRVTLADPLHLILGARYTNWRVDTLTYSMEKNHTTPYAGLVFDINDNWSTYASYTSIFQPQNDRDSSGKYLAPITGNNYELGLKSDWMNSRLTTTLAIFRIEQDNVAQSTGTPIPGSNGETAYKAVDGTVSKGVEFELNGAITDNWQLTFGATRYIAEDNEGNAVNPNLPRTTVKMFTSYRLPVMPELTVGGGVNWQNRVYTDTVTPYGTFRAEQGSYALVDLFTRYQVTKNFSLQGNVNNLFDKTYDTNVEGSIVYGAPRNFSITGTYQF

SEQ ID NO: 16911 - protein, 654 aa, Escherichia coli; identical to SEQ ID NO: 4042

SEQ ID NO: 16912 - protein, 774 aa, Escherichia coli; identical to SEQ ID NO: 2066

SEQ ID NO: 16913 - protein, 200 aa, Escherichia coli; identical to SEQ ID NO: 1801

SEQ ID NO: 16914 - protein, 366 aa, Escherichia coli; identical to SEQ ID NO: 4014

SEQ ID NO: 16915 - protein, 239 aa, Escherichia coli
MHQMQTTRIPYSISFMATVLLLLLFACHSTVANAAVALGATRVIYPANQKQVLLPVTNNDPASVYLIQSWIENAGDQKDTQFVITPPLFSMQGKKENTLRIINATNHQLPGDRESLFWVNVKAIPAMEKDQKNENTLQLAIISRIKMFYRPTNLAMAPEEAPAMLRFRRSGSKLTLINPTPYFITVTNMKAGNSNLPNTMVPPKGEVSVDIPHAATGDISFQTINDYGALTPRIKATMQ

SEQ ID NO: 16916 - protein, 650 aa, Escherichia coli; identical to SEQ ID NO: 8603

SEQ ID NO: 16917 - protein, 249 aa, Escherichia coli
MTKYLSAKTLTTVLSLLAATVSFSTQASVTPDRTRLIFNESDKSISVTLRNNDPKLPYLAQSWIEDEKGVKISSPLAVLPPVQRIEAMMNGQVKIQGLPDIHKLPADRESMFYFNVREIPPKSNKSNTLQIALQTRIKLFWRPKALEKTTTQNPWQHKVTLTRNGQEFTVNNPTPYYVIFSNASAQKNGNPAAGFSPIVMSPKTSAPLNVKMGSVPVLTYVNDYGARMPLFFTCNGNSCQVDEEQSRKG

SEQ ID NO: 16918 - protein, 654 aa, Escherichia coli
MDSVMKGLNKITCCLLAALLMPCAGHAENEQYGANFNNADIRQFVEIVGQHLGKTILIDPSVQGTISVRSNDTFSQQEYYQFFLSILDLYGYSVITLDNGFLKVVRSANVKTSPGMIADSSRPGAGDELVTRIVPLENVPARDLAPLLRQMMDGGSVGNVVHYEPSNVLILTGRASTINKLIEVIKRVDVIGTEKQQIIHLEYASAEDLAEILNQLISESHGKSQMPALLSAKIVADKRTNSLIISGPEKARQRITSLLKSLDVEESEEGNTRVYYLKYAKATNLVEVLTGVSEKLKDEKGNSRKPSSTSAMDNVAITADEQTNSLVITADQPVQEKLATVIARLDIRRAQVLVEAIIVEVQDGNGLNLGVQWANKNVGAQQFTNTGLPIFNAAQGVADYKKNGGITSANPAWDMFSAYNGMAAGFFNGDWGVLLTALASNNKNDILATPSIVTLDNKLASFNVGQDVPVLSGSQTTSGDNVFNTVERKTVGTKLKVTPQVNEGDAVLLEIEQEVSSVDSSSNSTLGPTFNTRTIQNAVLVKTGETVVLGGLLDDFSKEQVSKVPLLGDIPLVGQLFRYTSTERAKRNLMVFIRPTIIRDDDVYRSLSKEKYTRYRQEQQQRIDGKSKALVGSEDLPVLDENTFNSHTPAPSAR

SEQ ID NO: 16919 - protein, 361 aa, Escherichia coli; identical to SEQ ID NO: 3061

SEQ ID NO: 16920 - protein, 227 aa, Escherichia coli; identical to SEQ ID NO: 4009

SEQ ID NO: 16921 - protein, 432 aa, Escherichia coli; identical to SEQ ID NO: 2026

SEQ ID NO: 16922 - protein, 539 aa, Escherichia coli; identical to SEQ ID NO: 3146

SEQ ID NO: 16923 - protein, 250 aa, Escherichia coli; identical to SEQ ID NO: 2761

SEQ ID NO: 16924 - protein, 614 aa, Escherichia coli; identical to SEQ ID NO: 1888

SEQ ID NO: 16925 - protein, 213 aa, Escherichia coli; identical to SEQ ID NO: 2232

SEQ ID NO: 16926 - protein, 614 aa, Escherichia coli; identical to SEQ ID NO: 4016

SEQ ID NO: 16927 - protein, 243 aa, Escherichia coli; identical to SEQ ID NO: 4001

SEQ ID NO: 16928 - protein, 221 aa, Escherichia coli; identical to SEQ ID NO: 4116

SEQ ID NO: 16929 - protein, 518 aa, Escherichia coli; identical to SEQ ID NO: 2349

SEQ ID NO: 16930 - protein, 331 aa, Escherichia coli; identical to SEQ ID NO: 2705

SEQ ID NO: 16931 - protein, 567 aa, Escherichia coli; identical to SEQ ID NO: 4028

SEQ ID NO: 16932 - protein, 249 aa, Escherichia coli; identical to SEQ ID NO: 9840

SEQ ID NO: 16933 - protein, 203 aa, Escherichia coli; identical to SEQ ID NO: 2015

SEQ ID NO: 16934 - protein, 246 aa, Escherichia coli; identical to SEQ ID NO: 1985

SEQ ID NO: 16935 - protein, 446 aa, Escherichia coli; identical to SEQ ID NO: 2176

SEQ ID NO: 16936 - protein, 250 aa, Escherichia coli; identical to SEQ ID NO: 4096

SEQ ID NO: 16937 - protein, 659 aa, Escherichia coli; identical to SEQ ID NO: 4027

SEQ ID NO: 16938 - protein, 243 aa, Escherichia coli; identical to SEQ ID NO: 4122

SEQ ID NO: 16939 - protein, 478 aa, Escherichia coli; identical to SEQ ID NO: 2421

SEQ ID NO: 16940 - protein, 678 aa, Escherichia coli; identical to SEQ ID NO: 4005

SEQ ID NO: 16941 - protein, 224 aa, Escherichia coli; identical to SEQ ID NO: 3165

SEQ ID NO: 16942 - protein, 591 aa, Escherichia coli
MPSFIGGLVVFVSTAFNAQAETWFDPAFFKDDPSMVADLSRFEKGQKITPGVYRVDIVLNQTIVDTRNVNFVEITPEKGIAACLTTESLDAMGVNTDAFPAFKQLDKQACVPLAEIIPDASVTFNVNKLRLEISVPQIAIKSNARGYVPPERWDEGINALLLGYSFSGANSIHSSADSDSGDSYFLNLNSGVNLGPWRLRNNSTWSRSSGQTAEWKNLSSYLQRAVIPLKGELTVGDDYTAGDFFDSVSFRGVQLASDDNMLPDSLKGFAPVVRGIAKSNAQITIKQNGYTIYQTYVSPGAFEISDLYSTSSSGDLLVEIKEADGSVNSYSVPFSSVPLLQRQGRIKYAVTLAKYRTNSNEQQESKFAQATLQWGGPWGTTWYGGGQYAEYYRAAMFGLGFNLGDFGAISFDVTQAKSTLADQSEHKGQSYRFLYAKTLNQLGTNFQLMGYRYSTSGFYTLSDTMYKHMDGYEFNDGDDEDTPMWSRYYNLFYTKRGKLQVNISQQLGEYGSFYLSGSQQTYWHTDQQDRLLQFGYNTQIKDLSLGVSWNYSKSRGQPDADQVFALNFSLPLNLLLPRSNDSYTRKKITHG

SEQ ID NO: 16943 - protein, 229 aa, Escherichia coli; identical to SEQ ID NO: 3277

SEQ ID NO: 16944 - protein, 517 aa, Escherichia coli; identical to SEQ ID NO: 3116

SEQ ID NO: 16945 - protein, 834 aa, Escherichia coli
MYKKLKLTTISELIKNIYCSLSVLIIGCASAYAVEFNKDLIEAEDRENVNLSQFETDGQLPVGKYSLNALINNKRTPIHLDLQWVLIDNQTAVCLTPEQLTLLGFTDEIIEVAQQNLIDGCYPIEKEKQITTYLDKGKMQLSISAPQAWLKYKDANWTPPELWDHGIAGAFLDYNLYASHYAPHQGDNSQNISSYGQAGVNLGAWRLRTDYQYDQSFNNGKSQANNLDFPRIYLFRPIPAINAKLTIGQYDTESSIFDSFHFSGVSLKSDENMLPPDLRGYAPQITGVAQTNAKVTVSQNNRIIYQENVPPGPFAITNLFNTLQGQLDVKVEEEDGQVTQWQVASNSIPYLTRKGQIRYTTAMGKPTSVGGDSLQQPFFWTGEFSWGWLNNVSLYGGSVLTNRDYQSLAAGVGFNLNSLGSLSFDVTRSDAQLHNQDKETGYSYRANYSKRFESTGSQLTFAGYRFSDKNFVTMNEYINDTNHYTNYQNEKESYIVTFNQYLESLRLNTYVSLARNTYWDASSNVNYSFSLSRDFDIGPLKNVSTSLTFSRINWEEDNQDQLYLNISIPWGTSRTLSYGMQRNQDNKISHTASWYDSSDRNNSWSVSASGDNDEFKDMKASLRASYQHNTENGRLYLSGTSQRDSYYSLNASWNGSFTATRHGAAFHDYSGSADSRFMIDADGAEDIPLNNKRAVTNRYGIGVIPSVSSYITTSLSVDTRNLPENVDIENSVITTTLTEGAIGYAKLDTRKGYQIMGVIRLADGSHPPLGISVKDKTSHKELGLVADGGFVYLNGIQDDSKLTLRWGDKSCFIQPPNSSNLTTGTVILPCISQN

SEQ ID NO: 16946 - protein, 838 aa, Escherichia coli; identical to SEQ ID NO: 6105

SEQ ID NO: 16947 - protein, 678 aa, Escherichia coli; identical to SEQ ID NO: 3881

SEQ ID NO: 16948 - protein, 871 aa, Escherichia coli
MHQVLIMPRFARLTIALGLATAVFPVDAEYYFNPRFLSNDLAESVDLSAFTKGREAPPGTYRVDIYLNDEFMTSRDITFIADDNNAELIPCLSTDLLVSLGIKKSALLDNKEHSAEKHVPDNSACTPLQDRLADASTEFDVGQQHLSLSVPQIYVGRMARGYVSPDLWEEGINAGLLNYSFNGNSINNRSNHNAGKSNYAYLNLQSGINIGSWRLRDNSTWSYNSGSSNSSDSNKWQHINTSAERDIIPLRSRLTVGDSYTDGDIFDSVNFRGLKINSTEAMLPDSQHGFAPVIHGIARGTAQVSVKQNGYDVYQTTVPPGPFTIDDINSAANGGDLQVTIKEADGSIQTLYVPYSSVPVLQRAGYTRYALAMGEYRSGNNLQSSPKFIQGSLMHGLEGNWTPYGGMQIAEDYQAFNLGIGKDLGLFGAFSFDITQANTTLADGTRHSGQSVKSVYSKSFYQTGTNIQVAGYRYSTQGFYNLSDSAYSRMSGYTVKPPTGDSNEQTQFIDYFNLFYSKRGQEQISISQQLGNYGTTFFSASRQSYWNTSRSDQQISFGLNVPFGDITTSLNYSYSNNIWQNDRDHLLAFTLNVPFSHWMRTDSQSAFRNSNASYSMSNDLKGGMTNLSGVYGTLLPDNNLNYSVQVGNTHGGNTSSGTSGYSSLNYRGAYGNTNVGYSRNGDSSQIYYGMSGGIIAHADGITFGQPLGDTMVLVKAPGADNVKIENQTGIHTDWRGYAILPFATEYRENRVALNANSLADNVELDETVVTVIPTHGAIARATFNAQIGGKVLMTLKYGNKSVPFGAIVTHGENKNGSIVAENGQVYLTGLPQSGKLQVSWGKDKNSNCIVEYKLPEVSPGTLLNQQTAICR

SEQ ID NO: 16949 - protein, 236 aa, Escherichia coli; identical to SEQ ID NO: 3286

SEQ ID NO: 16950 - protein, 111 aa, Escherichia coli; identical to SEQ ID NO: 2911

SEQ ID NO: 16951 - protein, 228 aa, Escherichia coli; identical to SEQ ID NO: 3034

SEQ ID NO: 16952 - protein, 208 aa, Escherichia coli; identical to SEQ ID NO: 1949

SEQ ID NO: 16953 - protein, 130 aa, Escherichia coli; identical to SEQ ID NO: 3184

SEQ ID NO: 16954 - protein, 237 aa, Escherichia coli; identical to SEQ ID NO: 1814

SEQ ID NO: 16955 - protein, 747 aa, Escherichia coli; identical to SEQ ID NO: 2072

SEQ ID NO: 16956 - protein, 161 aa, Escherichia coli; identical to SEQ ID NO: 2582

SEQ ID NO: 16957 - protein, 200 aa, Escherichia coli; identical to SEQ ID NO: 1784

SEQ ID NO: 16958 - protein, 274 aa, Escherichia coli; identical to SEQ ID NO: 3471

SEQ ID NO: 16959 - protein, 250 aa, Escherichia coli; identical to SEQ ID NO: 3427

SEQ ID NO: 16960 - protein, 351 aa, Escherichia coli; identical to SEQ ID NO: 2519

SEQ ID NO: 16961 - protein, 224 aa, Escherichia coli; identical to SEQ ID NO: 3115

SEQ ID NO: 16962 - protein, 243 aa, Escherichia coli; identical to SEQ ID NO: 3483

SEQ ID NO: 16963 - protein, 359 aa, Escherichia coli; identical to SEQ ID NO: 2328

SEQ ID NO: 16964 - protein, 230 aa, Escherichia coli; identical to SEQ ID NO: 3348

SEQ ID NO: 16965 - protein, 729 aa, Escherichia coli; identical to SEQ ID NO: 6108

SEQ ID NO: 16966 - protein, 231 aa, Escherichia coli; identical to SEQ ID NO: 3055

SEQ ID NO: 16967 - protein, 162 aa, Escherichia coli; identical to SEQ ID NO: 1965

SEQ ID NO: 16968 - protein, 843 aa, Escherichia coli; identical to SEQ ID NO: 3042

SEQ ID NO: 16969 - protein, 816 aa, Escherichia coli; identical to SEQ ID NO: 2817

SEQ ID NO: 16970 - protein, 207 aa, Escherichia coli; identical to SEQ ID NO: 2211

SEQ ID NO: 16971 - protein, 368 aa, Escherichia coli
MNKTITALAIMMASFAANASVLPETPVPFKSGTGAIDNDTVYIGLGSAGTAWYKLDTQAKDKKWTALAAFPGGPRDQATSAFIDGNLYVFGGIGKNNEGLTQVFNDVHKYNPKTNSWVKLMSHAPMGMAGHVTFVHNGKAYVTGGVNQNIFNGYFEDLNQAGKDSTAIDKINTHYFDKKAEDYFFNKFLLSFDPSTQQWSYAGESPWYGTAGAAVVNKGDKTWLINGEAKPGLRTDAVFELDFTGNNLKWNKLAPVSSPDGVAGGFAGMSNDSLIFAGGAGFKGSRENYQNGKNYAHEGLKKSYSTDIHLWHNGKWDKSGELSQGRAYGVSLPWNNSLLIIGGETAGGKAVTDSVLISVKDNKVTVQN

SEQ ID NO: 16972 - protein, 880 aa, Escherichia coli
MPDHSLFRLRILPWCIALAMSGSYSSVWAEDDIQFDSRFLELKGDTKIDLKRFSSQGYVEPGKYNLQVQLNKQPLAEEYDIYWYAGEDDASKSYACLTPELVAQFGLKEDVAKNLQWSHDAKCLKSGQLEGMEIKADLSQSALVISLPQAYLEYTYPDWDPPSRWDDGISGIVADYSINAQTRHEENGGDDSNEISGNGTVGVNLGPWRMRADWQTNYQHTRSNDDDEFSGDETQKKWEWSRYYAWRALPSLKAKLALGEDYLRSDIFDGFNYVGGSVSTDDQMLPPNLRGYAPDISGVAHTTAKVTVSQMGRVIYETQVPAGPFRIQDLGDSVSGTLHIRIEEQNGQVQEYDISTASMPYLTRPGQVRYKIMMGRPQEWGHHVEGEFFSGAEASWGIANGWSLYGGALGDENYQSAALGVGRDLSTFGAVAFDVTHSHTKLDKDTAYGKGSLDGNSFRVSYSKDFDQLNSRVTFAGYRFSEENFMTMSEYLDASDSGMVRTGNDKEMYTATYNQNFRDAGVSVYLNYTRHTYWDREEQTNYNIMLSHYFNMGSIRNVSISMTGYRYEYDNQADKGMYISLSMPWGDNSTVSYNGNYGSGTDSSQVGYFSRVDDATHYQLNVGTSDKHTSVDGYYSHDGSLAQVDLSANYHEGQYTSAGLSLQGGATLTAHGGALHRTQNMGGTRLLIDADGVADVPVEGNGAAVYTNMFGKAVVSDVNNYYRNQAYIDLNKLPENAEATQSVVQATLTEGAIGYRKFAVISGQKAMAVLRLQDGSHPPFGAEVKNDNEQTVGLVDDDGNVYLAGVKPGEHMSVFWSGVAHCDINLPDPLPADLFNGLLLPCQHKGNVAPITSPAVKPAIQEQTQRVTPTEPPTSISVNQ

SEQ ID NO: 16973 - protein, 386 aa, Escherichia coli; identical to SEQ ID NO: 3072

SEQ ID NO: 16974 - protein, 241 aa, Escherichia coli; identical to SEQ ID NO: 2950

SEQ ID NO: 16975 - protein, 869 aa, Escherichia coli; identical to SEQ ID NO: 9935

SEQ ID NO: 16976 - protein, 430 aa, Escherichia coli; identical to SEQ ID NO: 2617

SEQ ID NO: 16977 - protein, 565 aa, Escherichia coli; identical to SEQ ID NO: 2669

SEQ ID NO: 16978 - protein, 784 aa, Escherichia coli; identical to SEQ ID NO: 2244

SEQ ID NO: 16979 - protein, 243 aa, Escherichia coli; identical to SEQ ID NO: 2910

SEQ ID NO: 16980 - protein, 331 aa, Escherichia coli; identical to SEQ ID NO: 2700

SEQ ID NO: 16981 - protein, 760 aa, Escherichia coli; identical to SEQ ID NO: 3923

SEQ ID NO: 16982 - protein, 700 aa, Escherichia coli; identical to SEQ ID NO: 3128

SEQ ID NO: 16983 - protein, 686 aa, Escherichia coli; identical to SEQ ID NO: 3129

SEQ ID NO: 16984 - protein, 232 aa, Escherichia coli; identical to SEQ ID NO: 2087

SEQ ID NO: 16985 - protein, 641 aa, Escherichia coli
MLAVDDDGETMVVTASSVEQNLKDAPASISVITQEDLQRKPVQNLKDVLKEVPGVQLTNEGDNRKGVSIRGLDSSYTLILVDGKRVNSRNAVFRHNDFDLNWIPVDSIERIEVVRGPMSSLYGSDALGGVVNIITKKIGQKWSGTVTVDTTIQEHRDRGDTYNGQFFTSGPLIDGVLGMKAYGSLAKREKDDPQNSTTTDTGETPRIEGFSSRDGNVEFAWTPNQNHDFTAGYGFDRQDRDSDSLDKNRLERQNYSVSHNGRWDYGTSELKYYGEKVENKNPGNSSPITSESNTVDGKYTLPLTAINQFLTVGGEWRHDKLSDAVNLTGGTSSKTSASQYALFVEDEWRIFEPLALTTGVRMDDHETYGEHWSPRAYLVYNATDTVTVKGGWATAFKAPSLLQLSPDWTSNSCRGACKIVGSPDLKPETSESWELGLYYMGEEGWLEGVESSVTVFRNDVKDRISISRTSDVNAAPGYQNFVGFETGANGRRIPVFSYYNVNKARIQGVETELKIPFNDEWKLSLNYTYNDGRDVSNGENKPLSDLPFHTANGTLDWKPLALEDWSFYVSGHYTGQKRADSATAKTPGGYTIWNTGAAWQVTKDVKLRAGVLNLGDKDLSRDDYSYNEDGRRYFMAVDYRF

SEQ ID NO: 16986 - protein, 404 aa, Escherichia coli; identical to SEQ ID NO: 14114

SEQ ID NO: 16987 - protein, 249 aa, Escherichia coli; identical to SEQ ID NO: 3492

SEQ ID NO: 16988 - protein, 266 aa, Escherichia coli; identical to SEQ ID NO: 1894

SEQ ID NO: 16989 - protein, 746 aa, Escherichia coli; identical to SEQ ID NO: 3031

SEQ ID NO: 16990 - protein, 170 aa, Escherichia coli [sequence omitted]

SEQ ID NO: 16991 - protein, 826 aa, Escherichia coli
MLRMTPLASAIVALLLGIEAYAAEETFDTHFMIGGMKDQQVANIRLDDNQPLPGQYDIDIYVNKQWRGKYEIIVKDNPQETCLSREVIKRLGINSDNFASGKQCLTFEQLVQGGSYTWDIGVFRLDFSVPQAWVEELESGYVPPENWERGINAFYTSYYVSQYYSDYKASGNNKSTYVRFNSGLNLLEWQLHSDASFSKTNNNPGVWKSNTLYLERGFAQLLGTLRVGDMYTSSDIFDSVRFSGVRLFRDMQMLPNSKQNFTPRVQGIAQSNALVTIEQNGFVVYQKEVPPGPFAITDLQLAGGGADLDVSVKEADGSVTTYLVPYAAVPNMLQPGVSKYDFAAGRSHIEGASKQSDFVQAGYQYGFNNLLTLYGGSMVANNYYAFTLGTGWNTRIGAISVDATKSHSKQDNGDVFDGQSYQIAYNKFVSQTSTRFGLAAWRYSSRDYRTFNDHVWANNKDNYRRDENDVYDIADYYQNDFGRKNSFSANMSQSLPEGWGSVSLSTLWRDYWGRSGSSKDYQLSYSNNWRRISYILAASQTYDENHHEEKRFNIFISIPFDWGDDVTTPRRQIYMSNSTTFDDQGFASNNTGLSGTVGSRDQFNYGVNLSYQHQGNETTAGANLTWNAPVATVNGSYSQSSTYRQAGASVSGGIVAWSGGVNLANRLSETFAVMNAPGIKDAYVNGQKYRTTNRNGVVIYDGMTPYRENHLMLDVSQSDSEAELRGNRKIAAPYRGAVVLVNFDTDQRKPWFIKALRADGQPLMFGYEVNDIHGHNIGVVGQGSQLFIRTNEVPPSVNVAIDKQQGLSCTITFGKEIDESRNYICQ

SEQ ID NO: 16992 - protein, 614 aa, Escherichia coli; identical to SEQ ID NO: 1884

SEQ ID NO: 16993 - protein, 446 aa, Escherichia coli; identical to SEQ ID NO: 2176

SEQ ID NO: 16994 - protein, 856 aa, Escherichia coli
MAGFFVRLFVACAFAAQAPLSSAELYFNPRFLADDPQAVADLSRFENGQELPPGTYRVDIYLNNGYMATRDVTFNTGDSEQGIVPCLTRAQLASMGLNTASVSGMNLLADDACVPLTSMIHDATAHLDVGQQRLNLTIPQAFMSNRARGYIPPELWDPGINAGLLNYNFSGNSVQNRIGGNSHYAYLNLQSGLNIGAWRLRDNTTWSYNRSDRSSGSKNKWQHINTWLERDIIPLRSRLTLGDGYTQGDIFDGINFRGAQLASDDNMLPDSQRGFAPVIHGIARGTAQVTIKQNGYDIYNSTVPPGPFTINDIYAAGNSGDLQVTIKEADGSTQIFTVPYSSVPLLQREGHTRYSITAGEYRSGNAQQEKPRFFQSTLLHGLPAGWTIYGGTQLADRYRAFNFGIGKNMGALGALSVDMTQANSTLPDDSQHDGQSVRFLYNKSLNESGTNIQLVGYRYSTSGYFNFADTTYSRMNGYNIETQDGVIQVKPKFTDYYNLAYNKRGKLQLTVTQQLGRTSTLYLSGSHQTYWGTSNVDEQFQAGLNTAFEDINWTLSYSLTKNAWQKGRDQMLALNVNIPFSHWLRSDSKSQWRHASASYSMSHDLNGRMTNLAGVYGTLLEDNNLSYSVQTGYAGGGDGNSGSTGYATLNYRGGYGNANIGYSHSDDIKQLYYGVSGGVLAHANGVTLGQPLNDTVVLVKAPGAKDAKVENQTGVRTDWRGYAVLPYATEYRENRVALDTNTLADNVDLDNAVANVVPTRGAIVRAEFKARVGIKLLMTLTHNNKPLPFGAMVTSESSQSSGIVADNGQVYLSGMPLAGKVQVKWGEEENAHCVANYQLPPESQQQLLTQLSAECR

SEQ ID NO: 16995 - protein, 361 aa, Escherichia coli; identical to SEQ ID NO: 3061

SEQ ID NO: 16996 - protein, 765 aa, Escherichia coli; identical to SEQ ID NO: 7498

SEQ ID NO: 16997 - protein, 432 aa, Escherichia coli; identical to SEQ ID NO: 2026

SEQ ID NO: 16998 - protein, 518 aa, Escherichia coli; identical to SEQ ID NO: 2349

SEQ ID NO: 16999 - protein, 203 aa, Escherichia coli; identical to SEQ ID NO: 2201

SEQ ID NO: 17000 - protein, 191 aa, Escherichia coli; identical to SEQ ID NO: 2727

SEQ ID NO: 17001 - protein, 230 aa, Escherichia coli; identical to SEQ ID NO: 4274

SEQ ID NO: 17002 - protein, 539 aa, Escherichia coli; identical to SEQ ID NO: 3050

SEQ ID NO: 17003 - protein, 367 aa, Escherichia coli; identical to SEQ ID NO: 2936

SEQ ID NO: 17004 - protein, 193 aa, Escherichia coli; identical to SEQ ID NO: 2246

SEQ ID NO: 17005 - protein, 203 aa, Escherichia coli; identical to SEQ ID NO: 2015

SEQ ID NO: 17006 - protein, 213 aa, Escherichia coli; identical to SEQ ID NO: 2232

SEQ ID NO: 17007 - protein, 351 aa, Escherichia coli; identical to SEQ ID NO: 2872

SEQ ID NO: 17008 - protein, 246 aa, Escherichia coli; identical to SEQ ID NO: 3021

SEQ ID NO: 17009 - protein, 678 aa, Escherichia coli; identical to SEQ ID NO: 2231

SEQ ID NO: 17010 - protein, 826 aa, Escherichia coli; identical to SEQ ID NO: 2758

SEQ ID NO: 17011 - protein, 816 aa, Escherichia coli; identical to SEQ ID NO: 2817

SEQ ID NO: 17012 - protein, 360 aa, Escherichia coli; identical to SEQ ID NO: 3062

SEQ ID NO: 17013 - protein, 784 aa, Escherichia coli; identical to SEQ ID NO: 2244

SEQ ID NO: 17014 - protein, 729 aa, Escherichia coli; identical to SEQ ID NO: 2948

SEQ ID NO: 17015 - protein, 432 aa, Escherichia coli; identical to SEQ ID NO: 2026

SEQ ID NO: 17016 - protein, 203 aa, Escherichia coli; identical to SEQ ID NO: 2009

SEQ ID NO: 17017 - protein, 213 aa, Escherichia coli; identical to SEQ ID NO: 4344

SEQ ID NO: 17018 - protein, 121 aa, Escherichia coli; identical to SEQ ID NO: 4345

SEQ ID NO: 17019 - protein, 880 aa, Escherichia coli; identical to SEQ ID NO: 6424

SEQ ID NO: 17020 - protein, 331 aa, Escherichia coli; identical to SEQ ID NO: 2700

SEQ ID NO: 17021 - protein, 700 aa, Escherichia coli; identical to SEQ ID NO: 3128

SEQ ID NO: 17022 - protein, 266 aa, Escherichia coli; identical to SEQ ID NO: 1894

SEQ ID NO: 17023 - protein, 250 aa, Escherichia coli; identical to SEQ ID NO: 4332

SEQ ID NO: 17024 - protein, 207 aa, Escherichia coli; identical to SEQ ID NO: 2211

SEQ ID NO: 17025 - protein, 170 aa, Escherichia coli [sequence omitted]

SEQ ID NO: 17026 - protein, 111 aa, Escherichia coli; identical to SEQ ID NO: 3096

SEQ ID NO: 17027 - protein, 565 aa, Escherichia coli; identical to SEQ ID NO: 2669

SEQ ID NO: 17028 - protein, 849 aa, Escherichia coli; identical to SEQ ID NO: 4340

SEQ ID NO: 17029 - protein, 102 aa, Escherichia coli; identical to SEQ ID NO: 1829

SEQ ID NO: 17030 - protein, 478 aa, Escherichia coli; identical to SEQ ID NO: 2404

SEQ ID NO: 17031 - protein, 274 aa, Escherichia coli; identical to SEQ ID NO: 2300

SEQ ID NO: 17032 - protein, 170 aa, Escherichia coli [sequence omitted]

SEQ ID NO: 17033 - protein, 213 aa, Escherichia coli; identical to SEQ ID NO: 2232

SEQ ID NO: 17034 - protein, 224 aa, Escherichia coli; identical to SEQ ID NO: 3165

SEQ ID NO: 17035 - protein, 863 aa, Escherichia coli
MHIRKHRLAGFFVRLFVACAFTAQAPLSSAELYFNPRFLADDPQAVADLSRFENGQELPPGTYRVDIYLNNGYMATRDVTFNTGDSEQGIVPCLTRAQLASMGLNTASVSGMNLLADDACVPLTSMIHDATAQLDVGQQRLNLTIPQAFMSNRARGYIPPELWDPGINAGLLNYNFSGNSVQNRIGSNSHYAYLNLQSGLNIGAWRLRDNTTWSYNSSDSSSGSKNKWQHINTWLERDIIPLRSRLTLGDGYTQGDIFDGINFRGAQLASDDNMLPDSQRGFAPVIHGIARGTAQVTIKQNGYDIYNSTVPPGPFTINDIYAAGNSGDLQVTIKEADGSTQIFTVPYSSVPLLQREGHTRYSITAGEYRSGNAQQEKPRFFQSTLLHGLPAGWTIYGGTQLADRYHAFNFGIGKNMGALGALSVDMTQANSTLPDDSQHDGQSVRFLYNKSLNESGTNIQLVGYRYSTSGYFNFADTTYSRMNGYNIETQDGVIQVKPKFTDYYNLAYNKRGKLQLTVTQQLGRTSTLYLSGSHQTYWGTSNVDEQFQAGLNTAFEDINWMLSYSLTKNAWQKGRDQMLALNVNIPFSHWLRSDSKSQWRHASASYSMSHDLNGRMTNLAGVYGTLLEDNNLSYSVQTGYAGGGDGNSGSTGYATLNYRGGYGNANIGYSHSDDIKQLYYGVSGGVLAHANGVTLGQPLNDTVVLVKAPGAKDAKVENQTGVRTDWRGYAVLPYATEYRENRVALDTNTLADNVDLDNAVANVVPTRGAIVRAEFKARVGIKLLMTLTHNNKPLPFGAMVTSESSQSSGIVADNGQVYLSGMPLAGKVQVKWGEEENAHCVANYQLPPESQQQLLTQLSAECR

SEQ ID NO: 17036 - protein, 241 aa, Escherichia coli
MSNKNVNVRKSQEITFCLLAGILMFMAMMVAGRAEAGVALGATRVIYPAGQKQVQLAVTNNDENSTYLIQSWVENADGVKDGRFIVTPPLFAMKGKKENTLRILDATNNQLPQDRESLFWMNVKAIPSMDKSKLTENTLQLAIISRIKLYYRPAKLALPPNQAAEKLRFRRSANSLTLINPTPYYLTVTELNAGTRVLENALVPPMGESAVKLPSDAGSNITYRTINDYGALTPKMTGVME

SEQ ID NO: 17037 - protein, 119 aa, Escherichia coli; identical to SEQ ID NO: 2527

SEQ ID NO: 17038 - protein, 386 aa, Escherichia coli; identical to SEQ ID NO: 5575

SEQ ID NO: 17039 - protein, 432 aa, Escherichia coli; identical to SEQ ID NO: 2026

SEQ ID NO: 17040 - protein, 505 aa, Escherichia coli
MYKKTTLAVLIALLTGATTVHAQTDISSIESRLAALEQRLKNAESRAQAAEARAKTAELQVQKLAETQQQNQLTTQEVAQRTVQLEQKSAENSGFEFHGYARSGLLMNDAASSSKSGPYLTPAGETGGAVGRLGNEADTYVELNVEHKQTLDNGATTRFKAMLADGQRDYNDWTGGSSNLNIRQAFAELGALPSFTGAFQDSTVWAGKRFDRDNFDIHWLDSDVVFLAGTGGGIYDVKWNDTFRSNFSLYGRNFGDLDDIDNNVQNYILTMNHYAGPFQLMVSGLRAKDNDDRKDANGDLIQTDAANTGVHALVGLHNDSFYGLREGTAKTALLYGHGLGAEVKGIGSDGALLSEANTWRFASYGTTPLGSGWYVAPAILAQSSKDRYVKGDSYEWVTFNTRLIKEVTQNFALAFEGSYQYMDLKPKGYQNHNAVNGSFYKLTFAPTLKANDINNFFSRPELRLFATWMDWSSKLDDFASNDAFGSSGFNTGGEWNFGVQMETWF

SEQ ID NO: 17041 - protein, 882 aa, Escherichia coli
MPNHSNFRLRGIACYIALAISGGSVNAWADDSIQFDPRFLELKGDTKIDLGKFSKKGYVDAGKYNLRVFINKQPLSDEYDINWYVSENDPTKNYACLTPELVAALGLKEGIAKSLQWTHNDECLKPGQLDGMEVENDLSQSALLLTVPQAYLEYTSSDWDPPSRWDDGIPGLIADYSLNAQTRHQEQGGEDSHDISGNGTVGANLGAWRFRADWQSDYQHTRSNDDDDDSSNSTTSKHWDWSRYYAWRALPSLKAKLSLGEDYLNSDIFDGFNYIGSSVSTDDQMLPPNLRGYAPDVSGVAHSSAKVTISQMGRVLYETQVPAGPFRIQDIGDSVSGTLHVRVEEQNGQVQEYDVTTASMPFLTRQGQVRYKVMMGRPEDWNHKTEGGFFSGGEASWGVADGWSLYGGALADKHYQSAAMGVGRDLAQFGALAFDVTHSHVNLDHDSAYGKGKLDGNSFRVSYAKDFDELNSRVTFAGYRFSEKNFMTMSEYLDANQSDMARTGNDKEMYTITYNQNFAAAGVSIYLNYSHRTYWDRPEQTNYNLMFSHYFNMGSIRNMSISVTGYRYEYDDNADKGMYLSMSIPWSDSSTVTYNGSYGSGSDSSQVGYFKRVDDATHYQVNVGTSEQHGSVDGYLSHDGSLAKVDLSANYHEGEYRSAGIALQGGATLTAHGGALHRTQNMGGTRLLIDADGIANVPVESNGAPVYTNMFGKAVVADINNYYRNQAYIDLNNLPEDAEATQSVVQATLTEGAIGYRKFKVISGQKAMAVLRLRDGSYPPFGAEVKNDEQQQVGIVDDEGNVYLAGVNADEHMMVFWEGSAQCEIVLPKPLPADLFSGLLLPCEQKGTAAPDSSAPEIKPVIQDQKRQVTPTEAPTSISATQ

SEQ ID NO: 17042 - protein, 656 aa, Escherichia coli; identical to SEQ ID NO: 5108

SEQ ID NO: 17043 - protein, 565 aa, Escherichia coli
MKSPAPSRPQKMALIPACIFLCFAALSVQAEETSVTPQPPDILLGPLFNDVQNAKLFPDQKTFADAVPNSDPLMILADYRMQQNQSGFDLRHFVNVNFTLPKEGEKYVPPEGQSLREHIDGLWPVLTRSTENTEKWDSLLPLPKPYVVPGGRFREVYYWDSYFTMLGLAESGHWDKVADMVANFAHEIDTYGHIPNGNRSYYLSRSQPPFFALMVELLAQHEGDAALKQYLPQMQKEYAYWMDGVENLQAGQQEKRVVKLQDGTLLNRYWDDRDTPRPESWVEDIATAKSNPNRPATEIYRDLRSAAASGWDFSSRWMDNPQQLNTLRTTSIVPVDLNSLMFKMEKILSRASKAAGDNAMANQYETLANARQKGIEKYLWNDQQGWYADYDLKSHKVRNQLTAAALFPLYVNAAAKDRASKMATATKTHLLQPGGLNTTSVKSGQQWDAPNGWAPLQWVATEGLQNYGQKEVAMDISWHFLTNVQHTYDREKKLVEKYDVSTTGTGGGGGEYPLQDGFGWTNGVTLKMLDLICPKEQPCDNVPATRPLSESTTQPVKQKEAEPTP

SEQ ID NO: 17044 - protein, 207 aa, Escherichia coli; identical to SEQ ID NO: 2213

SEQ ID NO: 17045 - protein, 118 aa, Escherichia coli [sequence omitted]

SEQ ID NO: 17046 - protein, 213 aa, Escherichia coli; identical to SEQ ID NO: 2232

SEQ ID NO: 17047 - protein, 249 aa, Escherichia coli
MNIMKSPLITTGMIYLLGICNFAQATVSPDRTRIIFNASNKSATVRLTNQSKIDPYLAQSWIEDASGKKTRDYISTLPPMERIEPDEQVQIRLMALASLNNLPQDRETLFYYNVREIPPRAKEQNVMQIAMQSRLKLFWRPKAIELKEGEMIPLQKVTITRTAAGLTLNNPTPYHITVGYIGTNGKTLMPGADSIMVAPFTSATQHLSSLPSTFQLGFVADYGGLEMFKVECNSIQSLCQSSPAKKGKI

SEQ ID NO: 17048 - protein, 351 aa, Escherichia coli
MKKSTLALVVMGIVASVSVQAAEIYNKDGNKLDVYGKVKAMHYMSDNDSKDGDQSYIRFGFKGETQINDQLTGYGRWEAEFAGNKAESDTAQQKTRLAFAGLKYKDLGSFDYGRNLGALYDVEAWTDMFPEFGGDSSTQTDNFMTKRASGLATYRNTDFFGVIDGLNLTLQYQGKNENRDVKKQNGDGFGTSLTYDFGGSDFAISGAYTNSDRTNEQNLQSRGTGKRAEAWATGLKYDANNIYLATFYSETRKMTPITGGFANKTQNFEAVAQYQFDFGLRPSLGYVLSKGKDIEGIGDEDLVNYIDVGATYYFNKNMSAFVDYKINQLDSDNKLNINNDDIVAVGMTYQF

SEQ ID NO: 17049 - protein, 430 aa, Escherichia coli; identical to SEQ ID NO: 2617

SEQ ID NO: 17050 - protein, 266 aa, Escherichia coli; identical to SEQ ID NO: 5141

SEQ ID NO: 17051 - protein, 658 aa, Escherichia coli
MSQSIAFTVIEGKKNAQACITQKNLLQFHISSPDKNSGKAILLKRDDDLGDCLNLAEMISQSSIRYDVNDQRLDIDVPQAWIMKNYQNYVDPSLWENGINAAMLSYNLNGYHSESPGRTNDSIYAAFNGGINLGAWRLRASGNYNWMTNVHSDYDFQNRYLQRDLASLRSQLVIGESYTTGETFDSVSIRGIRLYSDSRMLPPVLASFAPIIHGVANTNAKVTVMQNGYKIYETTVPPGAFAIDDLSPSGYGSDLIVTIEEADGTKRTFSQPFSSVVQMLRPGVGRWDISAGQVLKDSIQDEPNLFQASYYYGLNNYLTGYTGIQLTDNNYTAGLLGLGMNTPVGAFSVDVTHSNVSIPDDKTYQGQSYRISWNKLFENTSTSLNIAAYRYSTQHYLGLNDALTLIDEVEHPEQDLEPKSMRNYSRMKNQVTVSINQPLKFEKKESPWGTLSGSASASSDNSRQFSLNTDGGFVLHSGGLTFSNDSFSDSDTLAVIQAPGAKGARINYGNSTVDRWSYGVTSALSPYHENRIALDINDLENDVELKSTSTVAIPRQGAVVFADFETVQGQSAIMNIVRSDGKNIPFAEDIYDEQNNIIGNVGQGGQAFVHGIEQEENIRITWIEEGKPVSCFAHYQQNTASEKIAQSIILNGLRCQIQ

SEQ ID NO: 17052 - protein, 170 aa, Escherichia coli; identical to SEQ ID NO: 2565

SEQ ID NO: 17053 - protein, 446 aa, Escherichia coli; identical to SEQ ID NO: 2177

SEQ ID NO: 17054 - protein, 856 aa, Escherichia coli
MVVSRTYTSFFPFSLSVLALTVAGSFSATAGKFNPRFLEDTAGINQHVDLSMYETDHGAQLPGTYRVSLIVNEQKMETRTLEFKAATESQRKEMGEFLIPCLSRTQLADMGVRVDSFSALNLIPAEACVAFNEIIPQATSHFDFSEQKLVMSFPQAAMQQVARGTVPESRWDDGVPALLLDYSFSGSNSSHDTKSYNRYIDENGNHHQDKNETSQTNDSYYLSMRSGLNLGAWRLRNYSNWSYSNGEKQWDNIGTYVTRAIVPLKAQLTLGDTATPSDIFDSVQMRGALLASDEEMLPDSQRGFAPVVRGIAKSNAEVSIEQNGYVIYRAFVQPGAFEINDLYPTANSGDLTVIVKEADGSEQRFIQPFSSVAVFQREGHLKYSLSAGEYRAGNYDSANPRFGQFNAMYGLPFGMTTYGGALISKDYNAFALGLGKNFGSIGAISVDITQAKSTLNNNATDQGQSYRFLYSKSFASGTDFRLLGYKYSTSGFYTFQEATDVRSGADSDYGRYHKRSEIQGNLTQQLGTYGSVYFNMTQQDYWNDDGKRLSLATGYNGRIGRVNYSIAYSWNKSPEWDENDQLWSFNISIPFGRAWSNYRVTTDQDGRTIQQLGVNGTLLEDRNLSYNVQEGYSSNGVGNSGNASLAYQGGAGNISVGYSYGKDYQQTNYSLRGGIVAHSEGISLSQPLGETIAIVSAPGARGAKVLNNSGVSVDWQGNAVVPYLSIYRENDVSIRSETLNDSVDMNSAFQTIVPTRGAVVRAHFDTRVGYRVLMTLIRQNGVSVPFGATATLVSDTTEQISGIVGEDGQLYISGMPKTGNVKIVWGKDTSQQCVAKYELPVEEKNSGIISVTANCQ

SEQ ID NO: 17055 - protein, 518 aa, Escherichia coli
MKKLKINYLFIGILALLLAVALWPSIPWFGKADNRIAAIQARGELRVSTIHTPLTYNEINGKPFGLDYELAKQFADYLGVKLKVTVRQNISQLFDDLDNGNADLLAAGLVYNSERVKNYQPGPTYYSVSQQLVYKVGQYRPRTLGNLTAEQLTVAPGHVVVNDLQTLKDTKFPELSWKVDDKKGSAELMEDVIEGKLDYTIADSVAISLFQRVHPELAVALDITDEQPVTWFSPLDGDNTLSAALLDFFNEMNEDGTLARIEEKYLGHGDDFDYVDTRTFLRAVDAVLPQLKPLFEKYAKEIDWRLLAAIAYQESHWDAQATSPTGVRGMMMLTKNTAQSLGITDRTDAEQSISGGVRYLQDMMSKVPESVPENERIWFALAAYNMGYAHMLDARALTAKTKGNPDSWADVKQRLPLLSQKPYYSKLTYGYARGHEAYAYVENIRKYQISLVGYLQEKEKQATEAAMQLAQDYPAVSPTELGKEKFPFLSFLSQSSSNYLTHSPSLLFSRKGSEEKQN

SEQ ID NO: 17056 - protein, 191 aa, Escherichia coli; identical to SEQ ID NO: 2727

SEQ ID NO: 17057 - protein, 243 aa, Escherichia coli; identical to SEQ ID NO: 3483

SEQ ID NO: 17058 - protein, 203 aa, Escherichia coli; identical to SEQ ID NO: 2015

SEQ ID NO: 17059 - protein, 193 aa, Escherichia coli; identical to SEQ ID NO: 2246

SEQ ID NO: 17060 - protein, 539 aa, Escherichia coli; identical to SEQ ID NO: 3050

SEQ ID NO: 17061 - protein, 224 aa, Escherichia coli; identical to SEQ ID NO: 4280

SEQ ID NO: 17062 - protein, 732 aa, Escherichia coli; identical to SEQ ID NO: 4284

SEQ ID NO: 17063 - protein, 747 aa, Escherichia coli; identical to SEQ ID NO: 2072

SEQ ID NO: 17064 - protein, 266 aa, Escherichia coli; identical to SEQ ID NO: 1894

SEQ ID NO: 17065 - protein, 161 aa, Escherichia coli; identical to SEQ ID NO: 2582

SEQ ID NO: 17066 - protein, 243 aa, Escherichia coli; identical to SEQ ID NO: 2910

SEQ ID NO: 17067 - protein, 208 aa, Escherichia coli; identical to SEQ ID NO: 1949

SEQ ID NO: 17068 - protein, 193 aa, Escherichia coli; identical to SEQ ID NO: 2253

SEQ ID NO: 17069 - protein, 614 aa, Escherichia coli; identical to SEQ ID NO: 1888

SEQ ID NO: 17070 - protein, 222 aa, Escherichia coli; identical to SEQ ID NO: 10294

SEQ ID NO: 17071 - protein, 746 aa, Escherichia coli; identical to SEQ ID NO: 4275

SEQ ID NO: 17072 - protein, 193 aa, Escherichia coli; identical to SEQ ID NO: 2246

SEQ ID NO: 17073 - protein, 518 aa, Escherichia coli; identical to SEQ ID NO: 2349

SEQ ID NO: 17074 - protein, 395 aa, Escherichia coli; identical to SEQ ID NO: 3220

SEQ ID NO: 17075 - protein, 430 aa, Escherichia coli; identical to SEQ ID NO: 2617

SEQ ID NO: 17076 - protein, 368 aa, Escherichia coli; identical to SEQ ID NO: 2371

SEQ ID NO: 17077 - protein, 241 aa, Escherichia coli; identical to SEQ ID NO: 2884

SEQ ID NO: 17078 - protein, 760 aa, Escherichia coli; identical to SEQ ID NO: 3923

SEQ ID NO: 17079 - protein, 229 aa, Escherichia coli
MALLIFAVLSLLVAGELQAGVVVGGTRFIFPADKESIAILLTNTSQESWLINSKINRPTRWAGGEVSTVPAPLLAAPPLILLKPGTTGTLRLLRTESDILPVDRETLFELSIASVPSGKVENQSVKVAMRSVFKLFWRPEGLPGDPLEAYQQLRWTRNSQGVQLTNPTPYYINLIQVSVNGKALSNAGVVPPKSQRQTSWCQVIAQCHVAWRAINDYGGLSAKKEQNLP

SEQ ID NO: 17080 - protein, 784 aa, Escherichia coli; identical to SEQ ID NO: 2242

SEQ ID NO: 17081 - protein, 453 aa, Escherichia coli
MVVNTVASENPDEAGRYSMDVEHGQYSVTLLVEGFPPSHAGTITVYEDSRPGTLNDFLGAMTEDDARPEALRRFELMVEEVVRNAEEAKKNAGEAETSARNAGISASQAEESAANADTSAGDASESARQAAESAASAKQSEEASSSSASAAAQKASESLQSATDAELSKKTAESAAGNAARDATTATEKARESAESAQSAEQSRIAAEEAVNRIPTVVGPPGPKGEPGPAGPQGPKGDKGERGDTGPAGATGERGPAGDAGPAGPQGPKGDRGETGLTGAAGPAGPQGPKGDTGAAGPAGPQGPKGDTGAAGPAGPQGPKGDAGVAGPAGPQGPKGDTGAAGPAGPQGPKGDAGVAGPAGPQGPSGSPDSGLFGVGSFVLAAYYQTYYSGDRAPGSTVAGSSLSACCLSNGTPLVASGNVGETRLPGTWRACGPMLWTSSPGIRQAGLFQRIS

SEQ ID NO: 17082 - protein, 696 aa, Escherichia coli; identical to SEQ ID NO: 10314

SEQ ID NO: 17083 - protein, 517 aa, Escherichia coli; identical to SEQ ID NO: 3116

SEQ ID NO: 17084 - protein, 192 aa, Escherichia coli; identical to SEQ ID NO: 3894

SEQ ID NO: 17085 - protein, 359 aa, Escherichia coli; identical to SEQ ID NO: 4362

SEQ ID NO: 17086 - protein, 686 aa, Escherichia coli; identical to SEQ ID NO: 3129

SEQ ID NO: 17087 - protein, 249 aa, Escherichia coli; identical to SEQ ID NO: 3492

SEQ ID NO: 17088 - protein, 834 aa, Escherichia coli; identical to SEQ ID NO: 3095

SEQ ID NO: 17089 - protein, 199 aa, Escherichia coli; identical to SEQ ID NO: 3906

SEQ ID NO: 17090 - protein, 823 aa, Escherichia coli
MALIIKRCLPMVLTGSGMLCTTANAEEYYFDPIMLETTKSGMQTTDLSRFSKKYAQLPGTYQVDIWLNKKKVSQKKITFTANAEQLLQPQFTVEQLRELGIKVDEIPALAEKDDDSVINSLEQIIPGTAAEFDFNHQRLNLSIPQIALYRDARGYVSPSRWDDGIPTLFTNYSFTGSDNRYRQGNRSQRQYLNMQNGANFGPWRLRNYSTWTRNDQASSWNTISSYLQRDIKALKSQLLLGESATSGSIFSSYTFTGVQLASDDNMLPNSQRGFAPTVRGIANSSAIVTIRQNGYVIYQSNVPAGAFEINDLYPSSNSGDLEVTIEESDGTQRRFIQPYSSLPMMQRPGHLKYSATAGRYRADANSDSKEPEFAEATAIYGLNNTFTLYGGLLGSEDYYALGIGIGGTLGALGALSMDINRADTQFDNQHSFHGYQWRTQYIKDIPETNTNIAVSYYRYTNDGYFSFDEANTRNWDYNSRQKSEIQFNISQTIFDGVSLYASGSQQDYWGNNEKNRNISVGVSGQQWGIGYSLNYQYSRYTDENNDRALSLNLSIPLERWLPRSRVSYQMTSQKDRPTQHEMRLDGSLLDDGRLSYSLEQSLDDDNNHNSSLNASYRSPYGTFSAGYSYGNDSSQYNYGVTGGVVIHPHGVTLSQYLGNAFALIDANGASGVRIQNYPGIATDPFGYAVVPYLTTYQENRLSVDTTQLPDNVDLEQTTQFVVPNRGAMVAARFNANIGYRVLVTVSDRNGKPLPFGALASNDETGQQSIVDEGGILYLSRISSKSQSWTVRWGNQADQQCQFAFSTPDSEPTTSVLQGTAQCH

SEQ ID NO: 17091 - protein, 663 aa, Escherichia coli; identical to SEQ ID NO: 1910

SEQ ID NO: 17092 - protein, 200 aa, Escherichia coli; identical to SEQ ID NO: 1793

SEQ ID NO: 17093 - protein, 578 aa, Escherichia coli; identical to SEQ ID NO: 5358

SEQ ID NO: 17094 - protein, 230 aa, Escherichia coli; identical to SEQ ID NO: 2580

SEQ ID NO: 17095 - protein, 815 aa, Escherichia coli; identical to SEQ ID NO: 2698

SEQ ID NO: 17096 - protein, 430 aa, Escherichia coli; identical to SEQ ID NO: 2617

SEQ ID NO: 17097 - protein, 673 aa, Escherichia coli; identical to SEQ ID NO: 2919

SEQ ID NO: 17098 - protein, 784 aa, Escherichia coli; identical to SEQ ID NO: 2244

SEQ ID NO: 17099 - protein, 866 aa, Escherichia coli; identical to SEQ ID NO: 2004

SEQ ID NO: 17100 - protein, 511 aa, Escherichia coli; identical to SEQ ID NO: 2466

SEQ ID NO: 17101 - protein, 541 aa, Escherichia coli; identical to SEQ ID NO: 4657

SEQ ID NO: 17102 - protein, 700 aa, Escherichia coli; identical to SEQ ID NO: 2784

SEQ ID NO: 17103 - protein, 865 aa, Escherichia coli; identical to SEQ ID NO: 2167

SEQ ID NO: 17104 - protein, 828 aa, Escherichia coli; identical to SEQ ID NO: 2386

SEQ ID NO: 17105 - protein, 162 aa, Escherichia coli; identical to SEQ ID NO: 1973

SEQ ID NO: 17106 - protein, 231 aa, Escherichia coli; identical to SEQ ID NO: 2794

SEQ ID NO: 17107 - protein, 614 aa, Escherichia coli; identical to SEQ ID NO: 1888

SEQ ID NO: 17108 - protein, 237 aa, Escherichia coli; identical to SEQ ID NO: 1814

SEQ ID NO: 17109 - protein, 478 aa, Escherichia coli; identical to SEQ ID NO: 2404

SEQ ID NO: 17110 - protein, 239 aa, Escherichia coli; identical to SEQ ID NO: 2759

SEQ ID NO: 17111 - protein, 838 aa, Escherichia coli; identical to SEQ ID NO: 2795

SEQ ID NO: 17112 - protein, 446 aa, Escherichia coli; identical to SEQ ID NO: 2176

SEQ ID NO: 17113 - protein, 242 aa, Escherichia coli
MLVSTALMAMLTTASLTAHASVTPDRTRLVFNESDKSISVTLRNNNEKLPYLAQSWLEDEKGNKITSPLAVLPPVQRIDAMMNGQVKIQALPDIHTLPSDRESLFYYNVREIPPKSGKANTLQIALQTRIKLFWRPKALEKIDMRKPWQFKVTLTRSGQDYTVNNPTPYHVIISDASTQKKGLTAAGFKPLVMPPKTSQPLKAKLASAPVLTYINDYGARMPLIFRCEGNTCKVDEDQSSKG

SEQ ID NO: 17114 - protein, 883 aa, Escherichia coli
MTAFRAAFKAYRMHQVLLLPRFARLTIALGLATAVFPVDAEYYFNPRFLSNDLAESVDLSAFTKGHEAPPGTYRVDIYLNDEFMTSRDITFIADDNNADLIPCLSTDLLVSLGIKKSALLDNKEHLAEKHVSDNSACTPLRDRLADASSEFNVGQQHLSLSVPQIYVGRMARGYVSPDLWEEGINAGLLNYSFNGNSINNRSNHNAGKSNYAYLNLQSGINIGSWRLRDNSTWSYNSGSSNSSDSNKWQHINTSAERDIIPLRSRLTVGDSYTDGDIFDSVNFRGLKINSTEAMLPDSQHGFAPVIHGITRGTAQVSVKQNGYDVYQTTVPPGPFTIDDINSAANGGDLQVTIKEADGSIQTLYVPYSSVPVLQRAGYTCYALAMGEYRSGNNLQSSPKFIQGSLMHGLEGNWTPYGGMQIAENYQAFNLGIGKDLGLFGAFSFDITQANTTLADDTRHSGQSLKSVYSKSFYQTGTNIQVAGYRYSTQGFYNLSDSAYSRMSGYTVKPPTGDTSEQTLFIDYFNLFYSKRGQEQISISQQLGNYGTTFFSASRQSYWNTSRSDQQISFGLNVPFGDITTSLNYSYSNNIWQNDRDHLLAFTLNVPFSHWMRTDSQSAFRNSNASYSMSNDLKGGMTNLSGVYGTLLPDNNLNYSVQVGNTHGGNTSSGTSGYSSLNYRGAYGNTNIGYSRSGDSSQIYYGMSGGIIAHADGITFGQPLGDTMVLVKAPGADNVKIENQTGIHTDWRGYAILPFATEYRENRVALNANSLADNVELDETVVTVIPTHGAIARATFNAQIGGKVLMTLKYGNKSVPFGAIVTHGENKNGSIVAENGQVYLTGLPQSGKLQVSWGNDKNSNCIVDYKLPAVSPGTLLNQQTAICR

SEQ ID NO: 17115 - protein, 869 aa, Escherichia coli; identical to SEQ ID NO: 4351

SEQ ID NO: 17116 - protein, 203 aa, Escherichia coli; identical to SEQ ID NO: 2201

SEQ ID NO: 17117 - protein, 799 aa, Escherichia coli
MIDAEDRENIDISRFEKKGYIPPGRYLVRVQINKNMLPQTLILEWVKADNESGSLLCLTKENLTNFGLNTEFIELLQNIAGSECLDLSQRQELTTRLDKATMILSLSVPQAWLKYQATNWTPPEFWDTGIAGFILDYNVYASQYAPHHGDSTQNVSSYGTLGFNLGAWRLRSDYQYNQNFADGRPVNRDSEFARTYLFRTIPSWSSKFTMGQYDLSSNLYDTFHFTGASLESDESMLPPDLQGYAPQITGIAQTNAKVTVAQNGRVLYQTTVAPGPFTISDLGQSFQGQLDVTVEEEDGRTSTFQVGSASIPYLTRKGQVRYKTSLGKPTSVGHNDINNPFFWTAEASWGWLNNVSLYGGGMFTADDYQAITTGIGFNLNQFGSLSFDVTGADASLQQQNSGNLRGYSYRFNYAKHFESTGSQITFAGYRFSDKDYVSMSEYLSSRNGDESIDNEKESYVISLNQYFETLELNSYLNVTRNTYWDSASNTNYSVSVSKNFDIGDFKGISASLAVSRIRWDDDEENQYYFSFSLPLQQNRNISYSMQRTGSSNTSQMISWYDSSDRNNIWNISASATDDNIRDGEPTLRGSYQHYSPWGRLNINGSVQPNQYNSVTAGWYGSLTATRHGVALHDYSYGDNARMMVDTDGISGIEINSNRTVTNGLGIAVMPSLSNYTTSMLRVNNNDLPEGVDVENSVIRTTLTQGAIGYAKLNATTGYQIVGVIRQENGRFPPLGVNVTDKATGKDVGLVAEDGFVYLSGIQENSTLHLTCGDNTCEVTPPNQSNISESAIILPCKTVK

SEQ ID NO: 17118 - protein, 274 aa, Escherichia coli; identical to SEQ ID NO: 2301

SEQ ID NO: 17119 - protein, 161 aa, Escherichia coli; identical to SEQ ID NO: 2582

SEQ ID NO: 17120 - protein, 359 aa, Escherichia coli; identical to SEQ ID NO: 2329

SEQ ID NO: 17121 - protein, 207 aa, Escherichia coli; identical to SEQ ID NO: 2211

SEQ ID NO: 17122 - protein, 386 aa, Escherichia coli; identical to SEQ ID NO: 3072

SEQ ID NO: 17123 - protein, 237 aa, Escherichia coli; identical to SEQ ID NO: 3793

SEQ ID NO: 17124 - protein, 641 aa, Escherichia coli; identical to SEQ ID NO: 6206

SEQ ID NO: 17125 - protein, 565 aa, Escherichia coli; identical to SEQ ID NO: 2669

SEQ ID NO: 17126 - protein, 161 aa, Escherichia coli; identical to SEQ ID NO: 2582

SEQ ID NO: 17127 - protein, 200 aa, Escherichia coli; identical to SEQ ID NO: 5121

SEQ ID NO: 17128 - protein, 760 aa, Escherichia coli; identical to SEQ ID NO: 2080

SEQ ID NO: 17129 - protein, 765 aa, Escherichia coli; identical to SEQ ID NO: 4323

SEQ ID NO: 17130 - protein, 867 aa, Escherichia coli; identical to SEQ ID NO: 2581

SEQ ID NO: 17131 - protein, 232 aa, Escherichia coli; identical to SEQ ID NO: 2087

SEQ ID NO: 17132 - protein, 729 aa, Escherichia coli; identical to SEQ ID NO: 2074

SEQ ID NO: 17133 - protein, 863 aa, Escherichia coli; identical to SEQ ID NO: 6401

SEQ ID NO: 17134 - protein, 367 aa, Escherichia coli; identical to SEQ ID NO: 4285

SEQ ID NO: 17135 - protein, 823 aa, Escherichia coli
MTPLASAIVALLLGIEAYAAEETFDTHFMIGGMKDQQVANIRLDDNQPLPGQYDIDIYVNKQWRGKYEIIVKDNPQETCLSIEVIKRLGINSDNFASGKQCLTFEQLVQGGSYTWDIGVFRLDFSVPQAWVEELESGYVPPENWERGINAFYTSYYVSQYYSDYKASGNSKSTYVRFNSGLNLLGWQLHSDASFSKTNNNPGVWKSNTLYLERGFAQLLGTLRVGDMYTSSDIFDSVRFSGVRLFRDMQMLPNSKQNFTPRVQGIAQSNALVTIEQNGFVVYQKEVPPGPFAITDLQLAGGGADLDVSVKEADGSVTTYLVPYAAVPNMLQPGVSKYDFAAGRSHIEGASKQSDFVQAGYQYGFNNLLTLYGGSMVANNYYAFTLGTGWNTRIGAISVDATKSHSKQDNGDVFDGQSYQIAYNKFVSQTSTRFGLAAWRYSSRDYRTFNDHVWANNKDNYRRDENDVYDIADYYQNDFGRKNSFSANMSQSLPEGWGSVSLSTLWRDYWGRSGSSKDYQLSYSNNWRRISYILAASQAYDENHHEEKRFNIFISIPFDWGDDVTTPRRQIYMSNSTTFDDQGFASNNTGLSGTVGSRDQFNYGVNLSYQNQGNETTAGANLTWNAPVATVNGSYSQSSTYRQAGASVSGGIVAWSGGVNLANRLSETFAVMNAPGIKDAYVNGQKYRTTNRNGVVVYDGMTPYRENHLMLDVSQSDSEAELRGNRKIAAPYRGAVVLVNFDTNQRKPWFIKALRADGQPLMFGYEVNDIHGHNIGVVGQGSQLFIRTNEVPPSVNVAIDKQQGLSCTITFGKEIDESRNYICQ

SEQ ID NO: 17136 - protein, 237 aa, Escherichia coli; identical to SEQ ID NO: 4356

SEQ ID NO: 17137 - protein, 367 aa, Escherichia coli; identical to SEQ ID NO: 2433

SEQ ID NO: 17138 - protein, 224 aa, Escherichia coli; identical to SEQ ID NO: 3115

SEQ ID NO: 17139 - protein, 361 aa, Escherichia coli; identical to SEQ ID NO: 3061

SEQ ID NO: 17140 - protein, 191 aa, Escherichia coli; identical to SEQ ID NO: 2727

SEQ ID NO: 17141 - protein, 432 aa, Escherichia coli; identical to SEQ ID NO: 2026

SEQ ID NO: 17142 - protein, 221 aa, Escherichia coli; identical to SEQ ID NO: 3141

SEQ ID NO: 17143 - protein, 162 aa, Escherichia coli; identical to SEQ ID NO: 1965

SEQ ID NO: 17144 - protein, 641 aa, Escherichia coli; identical to SEQ ID NO: 3774

SEQ ID NO: 17145 - protein, 162 aa, Escherichia coli; identical to SEQ ID NO: 1965

SEQ ID NO: 17146 - protein, 678 aa, Escherichia coli; identical to SEQ ID NO: 3881

SEQ ID NO: 17147 - protein, 229 aa, Escherichia coli
MMKKKFIALTLWVLISQSALASGVGLSSTRVIYDGNKKEASLTVQNKNKSEEFLIQSWVDDATGSKKTPFIITPPLFKLEPGKNNILRIVNVNPSLPQDRESVYWVNVKAIPSQNEENEGKNVLQIAVRTRIKLFYRPAGLKGDIKSSPGELRFTRNGKQIKVDNPTVFNITFSDVFINGHEIEKSGMVPAKGALNINLPAGVNSASQIKYNTINDFGSSGEYLTREIN

SEQ ID NO: 17148 - protein, 118 aa, Escherichia coli [sequence omitted]

SEQ ID NO: 17149 - protein, 512 aa, Escherichia coli
MKKISFFIFTALFCCSAQAAPSSLEKRLGKSEYFIITKSSPVRAILNDFAANYSIPVFISSSVNDDFSGEIKNEKPVKVLEKLSKLYHLTWYYDENILYIYKTNEISRSIITPTYLDIDSLLKYLSDTISVNKNSCNVRKITTFNSIEVRGVPECIKYITSLSESLDKEAQSKAKNKDVVKVFKLNYASATDITYKYRDQNVVVPGVVSILKTMASNGSLPSTGKGAVERSGNLFDNSVTISADPRLNAVVVKDREITMDIYQQLISELDIEQRQIEISVSIIDVDANDLQQLGVNWSGTLNAGQGTIAFNSSTAQANISSSVISNASNFMIRVNALQQNSKAKILSQPSIITLNNMQAILDKNVTFYTKVSGEKVASLESITSGTLLRVTPRILDDNSNSLTGKRRERVRLLLDIQDGNQSSNQSNAQDASSTLPEVQNSEMTTEATLSAGESLLLGGFIQDKESSSKDGIPLLSDIPVIGSLFSSTVKQKHSVVRLFLIKATPIKSASSE

SEQ ID NO: 17150 - protein, 828 aa, Escherichia coli; identical to SEQ ID NO: 11965

SEQ ID NO: 17151 - protein, 591 aa, Escherichia coli; identical to SEQ ID NO: 4273

SEQ ID NO: 17152 - protein, 122 aa, Escherichia coli
MEKNMKKRGAFLGLLLVSACASVFAANNETSKSVTFPKCEDLDAAGIAASVKRDYQQNRVARWADDQKIVGQADPVAWVSLQDIQGKDDKWSVPLTVRGKSADIHYQVSVDCKAGMAEYQRR

SEQ ID NO: 17153 - protein, 274 aa, Escherichia coli; identical to SEQ ID NO: 2309

SEQ ID NO: 17154 - protein, 746 aa, Escherichia coli; identical to SEQ ID NO: 2069

SEQ ID NO: 17155 - protein, 236 aa, Escherichia coli
MQTTRTPYSISFMATVLLLLLFACHSTVANAAVALGVTRVIYPANQKQVLLPVTNNDPASVYLIQSWIENAGDQKDTQFVITPPLFSMQGKKENTLRIINATNHQLPGDRESLFWVNVKAIPAMEKDQKNENTLQLAIISRIKMFYRPTNLAMAPEEAPAMLRFRRSGSKLTLINPTPYFITVTNMKAGNSNLPNTMVPPKGEVSVDIPHAATGDISFQTINDYGALTPRIKATMQ

SEQ ID NO: 17156 - protein, 760 aa, Escherichia coli
MENNRNFPARQFHSLTFFAGLCIGITPVAQALAAEGQANADDTLVVEASTPSLYAPQKSADPKFSRPVADTTRTMTVISEQVIKDQGATNLTDALKNVPGVGAFFAGENGNSTTGDAIYMRGADTSNSIYIDGIRDIGSVSRDTFNTEQVEVIKGPSGTDYGRSAPTGSINMISKQPRNDSGIDASASIGSAWFRRGTLDVNQVIGDTTAVRLNVMGEKTHDAGRNKVKNERYGVAPSVAFGLGTANRLYLNYLHVTQHNTPDGGIPTIGLPGYSAPSAGTAALNHSGKVDTHNFYGTDSDYDDSTTDTATMRFEHDINDNTTIRNTTRWSRVKQDYLMTAIMGGASNITQPTSDVNSWTWSRTANTKDVSNKILTNQTNLTSTFYTGAIGHDVSTGVEFTRETQTNYGVNPVTLPAVNIYHPDSSIHPGGLTRNGANANGQTDTFAIYAFDTLQITRDFELNGGIRLDNYHTEYDSTTACGGSGRGAITCPAGVAKGSPVTTVDTAKSGNLVNWKAGALYHLTENGNVYINYAVSQQPPGGNNFALAQSGSGNSANRTDFKPQKANTSEIGTKWQVLDKRLLLTAALFRTDIENEVEQNDDGTYSQYGKKRVEGFEISVAGNITPAWQMIGGYTQQKATIKNGKDVAQDGSSSLPYTPEHAFTLWSQYQATDDISVGAGARYIGSMHKGSDGAVGTPAFTEGYWVADAKLGYRVNRNLDFQLNVYNLFDTDYVASINKSGYRYHPGEPRTFLLTANMHF

SEQ ID NO: 17157 - protein, 412 aa, Escherichia coli; identical to SEQ ID NO: 2161

SEQ ID NO: 17158 - protein, 660 aa, Escherichia coli; identical to SEQ ID NO: 5588

SEQ ID NO: 17159 - protein, 551 aa, Escherichia coli; identical to SEQ ID NO: 2446

SEQ ID NO: 17160 - protein, 191 aa, Escherichia coli; identical to SEQ ID NO: 2727

SEQ ID NO: 17161 - protein, 204 aa, Escherichia coli; identical to SEQ ID NO: 2957

SEQ ID NO: 17162 - protein, 446 aa, Escherichia coli [sequence omitted]

SEQ ID NO: 17163 - protein, 102 aa, Escherichia coli; identical to SEQ ID NO: 4681

SEQ ID NO: 17164 - protein, 246 aa, Escherichia coli; identical to SEQ ID NO: 1985

SEQ ID NO: 17165 - protein, 224 aa, Escherichia coli
MKGLLALLISSMVLPAHAGIVIYGTRIIYPAENKEVMVQLMNQGNRSSLLQAWIDDGDTSLPPEKIQVPFMLTPPVAKIGANSGQQVKIKIMPNKLPTNKESIFCLNVLDIPPNSPEQEGKNALKFAMQNRIKLFYRPAGIAPVNKETFKKLLVNRSGNGLVIKNDSANWVTISDVKANNVKVNYETIMIAPLESQSVNVKSNNANNWHLTIIDDHGNYISDKI

SEQ ID NO: 17166 - protein, 614 aa, Escherichia coli
MIKKASLLTACSVTAFSAWAQDTSPDTLVVTANRFEQPRSTVLAPTTVVTRQDIDRWQSTSVNDVLRRLPGVDITQNGGSGQLSSIFIRGTNASHVLVLIDGVRLNLAGVSGSADLSQFPIALVQRVEYIRGPRSAVYGSDAIGGVVNIITTRDHPGTEISAGWGSNSYQNYDVSTQQQLGDKTRVTLLGDYAHTHGYDVVAYGNTGTQAQPDNDGFLSKTLYGALEHNFTDVWSGFVRGYGYDNRTNYDAYYSPGLPLVDTRKLYSQSWDAGLRYNGELIKSQLITSYSHSKDYNYDPHYGRYDSSATLDEMKQYTVQWANNIIIGHGNIGAGVDWQKQSTAPGTAYVEDGYDQRNTGIYLTGLQQVGDFTFEGAGRSDDNSQFGRHGTWQTSAGWEFIEGYRFIASYGTSYKAPNLGQLYGSYGNPNLNPEKSKQWEGAFEGLTAGVNWRISGYRNDVSDLIDYDDHTLKYYNEGKARIKGVEATANFDTGPLTHTVSYDYVDARNAITDTPLLRRAKQQVKYQLDWQLYDFDWGITYQYLGSRYDKDYSSYPYQTVKMGGVSLWDLAVAYPVTSHLTVRGKIANLFDKDYETVYGYQTAGREYTLSGSYTF

SEQ ID NO: 17167 - protein, 686 aa, Escherichia coli
MFWRDITLSVWRKKTTGLKTKKRLLPLVLAAVLCSSPVWAEEATFTANFKDTDLKSFIETVGANLNKTIIMGPGVQGKVSIRTMTPLNERQYYQLFLNLLEAQGYAVVPMENDVLKVVKSSAAKVEPLPLVGEGSDNYAGDEMVTKVVPVRNVSVRELAPILRQMIDSAGSGNVVNYDPSNVIMLTGRASVVERLTEVIQRVDHAGNRTEEVIPLDNASASEIARVLESLTKNSGENQPATLKSQIVADERTNSVIVSGDPATRDKMRRLIRRLDSEMERSGNSQVFYLKYSKAEDLVDVLKQVSGTLTAAKEEAEGTVGSGREVVSIAASKHSNALIVTAPQDIMQSLQSVIEQLDIRRAQVHVEALIVEVAEGSNINFGVQWGSKDAGLMQFANGTQIPIGTLGAAISAAKPQKGSTVISENGATTINPDTNGDLSTLAQLLSGFSGTAVGVVKGDWMALVQAVKNDSSSNVLSTPSITTLDNQEAFFMVGQDVPVLTGSTVGSNNSNPFNTVERKKVGIMLKVTPQINEGNAVQMVIEQEVSKVEGQTSLDVVFGERKLKTTVLANDGELIVLGGLMDDQAGESVAKVPLLGDIPLIGNLFKSTADKKEKRNLMVFIRPTILRDGMAADGVSQRKYNYMRAEQIYRDEQGLSLMPHTAQPILPAQNQALPPEVRAFLNAGRTR

SEQ ID NO: 17168 - protein, 678 aa, Escherichia coli
MVPSTFSRLKAARCLPVVLAALIFAGCGTHTPDQSTAYMQGTAQADSAFYLQQMKQSSDDTRINWQLLAIRALVKEGKTGQAVELFNQLPQELNDSQRREKTLLAAEIKLAQKDFAGAQNLLAKITPADLEQNQQARYWQAKIDASQGRPSIDLLRALIAQEPLLGAKEKQQNIDATWQALSSMTQEQANTLVINADENILQGWLDLQRVWFDNRNDPDMMKAGIADWQKRYPNNPGAKMLPTQLVNVKAFKPASTNKIALLLPLNGQAAVFGRTIQQGFEAAKNIGTQPVAAQVAAAPAADVAEQPQPQTVDGVASPAQASVSDLTGEQPAAQPVPVSAPATSTAAVSAPANPSAELKIYDTSSQPLSQILNQVQQDGASIVVGPLLKNNVEELLKSNTPLNVLALNQPENIENRVNICYFALSPEDEARDAARHIRDQGKQAPLVLIPRSSLGDRVANAFAQEWQKLGGGTVLQQKFGSTSELRAGVNGGSGIALTGSPITPRETTDSGMTTNNPTLQTTPTDDQFTNNGGRVDAVYIVATPGEIAFIKPMIAMRNGSQSGATLYASSRSAQGTAGPDFRLEMEGLQYSEIPMLAGGNLPLMQQALSAVNNDYSLARMYAMGVDAWSLANHFSQMRQVQGFEINGNTGSLTANPDCVINRKLSWLQYQQGQVVPAS

SEQ ID NO: 17169 - protein, 242 aa, Escherichia coli; identical to SEQ ID NO: 2697

SEQ ID NO: 17170 - protein, 729 aa, Escherichia coli; identical to SEQ ID NO: 5131

SEQ ID NO: 17171 - protein, 221 aa, Escherichia coli; identical to SEQ ID NO: 11769

SEQ ID NO: 17172 - protein, 208 aa, Escherichia coli; identical to SEQ ID NO: 1948

SEQ ID NO: 17173 - protein, 371 aa, Escherichia coli
MKVKVLSLLVPALLVAGAANAAEIYNKDGNKLDLYGKVDGLHYFSDNDSKDGDKTYMRLGFKGETQVTDQLTGYGQWEYQIQGNEPESDNSSWTRVAFAGLKFQDVGSFDYGRNYGVVYDVTSWTDVLPEFGGDTYSSDNFMQQRGNGFATYRNTDFFGLVDGLNFAVQYQGKNGSPSGEGMTGVTNNGRDVLEQNGDGVGGSITYDIGEGFSFGGAISSSKRTAEQNNYGIGNGDRAETYTGGLKYDANNVYLAAQYTQTYNATLAGDLGWANKAQNFEVVAQYQFDFGLRPSVAYLQSKGKNLNANIAGRTYDDEDLLKYVDVGATYYFNKNMSTYVDYKINLLDDNQFTRAAGINTDNIVALGLVYQF

SEQ ID NO: 17174 - protein, 360 aa, Escherichia coli; identical to SEQ ID NO: 3354

SEQ ID NO: 17175 - protein, 233 aa, Escherichia coli; identical to SEQ ID NO: 2006

SEQ ID NO: 17176 - protein, 746 aa, Escherichia coli; identical to SEQ ID NO: 5579

SEQ ID NO: 17177 - protein, 203 aa, Escherichia coli; identical to SEQ ID NO: 2201

SEQ ID NO: 17178 - protein, 332 aa, Escherichia coli; identical to SEQ ID NO: 2709

SEQ ID NO: 17179 - protein, 731 aa, Escherichia coli; identical to SEQ ID NO: 13690

SEQ ID NO: 17180 - protein, 192 aa, Escherichia coli; identical to SEQ ID NO: 4587

SEQ ID NO: 17181 - protein, 331 aa, Escherichia coli; identical to SEQ ID NO: 4559

SEQ ID NO: 17182 - protein, 355 aa, Escherichia coli; identical to SEQ ID NO: 5115

SEQ ID NO: 17183 - protein, 236 aa, Escherichia coli; identical to SEQ ID NO: 2726

SEQ ID NO: 17184 - protein, 250 aa, Escherichia coli; identical to SEQ ID NO: 2761

SEQ ID NO: 17185 - protein, 362 aa, Escherichia coli; identical to SEQ ID NO: 2434

SEQ ID NO: 17186 - protein, 208 aa, Escherichia coli; identical to SEQ ID NO: 1949

SEQ ID NO: 17187 - protein, 711 aa, Escherichia coli
MFTPSFSGLKGRALFSLLFAAPMIHATDSVTTKDSETITVTADANTATEATDGYQPLSTSTATLTDMPMLDIPQVVNTVSDQVLENQNATTLDEALYNVSNVVQTNTLGGTQDAFVRRGFGANRDGSIMTNGLRTVLPRSFNAATERVEVLKGPASTLYGILDPGGLINVVTKRPEKTFHGSVSATSSSFGGGTGQLDITGPIEGTQLAYRLTGEVQDEDYWRNFGKERSTFIAPSLTWFGDNATVTMLYSHRDYKTPFDRGTIFDLTTKQPVNVDRKIRFDEPFNITDGQSNLAQLNAEYHLNSQWTARFDYSYSQDKYSDNQARVTAYDATTGTLTRRVDATQGSTQRMHATRADLQGNVDIAGFYNEILGGVSYEYYDLLRTDMIRCKKAKDFNIYNPVYGNTSKCTTVSASDSDQTIKQESYSAYAQDALYLTDNWIAVAGIRYQYYTQYAGKGRPFNVNTDSRDEQWTPKLGLVYKLTPSVSLFANYSQTFMPQSSIASYIGDLPPESSNAYEVGAKFELFDGITADIALFDIHKRNVLYTESVGDETIAKTAGRVRSRGVEVDLAGALTENINIIASYGYTDAKVLEDPDYAGKPLPNVPRHTGSLFLTYDIHNMPGNNTLTFGGGGHGVSRRSATNGADYYLPGYFVADAFAAYKMKLQYPVTLQLNVKNLFDKTYYTSSIATNNLGNQIGDPREVQFTVKMEF

SEQ ID NO: 17188 - protein, 472 aa, Escherichia coli; identical to SEQ ID NO: 7769

SEQ ID NO: 17189 - protein, 700 aa, Escherichia coli
MKIFSVRQTVLPALLVLSPVVFAADEQTMIVSAAPQVVSELDTPAAVSVVDGEEMRLATPRINLSESLTGVPGLQVQNRQNYAQDLQLSIRGFGSRSTYGIRGIRLYVDGIPATMPDGQGQTSNIDLSSVQNVEVLRGPFSALYGNASGGVMNVTTQTGQQPPTIEASSYYGSFGSWRYGLKATGATGDGTQPGDVDYTVSTTRFTTHGYRDHSGAQKNLANAKLGVRIDDASKLSLIFNSVDIKADDPGGLTEAEWKANPQQAPRAEQYDTRKTIKQTQAGLRYERSLSAQDDMSVMMYAGERETTQYQSIPMAPQLNPSHAGGVITLQRHYQGIDSRWTHRGELGVPLTFTTGLNYENMSENRKGYNNFRLNRGVPEYGQKGELRRDERNLMWNVDPYLQTQWQLSEKLSLDAGVRYSSVWFDSNDHYVTPGNGDDSGDASYHKWLPAGSLKYAMTDAWNIYLAAGRGFETPTINELSYRADGQSGMNFGLKPSTNDTIEIGSKTRIGDGLLSLALFQTDTDDEIVVDSSSGGRTTYKNAGKTRRQGAELAWDQRFAGDFRVKASWTWLDATYRSNVCNEQDCNGNRMPGIARNMGFASIGYIPEDGWYAGTEARYMGDIMADDENTAKAPSYTLVGLFTGYKYNYHNFTVDLFGRVDNLFDKEYVGSVIVNESNGRYYEPAPGRNYGVGINIAWRFE

SEQ ID NO: 17190 - protein, 351 aa, Escherichia coli; identical to SEQ ID NO: 2519

SEQ ID NO: 17191 - protein, 232 aa, Escherichia coli; identical to SEQ ID NO: 2087

SEQ ID NO: 17192 - protein, 539 aa, Escherichia coli; identical to SEQ ID NO: 5109

SEQ ID NO: 17193 - protein, 700 aa, Escherichia coli; identical to SEQ ID NO: 5110

SEQ ID NO: 17194 - protein, 686 aa, Escherichia coli; identical to SEQ ID NO: 3129

SEQ ID NO: 17195 - protein, 760 aa, Escherichia coli; identical to SEQ ID NO: 5104

SEQ ID NO: 17196 - protein, 208 aa, Escherichia coli; identical to SEQ ID NO: 1949

SEQ ID NO: 17197 - protein, 728 aa, Escherichia coli; identical to SEQ ID NO: 12146

SEQ ID NO: 17198 - protein, 111 aa, Escherichia coli; identical to SEQ ID NO: 3096

SEQ ID NO: 17199 - protein, 654 aa, Escherichia coli; identical to SEQ ID NO: 6524

SEQ ID NO: 17200 - protein, 207 aa, Escherichia coli; identical to SEQ ID NO: 5917

SEQ ID NO: 17201 - protein, 371 aa, Escherichia coli; identical to SEQ ID NO: 5126

SEQ ID NO: 17202 - protein, 351 aa, Escherichia coli; identical to SEQ ID NO: 2872

SEQ ID NO: 17203 - protein, 45 aa, Escherichia coli; identical to SEQ ID NO: 6471

SEQ ID NO: 17204 - protein, 191 aa, Escherichia coli; identical to SEQ ID NO: 2727

SEQ ID NO: 17205 - protein, 266 aa, Escherichia coli; identical to SEQ ID NO: 1894

SEQ ID NO: 17206 - protein, 203 aa, Escherichia coli; identical to SEQ ID NO: 2201

SEQ ID NO: 17207 - protein, 407 aa, Escherichia coli; identical to SEQ ID NO: 6407

SEQ ID NO: 17208 - protein, 514 aa, Escherichia coli; identical to SEQ ID NO: 8916

SEQ ID NO: 17209 - protein, 355 aa, Escherichia coli; identical to SEQ ID NO: 5115

SEQ ID NO: 17210 - protein, 230 aa, Escherichia coli; identical to SEQ ID NO: 3019

SEQ ID NO: 17211 - protein, 341 aa, Escherichia coli; identical to SEQ ID NO: 6505

SEQ ID NO: 17212 - protein, 170 aa, Escherichia coli [sequence omitted]

SEQ ID NO: 17213 - protein, 656 aa, Escherichia coli; identical to SEQ ID NO: 5108

SEQ ID NO: 17214 - protein, 370 aa, Escherichia coli; identical to SEQ ID NO: 6529

SEQ ID NO: 17215 - protein, 673 aa, Escherichia coli; identical to SEQ ID NO: 2919

SEQ ID NO: 17216 - protein, 700 aa, Escherichia coli; identical to SEQ ID NO: 5975

SEQ ID NO: 17217 - protein, 218 aa, Escherichia coli; identical to SEQ ID NO: 6511

SEQ ID NO: 17218 - protein, 331 aa, Escherichia coli; identical to SEQ ID NO: 6460

SEQ ID NO: 17219 - protein, 1024 aa, Escherichia coli
MTTITTAQIKSTLQSAKQSAANKLHSAGQSTKDALKKAAEQTRNAGNRLILLIPKDYKGQGSSLNDLVRTADELGIEVQYDEKNGTAITKQVFGTAEKLIGLTERGVTIFAPQLDKLLQKYQKAGNILGGGAENIGDNLGKAGGILSTFQNFLGTALSSMKIDELIKKQKSGGNVSSSEMAEASIELINQLVDTVASLNNNVNSFSQQLNTLGSVLSNTKHLNGVGNKLQNLPNLDNIGAGLDTVSGILSAISASFILSNADADTRTKAAAGVELTTKVLGNVGKGISQYIIAQRAAQGLSTSAAAAGLIASAVTLAISPLSFLSIADKFKRANKIEEYSQRFKKLGYDGDSLLAAFHKETGAIDASLTTISTVLASVSSGISAAATTSLVGAPVSALVGAVTGIISGILEASKQAMFEHVASKMADVIAEWEKKHGKNYFENGYDARHAAFLEDNFKILSQYNKEYSVERSVLITQQHWDTLIGELAGVTRNGDKTLSGKSYIDYYEEGKRLEKKPDEFQKQVFDPLKGNIDLSDSKSSTLLKFVTPLLTPGEEIRERRQSGKYEYITELLVKGVDKWTVKGVQDKGAVYDYSNLIQHASVGNNQYREIRIESHLGDGDDKVFLSAGSANIYAGKGHDVVYYDKTDTGYLTIDGTKATEAGNYTVTRVLGGDVKVLQEVVKEQEVSVGKRTEKTQYRSYEFTHINGKNLTETDNLYSVEELIGTTRADKFFGSKFTDIFHGADGDDLIEGNDGNDRLYGDKGNDTLIGGNGDDQLYGGDGNDKLIGGAGNNYLNGGDGDDELQVQGNSLAKNVLFGGKGNDKLYGSEGADLLDGGEGDDLLKGGYGNDIYRYLSGYGHHIIDDDGGKEDKLSLADIDFRDVAFKREGNDLIMYKAEGNVLSIGHKNGITFRNWFEKESGDISNHQIEQIFDKSGRIITPDSLKKALEYQQRNNKASYVYGNDALAYGSQGDLNPLINEISKIISAAGNFDVKEERTAASLLQLSGNASDFSYGRNSITLTTSA

SEQ ID NO: 17220 - protein, 200 aa, Escherichia coli; identical to SEQ ID NO: 1785

SEQ ID NO: 17221 - protein, 430 aa, Escherichia coli; identical to SEQ ID NO: 2617

SEQ ID NO: 17222 - protein, 903 aa, Escherichia coli; identical to SEQ ID NO: 6467

SEQ ID NO: 17223 - protein, 879 aa, Escherichia coli; identical to SEQ ID NO: 5138

SEQ ID NO: 17224 - protein, 138 aa, Escherichia coli; identical to SEQ ID NO: 15708

SEQ ID NO: 17225 - protein, 729 aa, Escherichia coli; identical to SEQ ID NO: 5961

SEQ ID NO: 17226 - protein, 729 aa, Escherichia coli; identical to SEQ ID NO: 5131

SEQ ID NO: 17227 - protein, 361 aa, Escherichia coli; identical to SEQ ID NO: 3061

SEQ ID NO: 17228 - protein, 243 aa, Escherichia coli; identical to SEQ ID NO: 6517

SEQ ID NO: 17229 - protein, 820 aa, Escherichia coli; identical to SEQ ID NO: 5921

SEQ ID NO: 17230 - protein, 871 aa, Escherichia coli; identical to SEQ ID NO: 6388

SEQ ID NO: 17231 - protein, 826 aa, Escherichia coli; identical to SEQ ID NO: 5098

SEQ ID NO: 17232 - protein, 518 aa, Escherichia coli; identical to SEQ ID NO: 2350

SEQ ID NO: 17233 - protein, 359 aa, Escherichia coli; identical to SEQ ID NO: 2329

SEQ ID NO: 17234 - protein, 446 aa, Escherichia coli; identical to SEQ ID NO: 2176

SEQ ID NO: 17235 - protein, 360 aa, Escherichia coli; identical to SEQ ID NO: 3062

SEQ ID NO: 17236 - protein, 798 aa, Escherichia coli; identical to SEQ ID NO: 8775

SEQ ID NO: 17237 - protein, 193 aa, Escherichia coli; identical to SEQ ID NO: 2246

SEQ ID NO: 17238 - protein, 121 aa, Escherichia coli
MNTVLSVQGASAPVKKKSFFSKFTRLNMLRLARAVIPAAVLMMFFPQLAMAAQGAGQDLMQSGNSTVKATFGKDSSVVKWVVLAEVLVGAVMYMMTKNVKFLAGFAIISVFIAVGMAVVGL

SEQ ID NO: 17239 - protein, 539 aa, Escherichia coli; identical to SEQ ID NO: 3050

SEQ ID NO: 17240 - protein, 236 aa, Escherichia coli; identical to SEQ ID NO: 3286

SEQ ID NO: 17241 - protein, 118 aa, Escherichia coli [sequence omitted]

SEQ ID NO: 17242 - protein, 237 aa, Escherichia coli; identical to SEQ ID NO: 6498

SEQ ID NO: 17243 - protein, 200 aa, Escherichia coli; identical to SEQ ID NO: 1784

SEQ ID NO: 17244 - protein, 224 aa, Escherichia coli; identical to SEQ ID NO: 3035

SEQ ID NO: 17245 - protein, 274 aa, Escherichia coli; identical to SEQ ID NO: 6497

SEQ ID NO: 17246 - protein, 250 aa, Escherichia coli; identical to SEQ ID NO: 3048

SEQ ID NO: 17247 - protein, 774 aa, Escherichia coli; identical to SEQ ID NO: 6495

SEQ ID NO: 17248 - protein, 232 aa, Escherichia coli; identical to SEQ ID NO: 2087

SEQ ID NO: 17249 - protein, 213 aa, Escherichia coli; identical to SEQ ID NO: 2232

SEQ ID NO: 17250 - protein, 432 aa, Escherichia coli; identical to SEQ ID NO: 2026

SEQ ID NO: 17251 - protein, 834 aa, Escherichia coli; identical to SEQ ID NO: 7303

SEQ ID NO: 17252 - protein, 249 aa, Escherichia coli; identical to SEQ ID NO: 3492

SEQ ID NO: 17253 - protein, 231 aa, Escherichia coli; identical to SEQ ID NO: 5923

SEQ ID NO: 17254 - protein, 429 aa, Escherichia coli; identical to SEQ ID NO: 8023

SEQ ID NO: 17255 - protein, 678 aa, Escherichia coli; identical to SEQ ID NO: 6490

SEQ ID NO: 17256 - protein, 203 aa, Escherichia coli; identical to SEQ ID NO: 2009

SEQ ID NO: 17257 - protein, 359 aa, Escherichia coli; identical to SEQ ID NO: 2329

SEQ ID NO: 17258 - protein, 120 aa, Escherichia coli; identical to SEQ ID NO: 7429

SEQ ID NO: 17259 - protein, 565 aa, Escherichia coli; identical to SEQ ID NO: 5118

SEQ ID NO: 17260 - protein, 207 aa, Escherichia coli; identical to SEQ ID NO: 2212

SEQ ID NO: 17261 - protein, 711 aa, Escherichia coli; identical to SEQ ID NO: 5144

SEQ ID NO: 17262 - protein, 678 aa, Escherichia coli; identical to SEQ ID NO: 6376

SEQ ID NO: 17263 - protein, 784 aa, Escherichia coli; identical to SEQ ID NO: 5933

SEQ ID NO: 17264 - protein, 161 aa, Escherichia coli; identical to SEQ ID NO: 2582

SEQ ID NO: 17265 - protein, 258 aa, Escherichia coli; identical to SEQ ID NO: 2060

SEQ ID NO: 17266 - protein, 193 aa, Escherichia coli; identical to SEQ ID NO: 2246

SEQ ID NO: 17267 - protein, 136 aa, Escherichia coli
MYIGAPLAKDRETLFFTSVRAVPSTTKREEGNTLKIATQSVIKLFWRPKGLAYPLGEAPAKLRCTSSADMVTVSNPTPYFITLTDLKIGGKVVKNQMISPFDKYQFSLPKGAKNSSVTYRTINDYGAETPQLNCKS

SEQ ID NO: 17268 - protein, 229 aa, Escherichia coli; identical to SEQ ID NO: 2815

SEQ ID NO: 17269 - protein, 391 aa, Escherichia coli
MTVKISGVLKDGTGKPVQNCTIVLKARRTSSTVVVNTVASENPDEAGRYSMDVEHGQYSVTLLVEGFPPSHAGTITVYEGSRPGTLNDFLGAMTEDDVRPEALRRFELMVEEAARHAEEAKKNAGEAETSARNAGISASQAEESAANADTSAGDASESARQAAESAAAAKQSEEASSSSASAAAQKASESSQSAADAELSKKTAESAAGNAARDATTATEKARESAESAQSAEQSRIAAEEAVNRIPTVVGPPGPKGEPGPAGPQGPKGDKGERGDTGPAGATGERGPAGDAGPAGPQGPKGDRGERGETGLTGNAGPQGPKGDTGAAGPAGPQGPKGETGAAGPVGATGPQGPKGDPGRHKSVFVWGRRALLRQTAMAGSRIQMAHSSPD

SEQ ID NO: 17270 - protein, 191 aa, Escherichia coli; identical to SEQ ID NO: 2727

SEQ ID NO: 17271 - protein, 236 aa, Escherichia coli; identical to SEQ ID NO: 3482

SEQ ID NO: 17272 - protein, 660 aa, Escherichia coli; identical to SEQ ID NO: 6291

SEQ ID NO: 17273 - protein, 111 aa, Escherichia coli; identical to SEQ ID NO: 5097

SEQ ID NO: 17274 - protein, 859 aa, Escherichia coli; identical to SEQ ID NO: 5113

SEQ ID NO: 17275 - protein, 386 aa, Escherichia coli; identical to SEQ ID NO: 6520

SEQ ID NO: 17276 - protein, 816 aa, Escherichia coli; identical to SEQ ID NO: 6500

SEQ ID NO: 17277 - protein, 118 aa, Escherichia coli [sequence omitted]

SEQ ID NO: 17278 - protein, 213 aa, Escherichia coli; identical to SEQ ID NO: 2232

SEQ ID NO: 17279 - protein, 208 aa, Escherichia coli; identical to SEQ ID NO: 1948

SEQ ID NO: 17280 - protein, 170 aa, Escherichia coli; identical to SEQ ID NO: 2564

SEQ ID NO: 17281 - protein, 246 aa, Escherichia coli; identical to SEQ ID NO: 3021

SEQ ID NO: 17282 - protein, 851 aa, Escherichia coli; identical to SEQ ID NO: 5907

SEQ ID NO: 17283 - protein, 200 aa, Escherichia coli; identical to SEQ ID NO: 5121

SEQ ID NO: 17284 - protein, 193 aa, Escherichia coli
NKDAYARYLVQSWVSNIDGSKAPFLITPPVYKLEENRQTLLHIVFTGDKDKLPQDRESLFLANVKSVSAMPEELKDKNILQFAMKARLKLFWRPVSLDNNDALTAWEKLKFHKEAGKLIVKNPTPFYISFNDLTVSGKNIVPVDTKSEPGALLMMVGPFSEQRFSLPAGAGNVVEWSVITDYGSSSGKRKQKL

SEQ ID NO: 17285 - protein, 351 aa, Escherichia coli; identical to SEQ ID NO: 4688

SEQ ID NO: 17286 - protein, 274 aa, Escherichia coli; identical to SEQ ID NO: 2301

SEQ ID NO: 17287 - protein, 249 aa, Escherichia coli; identical to SEQ ID NO: 5120

SEQ ID NO: 17288 - protein, 641 aa, Escherichia coli; identical to SEQ ID NO: 6206

SEQ ID NO: 17289 - protein, 237 aa, Escherichia coli; identical to SEQ ID NO: 3793

SEQ ID NO: 17290 - protein, 162 aa, Escherichia coli; identical to SEQ ID NO: 1965

SEQ ID NO: 17291 - protein, 243 aa, Escherichia coli; identical to SEQ ID NO: 3483

SEQ ID NO: 17292 - protein, 746 aa, Escherichia coli; identical to SEQ ID NO: 5132

SEQ ID NO: 17293 - protein, 856 aa, Escherichia coli; identical to SEQ ID NO: 5125

SEQ ID NO: 17294 - protein, 774 aa, Escherichia coli; identical to SEQ ID NO: 3426

SEQ ID NO: 17295 - protein, 162 aa, Escherichia coli; identical to SEQ ID NO: 1965

SEQ ID NO: 17296 - protein, 161 aa, Escherichia coli; identical to SEQ ID NO: 2582

SEQ ID NO: 17297 - protein, 518 aa, Escherichia coli; identical to SEQ ID NO: 2349

SEQ ID NO: 17298 - protein, 432 aa, Escherichia coli; identical to SEQ ID NO: 2026

SEQ ID NO: 17299 - protein, 165 aa, Escherichia coli; identical to SEQ ID NO: 5130

SEQ ID NO: 17300 - protein, 765 aa, Escherichia coli; identical to SEQ ID NO: 7320

SEQ ID NO: 17301 - protein, 760 aa, Escherichia coli; identical to SEQ ID NO: 6506

SEQ ID NO: 17302 - protein, 729 aa, Escherichia coli; identical to SEQ ID NO: 6527

SEQ ID NO: 17303 - protein, 881 aa, Escherichia coli; identical to SEQ ID NO: 6485

SEQ ID NO: 17304 - protein, 614 aa, Escherichia coli; identical to SEQ ID NO: 1884

SEQ ID NO: 17305 - protein, 731 aa, Escherichia coli; identical to SEQ ID NO: 6297

SEQ ID NO: 17306 - protein, 241 aa, Escherichia coli; identical to SEQ ID NO: 2890

SEQ ID NO: 17307 - protein, 386 aa, Escherichia coli; identical to SEQ ID NO: 5575

SEQ ID NO: 17308 - protein, 241 aa, Escherichia coli; identical to SEQ ID NO: 2922

SEQ ID NO: 17309 - protein, 746 aa, Escherichia coli; identical to SEQ ID NO: 4389

SEQ ID NO: 17310 - protein, 368 aa, Escherichia coli; identical to SEQ ID NO: 4616

SEQ ID NO: 17311 - protein, 266 aa, Escherichia coli; identical to SEQ ID NO: 5141

SEQ ID NO: 17312 - protein, 856 aa, Escherichia coli; identical to SEQ ID NO: 6509

SEQ ID NO: 17313 - protein, 203 aa, Escherichia coli; identical to SEQ ID NO: 2201

SEQ ID NO: 17314 - protein, 367 aa, Escherichia coli; identical to SEQ ID NO: 4285

SEQ ID NO: 17315 - protein, 430 aa, Escherichia coli; identical to SEQ ID NO: 2617

SEQ ID NO: 17316 - protein, 232 aa, Escherichia coli; identical to SEQ ID NO: 2087

SEQ ID NO: 17317 - protein, 203 aa, Escherichia coli; identical to SEQ ID NO: 2007

SEQ ID NO: 17318 - protein, 386 aa, Escherichia coli
MDNAPLPQVISMVWQRVFNRPYQLSPDIAGDTRLVSFYLSKNQEPRSFFISYLKRLNISVTSMKDGVDYISVIKQTEQKVPDVVFTYRPKYRSVSYLSAMLNSVVSSGAFSNHIQSVDYLSGGVSGITTTDSASTRMSIATDAEVLVYSGPAASVRQIEKILPRIDVPAEQVTVSGYVLEVQTTDRNATGLQIIADLFRNKLGMSVGARLDGGNSFTLNVGGLNAFYSLIKEDSRFNVVSNPRLTVLSGSKSQFTVGQEVPVLDSVSYQGSSGTPVQSVTYRNSGAIFTVTPVVLDGLITPDISQQLSDFVKTTTGVNSSPTLTKREISTKVDVKDGELLVLGGLASSKLTQSRTGFSFLPGFTGKSDENNRTDIIVVLQARRVGK

SEQ ID NO: 17319 - protein, 686 aa, Escherichia coli; identical to SEQ ID NO: 9611

SEQ ID NO: 17320 - protein, 331 aa, Escherichia coli; identical to SEQ ID NO: 5128

SEQ ID NO: 17321 - protein, 368 aa, Escherichia coli; identical to SEQ ID NO: 5102

SEQ ID NO: 17322 - protein, 446 aa, Escherichia coli; identical to SEQ ID NO: 2177

SEQ ID NO: 17323 - protein, 67 aa, Escherichia coli
MVIITFKSGETFQVEVPGSQHIDSQKKAIERMKDTLRITYLTETKIDKLCVWNNKTPNSIAAISMKN

SEQ ID NO: 17324 - protein, 663 aa, Escherichia coli; identical to SEQ ID NO: 5822

SEQ ID NO: 17325 - protein, 375 aa, Escherichia coli
MKVKVLSLLVPALLVAGAANAAEVYNKDGNKLDLYGKVDGLHYFSDDKSVDGDQTYMRLGFKGETQVTDQLTGYGQWEYQIQGNAPESENNSWTRVAFAGLKFQDIGSIDYGRNYGVVYDVTSWTDVLPEFGGDTYGSDNFMQQRGNGFATYRNTDFFGLVDGLNFAVQYQGQNGSVSGESDPDFTGHGITNNGRKALRQNGDGVGGSITYDYEGFGIGGAISSSKRTWDQNNTGLIGTGDRAETYTGGLKYDANNIYLAAQYTQTYNATRVGSLGWANKAQNFEAVAQYQFDFGLRPSVAYLQSKGKNLGVIKGRNYDDEDILKYVDVGATYYFNKNMSTYVDYKINLLDDNRFTRDAGINTDDIVALGLVYQF

SEQ ID NO: 17326 - protein, 446 aa, Escherichia coli; identical to SEQ ID NO: 2182

SEQ ID NO: 17327 - protein, 518 aa, Escherichia coli; identical to SEQ ID NO: 2349

SEQ ID NO: 17328 - protein, 360 aa, Escherichia coli; identical to SEQ ID NO: 4018

SEQ ID NO: 17329 - protein, 840 aa, Escherichia coli
MNNKNTFTGDKLSHAIKIALSGVVCSLLFVLPVHAVEFNVDMVDAEDRENIDISRFEKKGYIPPGRYLVRVQINKNMLPQTLILEWVKADNESGSLLCLTKENLTNFGLNTEFIESLQNIAGSECLDLSQRQELTTRLDKATMILSLSVPQAWLKYQATNWTPPEFWDAGIAGFILDYNVYASQYAPHHGDSTQNVSSYGTLGFNLGAWRLRSDYQYNQNFADGRSVNHDSEFARTYLFRPIPSWSSKFTMGQYDLSSNLYDTFHFTGASLESDESMLPPDLQGYAPQITGIAQTNAKVTVAQNGRVLYQTTVAPGPFTISDLGQSFQGQLDVTVEEEDGRTSTFQVGSASIPYLTRKGQVRYKTSLGKPTSVGHNDINNPFFWTAEASWGWLNNVSLYGGGMFTADDYQAITTGIGFNLNQFGSLSFDVTGADASLQQQNSDNLRGYSYRFNYAKHFESTGSQITFAGYRFSDKDYVSMSEYLSSRNGDESIDNEKESYVISLNQYFETLELNSYLNVTRNTYWDSASNTNYSVSVSKNFDIGDFKGISASLAVSRIRWDDDEENQYYFSFSLPLQQNRNISYSMQRTGSSNTSQMISWYDSSDRNNIWNISASATDDNIRDGEPTLRGSYQHYSPWGRLNINGSVQPNQYNSVTAGWYGSLTATRHGVALHDYSYGDNARMMVDTDGISGVEINSNRTVTNGLGIAVIPSLSNYTTSMLRVNNNDLPEGVDVENSVIRTTLTQGAIGYAKLNATTGYQIVGVIRQENGRFPPLGVNVTDKATGKDVGLVAEDGFVYLSGIQENSILHLTWGDNTCEVTPPNQSNISESAIILPCKTVK

SEQ ID NO: 17330 - protein, 567 aa, Escherichia coli; identical to SEQ ID NO: 4028

SEQ ID NO: 17331 - protein, 432 aa, Escherichia coli; identical to SEQ ID NO: 2026

SEQ ID NO: 17332 - protein, 505 aa, Escherichia coli
MSQYGNPTTCEIDNGGVIVADGFQASKAYSANSIVDYNDAHYKTSVDQGAWGFVPGGDNPWKKYEPAKAWSASTVYVKGDRVVVDGQAYEALFWTQSDNPALVANQNATGSNSRPWKPLGKAQSYSNEELNNAPQFNPETLYASDTLIRFNGANYISQSKVQKVSPSDSNPWRVFVDWTGTKERVGTPKKAWPKHVYAPYVDFTLNTIPDLAALAKNHNVNHFTLAFVVSKDANTCLPTWGTAYGMQNYAQYSKIKALREAGGDVMLSIGGANNAPLAASCKNVDDLMQHYYDIVDNLNLRVLDFDIEGTWVADQASIERRNLAVKKVQDKWKSEGKDIAIWYTLPILPTGLTPEGMNVLSDAKAKGVELAGVNVMTMDYGNAICQSANTEGQNIHGKCATSAITNLHSQLKGLHPNKSDAEIDAMMGTTPMVGVNDVQGEVFYLSDARLVMQDAQKRNLGMVGIWSIARDLPGGTNLSPEFHGLTKEQAPKYAFSEIFAPFTKQ

SEQ ID NO: 17333 - protein, 430 aa, Escherichia coli
MKQALRVAFGFLILWASVLHAEVRIVIDSGVDSGRPIGVVPFQWAGPGAAPEDIGGIVAADLRNSGKFNPLDRARLPQQPGSAQEVQPAAWSALGIDAVVVGQVTPNPDGSYNVAYQLVDTGGAPGTVLAQNSYKVNKQWLRYAGHTASDEVFEKLTGIKGAFRSRIAYVVQTNGGQFPYELRVSDYDGYNQFVVHRSPQPLMSPAWSPDGSKLAYVTFESGRSALVIQTLANGAVRQVASFPRHNGAPAFSPDGSKLAFALSKTGSLNLYVMDLASGQIRQVTDGRSNNTEPTWFPDSQNLAFTSDQAGRPQVYKVNINGGAPQRITWEGSQNQDADVSSDGKFMVMVSSNGGQQHIAKQDLATGGVQVLSSTFLDETPSLAPNGTMVIYSSSQGMGSVLNLVSTDGRFKARLPATDGQVKFPAWSPYL

SEQ ID NO: 17334 - protein, 274 aa, Escherichia coli; identical to SEQ ID NO: 9502

SEQ ID NO: 17335 - protein, 200 aa, Escherichia coli; identical to SEQ ID NO: 1801

SEQ ID NO: 17336 - protein, 559 aa, Escherichia coli
MSGSYSSVWAEDDIQFDSRFLELKGDTKIDLKRFSSQGYVEPGKYNLQVQLNKQPLAEEYDIYWYAGEDDVSKSYACLTPELVAQFGLKEDVAKNLQWSHDGKCLKPGQLEGVEIKADLSQSALVISLPQAYLEYTWPDWDPPSRWDDGISGIIADYSITAQTRHEENGGDDSNEISGNGTVGVNLGPWRMRADWQTNYQHTRSNDDDDEFGGDDTQKKWEWSRYYAWRALPSLKAKLALGEDYLNSDIFDGFNYVGGSVSTDDQMLPPNLRGYAPDISGVAHTTAKVTVSQMGRVIYETQVPAGPFRIQDLGDSVSGTLHIRIEEQNGQVQEYDISTASMPYLTRPGQVRYKIMMGRPQEWGHHVEGGFFSGAEASWGIANGWSLYGGALGDENYQSAALGVGRDLSTFGAVAFDVTHSHTKLDKDTAYGKGSLDGNSFRVSYSKDFDQLNSRVTFAGYRFSEENFMTMSEYLDASDSEMVRTGNDKEMYTATYNQNFRDAGVSVYLNYTRHTYWDREEQTNYNIMLSHYFNMGSIRNMSVSLTGYRYEYDNRADKGM

SEQ ID NO: 17337 - protein, 866 aa, Escherichia coli
MPRTHRQHSLLTSGGVPSFIGGLVVFVSAAFNAQAETWFDPAFFKDDPSMVADLSRFERGQKITPGVYRVDIVLNQTVIDTRNVNFVEITPEKGIAACLTTESLDAMGVNIDAFPAFKQLDKQACAPLAEIIPDASVTFDVNKLRLEISVPQIAIKSNARDYVPPERWDEGINALLLGYSFSGANSIHSSSDSDSTDSYFLNLNSGVNLGPWRLRNNSTWSRSSGQTAEWKNLSSYLQRAVIPLKGELTVGDDYTAGDFFDSVSFRGVQLASDDNMLPDSLKGFAPVVRGIAKSNAQITIKQNGYTIYQTYVSPGAFEISDLYSTSSSGDLLVEIKEVDGSINSYSVPFSSVPLLQRQGRIKYAVTLAKYRTNSNDQQESKFAQATLQWGGPWGTTWYGGGQYAEYYRAAMLGLGFNLGDFGAISFDATQAKSTLADQSEHKGQSYRFLYAKTLNQLGTNFQLMGYRYSTSGFYTLSDTMYKHMDGYEFNDGDDEDTPMWSRYYNLFYTKRGKLQVNISQQLGDYGSFYLSGSQQTYWHTDQQDRLLQFGYNTQIKDLSLGVSWNYSKSRGQPDADQVFALNFSLPLNLLLPRSNDSYTRKKNYAWMTSNTSIDNEGHTTQNLGLTETLLDDGNLSYSVQQGYNSEGKTANGSASMDYKGAFADARVGYNYSDSGSQQQLNYALSGSLVAHSRGITLGQSLGETNVLIVAPGAENTRVANSTGLKTDWRGYTVVPYATSYRENRIVLDAASLKRNVDLENAVVNVVPTKGALVLAEFNAHAGARVLMKTSKQGMPLRFGAIATLDGVQTNSGIIDDDGSLYMSGLPAQGAITVRWGEAPDQICHISYELTEQQINAAITRMDAICR

SEQ ID NO: 17338 - protein, 729 aa, Escherichia coli
MLSTQFNRDNQHQTTSKPSLLAACIALALLPSAAFAAPATEETVIVEGSATAPDDGENDYSVTSTSAGTKMQMTQRDIPQSVTIVSQQRMEDQQLQTLGEVMENTLGISKSQADSDRALYYSRGFQIDNYMVDGIPTYFESRWNLGDALSDMALFERVEVVRGATGLMTGTGNPSAAINMVRKHATSREFKGDVSAEYGSWNKERYVADLQSPLTEDGKIRARIVGGYQNNDSWLDRYNSEKTFFSGIVDADLGDLTTLSAGYEYQRIDVNSPTWGGLPRWNTDGSSNSYDRARSTAPDWAYNDKEINKVFMTLKQRFADTWQATLNATHSEVEFDSKMMYVDAYVNKADGMLVGPYSNYGPGFDYVGGTGWNSGKRKVDALDLFADGSYELFGRQHNLMFGGSYSKQNNRYFSSWANIFPDEIGSFYNFNGNFPQTDWSPQSLAQDDTTHMKSLYAATRVTLADPLHLILGARYTNWRVDTLTYSMEKNHTTPYAGLVFDINDNWSTYASYTSIFQPQNDRDSSGKYLAPITGNNYELGLKSDWMNSRLTTTLAIFRIEQDNVAQSTGTPIPGSNGETAYKAVDGTVSKGVEFELNGAITDNWQLTFGATRYIAEDNEGNAVNPNLPRTTVKMFTSYRLPVMLELTVGGGVNWQNRVYTDTVTPYGTFRAEQGSYALVDLFTRYQVTKNFSLQGNVNNLFDKTYDTNVEGSIVYGAPRNFSITGTYQF

SEQ ID NO: 17339 - protein, 213 aa, Escherichia coli
MTKMSRYALITALAMFLAGCVGQREPAPVEEVKPAPEQPAEPQQPVPTVPSVPTIPQQPGPIEHEDQTAPPAPHIRHYDWNGAMQPMVSKMLGADGVTAGSVLLVDSVNNRTNGSLNAAEATETLRNSLANNGKFTLVSAQQLSMAKQQLGLSPQDSLGTRSKAIGIARNVGAHYVLYSSASGNVNAPTLQMQLMLVQTGEIIWSGKGAVSQQ

SEQ ID NO: 17340 - protein, 193 aa, Escherichia coli; identical to SEQ ID NO: 2246

SEQ ID NO: 17341 - protein, 161 aa, Escherichia coli; identical to SEQ ID NO: 2582

SEQ ID NO: 17342 - protein, 266 aa, Escherichia coli
MAKSLFRALVALSFLAPLWLNAAPRVITLSPANTELAFAAGITPVGVSSYSDYPPQAQKIEQVSTWQGMNLERIVALKPDLVIAWRGGNAERQVDQLASLGIKVMWVDATSIEQIANALSQLALWSPQPDKAEQAAQSLLDQYAQLKAQYADKPKKRVFLQFGINPPFTSGKESIQNQVLEVCGGENIFKDSRVPWPQVSREQVLARAPQAIVITGGPDQIPKIKQYWGEQLKIPVIPLTSDWFERASPRIILAAQQLCNALSQVD

SEQ ID NO: 17343 - protein, 897 aa, Escherichia coli; identical to SEQ ID NO: 1908

SEQ ID NO: 17344 - protein, 784 aa, Escherichia coli; identical to SEQ ID NO: 2244

SEQ ID NO: 17345 - protein, 102 aa, Escherichia coli; identical to SEQ ID NO: 1823

SEQ ID NO: 17346 - protein, 822 aa, Escherichia coli
QMSGNIGANPVIIIGCASAYAVEFNKDLIEAEDRENVNLSQFETDGQLPVGKYSLSTLINNKRTPIHLDLQWVLIDNQTAVCVTPEQLTLLGFTDEFIEKTQQNLIDGCYPIEKEKQITTYLDKGKMQLSISAPQAWLKYKDANWTPPELWNHGIAGAFLDYNLYASHYAPHQGDNSQNISSYGQAGVNLGAWRLRTDYQYDQSFNNGKSQATNLDFPRIYLFRPIPAMNAKLTIGQYDTESSIFDSFHFSGISLKSDENMLPPDLRGYAPQITGVAQTNAKVTVSQNNRIIYQENVPPGPFAITNLFNTLQGQLDVKVEEEDGRVTQWQVASNSIPYLTRKGQIRYTTAMGKPTSVGGDSLQQPFFWTGEFSWGWLNNVSLYGGSVLTNRDYQSLAAGVGFNLNSLGSLSFDVTRSDAQLHNQDKETGYSYRANYSKRFESTGSQLTFAGYRFSDKNFVTMNEYINDTNHYTNYQNEKESYIVTFNQYLESLRLNTYVSLARNTYWDASSNVNYSLSLSRDFDIGPLKNVSTSLTFSRINWEEDNQDQLYLNISIPWGTSRTLSYGMQRNQDNEISHTASWYDSSDRNNSWSVSASGDNDEFKDMKASLRASYQHNTENGRLYLSGTSQRDSYYSLNASWNGSFTATRHGAAFHDYSGSADSRFMIDADGTEDIPLNNKRAVTNRYGIGVIPSVSSYITTSLSVDTRNLPENVDIENSVITTTLTEGAIGYAKLDTRKGYQIIGVIRLADGSHPPLGISVKDETSHKELGLVADGGFVYLNGIQDDNKLALRWGDKSCFIQPPNSSNLTTGTAILPCISQN

SEQ ID NO: 17347 - protein, 826 aa, Escherichia coli; identical to SEQ ID NO: 2758

SEQ ID NO: 17348 - protein, 867 aa, Escherichia coli; identical to SEQ ID NO: 2581

SEQ ID NO: 17349 - protein, 368 aa, Escherichia coli; identical to SEQ ID NO: 2374

SEQ ID NO: 17350 - protein, 207 aa, Escherichia coli; identical to SEQ ID NO: 2211

SEQ ID NO: 17351 - protein, 826 aa, Escherichia coli
MLRMTPLASAIVALLLGIEAYAAEETFDTHFMIGGMKDQQVANIRLDDNQPLPGQYDIDIYVNKQWRGKYEIIVKDNPQETCLSREIIKRLGINTDNFASGKQCLTFEQLVQGGSYTWDIGVFRLDFSVPQAWVEELESGYVPPENWERGINAFYTSYYVSQYYSDYKASGNSKSTYVRFNSGLNLLGWQLHSDASFSKTNSNPGVWKSNTLYLERGFAQLLGTLRVGDMYTSSDIFDSVRFSGVRLFRDMQMLPNSKQNFTPRVQGIAQSNALVTIEQNGFVVYQKEVPPGPFAITDLQLAGGGADLDVSVKEADGSVTTYLVPYAAVPNMLQPGVSKYDFAAGRSHIEGASKQSDFVQAGYQYGFNNLLTLYGGSMVANNYYAFTLGTSWNTRIGAISVDATKSHSKQDNGDVFDGQSYQIAYNKFVSQTSTRFGLAAWRYSSRDYRTFNDHVWANNKDNYRRDENDIYDIADYYQNDFGRKNSFSANMSQSLPEGWGSVSLSTLWRDYWGRSGSSKDYQLSYSSNLRRISYTLAASQAYDENHHEEKRFNILISIPFDWGDDVTTPRRQIYMSNSTTFDDQGFASNNTGLSGTVGGRDQFNYGVNLSHQHQGNETTAGANLTWNAPVATVNGSYSQSSTYRQAGASVSGGIVAWSGGVNLANRLSETLAVMNAPGIKNAYVNGQKYRTTNRNGVVVYDGMTPYRENHLMLDVSQSDSEAELRGNRKIVAPYRGAVVLVNFDTDQRKPWFIKALRADGQPLTFGYEVNDIHGHNIGVVGQGSQLFIRTNEVPPSVNVAIDKQQGLSCTITFGKEIDESRNYICQ

SEQ ID NO: 17352 - protein, 838 aa, Escherichia coli; identical to SEQ ID NO: 2795

SEQ ID NO: 17353 - protein, 686 aa, Escherichia coli; identical to SEQ ID NO: 3015

SEQ ID NO: 17354 - protein, 266 aa, Escherichia coli; identical to SEQ ID NO: 1894

SEQ ID NO: 17355 - protein, 713 aa, Escherichia coli
MAKFTPSFSGIKGRALFSLLFAAPMIHATDTATTKDGETITVTADANTATEATDGYQPLSTSTATLTDMPMLDIPQVVNTVSDQVLENQNATTLDEALYNVSNVVQTNTLGGTQDAFVRRGFGANRDGSIMTNGLRTVLPRSFNAATERVEVLKGPASTLYGILDPGGLINVVTKRPEKTFHGSVSATSSSFGGGTGQLDITGPIEGTQLAYRLTGEVQDEDYWRNFGKERSTFIAPSLTWFGDNATVTMLYSHRDYKTPFDRGTIFDLTTKQPVNVDRKIRFDEPFNITDGQSDLAQLNAEYHLNSQWTARFDYSYSQDKYSDNQARVTAYDATTGTLTRRVDATQGSTQRMHATRADLQGNVDIAGFYNEILGGVSYEYYDLLRTDMIRCKKAKDFNIYNPVYGITSKCTTVSASDSDQTIKQESYSAYAQDALYLTDNWIAVAGIRYQYYTQYAGKGRPFNVNTDSRDEQWTPKLGLVYKLTPSVSLFANYSQTFMPQSSIASYIGDLPPESSNAYEVGAKFELFDGITADIALFDIHKRNVLYTESIGDETIAKTAGRVRSRGVEVDLAGALTENINIIASYGYTDAKVLEDPDYAGKPLPNVPRHTGSLFLTYDIHNMPGNNTLTFGGGGHGVSRRSATNGADYYLPGYFVADAFAAYKMKLQYPVTLQLNVKNLFDKTYYTSSIATNNLGNQIGDPREVQFTVKMEF

SEQ ID NO: 17356 - protein, 366 aa, Escherichia coli; identical to SEQ ID NO: 3901

SEQ ID NO: 17357 - protein, 816 aa, Escherichia coli
MLRTTRWVAAIIFLYSFPGYAEETFDTHFMIGGMRGEKVSEYRFDNKQPLPGNYELDFYVNHQWRGKKDITIPESPAKPCLPKVLLTTLGVKTDNLNTENNCILLDEAVHGGQYQWDISEHRLNLTVPQAYINELERGYVPPESWDRGIDAFYTSYNLSQYRSYDSNNNSNTASYGRFNSGLNLFSWQLHSDASYSKPDDMKGKWQSNTLYLERGWSQILSTVQIGENYTSSLIFDSLRFSGIRLFRDMQMLPDSMQSFTPLVQGVAQSNALITVSQNGYIIYQKEVPPGPFTIADLQLSGSGSDLDVSIKEADGSVRSFLVPYSSVPNMLQPGVSNFDFITGRSKLYGVKNQEDFLEANYIYGLNNLLTLYGGTILSDNYNAITLGNGWNTPLGAISFDATRSSSKLNNDITHEGTSYQVAYNKYLVQTATLFSVAAWRYASQDYRTFSDHLYENDKINHQSDYDDFYDIGRKNSLSANIMQPLSNNLGNVSLSALWRNYWGRSGNAKDYQFSYSNSWQRISYTFSASQSYDENDKEEERFNLFISIPFYWGDDIAKTRHQINLSNSTSFSKDGYSSNNTGITGIAGEHDQLNYGIYVNQQQQNNDTSLGTNLSWRTPIAIIDGSYSHSKNTWQSGGSISSGLVVRPGGINITNQLSDTFAILDAPGLEGAHINGQKYNRTNSKGQVVYDLMIPHRENHLVLDIANSESETELQGNRQIIAPYRGAVSYVQFTTDQRKPWYIQALRPDGSPLTFGYDVLDLQENNIGVVGQGSRLFIRVDEIPTGIKVALNDEQNLFCTITFQHVIDENKTYICQ

SEQ ID NO: 17358 - protein, 828 aa, Escherichia coli; identical to SEQ ID NO: 14698

SEQ ID NO: 17359 - protein, 803 aa, Escherichia coli
MAIPSALAVEFNLNVLDKSMRDRIDISLLKEKGVIAPGEYFVSVAVNNNQISNGQKIDWKKNGDQTIPCINDLLVDKFGLKPEVRQSLPRLNQCVDFSSRPEILFIFDQASQQLNITIPQAWLAWHSDNWTPPSTWKEGVAGVLMDYNLFASSYRPQDGSNSTNLNAYGTAGINAGAWRLRSDYQLNQTDSDDNHEQSGEISRTYLFRPLPQLGSKLTLGETDFSSNIFDGFSYTGAALASDDRMLPWELRGYAPQISGIAQTNATVTISQSGRVIYQKKVPPGPFIIDDLNQSVQGTLDVKVTEEDGRVNNFQVSAASTPFLTRQGQVRYKLAAGQPRTSMSHQTENETFFSNEVSWGMLSNTSLYGGLLISGDDYHSAAMGIGQNMLWLGALSFDVTWASSQFDTQQDERGLSYRFNYSKQVDATNSTISLAAYRFSDRHFHSYANYLDHKYNDNDAQDEKQTISLSVGQPITPLNLNLYANLLHQTWWNADASTTANITAGFNVDIGNWRDISISTSFNTTHYEDKDRDNQIYLSISLPFGNGGRVGYDMQNSSHSTTHRMSWNDTLDERNSWGMSTGLQSDRPDNGAQVSGNYQHLSSAGEWDISGTYAANDYSSVSSSWSGSFTATQYGAAFHRRSSTNEPRLMVSTDGVADIPVQGNLDYTNHFGIAVVPLISSYQPSTVAVNMNDLPDGVTVADNVIKETWIEGAIGYKSLASRSGKDVNVIIRNASGQFPPLGADIRQEDSGISVGMVGEEGHAWLSGVAENQQVTVIWGDSQRCSIHLPEHMEDTANRLILPCH

SEQ ID NO: 17360 - protein, 565 aa, Escherichia coli
MKSPTPSRPQKMALIPACIFLCFAALSVQAEETSVTPQPPDILLGPLFNDVQNAKLFPDQKTFADAVPNSDPLMILADYRMQQNQSGFDLRHFVNVNFTLPKEGEKYVPPEGQSLREHIDGLWPVLTRSTENTEKWDSLLPLPEPYVVPGGRFREVYYWDSYFTMLGLAESGHWDKVADMVANFAHEIDTYGHIPNGNRSYYLSRSQPPFFALMVELMAQHEGDAALKQYLPQMQKEYAYWMDGVENLQAGQQEKRVVKLQDGTLLNRYWDDRDTPRPESWVEDIATAKSNPNRPATEIYRDLRSAAASGWDFSSRWMDNPQQLNTLRTTSIVPVDLNSLMFKMEKILARASKAAGDNAMANQYETLANARQKGIEKYLWNDQQGWYADYDLKSHKVRNQLTAAALFPLYVNAAAKDRASKMATATKTHLLQPGGLNTTSVKSGQQWDAPNGWAPLQWVATEGLQNYGQKEVAMDISWHFLTNVQHTYDREKKLVEKYDVSTTGTGGGGGEYPLQDGFGWTNGVTLKMLDLICPKEQPCDNVPATRPLSESTTQPVKQKEAEPTP

SEQ ID NO: 17361 - protein, 539 aa, Escherichia coli
MAAVCGTSGIASLFSQAAFAADSDIADGQTQRFDFSILQSMAHDLAQTAWRGAPRPLPDTLATMTPQAYNSIQYDAEKSLWHNVENRQLDAQFFHMGMGFRRRVRMFSVDPATHLAREIHFRPELFKYNDAGVDTKQLEGQSDLGFAGFRVFKAPELARRDVVSFLGASYFRAVDDTYQYGLSARGLAIDTYTDSKEEFPDFTAFWFDTVKPGATTFTVYALLDSASITGAYKFTIHCEKSQVIMDVENHLYARKDIKQLGIAPMTSMFSCGTNERRMCDTIHPQIHDSDRLSMWRGNGEWICRPLNNPQKLQFNAYTDNNPKGFGLLQLDRDFSHYQDIMGWYNKRPSLWVEPRNKWGKGTIGLMEIPTTGETLDNIVCFWQPEKTVKAGDEFAFQYRLYWSAQPPVHCPLARVMATRTGMGGFPEGWAPGEHYPEKWARRFAVDFVGGDLKAAAPKGIEPVITLSSGEAKQIEILYIEPIDGYRIQFDWYPSSDSTDPVDMRMYLRCQGDAISETWLYQYFPPAPDKRQYVDDRVMS

SEQ ID NO: 17362 - protein, 368 aa, Escherichia coli
MNKTITALTIIMASFAANASVLPETPVPFKSGTGAIDNDTVYIGLGSAGTAWYKLDTQAKDKKWTALAAFPGGPRDQATSAFIDGNLYVFGGIGKNSEGLTQVFNDVHKYNPKTNSWVKLMSHAPMGMAGHVTFVHNGKAYVTGGVNQNIFNGYFEDLNEAGKDSTAIDKINAHYFDKKAEDYFFNKFLLSFDPSTQQWSYAGESPWYGTAGAAVVNKGDKTWLINGEAKPGLRTDAVFELDFTGNNLKWNKLAPVSSPDGVAGGFAGMSNDSLIFVGGAGFKGSRENYQNGKNYAHEGLKKSYSTDIHLWHNGKWDKSGELSQGRAYGVSLPWNNSLLIIGGETAGGKAVTDSVLISVKDNKVTVQN

SEQ ID NO: 17363 - protein, 869 aa, Escherichia coli
MKIPTTTDIPQRYSWCLAGICYSSLAILPSFLSYAESYFNPAFLLENGTSVADLSRFERGNHQPAGVYRVDLWRNDEFIGSQDIVFESTTENTRDKSGGLMPCFNQVLLERIGLNSSAFPELAQQQNNKCINLLKAVPDATINFDFAAMRLNITIPQIALLSSAHGYIPPEEWDEGIPALLLNYNFTGNRGNGNDSYFFSELSGINIGPWRLRNNGSWNYFRGNGYHSEQWNNIGTWVQRAIIPLKSELVMGDGNTGSDIFDGVGFRGVRLYSSDNMYPDSQQGFAPTVRGIARTAAQLTIRQNGFIIYQSYVSPGAFEITDLHPTSSNGDLDVTIDERDGNQQNYTIPYSTVPILQREGRFKFDLTAGDFRSGNSQQSSPFFFQGTALGGLPQEFTAYGGTQLSANYTAFLLGLGRNLGNWGAVSLDVTHARSQLADDSRHEGDSIRFLYAKSMNTFGTNFQLMGYRYSTQGFYTLDDVAYRRMEGYEYDYDYDGEHRDEPIIVNYHNLRFSRKDRLQLNISQSLNDFGSLYISGTHQKYWNTSDSDTWYQVGYTSSWVGISYSLSFSWNESVGIPDNERIVGLNVSVPFNVLTKRRYTRENALDRAYASFNANRNSNGQNSWLAGVGGTLLEGHNLSYHVSQGDTSNNGYTGSATANWQAAYGTLGVGYNYDRDQHDVNWQLSGGVVGHENGITLSQPLGDTNVLIKAPGAGGVRIENQTGILTDWRGYAVMPYATVYRYNRIALDTNTMGNSIDVEKNISSVVPTQGALVRANFDTRIGVRALITVTQGGKPVPFGSLVRENSTGITSMVGDDGQVYLSGAPLSGELLVQWGDGANSRCIAHYVLPKQSLQQAVTVISAVCTHPGS

SEQ ID NO: 17364 - protein, 878 aa, Escherichia coli; identical to SEQ ID NO: 2077

SEQ ID NO: 17365 - protein, 760 aa, Escherichia coli
MENNRNFPARQFHSLTFFAGLCIGITPVAQALAAEGQANADDTLVVEASTPSLYAPQQSADPKFSRPVADTTRTMTVISEQVIKDQGATNLTDALKNVPGVGAFFAGENGNSTTGDAIYMRGADTSNSIYIDGIRDIGSVSRDTFNTEQVEVIKGPSGTDYGRSAPTGSINMISKQPRNDSGIDASASIGSAWFRRGTLDVNQVIGDTTAVRLNVMGEKTHDAGRDKVKNERYGVAPSVAFGLGTANRLYLNYLHVTQHNTPDGGIPTIGLPGYSAPSAGTAALNHSGKVDTHNFYGTDSDYDDSTTDTATMRFEHDINDNTTIRNTTRWSRVKQDYLMTAIMGGASNITQPTSDVNSWTWSRTANTKDVSNKILTNQTNLTSTFYTGSIGHDVSTGVEFTRETQTNYGVNPVTLPAVNIYHPDSSIHPGGLTRNGANANGQTDTFAIYAFDTLQITRDFELNGGIRLDNYHTEYDSATACGGSGRGAITCPAGVAKGSPVTTVDTAQSGNLVNWKAGALYHLTENGNVYINYAVSQQPPGGNNFALAQSGSGNSANRTDFKPQKANTSEIGTKWQVLDKRLLLTAALFRTDIENEVEQNDDGTYSQYGKKRVEGYEISVAGNITPAWQVIGGYTQQKATIKNGKDVAQDGSSSLPYTPEHAFTLWSQYQATDDISVGAGARYIGSMHKGSDGAVGTPAFTEGYWVADAKLGYRVNRNLDFQLNVYNLFDTDYVASINKSGYRYHPGEPRTFLLTANMHF

SEQ ID NO: 17366 - protein, 803 aa, Escherichia coli
MTAFRAAFKAYRMHQVLLLPRFARLTIALGLATAVFPVDAEYYFNPRFLSNDLAESVDLSAFTKGREAPPGTYRVDIYLNDEFMTSRDITFIADDNNADLIPCLSTDLLVSLGIKKSALLDNKEHSAEKHVPDNSACTPLQDRLADASTEFDIGQQHLSLSVPQIYVGRMARGYVSPDLWEEGINAGLLNYSFNGNSINNRSNHNAGKSNYAYLNLQSGINIGSWRLRDNSTWSYNSGSSNSSDSNKWQHINTSAERDIIPLRSRLTVGDSYTDGDIFDSVNFRGLKINSTEAMLPDSQHGFAPVIHGIARGTAQVSVKQNGYDVYQTTVPPGPFTIDDINSAANGGDLQVTIKEADGSIQTLYVPYSSVPVLQRAGYTRYALAMGEYRSGNNLQSSPKFIQGSLMHGLEGNWTPYGGMQIAEDYQAFNLGIGKDLGLFGAFSFDITQANTTLADGTRHSGQSIKSVYSKSFYQTGTNIQVAGYRYSTQGFYNLSDSAYSRMSGYTVKPPTGDSNEQTQFIDYFNLFYSKRGQEQISISQQLGNYGTTFFSASRQSYWNTSRSDQQISFGLNVPFGDITTSLNYSYSNNIWQNDRDHLLAFTLNVPFSHWMRTDSQSAFRNSNASYSMSNDLKGGMTNLSGVYGTLLPDNNLNYSVQVGNTHGGNTSSGTSGYSSLNYRGAYGNTNVGYSRSGDSSQIYYGMSGGIIAHADGITFGQPLGDTMVLVKAPGADNVKMRTRPVFIPTGVAMPYYHLRQNIEKIVSLLTRIPLQIMLNWMKPLSLSSQLTVLLPEQHLMHKSAGKY

SEQ ID NO: 17367 - protein, 359 aa, Escherichia coli
MKKYLALALIAPLLISCSTTKKGDTYNEAWVKDTNGFDILMGQFAHNIENIWGFKEVVIAGPKDYVKYTDQYQTRSHINFDDGTITIETIAGTEPAAHLRRAIIKTLLMGDDPSSVDLYSDVDDITISKEPFLYGQVVDNTGQPIRWEGRASNFADYLLKNRLKSRSNGLRIIYSVTINMVPNHLDKRAHKYLGMVRQASRKYGIDESLILAIMQTESSFNPYAVSRSDALGLMQVVQHTAGKDVFRSQGKSGTPSRSFLFDPASNIDTGTAYLAMLNNVYLGGIDNPTSRRYAVITAYNGGAGSVLRVFSNDKIQAANIINTMTPGDVYQTLTTRHPSAESRRYLYKVNTAQKSYRRR

SEQ ID NO: 17368 - protein, 203 aa, Escherichia coli; identical to SEQ ID NO: 2009

SEQ ID NO: 17369 - protein, 879 aa, Escherichia coli
MPEHSFLRLRGLSWWIALAISGSPFNALADDTIQFDGRFLDLKGNTKIDLGRFSQKGYVEPGKYNLRVHVNNQPLPDDYDIYWYATENDPNKSYACLSPELVAQFGLKEDIAKNLQWIRDGQCLNTALLAGTEISGDLGQSALLVSVPQAYLEYTDSEWDPPSRWDDGIPGLIADYSINAQTRHENGGDDTNDISGNGTVGVNVGPWRLRADWQSDYQHTRSNDDGDTDDSGTQKNWEWSRYYTWRALPSLKAKLSLGEDYLNSDIFDGFSYIGGSISTDDQMLPPNLRGYAPDISGVAHTTAKVTVTQMGRVIYETQVPAGPFRIQDIGDSVSGTLHVRIEEQNGQVQEYDVSTASMPFLTRPGQVRYKVTMGRPQNWDHQVAGSFFSGGEASWGIANGWSLYGGALADENYQSAALGLGRDLALLGALAFDVTHSRVQLDDNSVYGNKTLDGNSYRVSYAKDFDELNSRVTFAGYRFSEKNYMTMSEYLDANDDDRARTGNDKEMYTVTYNQNFTDARVSVYLNYSHHTYWDRQDQTNYNMMLSHYFNLGSLRNLSVSLTGYRYEYDKSADKGVYLSLSLPWGDNSTISYNGNYGSGADSNQVSLYHRIDDASHYTVSAGTSENHSSVDGYYSHDGTLAKVDLSANYHEGQYTSAGISLQGGATLTAHGGALHRTQNMGGTRLLIDADGVANVPVEGNGSAVYTNMFGKAVVADVNDYYRNQAYIDLNKLPENAEATKSVVQATLTEGAIGYRKFAVISGEKAMAVLRLQDGSHPPFGAEVKNDNQQQVGLVDDEGNVYLAGVKPGEHMTVSWEGESHCDISLPDPLPNDLFNGLLLPCQQKGGSAPVIPHDIQPVIQQQTQQVAPMEPPMSVSSNQ

SEQ ID NO: 17370 - protein, 866 aa, Escherichia coli; identical to SEQ ID NO: 2004

SEQ ID NO: 17371 - protein, 815 aa, Escherichia coli; identical to SEQ ID NO: 2698

SEQ ID NO: 17372 - protein, 793 aa, Escherichia coli; identical to SEQ ID NO: 2768

SEQ ID NO: 17373 - protein, 840 aa, Escherichia coli
MNKSVVSISAAILVLLCQPVMGKEISPATPSDEDNYTFDPQLFRGSRFSQSSLAKLTTRVSVAPGNYKMDIYTNNKLSGSWNVTFKEAADGRVLPCLTPEVADAIGLKTGEDKGEKDPVCTFAQELAPGITSHTQLSQLRLDLSVPQSQMISRPRGYVPPSELDTGASLAFMNYIANYYNVAYSGQNAHSQRSLWASFNGGINLGAWQYRQLSNMTWDNDKGNQWNNIRSYLQRPLPAINSQLMMGQLITSGRFFSGLSYHGVSLATDERMLPDSMRGYAPTIRGVAATNARVSVMQNGHEIYQTTVAPGPFEINDLYPTSYSGDLDVTVTEANGAVSRFSVPFSAVPESMRPGTSRYNVEVGKTQDSGDDSMFGDLTWQHGMTNTLTFNSGSRIADGYQALMLGGVYGSTLGAFGANLTWSHARVPESEAQSGWMSQLTWSKTFQPTSTTVSLAGYRYSTSGYRDLADVLGERHAASNKQSWDSSQWRQQSRFDLTLSQSLANYGNLFVSGSTQNYRGGKSRDTQLQLGYSNSFSHGISMNLSVGRQRMGGYKDNSDDMQTVTSLSFSFPLGGNGPRVPSLSNSWTHSTDGSSQLQSSLTGMLDEAQTTNYSLNVMRDQQYKQTTLSGNMQKRFSQTTVGLNASKGQDYWQASGNVQGAMAVHGGGVTFGPYLGETFALVEAKGAEGAKVYNSSQLEINDSGYALVPAVTPYRYNRISLDPQGMDGDAELVDSEKQVAPVAGAAVKVVFRTRPGKALLIKSRMADGSELPMGADVLDENNTVVGIAGQGGQIYLRTEQTKGHLSVRWGEGANDSCQLPFDISGKDSNSPIIRLNETCQS

SEQ ID NO: 17374 - protein, 873 aa, Escherichia coli
MQQEANVMKTTTSTKRHNLTRIAMYCSIMYSGATIGAESVEYDPTFLMGGNASSIDVSRYSDGNPTLPGVYDVSIYVNEQPVANLEIPFIAIPDKKNAQACITLKNLLQLHIKTPPADEENTILLPRDETLGNCLDLSLAIPKSSVSYDPSEQRLDINVPQAWVMKNYQNYVDPSLWENGINAATLSYNINAYRSENSNYTNDSVYTSFNGGVNLGAWRLRSSGNYSWRNDAGSDVEFMNRYVQRDITAIRSQLIMGESYTTGETFDSVSIRGIRLYSDSRMLPPVLANFAPTIRGVANTNAKVSITQSGYKIYETTVPPGPFVIDDLSPSGYGSDLIVTIEEADGSKRTFSQPFSSVIQMLRPGVSRWDISGGQINKDDLHHEPNLLQATYYRGLSNLFTGYTGFQVTDNHYAAGLLGIGMNTSVGAISFDVTHSSVDIPDDKRYQGQSYRISWNKFFDLTDTSLNIAAYRYSTQDYLGLNDALTLIDEVEHPTQDLDPKTMRNYGRMKNQFTVSINQPLRFGKDDYGSFYTSGSWSDYWGGGKSRSNYSVGYSNSASWGSYSISAQRSWDEYSQTENSIYLSFSIPIEKLMGTEHRDSGFQSIDTQLSTNMDGNNQFNMSSSGYSNDNRVSYSVNAGYGMNKTGKDLSNIGGYASYESPWGTLAGSVSATSDNNRQYSVNTDGGFVLHSGGLTFSNDSFSDNDTIALVKAPGAKGARINYGNNTVDRWGYGVTSALSPYQENKIALDTENLENDIEMKSTSTVAVPRQGSVIFAGFETNQGQSAIMNIKRSDGKGIPFAADIHDETNAIIGNVGQGGQAFVRGIQQQGTIKITWLEASMPKTCVAQYQQPNVTSEKIQQTIILNNILCQLQ

SEQ ID NO: 17375 - protein, 118 aa, Escherichia coli [sequence omitted]

SEQ ID NO: 17376 - protein, 362 aa, Escherichia coli; identical to SEQ ID NO: 2827

SEQ ID NO: 17377 - protein, 208 aa, Escherichia coli; identical to SEQ ID NO: 1949

SEQ ID NO: 17378 - protein, 865 aa, Escherichia coli; identical to SEQ ID NO: 2167

SEQ ID NO: 17379 - protein, 478 aa, Escherichia coli; identical to SEQ ID NO: 2404

SEQ ID NO: 17380 - protein, 700 aa, Escherichia coli
MKIFSVRQTVLPALLVLSPVVFAADEQTMIVSAAPQVVSELDTPAAVSVVDGEEMRLATPRINLSESLTGVPGLQVQNRQNYAQDLQLSIRGFGSRSTYGIRGIRLYVDGIPATMPDGQGQTSNIDLSSVQNVEVLRGPFSALYGNASGGVMNVTTQTGQQPPTIEASSYYGSFGSWRYGLKATGATGDGTQPGDVDYTVSTTRFTTHGYRDHSGAQKNLANAKLGVRIDDASKLSLIFNSVDIKADDPGGLTKAEWKANPQQAPRAEQYDTRKTIKQTQAGLRYERSLSAQDDMSVMMYAGERETTQYQSIPMAPQLNPSHAGGVITLQRHYQGIDSRWTHRGELGVPVTFTTGLNYENMSENRKGYNNFRLNSGVPEYGQKGELRRDERNLMWNVDPYLQTQWQLSEKLSLDAGVRYSSVWFDSNDHYVTPGNGDDSGDASYHKWLPAGSLKYAMTDAWNIYLAAGRGFETPTINELSYRADGQSGMNFGLKPSTNDTIEIGSKTRIGDGLLSLALFQTDTDDEIVVDSSSGGRTTYKNAGKTRRQGAEMAWDQRFAGDFRVKASWTWLDATYRSNVCNEQDCNGNRMPGIARNMGFASIGYVPEDGWYAGTEARYMGDIMADDENTAKAPSYTLVGLFTGYKYNYHNLTVDLFGRVDNLFDKEYVGSVIVNESNGRYYEPAPGRNYGVGMNIAWRFE

SEQ ID NO: 17381 - protein, 878 aa, Escherichia coli
MSYLNLRLYQRNTQCLHIRKHRLAGFFVRLVVACAFAAQAPLSSAELYFNPRFLADDPQAVADLSRFENGQELPPGTYRVDIYLNNGYMATRDVTFNTGDSEQGIVPCLTRAQLAGMGLNTASVSGMNLLADDACVPLTTMIHDATAHLDVGQQRLNLTIPQAFMSNRARGYIPPELWDPGINAGLLNYNFSGNSVQNRIGGNSHYAYLNLQSGLNIGAWRLRDNTTWSYNSSDSSSGSKNKWQHINTWLERDIIPLRSRLTLGDGYTQGDIFDGINFRGAQLASDDNMLPDSQRGFAPVIHGIARGTAQVTIKQNGYDIYNSTVPPGPFTINDIYAAGNSGDLQVTIKEADGSTQIFTVPYSSVPLLQREGHTRYSITAGEYRSGNAQQEKPRFFQSTLLHGLPAGWTIYGGTQLADRYRAFNFGIGKNMGALGALSVDMTQANSTLPDDSQHDGQSVRFLYNKSLNESGTNIQLVGYRYSTSGYFNFADTTYSRMNGYNIETQDGVIQVKPKFTDYYNLAYNKRGKLQLTVTQQLGRTSTLYLSGSHQTYWGTSNVDEQFQAGLNTAFEDINWTLSYSLTKNAWQKGRDQMLALNVNIPFSHWLRSDSKSQWRHASASYSMSHDLNGRMTNLAGVYGTLLEDNNLSYSVQTGYAGGGDGNSGSTGYATLNYRGGYGNANIGYSHSDDIKQLYYGVSGGVLAHANGVTLGQPLNDTVVLVKAPGAKDAKVENQTGVRTDWRGYAVLPYATEYRENRVALDTNTLADNVDLDNAVANVVPTRGAIVRAEFKTRVGIKLLMTLTHNNKPLPFGAMVTSESSQSSGIVADNGQVYLSGMPLAGKVQVKWGEEENAHCVANYQLPPESQQQLLTQLSAECR

SEQ ID NO: 17382 - protein, 207 aa, Escherichia coli; identical to SEQ ID NO: 2211

SEQ ID NO: 17383 - protein, 161 aa, Escherichia coli; identical to SEQ ID NO: 2582

SEQ ID NO: 17384 - protein, 331 aa, Escherichia coli; identical to SEQ ID NO: 2705

SEQ ID NO: 17385 - protein, 237 aa, Escherichia coli; identical to SEQ ID NO: 1814

SEQ ID NO: 17386 - protein, 392 aa, Escherichia coli
MKRKVLAMLVPALLVAGAANAAEIYNKDGNKLDLYGKVAGLHYFSDDAGSDGDKSYARIGFKGETQIADQFTGYGQWEFNIGANGTESDKGNTATRLAFAGLGFGQNGTFDYGRNYGVVYDVEAWTDMLPEFGGDTYAGADNFMNGRANGVATYRNNGFFGQVDGLNFALQYQSNNENGGPFGQEGSGKGKGRDIAQENGDGFGMSTSYDFDFGLSLGAAYSNSDRTDNQVHKGWHNTRDGDRSDTTAGGETAEAWTVGAKYDANNVYLAAMYAETRNMTGYGKVDAIANKTQNFEVVAQYQFDFGLRPSIAYLQSKGKDLGGWAHDGNGDPRYTNKDLVKYVDIGATYYFNKNMSTYVDYKINLLDNDDDFYKANGIATDDIVAVGLVYQF

SEQ ID NO: 17387 - protein, 828 aa, Escherichia coli; identical to SEQ ID NO: 2390

SEQ ID NO: 17388 - protein, 660 aa, Escherichia coli; identical to SEQ ID NO: 4097

SEQ ID NO: 17389 - protein, 746 aa, Escherichia coli
MNKKIHSLALLVNLGIYGVAQAQEPTDTPVSHDDTIVVTAAEQNLQAPGVSTITADEIRKNPVARDVSEIIRTMPGVNLTGNSTSGQRGNNRQIDIRGMGPENTLILIDGKPVSSRNSVRQGWRGERDTRGDTSWVPPEMIERIEVLRGPAAARYGNGAAGGVVNIITKKGSGEWHGSWDAYFNAPEHKEEGATKRTNFSLTGPLGDEFSFRLYGNLDKTQADAWDINQGHQSARAGTYATTLPAGREGVINKDINGVVRWDFAPLQSLELEAGYSRQGNLYAGDTQNTNSDAYTRSKYGDETNRLYRQNYSLTWNGGWDNGVTTSNWVQYEHTRNSRIPEGLAGGTEGKFNEKATQDFVDIDLDDVMLHSEVNLPIDFLVNQTLTLGTEWNQQRMKDLSSNTQALTGTNTGGAIDGVSATDRSPYSKAEIFSLFAENNMELTDSTIVTPGLRFDHHSIVGNNWSPALNISQGLGDDFTLKMGIARAYKAPSLYQTNPNYILYSKGQGCYASAGGCYLQGNDDLKAETSINKEIGLEFKRDGWLAGVTWFRNDYRNKIEAGYVAVGQNAVGTDLYQWDNVPKAVVEGLEGSLNVPVSETVMWTNNITYMLKSENKTTGDRLSIIPEYTLNSTLSWQAREDLSMQTTFTWYGKQQPKKYNYKGQPAVGPETKEISPYSIVGLSATWDVTKNVSLTGGVDNLFDKRLWRAGNAQTTGDLAGANYIAGAGAYTYNEPGRTWYMSINTHF

SEQ ID NO: 17390 - protein, 654 aa, Escherichia coli
MDSVMKGLNKITCCLLAALLMPCAGHAENEQYGANFNNADIRQFVEIVGQHLGKTILIDPSVQGTISVRSNDTFSQQEYYQFFLSILDLYGYSVVTLDNGFLKVVRSANVKTSPGMIADSSRPGVGDELVTRIVPLENVPARDLAPLLRQMMDAGSVGNVVHYEPSNVLILTGRASTINKLIEVIKRVDVIGTEKQQIIHLEYASAEDLAEILNQLISESHGKSQMPALLSAKIVADKRTNSLIISGPEKARQRITSLLKSLDVEESEEGNTRVYYLKYAKATNLVEVLTGVSEKLKDEKGNERKPSSSGAMDNVAITADEQTNSLVITADQSVQEKLATVIARLDIRRAQVLVEAIIVEVQDGNGLNLGVQWANKNVGAQQFTNTGLPIFNAAQGVADYKKNGGITSANPAWDMFSAYNGMAAGFFNGDWGVLLTALASNNKNDILATPSIVTLDNKLASFNVGQDVPVLSGSQTTSGDNVFNTVERKTVGTKLKVTPQVNEGDAVLLEIEQEVSSVDSSSNSTLGPTFNTRTIQNAVLVKTGETVVLGGLLDDFSKEQVSKVPLLGDIPLVGQLFRYTSTERAKRNLMVFIRPTIIRDDDVYRSLSKEKYTRYRQEQQQRIDGKSKALVGSEDLPVLDENTFNSHPPAPSAR

SEQ ID NO: 17391 - protein, 747 aa, Escherichia coli; identical to SEQ ID NO: 13148

SEQ ID NO: 17392 - protein, 191 aa, Escherichia coli; identical to SEQ ID NO: 2730

SEQ ID NO: 17393 - protein, 351 aa, Escherichia coli; identical to SEQ ID NO: 9585

SEQ ID NO: 17394 - protein, 656 aa, Escherichia coli; identical to SEQ ID NO: 10533

SEQ ID NO: 17395 - protein, 162 aa, Escherichia coli; identical to SEQ ID NO: 1967

SEQ ID NO: 17396 - protein, 402 aa, Escherichia coli
MLIPGVQAAKPQKVTLMVDDVPVAQVLQALAEQEKLNLVVSPDVSGTVSLHLTDVPWKQALQTVVKSAGLITRQEGNILSVHSVAWQNDNIARQEAEQARAQANLPLENRNITLQYADAGELAKAGEKLLSAKGSMTVDKRTNRLLLRDNKTALSALEQWVAQMDLPVGQVELSAHIVTINEKSLRELGVKWTLADAQQAGGVGQVTTLGSDLSVATATTHVGFNIGRINGRLLDLELSALEQKQQLDIIASPRLLASHLQPASIKQGSEIPYQVSSGESGATSVEFKEAVLGMEVTPTVLQKGRIRLKLHISQNVPGQVLQQADGEVLAIDKQEIETQVEVKNGETLALGGIFTRKNKSGQDSVPLLGDIPWFGQLFRHDGKEDERRELVVFITPRLVSSE

SEQ ID NO: 17397 - protein, 232 aa, Escherichia coli
MQKNAAHTYAISSLLVLSLTGCAWIPSTPLVQGATSAQPVPGPTPVANGSIFQSAQPINYGYQPLFEDRRPRNIGDTLTIMLQENVSASKSSSANASRDGKTNFGFDTVPRYLQGLFGNARADVEASGGNTFNGKGGANASNTFSGTLTVTVDQVLVNGNLHVVGEKQIAINQGTEFIRFSGVVNPRTISGSNTVPSTQVADARIEYVGNGYINEAQNMGWLQRFFLNLSPM

SEQ ID NO: 17398 - protein, 241 aa, Escherichia coli; identical to SEQ ID NO: 2922

SEQ ID NO: 17399 - protein, 246 aa, Escherichia coli; identical to SEQ ID NO: 13217

SEQ ID NO: 17400 - protein, 331 aa, Escherichia coli; identical to SEQ ID NO: 5381

SEQ ID NO: 17401 - protein, 362 aa, Escherichia coli; identical to SEQ ID NO: 2434

SEQ ID NO: 17402 - protein, 162 aa, Escherichia coli; identical to SEQ ID NO: 1973

SEQ ID NO: 17403 - protein, 250 aa, Escherichia coli
MRWISKNKCFSNRNINSLLKTQYVIRAGALFLLSAISINAIAAGGFGLGSTRLVYPSDSQQITLSVQNGGANTSYLIQSWIDDNQSSKKSQDFVVTPPLFMLPTRKEASLRIMFIGKSQLPTDRETLFWMNVKAIPPTDEKNTQKNTLQLALQNRIKLFYRPTNLPVQAGKARDMLRFKYEGKQLRVINPSPYYLTVTGIRVQGAKLPNAFVPPKSDVTVSSPVTLAGEITYQTINDYGATTARQKGTMQ

SEQ ID NO: 17404 - protein, 432 aa, Escherichia coli; identical to SEQ ID NO: 2026

SEQ ID NO: 17405 - protein, 678 aa, Escherichia coli; identical to SEQ ID NO: 2231

SEQ ID NO: 17406 - protein, 233 aa, Escherichia coli
MKTCITKGIVTVSLTAILLSCSSAWAAGKGGIGLAATRLVYSEGEEQISLGVHNTSPDVPYLIQSWVMTPDNKKSADFIITPPLFVLNPANENLLRIMYIGAPLAKDRETLFFTSVRAVPSTTKREEGNTLKIATQSVIKLFWRPKGLAYPLAEAPAKLRCTSSADMVTLSNPTPYFITLTDLKIGGKVVKNQMISPFDKYQFPLPKGAQNSSVTYRTINDYGAETPQLNCKS

SEQ ID NO: 17407 - protein, 229 aa, Escherichia coli; identical to SEQ ID NO: 9596

SEQ ID NO: 17408 - protein, 229 aa, Escherichia coli
MKSVLLLLTVLFVQSVEAGIMPASSRIIYRDGDREKTLMLVNTNDYPVLVQSWVDNGEGSPEAASPPFVVLPPVFRLAAKRTQGLRIIYNHDPLPQDRESAFWLNLYEMPPETPHQDPTHLTLAMNTQLKIFYRPKSVTMTPEEAMRKISWHLGNDGSSSYIELNNPTPLNISFTSISIGATKVQQESDMMIKPFSQRRYWLASNNVSGVVAATYLDDNGSQIKQQLAP

SEQ ID NO: 17409 - protein, 241 aa, Escherichia coli; identical to SEQ ID NO: 2076

SEQ ID NO: 17410 - protein, 351 aa, Escherichia coli; identical to SEQ ID NO: 2519

SEQ ID NO: 17411 - protein, 375 aa, Escherichia coli
MNIYRAVTSFFNNSSKKGLTMKKLTVAISAVAASVLMAMSAQAAEIYNKDSNKLDLYGKVNAKHYFSSNDADDGDTTYARLGFKGETQINDQLTGFGQWEYEFKGNRAESQGSSKDKTRLAFAGLKFGDYGSIDYGRNYGVAYDIGAWTDVLPEFGGDTWTQTDVFMTQRATGVATYRNNDFFGLVDGLNFAAQYQGKNDRSDFDNYTEGNGDGFGFSATYEYEGFGIGATYAKSDRTDTQVNAGKVLPEVFASGKNAEVWAAGLKYDANNIYLATTYSETQNMTVFADHFVANKAQNFEAVAQYQFDFGLRPSVAYLQSKGKDLGVWGDQDLVKYVDVGATYYFNKNMSTFVDYKINLLDKNDFTKEGANKSLI

SEQ ID NO: 17412 - protein, 203 aa, Escherichia coli; identical to SEQ ID NO: 2015

SEQ ID NO: 17413 - protein, 193 aa, Escherichia coli; identical to SEQ ID NO: 2246

SEQ ID NO: 17414 - protein, 242 aa, Escherichia coli; identical to SEQ ID NO: 2697

SEQ ID NO: 17415 - protein, 650 aa, Escherichia coli; identical to SEQ ID NO: 2146

SEQ ID NO: 17416 - protein, 227 aa, Escherichia coli; identical to SEQ ID NO: 6371

SEQ ID NO: 17417 - protein, 774 aa, Escherichia coli
MTPLRVFRKTTPLVNTIRLSLLPLAGLSFSAFAAQVNIAPGSLDKALNQYAAHSGFTLSVDASLTRGKQSNGLHGDYDVESGLQQLLDGSGLQVKPLGNNSWTLEPAPAPKEDALTVVGDWLGDARENDVFEHAGARDVIRREDFAKTGATTMREVLNRIPGVSAPENNGTGSHDLAMNFGIRGLNPRLASRSTVLMDGIPVPFAPYGQPQLSLAPVSLGNMDAIDVVRGGGAVRYGPQSVGGVVNFVTRAIPQDFGIEAGVEGQLSPTSSQNNPKETHNLMVGGTADNGFGTALLYSGTRGSDWREHSATRIDDLMLKSKYAPDEVHTFNSLLQYYDGEADMPGGLSRADYDADRWQSTRPYDRFWGRRKLASLGYQFQPDSQHKFNIQGFYTQTLRSGYLEQGKRITLSPRNYWVRGIEPRYSQIFMIGPSAHEVGVGYRYLNESTHEMRYYTATSSGQLPSGSSPYDRDTRSGTEAHAWYLDDKIDIGNWTITPGMRFEHIESYQNNAITGTHEEVSYNAPLPALNVLYHLTDSWNLYANTEGSFGTVQYSQIGKAVQSGNVESEKARTWELGTRYDDGALTAEMGLFLINFNNQYDSNQTNDTVTARGKTRHTGLETQARYDLGTLTPTLDNVSIYASYAYVNAEIREKGDTYGNLVPFSPKHKGTLGVDYKPGNWTFNLNSDFQSSQFADNANTVKESADGSTGRIPGFMLWGARVAYDFGPQMADLNLAFGVKNIFDQDYFIRSYDDNNKGIYAGQPRTLYMQGSLKF

SEQ ID NO: 17418 - protein, 208 aa, Escherichia coli; identical to SEQ ID NO: 1949

SEQ ID NO: 17419 - protein, 213 aa, Escherichia coli; identical to SEQ ID NO: 2232

SEQ ID NO: 17420 - protein, 700 aa, Escherichia coli; identical to SEQ ID NO: 2784

SEQ ID NO: 17421 - protein, 118 aa, Escherichia coli; identical to SEQ ID NO: 2737

SEQ ID NO: 17422 - protein, 129 aa, Escherichia coli
MYAETRNMTPYGGGEFDNGESRSAIANKTQNFEVVAQYQFDFGLRPSIAYLQSKGKDLGGWAHDGNGDPRYTNKDLVKYVDIGATYYFNKNMSTYVDYKINLLDNDDDFYEANGIATDDIVAVGLVYQF

SEQ ID NO: 17423 - protein, 274 aa, Escherichia coli; identical to SEQ ID NO: 2309

SEQ ID NO: 17424 - protein, 190 aa, Escherichia coli
MKYVPEDRPIVVTGAVYNLTKTNNLMADPEGSFFSVEGGEIRARGVEIEAKAALSASVNVVGSYTYTDAEYTTDTTYKGNTPAQVPKHMASLWADYTFFDGPLSGLTLGTGGRYTGSSYGDPANSFKVGSYTVVDALVRYDLARVGMAGSNVALHVNNLFDREYVASCFNTYGCFWGAERQVVATATFRF

SEQ ID NO: 17425 - protein, 230 aa, Escherichia coli; identical to SEQ ID NO: 2580

SEQ ID NO: 17426 - protein, 111 aa, Escherichia coli; identical to SEQ ID NO: 3153

SEQ ID NO: 17427 - protein, 229 aa, Escherichia coli; identical to SEQ ID NO: 3984

SEQ ID NO: 17428 - protein, 518 aa, Escherichia coli; identical to SEQ ID NO: 2349

SEQ ID NO: 17429 - protein, 224 aa, Escherichia coli
MKGLLALLISSMVLPAHAGIVIYGTRIIYPAEHKEVMVQLMNQGNRSSLLQAWIDDGDTSLPPEKIQIPFMLTPPVAKIGANSGQQVKIKIMPNKLPTNKESIFYLNVLDIPPNSPEQEGKNALKFAMQNRIKLFYRPAGIAPVNKATFKKLLVNRSGNGLVIKNDSANWVTISDVKANNVKVNYETIMIAPLESQSINVKSNNANNWYLTIIDDHGNYISDKI

SEQ ID NO: 17430 - protein, 828 aa, Escherichia coli; identical to SEQ ID NO: 2386

SEQ ID NO: 17431 - protein, 364 aa, Escherichia coli
MKLNIFTKSMIGMGLVCSALPALAMEAWNNQQGGNKYQVIFDGKIYENAWWVSSTNCPGKAKANDATNPWRLKRTATAAEISQFGNTLSCEKSGSSSSSTSNTPASNTPANGGSATPAQGTVPSNSSVVAWNKQQGGQTWYVVFNGAVYKNAWWVASSNCPGDAKGNDASNPWRYVRAATATEISETSNPQSCTSAPQPAPDVKPAPDVKPAPDVQPAPADKSNDNYAVVAWKGQEGSSTLYVIYNGSIYKNAWWVGAANCPGDAKENDASNPWRYVRAATATEISQYGNPGSCSVKPDNNGDAVTPVDPTPETPETPVTPTPDNNEPSTPADSSNDYSLQAWSGQEGSEIYHVIFNGNVYQNA

SEQ ID NO: 17432 - protein, 784 aa, Escherichia coli; identical to SEQ ID NO: 2244

SEQ ID NO: 17433 - protein, 203 aa, Escherichia coli; identical to SEQ ID NO: 2201

SEQ ID NO: 17434 - protein, 233 aa, Escherichia coli; identical to SEQ ID NO: 2006

SEQ ID NO: 17435 - protein, 430 aa, Escherichia coli; identical to SEQ ID NO: 2617

SEQ ID NO: 17436 - protein, 233 aa, Escherichia coli
MNIFAYLLVLVFSMSMSSSAFASVVMTGTRIIFPGDAKEKTIQLRNTSDQPYIINIHVEDERGSDKNVPFMPTPQTFRMEAAAGQALRLLYTGDNLPQDRESVFWFSFSQLPYLNKNDKSQNQLILALTNRVKIFFRPSSIVGKSSDAPKNLTYQVKQNRIEVTNPTGYYVVIRAAELLNNGKKVPLANSVMIAPQSTTEWTLRSGISVAPGAQIHLVTVNDYGVNVTSEHAL

SEQ ID NO: 17437 - protein, 249 aa, Escherichia coli
MTKYLSAKTLTTVLSLLAATVSFSAQASVTPDRTRLIFNESDKSISVTLRNNDPKLPYLAQSWIEDEKGVKISSPLAVLPPVQRIDAMMNGQVKIQGLPDIHKLPADRESMFYFNVREIPPKSNKSNTLQIALQTRIKLFWRPKALEKNTTQNPWQHKVTLTRNGQEFTVNNPTPYYVIFSNASAQKNGNPAAGFSPIVMSPKTSAPLNVKMGSVPVLTYVNDYGARMPLFFTCNGNSCQVDEEQSRKG

SEQ ID NO: 17438 - protein, 746 aa, Escherichia coli; identical to SEQ ID NO: 2069

SEQ ID NO: 17439 - protein, 250 aa, Escherichia coli; identical to SEQ ID NO: 2761

SEQ ID NO: 17440 - protein, 258 aa, Escherichia coli
MLQFPLSSLMINVLICILICCTNAQAGVVVGGTRFVYPEKQSSISVELKNTASKDMLVKISVTPDDGRQLKGTLESQPLLPDKAFIATPPLLVLKQDKNTKIRINRVGGQLPIDRESLFILNVAALPAQEKNSQLKNENQLQVAVRNRMKIFYRPETLSGNPLDAYQQLRWSRKNEAVTVFNPTPWYVTLYNLSIDGKSINGGMVAPFSHRQQDWCQRQGYCEINWQTLDLYNNALPVWSVKLNVLQNNVMSAVAIHG

SEQ ID NO: 17441 - protein, 237 aa, Escherichia coli; identical to SEQ ID NO: 1814

SEQ ID NO: 17442 - protein, 663 aa, Escherichia coli; identical to SEQ ID NO: 1910

SEQ ID NO: 17443 - protein, 511 aa, Escherichia coli; identical to SEQ ID NO: 2466

SEQ ID NO: 17444 - protein, 446 aa, Escherichia coli [sequence omitted]

SEQ ID NO: 17445 - protein, 259 aa, Escherichia coli
MSPPCLENNSCHGWYILLNKKNIVALCVASSMAFSMPVMADIVISGTRVIYKSDQKSVSVRLENKGNSHLLVQSWLDTGDDNAEPGSINVPFTATPPVSRIDAKRGQTIKLMYTGSTVLPSDKESVFWFNVLEVPPKPDATKVENQSLLQLAFRTRIKLFYRPAGLNGNPSEAPLALKWKWAEGKSGLSVYNPTPYYVSFNSAELIAGGKSNPLNVKMVAPKSEEIFTISGSGGKATSGKVHFSAINDFGGAIEGDVNL

SEQ ID NO: 17446 - protein, 249 aa, Escherichia coli; identical to SEQ ID NO: 2793

SEQ ID NO: 17447 - protein, 478 aa, Escherichia coli
MTRIKINARRIFSLLIPFFFFTSVHAEQTAAPAKPVTVEAKNETFAPQHPDQYLSWKATSEQSERVDALAEDPRLVILWAGYPFSRDYNKPRGHAFAVTDVRETLRTGAPKNAEDGPLPMACWSCKSPDVARLIQKDGEDGYFHGKWTRGGPEIVNNLGCADCHNTASPEFAKGKPELTLSRPYAARAMETIGKPFEKAGRFDQQSMVCGQCHVEYYFDGKNKAVKFPWDDGMKVENMEQYYDKIAFSDWTNSLSKTPMLKAQHPEYETWTAGIHGKNNVTCIDCHMPKVQNAEGKLYTDHKIGNPFDNFAQTCANCHTQDKAALQKVVAERKQSINDLKIKVEDQLVHAHFEAKAALDAGATEAEMKPIQDDIRHAQWRWDLAIASHGIHMHAPEEGLRMLGTAMDKAADARTKLARLLATKGITHEIQIPDISTKEKAQQAIGLNMEQIKAEKQDFIKTVIPQWEEQARKNGLLSQ

SEQ ID NO: 17448 - protein, 729 aa, Escherichia coli; identical to SEQ ID NO: 2074

SEQ ID NO: 17449 - protein, 232 aa, Escherichia coli; identical to SEQ ID NO: 2087

SEQ ID NO: 17450 - protein, 367 aa, Escherichia coli; identical to SEQ ID NO: 2433

SEQ ID NO: 17451 - protein, 230 aa, Escherichia coli; identical to SEQ ID NO: 2580

SEQ ID NO: 17452 - protein, 551 aa, Escherichia coli; identical to SEQ ID NO: 2449

SEQ ID NO: 17453 - protein, 203 aa, Escherichia coli; identical to SEQ ID NO: 2201

SEQ ID NO: 17454 - protein, 760 aa, Escherichia coli; identical to SEQ ID NO: 2080

SEQ ID NO: 17455 - protein, 246 aa, Escherichia coli; identical to SEQ ID NO: 1985

SEQ ID NO: 17456 - protein, 191 aa, Escherichia coli; identical to SEQ ID NO: 2727

SEQ ID NO: 17457 - protein, 614 aa, Escherichia coli; identical to SEQ ID NO: 1888

SEQ ID NO: 17458 - protein, 565 aa, Escherichia coli; identical to SEQ ID NO: 2669

SEQ ID NO: 17459 - protein, 243 aa, Escherichia coli
MTFMKGLPLLLLVASLCSHAALQPDRTRIVFNANDKATSLRVDNRSDKLPYLAYSWLENEKGEKSDDLLVALPPIQRLEPKATTQVRIVKQASTTKLPGDRETLFFYNMREIPPAPEKNSDHAVLQVAIQSRIKVFWRPAALRKKAGEKVELQLQVSQQGNQLNLKNPTGYYLTIAYLGRNEQGILPGFKTVMVAPFSTVITNTGSYSGSQFYLGYMDDYGALRMTTLNCNGHCRLQAVEAKK

SEQ ID NO: 17460 - protein, 359 aa, Escherichia coli; identical to SEQ ID NO: 2329

SEQ ID NO: 17461 - protein, 231 aa, Escherichia coli; identical to SEQ ID NO: 2794

SEQ ID NO: 17462 - protein, 233 aa, Escherichia coli; identical to SEQ ID NO: 2853

SEQ ID NO: 17463 - protein, 170 aa, Escherichia coli [sequence omitted]

SEQ ID NO: 17464 - protein, 412 aa, Escherichia coli; identical to SEQ ID NO: 2161

SEQ ID NO: 17465 - protein, 200 aa, Escherichia coli; identical to SEQ ID NO: 1793

SEQ ID NO: 17466 - protein, 505 aa, Escherichia coli; identical to SEQ ID NO: 14775

SEQ ID NO: 17467 - protein, 224 aa, Escherichia coli; identical to SEQ ID NO: 4515

SEQ ID NO: 17468 - protein, 236 aa, Escherichia coli; identical to SEQ ID NO: 3482

SEQ ID NO: 17469 - protein, 780 aa, Escherichia coli
MKIPTTTDIPQRYTWCLAGICYSSLAILPSFLSYAESYFNPAFLLENGTSVADLSRFERGNHQPAGVYRVDLWRNDEFIGSQDIVFESTTVNTGDKSGGLMPCFNQALLERIGLNSSAFPELAQQQNNKCINLLKAVPDATINFDFAAMRLNITIPQIALLSSAHGYIPPEEWDEGIPALLLNYNFTGNRGNGNDSYFFSELSGINIGPWRLRNNGSWNYFRGNGYHSEQWNNIGTWVQRAIIPLKSELVMGDGNTGSDIFDGVGFRGVRLYSSDNMYPDSQQGFAPTVRGIARTAAQLTIRQNGFIIYQSYVSPGAFEITDLHPTSSNGDLDVTIDERDGNQQNYTIPYSTVPILQREGRFKFDLTAGDFRSGNSQQSSPFFFQGTALGGLPQEFTAYGGTQLSANYTAFLFGLGRNLGNWGAVSLDVTHARSQLADDSRHEGESIRFLYAKSMNTFGTNFQLMGYRYSTQGFYTLDDVAYRRMEGYEYDYDYDGEHRDEPIIVNYHNLRFSRKDRLQLNISQSLNDFGSLYISGTHQKYWNTSDSDTWYQVGYTSSWVGISYSLSFSWNESVGIPDNERIVGLNVSVPFNVLTKRRYTRENALDRAYAYFNANRNSNGQNSWLAGVGGTLLEGHNLSYHVSQGDTSNNGYTGSATANWQAAYGTLGVGYNYDRDQHDVNWQLSGGVVGHENGITLSQPLGDTNVLIKAPGAGGVRIENQTGILTDWRGYAVMPYATVYRYNRIALDTNTMGNSIDVEKILAALCRRKARWFVPILIPA

SEQ ID NO: 17470 - protein, 865 aa, Escherichia coli
MQKITIIHPHNLTQIATLCALLYSSFSISAEHVEYDHTFLMGRDASNIDLSRYSEGNPTLPGIYDVNVYVNDQPVINQSIPFVVIDGKKNAQACITQKNILQFHITQPDIDSENAVLLERDEELGDCLNLTEIIPQSSVRYDVNDQRLDIDVPQAWVMKNYQNYVDPSLWENGINAAMLSYNVNGYHSESPGRKNDSIYASFNGGVNLGAWRMRASGNYNWMNDSGSDYNFQNRYLQRDIASLRSQLIIGESYTTGETFDSVSIRGVRLYSDSRMLPPALASFAPVIHGVANTNAKVTITQSGYKIYETTVPPGAFTIDDLSPSGYGSDLIVTIEEADGSKRTFSQPFSSVVQMLRPGVGRWDISGGQVLKDDIQDEPNLFQASYYYGLNNYLTAYTGIQLTDNNYTAGLLGLGLNTSLGAFSFDVTHSNVRIPEDKTYQGQSYRLSWNKLFEDTSTSLNIAAYRYSTQNYLGLNDALTLIDEVKHPEQELEPQSMRNYSRMKNQVTVSINQPLKFEKKDYGSFYLSGSWSDYWASGQNQSNYSIGYSNSASWGSYSISAQRSWNEDGETDDSIYLSFTIPIEKLLGTEHRDSGFQNIDTQLNSDFKGNNQLNISSSGYNDNNRISYSVNTGYTMNKSTDDLSYIGGYASYESPWGTLAGSVSASSDNSRQFSLNTDGGFVLHSGGLTFSNDSFSDSDTLAVVQAPGAKGARINYGNSTVDRWGYGVTSALSPYHENRIALDINDLENDVELKSTSTVAVPRQGSVIFAGFETVQGQSAIMNIKRSDGRNIPFAADIYDEQGNNIGNVGQGGQAFVRGISQQGNIQIKWLEAGKPVNCLAHYQQNAEAEKIAQTIIINGINCQIQ

SEQ ID NO: 17471 - protein, 368 aa, Escherichia coli
MNKTITALAIMMASFAANASVLPETPVPFKSGTGAIDNDTVYIGLGSAGTAWYKLDTQAKDKKWTALAAFPGGPRDQATSAFIDGNLYVFGGIGKNSEGLTQVFNDVHKYNPKTNSWVKLMSHAPMGMAGHVTFVRNGKAYVTGGVNQNIFNGYFEDLNEAGKDSTAIDKINAHYFDKKAEDYFFNKFLLSFDPSTQQWSYAGESPWYGTAGAAVVNKGDKTWLINGEAKPGLRTDAVFELDFTGNNLKWNKLAPVSSPDGVAGGFAGISNDSLIFAGGAGFKGSRENYQNGKNYAHEGLKKSYSADIHLWHNGKWDKSGELSQGRAYGVSLPWNNSLLIIGGETAGGKAVTDSVLISVKDNKVTVQN

SEQ ID NO: 17472 - protein, 237 aa, Escherichia coli
MRKITQALSAVCLLFALNSSAVALASSPSPLNPGTNVARLAEQAPVHWVSVTQIENSLAGRPPMAVGFDIDDTVLFSSPGFWRGKKTFSPESEDYLKNPVFWEKMNNGWDEFSIPKEVARQLIDMHVRRGDAIFFVTGRSPTKTETVSKTLADNFHIPATNMNPVIFAGDKPGQNTKSQWLQDKNIRIFYGDSDNDITAAREVGARGIRILRASNSTYKPLPQAGAFGEEVIVNSEY

SEQ ID NO: 17473 - protein, 878 aa, Escherichia coli
MPDHSLFRLRALPWCVAVVISGCHINAWADEDIQFDSRFLELKGDTKIDLKRFSSQGYVEPGKYSLQVEVNKQPLPGEYDIYWYAAENDANKTYACLSPDLVALLGFKEDIAKNLQWVHDGKCLKPGQFDGLEMRVDLSQSALLISLPQAYLEYSDVDWDPPSRWDDGISGLIADYSINAQTRHEENGGDDSNDISGNGTVGVNLGPWRLRADWQSDYQHTRSNDEETEDSTERNWDWSRYYAWRALPSLKAKLALGEDYLDSDIFDGFNYIGGSISTDDQMLPPNLRGYAPDISGVAHTAAKVTVSQAGRVIYETQVPAGPFRIQDLADFSSGTLHVRIEEVNGQVQEYDISTASMPFLTRPGQVRYKIMMGRPQEWGHHVQGGFFSGGEASWGIANGWSLYGGALGDENYQSAALGIGRDLSVFGAMAFDITHSHTRLDDSTAYGKSTLDGNSFRVSYSKDFDELNSRVTFAGYRFSEENYMTMSEYLDANDSAMVRSGNDKEMYTATYNQNFRDAGVSVYLNYTRHTYWDREEQTNYNVMLSHYFNMGGIRNMSISLTGYRYEYDDSADKGVYISLSMPWGDSSVVSYNGNYGSGSDSSQVGYFSRIDDASHYQINVGNSENHSSVDGYYSRDGSMAHVDLNANYHEGQYTSAGLSLQGGATLTAHGGALHRTQNMGGTRLLIDADGVADVPVEGNGAAVYTNMFGKAVVADVNNYYRNQATIDLTRLPEDAEATQSVVQATLTEGAIGYRQFAVISGQKAMAVLRMSDGSYPPFGAEVRNEHDQQVGLVDDDGNVYLAGVKAGEHMRVSWNGEPHCEISLPDPLPADLFNGLLLPCKQQGAVMPAAPSDIKPMIQEQTQQVTPGAEPMAISANQ

SEQ ID NO: 17474 - protein, 826 aa, Escherichia coli
MLRMTPLASAIVALLLGIEAYAAEETFDTHFMIGGMKDQQVANIRLDDNQPLPGQYDIDIYVNKQWRGKYEIIVKDNPQETCLSREIIKRLGINTDNFASGKQCLTFEQLVHGGSYTWDIGVFRLDFSVPQAWVEELESGYVPPENWERGINAFYTSYYVSQYYSDYKASGNSKSTYVRFNSGLNLLGWQLHSDASFSKTNSNPGVWKSNTLYLERGFAQLLGTLRVGDMYTSSDIFDSVRFSGVRLFRDMQMLPNSKQNFTPRVQGIAQSNALVTIEQNGFVVYQKEVPPGPFAITDLQLAGGGADLDVSVKEADGSVTTYLVPYAAVPNMLQPGVSKYDFAAGRSHIEGASKQSDFVQAGYQYGFNNLLTLYGGSMVANNYYAFTLGTGWNTRIGAISVDATKSHSKQDNGDVFDGQSYQIAYNKFVSQTSTRFGLAAWRYSSRDYRTFNDHVWANNKDNYRRDENDIYDIADYYQNDFGRKNSFSANMSQSLPEGWGSVSLSTLWRDYWGRSGSSKDYQLSYSNNLRRISYTLAASQAYDENHHEEKRFNIFISIPFDWGDDVTTPRRQIYMSNSTTFDDQGFASNNTGLSGTVGSRDQFNYGVNLSHQHQGNETTAGANLTWNAPVATVNGSYSQSSTYRQAGASLSGGIVAWSGGVNLANRLSETFAVMNAPGIKDAYVNGQKYRTTNRNGVVVYDGMTPYRENHLMLDVSQSDSEAELRGNRNIAAPFRGAVVLVNFDTDQRKPWFIKALRADGQPLTFGYEVNDIHGHNIGVVGQGSQLFIRTNDVPPSVNVAIDKQQGLSCTITFGKEIDENRNYICQ

SEQ ID NO: 17475 - protein, 840 aa, Escherichia coli
MNNKNTFTGDRLSHAIKNALSGVVCSLLFVLPVHAVEFNVDMIDAEDRENIDISRFEKKGYITPGKYLVRVQINKNILPKALILEWVKADNESGSLLCLTRENLINFGLHTDFIESLQSTAGSECLDLSQRQELSARLDKSTMILSLSIPQAWLKYQATNWTPPEFWDDGITGFILDYNVYASQYDPHHGDSTQNISSYGTLGFNLGAWRLRSDYQYNQNFADGRSVNHDSEFARTYLFRPIPSWSSKFTMGQYDLSSNLYDTFHFTGASLESDESMLPPDLQGYAPQITGIAQTNAKVTVAQNGRVLYQTTVAPGPFTISDLGQSFQGQLDVTVEEEDGRTNTFQVGSASIPYLTRKGQVRYKTSLGKPTSVGHNDINNPFFWTAEASWGWLNNVSLYGGGMFTADDYQAITTGIGFNLNQFGSLSFDVTGADASLQQQHSDNLRGFSYRFNYAKHFESTGSQITFAGYRFSDKNYVSMNEYLNSRNGDESIDNEKESYVISLNQYFETLELNSYLNVTRNTYWDSPSNTNYSISVSKNFDIGDFKGISASLAVSRIRWDDDEENQYYFSFSLPLQQSRNISYSMQRTDGSNTSQMISWYDSSDRNNVWNISASATDDNIRDGEPTLRGSYQHYSPWGRLNINGSVQPNQYNSVTAGWYGSLTATRHGVALHDYSYGDNARMMVDTDGISGVEINSNRTVTNGLGIAVVPSLSNYTTSMLRVNNNDLPEGVDVENSVIRTTLTQGAIGYAKLNATTGYQIVGIIRQENGRFPPLGVNVTDKATGKDVGLVAEDGFVYLSGIQENSTLRLTWGDNSCEITPPNQSNISESAIILPCKTVN

SEQ ID NO: 17476 - protein, 871 aa, Escherichia coli
MHHVLLLPRFARLTFALGLATAVFPVEAEYYFNPRFLSNDLAESVDLSAFAKGREAPPGTYRVDIYLNDEFMTTRDVTFVADDNNADLTPCLSTDLLVSLGIKKSALLANKDHLAGKNVPDNNACTPLQDRLADASTEFDVGQQHLSLSVPQIYVGRMARGYVSPDLWEEGINAGLLNYSFNGNSINNRSNHNASKTNYAYLNLQSGINIGSWRLRDNSTWSYNSGSNNPSDSNKWQHINTSAERDIIPLRSRLTVGDSYTDSDIFESVNFRGLKINSTEAMLPDSQHGFAPVIHGIARGTAQVSVKQNGYDVYQTTVPPGPFTIDDINSAANGGDLQVTIKEADGSIQTLYVPYSSVPVLQRAGYTRYALALGEYRSGNNLQSSPKFIQGSVMHGLEGNWTPYGGMQIAEDYQAFNVGIGKDLGLLGAFSVDITQANTTLADDTRHSGQSVKSVYSKSFYQTGTNIQVAGYRYSTQGFYNLSDSAYSRMSGYTVKPPTVDTNEQIQFIDYFNLYYSKRGQEQISISQQLGNYGTTFFSASRQSYWNTSRSDQQISFGLNVPFGDITTSLNYSYSSNIWQNDRDHLLAFTLNVPFSHWMRTDSQSAFRNSNASYSMSNDLKGGMTNLSGVYGTLLPDNNLNYSVQVGNTRGGNASSGTSGYSSLNYRGAYGNTNVGYSRNGDSNQIYYGMSGGIIAHADGVTFGQPMGDTMVLVKAPGAENVKIENQTGIHTDWRGYAILPFATEYRENRVALNANSLADNVELDETVVTVIPTHGAIARATFNAQIGGKVLMTLKYGNKPVPFGAIVTHGDNNNGSIVAENGQVYLTGLPQSGKLQVSWGNNANAKCVVNYKLPEVSPGNLLSQQTAVCR

SEQ ID NO: 17477 - protein, 266 aa, Escherichia coli
MAKSLFRALVALSFLAPLWLNAAPRVITLSPANTELAFAAGITPVGVSSYSDYPPQAQKIEQVSTWQGMNLERIVALKPDLVIAWRGGNAERQVDQLASLGIKVMWVDATSIEQIANALRQLAPWSPQPDKAEQAAQSLLDQYAQLKAQYADKPKKRVFLQFGINPPFTSGKESIQNQVLEVCGGENIFKDSRVPWPQVSREQVLARAPQAIIITGGPDQIPKIKQYWGEQLKIPVIPLTSDWFERASPRIILAAQQLCNALSQVD

SEQ ID NO: 17478 - protein, 878 aa, Escherichia coli
MSYLNLRLYQRNTQCLHIRKHRLAGFFVRFFVACAFAAQAPLSSAELYFNPRFLADDPQAVADLSRFENGQELPPGTYRVDIYLNNGYMATRDVTFNTGDSEQGIVPCLTRAQLAGMGLNTASVSGMNLLADDACVPLTSMIHDATAQLDVGQQRLNLTIPQAFMSNRARGYIPPELWDPGINAGLLNYNFSGNSVQNRIGGNSHYAYLNLQSGLNIGAWRLRDNTTWSYNSSDSSSGSKNKWQHINTWLERDIIPLRSRLTLGDGYTQGDIFDGINFRGAQLASDDNMLPDSQRGFAPVIHGIARGTAQVTIKQNGYDIYNSTVPPGPFTINDIYAAGNSGDLQVTIKEADGSTQIFTVPYSSVPLLQREGHTRYSITAGEYRSGNAQQEKPRFFQSTLLHGLPAGWTIYGGTQLADRYRAFNFGIGKNMGALGALSVDMTQANSTLPDDSQHDGQSVRFLYNKSLNESGTNIQLVGYRYSTSGYFNFADTTYSRMNGYNIETQDGVIQVKPKFTDYYNLAYNKRGKLQLTVTQQLGRSSTLYLSGSHQTYWGTSNVDEQFQAGLNTAFEDINWTLSYSLTKNAWQKGRDQMLALNVNIPFSHWLRSDSKSQWRHASASYSMSHDLNGRMTNLAGVYGTLLEDNNLSYSVQTGYAGGGDGNSGSTGYATLNYRGGYGNANIGYSHSDDIKQLYYGVSGGVLAHANGVTLGQPLNDTVVLVKAAGAKDAKVENQTGVRTDWRGYAVLPYATEYRENRVALDTNTLADNVDLDNAVANVVPTRGAIVRAEFKARVGIKLLMTLTHNNKPLPFGAMVTSESSQSSGIVADNGQVYLSGMPLAGKVQVKWGEEENAHCVANYQLPPESQQQLLTQLSAECR

SEQ ID NO: 17479 - protein, 819 aa, Escherichia coli
MDTVNIYRLSFVSCLVMAMPSAMAVEFNLNVLDKSMRERIDISLLKEKGVIAPGEYFVSVAVNNNQISNGQKINWQKKGDTTIPCINDLLVDKFGLKPEVRQSLPLINQCVDFSSRPEMLFNFDQASQQLNITIPQAWLAWQSDNWTPPSTWKEGVPGVLMDYNLFASSYRPQDGSNSTNLNAYGTAGINAGAWRLRSDYQLNQTDSDDNHEQSGEISRTYLFRPLPQLGSKLTLGETDFSSNIFDGFSYTGAALASDDRMLPWELRGYAPQISGIAQTNATVTISQSGRVIYQKKVPPGPFIIDDLNQSVQGTLDVKVTEEDGRVNNFQVSAASTPFLTRQGQVRYKLAAGQPRTSMSHQTENETFFSNEVSWGMLSNTSLYGGLLISGDDYHSAAMGIGQNMLWLGALSFDVTWASSQFDTQQDERGLSYRFNYSKQVDATNSTISLAAYRFSDRHFHSYANYLDHKYNDNDAQDEKQTISLSVGQPITPLNLNLYANLLHQTWWNADASTTANITAGFNVDIGNWRDISISTSFNTTHYEDKDRDNQIYLSISLPFGNGGRVGYDMQNSSHSTTHRMSWNDTLDERNSWGMSAGLQSDRPDNGAQVSGNYQHLSSAGEWDLSGTYAANDYSSVSSSWSGSFTATQYGAAFHRRSSTNEPRLMVSTDGVADIPVQGNLDYTNHFGIAVVPLVSSYQPSTVAVNMNDLPDGVTVTENVIKETWIEGAIGYKSLASRSGKDINVIIRNASGQFPPLGADIRQDGSSISVGMVGEEGHAWLSGVAENQKFTVVWGDSQRCSIHLPEHMEDTANRLILPCH

SEQ ID NO: 17480 - protein, 207 aa, Escherichia coli; identical to SEQ ID NO: 2211

SEQ ID NO: 17481 - protein, 785 aa, Escherichia coli
MEGEQEVAIYVNDEFYSRNTLFFKNTLDKGLLPEFTPGFFDELLSGDFLVSEEDKTISSSDFLKKVPYSDINFNQGMSRVNISIPQAYLGDGAKLISSPDTWEYGGPAFLLDYNISGNRNDSGNYDSRSLYISSQMGVNLMKWRLRTSSSYSNYKTNSVWGGARSEQNSFYNTYAERDISSLRAILRLGEVSTAGLILDSVPFRGVKLSSSDDMLGMRLRNYTPTVRGMASSQAVVTITQNGRQVYQTNVPAGPFELNDFYLSGYSGDMLVTVREADGSEHSFLQPYSTLPEMKREGVSGFEVSVGRYDNNGAEHYYDAESFVYGNWSRGFARGVTFFAETLQAEKYQSLGGGSTLSLGRLGAASADISLSRADKYGDIRIGQSYGFKYSKSQIETGTTVTLATYRYSTENFYTFRDFVSKTDTARYIWENKLKSRMTFSLSQSLGEYGYLSANASQQDYWNSREVSRNYSLTHSFSWNDIYFSTTLSMDDQRGRETGHLSNKQAGIYASVPLSKLLPRTDPTSSSLTWSTSHADHKVRNSVTLDGKVPESDVRYRVGGSWGNGTTEGSRMASVSWTGDHASTSLGYTRVGKYRTLDYSMSGAAVMYPWGIAVGNSSVTGDGAIVVETPGAKGVRTSTGYKTSWLGTALISSPQKYTENRINLYPDGLPSDTVLGETSKTAVPAKGAVVVLDYTVFRGSQVVFTLRQTDGNPLPFGTVITLDGVSRGKENSGIVGEEGRVYMAGIPEKGTLTASWGLNKTCSIPFRINQHKAEAVIREVQGVCRV

SEQ ID NO: 17482 - protein, 161 aa, Escherichia coli; identical to SEQ ID NO: 2582

SEQ ID NO: 17483 - protein, 243 aa, Escherichia coli; identical to SEQ ID NO: 3432

SEQ ID NO: 17484 - protein, 432 aa, Escherichia coli; identical to SEQ ID NO: 2026

SEQ ID NO: 17485 - protein, 230 aa, Escherichia coli
MMTKIKLLMPIIFYLIISASAHAAGGIALGATRIIYPADAKQTAVWIRNSHTNERFLVNSWIENSSGVKEKSFIITPPLFVSEPKSENTLRIIYTGPPLAADRESLFWMNVKTIPSVDKNALNGRNVLQLAILSRMKLFLRPIQLQELPAEAPDTLKFSRSGNYINVHNPSPFYVTLVNLQVGSQKLGNAMAAPRVNSQIPLPSGVQGKLKFQTVNDYGSVTPVREVNLN

SEQ ID NO: 17486 - protein, 221 aa, Escherichia coli
MKNYLWLVALLPLLSGCESQAILVKKDDAYFAPPKTEAPPPADGRAGGVFETGYNWSLTADRRAYRVGDILTVILEESTQSSKQAKTNFGKSNSVDITAPTVFGHTKNNLSGSIDANRDFDGSATSQQQNSLRGEITVSVHAVQPNGILEIRGEKWLTLNQGDEYIRLSGLVRADDIQNDNSVSSQRIADARISYAGRGALSDANAAGWLTRLFNHPLFPI

SEQ ID NO: 17487 - protein, 241 aa, Escherichia coli; identical to SEQ ID NO: 2922

SEQ ID NO: 17488 - protein, 331 aa, Escherichia coli
MKKPVVIGLAVVVLAAVVAGGYWWYQSRQDNGLTLYGNVDIRTVNLSFRVGGRVESLAVDEGDAIKAGQVLGELDHKPYEIALMQAKAGVSVAQAQYDLMLAGYRDEEIAQAAAAVKQAQAAYDYAQNFYNRQQGLWKSRTISANDLENARSSRDQAQATLKSAQDKLRQYRSGNREQDIAQAKASLEQAQAQLAQAELNLQDSTLVAPSDGTLLTRAVEPGTVLNEGGTVFTVSLTRPVWVRAYVDERNLDQAQPGRKVLLYTDGRPDKPYHGQIGFVSPTAEFTPKTVETPDLRTDLVYRLRIVVTDADDALRQGMPVTVQFGNEAGHE

SEQ ID NO: 17489 - protein, 274 aa, Escherichia coli
MNKTAIALLALLASSASLAATPWQKITQPVPGSAQSIGSFSNGCIVGADTLPIQSEHYQVMRTDQRRYFGHPDLVMFIQRLSSQVSNLGMGTVLIGDMGMPAGGRFNGGHASHQTGLDVDIFLQLPKKRWTSAQLLRPQALDLVSRDGKHVVPTLWKPEIFSLIKLAAQDKDVTRIFVNPAIKQQLCLDAGTDRDWLRKVRPWFQHRAHMHVRLRCPADSLECEDQPLPPPGDGCGAELQSWFEPPKPGTTKPEKKTPPPLPPSCQALLDEHVI

SEQ ID NO: 17490 - protein, 162 aa, Escherichia coli
MKTILPAVLFAAFATTSAWAAESVQPLEKIAPYPQAEKGMKRQVIQLTPQEDESTLKVELLIGQTLEVDCNLHRLGGKLESKTLEGWGYDYYVFDKVSSPVSTMMACPDGKKEKKFVTAYLGDAGMLRYNSKLPIVVYTPDNVDVKYRIWKAEEKIDNAVVL

SEQ ID NO: 17491 - protein, 221 aa, Escherichia coli
MLLSAFLFRPALTYAGVVIGGTRVVYASNNAGKSISVFSKEEKIPYLIQAWVDPFNKDDKTKAPFIVIPPVSRLEPAQEKILRIVHTKGLSLPEDRESVFWLNIKNIPPSASNKEANSLEIAVKTRIKLFWRPASIRMIPENAAPKVKWHREGRNLIAENPNPIHISVMDVIVDGHDVPLNMIRPFETLTLPLPANSSGSQMTWRFINDYGAISEPIKQAL

SEQ ID NO: 17492 - protein, 412 aa, Escherichia coli
MKQWIAALLLMLIPSVQAAKPQKVTLMVDDVPVAQVLQALAEQEKLNLVVSPDVSGTVSLHLTDVPWKQALQTVVKSAGLITRQEGNILSVHSVAWQNDNIARQEAEQARVQASLPLENRSITLQYADAGELAKAGEKLLSAKGSMTVDKRTNRLLLRDNKAALSALEQWVAQMDLPVGQVELSAHIVTINEKSLRELGVKWTLADAQQAGGVGQVTTLGSDLSVATATTHVGFNIGRINGRLLDLELSALEQKQQLDIIASPRLLASHLQPASIKQGSEIPYQVSSGESGATSVEFKEAVLGMEVTPTVLQKGRIRLKLHISQNVPGQVLQQADGEVLAIDKQEIETQVEVKSGETLALGGIFTRKNKSGQDSVPLLGDIPWFGQLFRHDGKEDERRELVVFITPRLVSSE

SEQ ID NO: 17493 - protein, 565 aa, Escherichia coli
MKATAPPRPQKIALIPACVLLCFAALAAQAEETPVTPQPPDILLGPLFNDVQNAKLFPDQKTFADAVPNSDPLMILADYRMQQNQSGFDLRHFVNVNFTLPKEGEKYVPPEGQSLREHIDGLWPVLTRSTENTEKWDSLLPLPEPYVVPGGRFREVYYWDSYFTMLGLAESGHWDKVADMVTNFAHEIDTYGHIPNGNRSYYLSRSQPPFFALMVELLAQHDGDVALKQYLPQMQKEYAYWMDGVENLQAGQQEKRVVKLQDGTLLNRYWDDRDTPRPESWVEDIATAKSNPNRPATEIYRDLRSAAASGWDFSSRWMDNPQQLNTLRTTSIVPVDLNSLMFKMEKILARASKAAGDNAMANQYETLANARQKGIEKYLWNDQQGWYADYDLKSHKVRNQLTAAALFPLYVNAAAKDRASKMATATKTHLLQPGGLNTTSVKSGQQWDAPNGWAPLQWVAKEGLQNYGQKEVAMDISWHFLTNVQHTYDREKKLVEKYDVSTTGTGGGGGEYPLQDGFGWTNGVTLKMLDLICPKEQPCDNVPATRPLSESTTQPVKQKEAEPTP

SEQ ID NO: 17494 - protein, 700 aa, Escherichia coli
MKIFSVRQTVLPALLVLSPVVFAADEQTMIVSAAPQVVSELDTPAAVSVVDGEEMRLATPRINLSESLTGVPGLQVQNRQNYAQDLQLSIRGFGSRSTYGIRGIRLYVDGIPATMPDGQGQTSNIDLSSVQNVEVLRGPFSALYGNASGGVMNVTTQTGQQPPTIEASSYYGSFGSWRYGLKATGATGDGTQPGDVDYTVSTTRFTTHGYRDHSGAQKNLANAKLGVRIDDASKLSLIFNSVDIKADDPGGLTEAEWKANPQQAPRAEQYDTRKTIKQTQAGLRYERSLSSQDDMSVMMYAGERETTQYQSIPMAPQLNPSHAGGVITLQRHYQGIDSRWTHRGELGVPVTFTTGLNYENMSENRKGYNNFRLNSGVPEYGQKGELRRDERNLMWNVDPYLQTQWQLTEKLSLDAGVRYSSVLFDSNDHYVTPGNGDDSGDASYHKWLPVGSLKYAMTDAWNIYLAAGRGFETPTINELSYRADGQSGMNFGLKPSTNDTIEIGSKTRIGDGLLSLALFQTDTDDEIVVDSSSGGRTTYKNAGKTRRQGAELAWDQRFAGDFRIKASWTWLDATYRSNVCNDQDCNGNRMPGIARNMGFASIGYVPEDGWYAGTEARYMGDIMADDENTAKAPSYTLVGLFTGYKYNYHNLTVDLFGRVDNLFDKEYVGSVIVNESNGRYYEPAPGRNYGIGVNVAWRFE

SEQ ID NO: 17495 - protein, 729 aa, Escherichia coli
MLSTQFNRDNQHQTTSKPSLLAACIALALLPSAAFAAPATEETVIVEGSATTPVDDENDYSVTSTSAGTKMQMTQRDIPQSVTIVSQQRMEDQQLQTLGEVMENTLGISKSQADSDRALYYSRGFQIDNYMVDGIPTYFESRWNLGDALSDMALFERVEVVRGATGLMTGTGNPSAAINMVRKHATSREFKGDVSAEYGSWNKERYVADLQSPLTEDGKIRARIVGGYQNNDSWLDRYNSEKTFFSGIVDADLGDLTTLSAGYEYQRIDVNSPTWGGLPRWNTDGSSNSYDRARSTAPDWAYNDKEINKVFMTLKQRFADTWQATLNATHSEVEFDSKMMYVDAYVNKADGMLVGPYSNYGPGFDYVGGTGWNSGKRKVDALDLFADGSYELFGRQHNLMFGGSYSKQNNRYFSSWANIFPDEIGSFYNFNGNFPQTDWSPQNLAQDDTTHMKSLYAVTRVTLADPLHLILGARYTNWRVDTLTYSMEKNHTTPYAGLVFDINDNWSTYASYTSIFQPQNDRDSSGKYLAPITGNNYELGLKSDWMNSRLTTTLAIFRIEQDNVAQSTGTPIPGSNGETAYKAVDGTVSKGVEFELNGAITDNWQLTFGATRYIAEDNEGNAVNPNLPRTTVKMFTSYRLPVMPELTVGGGVNWQNRVYTDTVTPYGTFRAEQGSYALVDLFTRYQVTKNFSLQGNVNNLFDKTYDTNVEGSIVYGAPRNFSITGTYQF

SEQ ID NO: 17496 - protein, 232 aa, Escherichia coli; identical to SEQ ID NO: 2087

SEQ ID NO: 17497 - protein, 678 aa, Escherichia coli
MVPSTFSRLKAARCLPVVLAALIFAGCGTHTPDQSTAYMQGTAQADSAFYLQQMQQSADDTRINWQLLAIRALVKEGKTGQAVELFNQLPQELNDYQRREKTLLAVEIKLAQKDFAGAQTLLAKITPADLDQYQQARYWQAKIDASQGRPSIDLLRALIAQEPLLGAKEKQQNIDATWQALSSMTQDQANTLVINADENILQGWLDLQRVWFDNRNDPDMMKAGIADWQKRYPNNPGAKMLPTQLVNVKAFKPASTNKIALLLPLNGQAAVFGRTIQQGFEAAKNIGTQPVAAQATAAPIADVAEQPQPQTVDGVASPAQASVSDLTGEETAAQPVPVSAPAASTAAVSAPANPSAELKIYDTSSQPLSQILNQVQQDGASIVVGPLLKNNVEELLKSNTPLNVLALNQPENIENRVNICYFALSPEDEARDAARHIRDQGKQAPLVLIPRSSLGDRVANAFAQEWQKLGGGTVLQQKFGSASELRAGVNGGSGIALTGSPITPRETTDPGMTTNNPTLQTTPTDDQFTNNGGRVDAVYIVATPGEIAFIKPMIAMRNGSQSGATLYASSRSAQGTAGPDFRLEMEGLQYSEIPMLAGGNLPLMQQALSAVNNDYSLARMYAMGVDAWSLANHFSQMRQVQGFEINGNTGSLTANPDCVINRKLSWLQYQQGQVVPAS

SEQ ID NO: 17498 - protein, 191 aa, Escherichia coli
MKKSLLGLTFASMMFSAGSAVAADYKIDKEGQHAFVNFRIQHLGYSWLYGTFKDFDGTFTFDEKNPAADKVNVTINTTSVDTNHAERDKHLRSADFLNTAKYPQATFTSTSVKKDGDELDITGDLTLNGVTKPVTLEAKLIGQGDDPWGGKRAGFEAEGKIKLKDFNIKTDLGPASQEVDLIISVEGVQQK

SEQ ID NO: 17499 - protein, 265 aa, Escherichia coli
MIYKFSSMKNITFIFFILLASPLYANGDKLYRADSRPPDEIKRSGGLMPRGHNEYFDRGTQMNINLYDHARGTQTGFVRYDDGYVSTSLSLRSAHLAGQSILSGYSTYYIYVIATAPNMFNVNDVLGVYSPHPYEQEVSALGGIPYSQIYGWYRVNFGVIDERLHRNREYRDRYYRNLNIAPAEDGYRLAGFPPDHQAWREEPWIHHAPQGCGNSSRTITGDTCNEETQNLSTIYLRKYQSKVKRQIFSDYQSEVDIYNRIRDEL

SEQ ID NO: 17500 - protein, 760 aa, Escherichia coli
MENNRNFPARQFHSLTFFAGLCIGITPVAQALAAEGQANADDTLVVEASTPSLYAPQQSADPKFSRPVADTTRTMTVISEQVIKDQGATNLTDALKNVPGVGAFFAGENGNSTTGDAIYMRGADTSNSIYIDGIRDIGSVSRDTFNTEQVEVIKGPSGTDYGRSAPTGSINMISKQPRNDSGIDASASIGSAWFRRGTLDVNQVIGDTTALRLNVMGEKTHDAGRDKVKNERYGVAPSVAFGLGTANRLYLNYLHVTQHNTPDGGIPTIGLPGYSAPSAGTATLNHSGKVDTHNFYGTDSDYDDSTTDTATMRFEHDINDNTTIRNTTRWSRVKQDYLMTAIMGGASNITQPTSDVNSWTWSRTANTKDVSNKILTNQTNLTSTFYTGSIGHDVSTGVEFTRETQTNYGVNPVTLPAVNIYHPDSSIHPGGLTRNGANANGQTDTFAIYAFDTLQITRDFELNGGIRLDNYHTEYDSATACGGSGRGAVTCPAGVAKGSPVTTVDTAKSGNLVNWKAGALYHLTENGNVYINYAVSQQPPGGNNFALAQSGSGNSANRTDFKPQKANTSEIGTKWQVLDKRLLLTAALFRTDIENEVEQNDDGTYSQYGKKRVEGYEISVAGNITPAWQVIGGYTQQKATIKNGKDVAQDGSSSLPYTPEHAFTLWSQYQATDDISVGAGARYIGSMHKGSDGAVGTPAFTEGYWVADAKLGYRVNRNLDFQLNVYNLFDTDYVASINKSGYRYHPGEPRTFLLTANMHF

SEQ ID NO: 17501 - protein, 233 aa, Escherichia coli
MRYQYSVLFVFLFSGVVQAAESFGPRESRLLFEEKKGNTFYRIDNSDKKLPWLVQAWVEDASEKKTTALTATPMVFRVEPSSVFTVRVVKTGALPEDRETLFWAVSNSLPGGVSTKQDNEEGKISAKLSLAYRFKVPLIYRPAALDNFRQEPEKLEWTYNGKDGLKLYNPTRYVVQLHNVTANGREFKGKGVSFILLPMSGKNVSAAVNKGTRIKYGVINDYGAVKEYDGVVK

SEQ ID NO: 17502 - protein, 203 aa, Escherichia coli; identical to SEQ ID NO: 2201

SEQ ID NO: 17503 - protein, 366 aa, Escherichia coli
MKVKVLSLLVPALLVAGAANAAEVYNKDGNKLDLYGKVDGLHYFSDNKSEDGDQTYVRLGFKGETQVTDQLTGYGQWEYQIQGNTSEDNKENSWTRVAFAGLKFQDVGSFDYGRNYGVVYDVTSWTDVLPEFGGDTYGSDNFMQQRGNGFATYRNTDFFGLVDGLNFAVQYQGKNGSVSGEGMTNNGRSALRQNGDGVGGSITYDYEGFGIGAAVSSSKRTDDQNSIAYIGNGDRAETYTGGLKYDANNIYLAAQYTQTYNATRVGTNNWGWANKAQNFEVVAQYQFDFGLRPSLAYLQSKGKNLGRGYDDEDLLKYVDVGATYYFNKNMSTYVDYKINLLDDNQFTRAAGINTDDIVALGLVYQF

SEQ ID NO: 17504 - protein, 362 aa, Escherichia coli; identical to SEQ ID NO: 2827

SEQ ID NO: 17505 - protein, 246 aa, Escherichia coli
MKSLLTATGMICLLGICNFAQATVSPDRTRIIFNASNKSATVRLTNQSKIDPYLAQSWIEDASGKKTRDYISTLPPMERIEANEQVQIRLMALASLNNLPQDRETLFYYNVREIPPRAKEQNVMQIAMQSRLKLFWRPKAIELKEGEMVPLQKVTITRTAAGLTLNNPTPYHITVGYIGTNGKTLMPGANSIMVAPFASATQHLNNLPSIFQLGFVADYGGLEMFKVVCNSVQSLCQSTPAKKGKI

SEQ ID NO: 17506 - protein, 614 aa, Escherichia coli
MIKKASLLTACSVTAFSAWAQDTSPDTLVVTANRFEQPRSTVLAPTTVVTRQDIDRWQSTSVNDVLRRLPGVDITQNGGSGQLSSIFIRGTNASHVLVLIDGVRLNLAGVSGSADLSQFPIALVQRVEYIRGPRSAVYGSDAIGGVVNIITTRDQPGTEISAGWGSNNYQNYDVSTQQQLGDKTRVTLLGDYAHTHGYDVVAYGNTGTQAQPDNDGFLSKTLYGALEHNFTDVWSGFVRGYGYDNRTNYDAYYSPGSPLLDTRKLYSQSWDAGLRYNGELIKSQLITSYSHSKDYNYDPHYGRYDSSATLDEMKQYTVQWANNVIVGHGSIGAGVDWQKQTTTPGTGYVEDGYDQRNTGIYLTGLQQVGDFTFEGAARSDDNSQFGRHGTWQTSAGWEFIEGYRFIASYGTSYKAPNLGQLYGFYGNPNLEPEKSKQWEGAFEGLTAGVNWRISGYRNDVSDLIDYDDHTLKYYNEGKARIKGVEATANFDTGPLTHTVSYDYVDARNAITDTPLLRRAKQQVKYQLDWQLYDFDWGITYQYLGTRYDKDYSSWPYQTVKMGGVSLWDLAVAYPVTSHLTVRGKIANLFDKDYETVYGYQTAGREYTLSGSYTF

SEQ ID NO: 17507 - protein, 774 aa, Escherichia coli
MTPLRVFRKTTPLVNTIRLSLLPLAGLSFSAFAAQVNIAPGSLDKALNQYAAHSGFTLSVDASLTRGKQSNGLHGDYDVESGLQQLLDGSGLQVKPLGNNSWTLEPAPAPKEDALTVVGDWLGDARENDVFEHAGARDVIRREDFAKTGATTMREVLNRIPGVSAPENNGTGSHDLAMNFGIRGLNPRLASRSTVLMDGIPVPFAPYGQPQLSLAPVSLGNMDAIDVVRGGGAVRYGPQSVGGVVNFVTRAIPQDFGIEAGVEGQLSPTSSQNNPKETHNLMVGGTADNGFGTALLYSGTRGSDWREHSATRIDDLMLKSKYAPDEVHTFNSLLQYYDGEADMPGGLSRADYDADRWQSTRPYDRFWGRRKLASLGYQFQPDSQHKFNIQGFYTQTLRSGYLEQGKRITLSPRNYWVRGIEPRYSQIFMIGPSAHEVGVGYRYLNESTHEMRYYTATSSGQLPSGSSPYDRDTRSGTEAHAWYLDDKIDIGNWTITPGMRFEHIESYQNNAITGTHEEVSYNAPLPALNVLYHLTDSWNLYANTEGSFGTVQYSQIGKAVQSGNVEPEKARTWELGTRYDDGALTAEMGLFLINFNNQYDSNQTNDTVTARGKTRHTGLETQARYDLGTLTPTLDNVSIYASYAYVNAEIREKGDTYGNLVPFSPKHKGTLGVDYKPGNWTFNLNGDFQSSQFADNANTVKESADGSTGRIPGFMLWGARVAYDFGPQMADLNLAFGVKNIFDQDYFIRSYDDNNKGIYAGQPRTLYMQGSLKF

SEQ ID NO: 17508 - protein, 656 aa, Escherichia coli
MRLKKRYLCTALSLAFTQQAVAAQESDTLTVWSSPVSSTTTTVLDQPTMKALDKQNVAQALSVVPGVVLQKSGSRNEEQVKVRGFDSRQVPVYFDGVPIYVPYDGNLDLARILTNNLGAVEVSKGYSSLLQGPNQMGGAINITTQKPTKPLEASLGYRQGWSRSQDNAYDMHASFAASSDLGYLQVSGSQLKQDFLGLPHGVNNDIAGKHGKMINSSADDKRGIVKLGFTPRENDEYTLTYIKQDGEKDNPPYSGNSGQKSRYWQWPEYDKESFYYQGTTQLNDRFTLKSRLYRDTFENTLMMYNSLADLKNKKGSYSHYSDYSDGAGLQLAADVRENDLLSFAVNWKDDVHREKGAPHAAYDRYEDRTWSLASEYQWAAADNVDVVAGISYDWRDSVEAKKHEKDGSITHYDDNNQSAFNWQVMGKYHFANEDTLALSYYDRTRFPTLKERYTTSKPAYNQIAIVNPQLKPERARGVDLTRNGAFTHDWGFEVSVYYNRVSDAILSHNIDADTIQNQNSGTVDYSGLDAGIKGKISNILDVGLSYALIHADAKRKDIGKITDLPTQTMTAWMTLKPWEPLSVTLSEEARSSSYSNSDGSQKAAGFAVTHIRADYTLGHGFSVNASVNNLFDTKYAYSEGFIEEGRNFWAGIEYTF

SEQ ID NO: 17509 - protein, 746 aa, Escherichia coli
MNKKIHSLALLVNLGIYGVAQAQEPTDTPVSHDDTIVVTAAEQNLQAPGVSTITADEIRKNPVARDVSEIIRTMPGVNLTGNSTSGQRGNNRQIDIRGMGPENTLILIDGKPVSSRNSVRQGWRGERDTRGDTSWVPPEMIERIEVLRGPAAARYGNGAAGGVVNIITKKGSGEWHGSWDAYFNAPEHKEEGATKRTNFSLTGPLGDEFSFRLYGNLDKTQADAWDINQGHQSARAGTYATTLPAGREGVINKDINGVVRWDFAPMQSLELEAGYSRQGNLYAGDTQNTNSDSYTRSKYGDETNRLYRQNYSLTWNGGWDNGVTTSNWVQYEHTRNSRIPEGLAGGTEGKFNEKATQDFVDIDLDDVMLHSEVNLPIDFLVNQTLTLGTEWNQQRMKDLSSNTQALTGTNTGGAIDGVSATDRSPYSKAEIFSLFAENNMELTDSTIVTPGLRFDHHSIVGNNWSPALNISQGLGDDFTLKMGIARAYKAPSLYQTNPNYILYSKGQGCYASAGGCYLQGNDDLKAETSINKEIGLEFKRDGWLAGVTWFRNDYRNKIEAGYVAVGQNAVGTDLYQWDNVPKAVVEGLEGSLNVPVSETVMWTNNITYMLKSENKTTGDRLSIIPEYTLNSTLSWQAREDLSMQTTFTWYGKQQPKKYNYKGQPAVGPETKEISPYSIVGLSATWDVTKNVSLTGGVDNLFDKRLWRAGNAQTTGDLAGANYIAGAGAYTYNEPGRTWYMSVNTHF

SEQ ID NO: 17510 - protein, 224 aa, Escherichia coli
MKGLLALLISSMVLPAHAGIVIYGTRIIYPAENKEVMVQLMNQGNRSSLLQAWIDDGDTSLPPEKIQVPFMLTPPVAKIGANSGQQVKIKIMSNKLPTNKESIFYLNVLDIPPNSPEQEGKNALKFAMQNRIKLFYRPAGIAPVNKATFKKLLVNRSGNGLVIKNDSANWVTISDVKANNVKVNYETIMIAPLESQSINVKSNNANNWYLTIIDDHGNYISDKI

SEQ ID NO: 17511 - protein, 478 aa, Escherichia coli
MTRIKINARRIFSLLIPFFFFTSVHAEQTAAPAKPVTVEAKNETFAPQHPDQYLSWKATSEQSERVDALAEDPRLVILWAGYPFSRDYNKPRGHAFAVTDVRETLRTGAPKNAEDGPLPMACWSCKSPDVARLIQKDGEDGYFHGKWARGGPEIVNNLGCADCHNTASPEFAKGKPELTLSRPYAARAMEAIGKPFEKAGRFDQQSMVCGQCHVEYYFDGKNKAVKFPWDDGMKVENMEQYYDKIAFSDWTNSLSKTPMLKAQHPEYETWTVGIHGKNNVTCIDCHMPKVQNAEGKLYTDHKIGNPFDNFAQTCANCHTQDKAALQKVVAERKQSINDLKIKVEDQLVHAHFEAKAALDAGATEAEMKPIQDDIRHAQWRWDLAIASHGIHMHAPEEGLRMLGTAMDKAADARTKLARLLATKGITHEIPIPDISTKEKAQQAIGLNMEQIKAEKQDFIKTVIPQWEEQARKNGLLSQ

SEQ ID NO: 17512 - protein, 73 aa, Escherichia coli
MAGKREMVIITFKSGATFQVEVPGSQHIDSQKKAIERMKDTLRITYLTETKIDKLCVWNNKTPNSIAAISMEN

SEQ ID NO: 17513 - protein, 111 aa, Escherichia coli; identical to SEQ ID NO: 3419

SEQ ID NO: 17514 - protein, 213 aa, Escherichia coli
MIKMSRYALIAALAMFLAGCVGQREPAPVEEVKPAPEQPAEPQQPVPTVPSVPTIPQQPGPIEHEDQTAPPAPHIRYYDWNGAMQPMVSKMLGADGVTAGSVLLVDSVNNRTNGSLNAAEATETLRNALANNGKFTLVSAQQLSMAKQQLGLSPQDSLGTRSKAIGIARNVGAHYVLYSSASGNVNAPTLQMQLMLVQTGEIIWSGKGAVSQQ

SEQ ID NO: 17515 - protein, 246 aa, Escherichia coli
MFFNTKHTAALCFATCVAFSSSAIADIVISGTRVIYKSDQKSVSVRLENKGNNPLLVQSWLDTGDDNAEPGSITVPFTATPPVSRIDAKRGQTIKLMYTASSVLPKDRESVFWFNVLEVPPKPDAATATNQSLLQLAFRTRIKLFYRPEGLKGNPSDAPLALKWSWATAGGQTALQVTNPTPYYVSFSSGDLETSSKRYPLDVKMIAPFSNDVIKVNGMSGKSSSAKVHFYAINDFGGAIEGNATL

SEQ ID NO: 17516 - protein, 659 aa, Escherichia coli
MFRLNPFVRVGLCLSAISCAWPVLAVDDDGETMVVTASSVEQNLKDAPASISVITQEDLQRKPVQNLKDVLKEVPGVQLTNEGDNRKGVSIRGLDSSYTLILVDGKRVNSRNAVFRHNDFDLNWIPVDSIERIEVVRGPMSSLYGSDALGGVVNIITKKIGQKWAGTVTVDTTIQEHRDRGDTYNGQFFTSGPLIDGVLGMKAYGSLAKREKDDPQNSTTTDTGETPRIEGFSSRDGNVEFAWTPNQNHDFTAGYGFDRQDRDSDSLDKNRLERQNYSVSHNGRWDYGTSELKYYGEKVENKNPGNSSPITSESNTVDGKYTLPLTAINQFLTVGGEWRHDKLSDAVNLTGGSSSKTSASQYALFVEDEWRIFEPLALTTGVRMDDHETYGEHWSPRAYLVYNATDTVTVKGGWATAFKAPSLLQLSPDWTSNSCRGACKIVGSPDLKPETSESWELGLYYMGEDGWLEGVESSVTVFRNDVKDRISISRTSDVNAAPGYQNFVGFTADGVPVFSYYNVNKARIQGVETELKIPFNDEWKLSINYTYNDGRDVSNGENKPLSDLPFHTANGTLDWKPLALEDWSFYVSGHYTGQKRADSATAKTPGGYTIWNTGAAWQVTKDVKLRAGVLNLGDKDLSRDDYSYNEDGRRYFMAVDYRF

SEQ ID NO: 17517 - protein, 200 aa, Escherichia coli
MLAFCRSSLKSKKYIIILLALAAIAGLGTHAAWSSNGLPRIDNKTLARLAQQHTVVVLFRHAERCDRSANQCLSDKTGITVKGTQDARELGNAFSADIPDFDLYSSNTVRTIQSATWFSAGKKLTVDKRLLQCGNEIYSAIKDLQSKAPDKNIVIFTHNHCLTYIAKDKRDATFKPDYLDGLVMHVEKGKVYLDGEFVNH

SEQ ID NO: 17518 - protein, 121 aa, Escherichia coli; identical to SEQ ID NO: 3506

SEQ ID NO: 17519 - protein, 828 aa, Escherichia coli; identical to SEQ ID NO: 2388

SEQ ID NO: 17520 - protein, 567 aa, Escherichia coli
MKIKLRITIILISALCIFNGLLTPGAYAAAANGYVANKENLRSFFETVSSYAGKPTIVSKLAMKKQISGNFDLTEPYALIERLSAQMGLIWYDDGKAIYIYDSSEMRNALINLRKVSTNEFNNFLKKSGLYNSRYEIKGGGNGTFYVSGPPVYVDLVVNAAKLMEQNSDGIEIGRNKVGIIHLVNTFVNDRTYELRGEKIVIPGMAKVLSTLLNNNIKQSTGVNVLSEISSRQQLKNVSRMPPFPGAEEDDDLQVEKIISTAGAPETDDIQIIAYPDTNSLLVKGTVSQVDFIEKLVATLDIPKRHIELSLWIIDIDKTDLEQLGADWSGTIKIGSSLSASFNNSGSISTLDGTQFIATIQALAQKRRAAVVARPVVLTQENIPAIFDNNRTFYTKLVGERTAELDEVTYGTMISVLPRFASRNQIELLLNIEDGNEINSDKTNVDDLPQVGRTLISTIARVPQGKSLLIGGYTRDTNTYESRKIPILGSIPFIGKLFGYEGTNANNIVRVFLIEPREIDERMMNNANEAAVDARAITQQMAKNKEINDELLQKWIKTYLNREVVGG

SEQ ID NO: 17521 - protein, 784 aa, Escherichia coli; identical to SEQ ID NO: 2244

SEQ ID NO: 17522 - protein, 372 aa, Escherichia coli
MALMLFIPPIIYSQYRSYDSNNNSNTASYGRFNSGLNLFSWQLHSDASYSKPDDMKGTWQSNTLYLERGWSQILSTVQIGENYTSSLIFDSLRFSGIRLFRDMQMLPDSMQNFTPLVQSVAQSNGLITVSQNGYIIYQKEVPPGPFTIADLQLSGSGSDLDVSIKEADGSVRSFLVPYSSVPNMLQPGVSNFDFIAGRSKIYGVNNQEDFLEANYLYGLNNLVTLYGGTILTDNYNAITLGNGWNTPLGAISFDATRSSSKLNNDKIHEGTSYQVAYNKYLVQTTTRFSVAAWRYASQDYRTFSDHLYENDKHNHHSEYDDFYDIGRKNSLSANIMQPLSTGIKIALNDEQNLFCTITFKNVIDENKTYICQ

SEQ ID NO: 17523 - protein, 517 aa, Escherichia coli; identical to SEQ ID NO: 2462

SEQ ID NO: 17524 - protein, 446 aa, Escherichia coli; identical to SEQ ID NO: 3394

SEQ ID NO: 17525 - protein, 360 aa, Escherichia coli; identical to SEQ ID NO: 3354

SEQ ID NO: 17526 - protein, 122 aa, Escherichia coli; identical to SEQ ID NO: 2915

SEQ ID NO: 17527 - protein, 238 aa, Escherichia coli
MSVSYRFFLGFTFLLTAIQAQASVVLGGTRIVYPSNQNEVQITLKNKDVHARYLVQSWVSNIDGSKAPFLITPPVYKLEENRQTLLHVVFTGNKESLPQDRESLFLANIKSISAMPEELKDKNTLQFAMKVRLKLFWRPDSLSNSDALTAWEKLTFHKESGRLIVKNPTPFYISFNELTVSGESITAVEEKSEPGALSMMVGPFSENRFSLPAGAGSVVEWSVITDYGSSSGKRQQKL

SEQ ID NO: 17528 - protein, 72 aa, Escherichia coli; identical to SEQ ID NO: 2162

SEQ ID NO: 17529 - protein, 236 aa, Escherichia coli
MQTTRTPYSVSFMATVLLSLVFLCHSTIANAAVALGATRVIFPANQKQVLLPVTNNDPASVYLIQSWIENAGDQKDTQFVITPPLFSMQGKKENTLRIINATNHQLPSDRESLFWVNVKAIPAMEKDQKNANTLQLAIISRIKMFYRPTNLAMAPDQAPEMLRFRRSGSKLTLINPTPYFITVTNMKAGNNDLPNTMVPPKGEISVDIPHGASGDISFQTINDYGALTPRIKATMQ

SEQ ID NO: 17530 - protein, 250 aa, Escherichia coli
MYTLTRSATRAAPALALLVAATSFTTHASVTPDRTRLVFNEGDKSISVTLRNNDPKQPYLAQSWMEDEKGNKISSPLTVLPPVQRIDAMMNGQVKVQGMPDINKLPADRESMFYFNVREIPPKSNKPNTLQIALQTRIKLFWRPKALAKIDMREPWQHKVTLTRNGQAFTVNNPTPYYVIISNASTQKNGNPAAGFTPLVMPPKSSAPLNVKMDTVPVLTYVNDYGARLSLNFKCTGNNCQVDAEQSRKG

SEQ ID NO: 17531 - protein, 136 aa, Escherichia coli
MPNNLPHNKESLFYLNVIDIPPNNPQNAGKNKIKLALQNRIKLFWRPEGVAPVDKKSLSQLTIKKKDNAISINNETANWITITTIKAQNVKVNNESILLPPFSNNDITLKNNNASEYELTVVDDYGNNINSKIAAK

SEQ ID NO: 17532 - protein, 430 aa, Escherichia coli; identical to SEQ ID NO: 2617

SEQ ID NO: 17533 - protein, 686 aa, Escherichia coli
MFWRDITLSVWRKKTTGLKTKKRLLPLVLAAVLCSSPVWAEEATFTANFKDTDLKSFIETVGANLNKTIIMGPGVQGKVSIRTMTPLNERQYYQLFLNLLEAQGYAVVPMENDVLKVVKSSAAKVEPLPLVGEGSDNYAGDEMVTKVVPVRNVSVRELAPILRQMIDSAGSGNVVNYDPSNVIMLTGRASVVERLTEVIQRVDHAGNRTEEVIPLDNASASEIARVLESLTKNSGENQPATLKSQIVADERTNSVIVSGDPATRDKMRRLIRRLDSEMERSGNSQVFYLKYSKAEDLVDVLKQVSGTLTAAKEEAEGTVGSGREVVSIAASKHSNALIVTAPQDIMQSLQSVIEQLDIRRAQVHVEALIVEVAEGSNINFGVQWASKDAGLMQFANGTQIPIGTLGAAISAAKPQKGSTVISENGATIINPDTNGDLSTLAQLLSGFSGTAVGVVKGDWMALVQAVKNDSSSNVLSTPSITTLDNQEAFFMVGQDVPVLTGSTVGSNNSNPFNTVERKKVGIMLKVTPQINEGNAVQMVIEQEVSKVEGQTSLDVVFGERKLKTTVLANDGELIVLGGLMDDQAGESVAKVPLLGDIPLIGNLFKSTADKKEKRNLMVFIRPTILRDGMAADGVSQRKYNYMRAEQIYRDEQGLSLMPHTAQPVLPAQNQALPPEVRAFLNAGRTR

SEQ ID NO: 17534 - protein, 208 aa, Escherichia coli; identical to SEQ ID NO: 1948

SEQ ID NO: 17535 - protein, 518 aa, Escherichia coli
MKKLKINYLFIGILALLLAVALWPSIPWFGKADNRIAAIQARGELRVSTIHTPLTYNEINGKPFGLDYELAKQFAEYLGVKLKVTVRQNISQLFDDLDNGNADLLAAGLVYNSERVKNYQPGPTYYSVSQQLVYKVGQYRPRTLGNLTAEQLTIAPGHVVVNDLQTLKETKFPELSWKVDDKKGSAELMEDVIEGKLDYTIADSVAISLFQRVHPELAVALDITDEQPVTWFSRLDGDNTLSAALLDFFNEMNEDGTLARIEEKYLGHGADFDYVDTRTFLRAVDTVLPQLKPLFEKYAEEIDWRLLAAIAYQESHWDAQATSPTGVRGMMMLTKNTAQSLGITDRTDAEQSISGGVRYLQDMMSKVPESVPENERIWFALAAYNMGYAHMLDARALTAKTKGNPDSWADVKQRLPLLSQKPYYSKLTYGYARGHEAYAYVENIRKYQISLVGYLQEKEKQATEAAMQLAQDYPAVSPTELGKEKFPFLSFLSQSSSNYLTHSPSLLFSRKGSEEKQN

SEQ ID NO: 17536 - protein, 366 aa, Escherichia coli; identical to SEQ ID NO: 3360

SEQ ID NO: 17537 - protein, 551 aa, Escherichia coli; identical to SEQ ID NO: 2446

SEQ ID NO: 17538 - protein, 193 aa, Escherichia coli; identical to SEQ ID NO: 2252

SEQ ID NO: 17539 - protein, 747 aa, Escherichia coli
MARSKTAQPKHSLRKIAVVVATAVSGMSVYAQAAVEPKEDTITVTAAPAPQESAWGPAATIAARQSATGTKTDTPIQKVPQSISVVTAEEMALHQPKSVKEALSYTPGVSVGTRGASNTYDHLIIRGFAAEGQSQNNYLNGLKLQGNFYNDAVIDPYMLERAEIMRGPVSVLYGKSSPGGLLNMVSKRPTTEPLKEIQFKAGTDSLFQTGFDFSDALDDDGVYSYRLTGLARSANAQQKGAEEQRYAIAPAFTWRPDDKTNFTFLSYFQNEPETGYYGWLPKEGTVEPLPNGKRLPTDFNEGAKNNTYSRNEKMVGYSFDHEFNDTFTVRQNLRFAENKTSQNSVYGYGVCSDPANAYSKQCAALAPADKGHYLARKYVVDDEKLQNFSVDTQLQSKFATGDIDHTLLTGVDFMRMRNDINAWFGYDDSVPLLDLYNPVNTDFDFNAKDPANSGPYRILNKQKQTGVYVQDQAQWDKVLVTLGGRYDWADQESHNRVEGTTDKRDDKQFTWRGGVNYLFDNGVTPYFSYSESFEPSSQVGKDGNIFAPSKGKQYEVGVKYVPEDRPIVVTGAVYNLTKTNNLMADPEGSFFSVEGGEIRARGVEIEAKAALSASVNVVGSYTYTDAEYTTDTTYKGNTPAQVPKHMASLWADYTFFDGPLSGLTLGTGGRYTGSSYGDPANSFKVGSYTVVDALVRYDLARVGMAGSNVALHVNNLFDREYVASCFNTYGCFWGAERQVVATATFRF

SEQ ID NO: 17540 - protein, 397 aa, Escherichia coli; identical to SEQ ID NO: 8527

SEQ ID NO: 17541 - protein, 266 aa, Escherichia coli
MAKSLFRALVALSFLAPLWLNAAPRVITLSPANTELAFAAGITPVGVSSYSDYPPQAQKIEQVSTWQGMNLERIVALKPDLVIAWRGGNAERQVDQLASLGIKVMWVDATSIEQIANALRQLAPWSPQPDKAEQAAQSLLDQYAQLKAQYADKPKKRVFLQFGINPPFTSGKVSIQNQVLEVCGGENIFKDSRVPWPQVSREQVLARAPQAIVITGGPDQIPKIKQYWGEQLKIPVIPLTSDWFERASPRIILAAQQLCNALSQVD

SEQ ID NO: 17542 - protein, 826 aa, Escherichia coli
MLRMTPLASAIVALLLGIEAYAAEETFDTHFMIGGMKDQQVANIRLDDNQPLPGQYDIDIYVNKQWRGKYEIIVKDNPQETCLSREIIKRLGINTDNFASGKQCLTFEQLVQGGSYTWDIGVFRLDFSVPQAWVEELESGYVPPENWERGINAFYTSYYVSQYYSDYKASGNSKSTYVRFNSGLNLLGWQLHSDASFSKTNSNPGVWKSNTLYLERGFAQLLGTLRVGDMYTSSDIFDSVRFSGVRLFRDMQMLPNSKQNFTPRVQGIAQSNALVTIEQNGFVVYQKEVPPGPFAITDLQLAGGGADLDVSVKEADGSVTTYLVPYAAVPNMLQPGVSKYDFAAGRSHIEGASKQSDFVQAGYQYGFNNLLTLYGGSMVANNYYAFTLGTGWNTRIGAISVDATKSHSKQDNGDVFDGQSYQIVYNKFVSKTSTRFGLAAWRYSSRDYRTFNDHVWANNKDNYRRDENDIYDIADYYQNDFGRKNSFSANMSQSLPEGWGSVSLSTLWRDYWGRSGSSKDYQLSYSNNLRRISYTLAASQAYDENHHEEKRFNIFISIPFDWGDDVTTPRRQIYMSNSTTFDDQGVASNNTGLSGTVGSRDQFNYGVNLSYQYQGNETTAGANLTWNAPVATVNGSYSQSSAYRQAGASVSGGIVAWSGGVNLANRLSETFAVMNAPGIKDAYVNGQKYRTTNRNGVVVYDGMTPYRENYLMLDMSQSDSEAELRGNRKIAAPYRGAVVLVNFDTDQRKPWFIKALRADGQPLTFGYEVNDIHGHNIGVVGQGSQLFIRTNEVPPSVNVAIDKQQGLSCTITFGKEIDESKNYICQ

SEQ ID NO: 17543 - protein, 860 aa, Escherichia coli; identical to SEQ ID NO: 2958

SEQ ID NO: 17544 - protein, 729 aa, Escherichia coli; identical to SEQ ID NO: 2074

SEQ ID NO: 17545 - protein, 367 aa, Escherichia coli; identical to SEQ ID NO: 2433

SEQ ID NO: 17546 - protein, 203 aa, Escherichia coli; identical to SEQ ID NO: 2015

SEQ ID NO: 17547 - protein, 885 aa, Escherichia coli
MCMPNHSNFRLRGIACYIALAISGGSVNAWADDSIQFDPRFLELKGDTKIDLGKFSKKGYVDAGKYNLRVFINKQPLSDEYDINWYVSENDPTKTYACLTPELVAALGLKEGIAKSLQWTHNDECLKPGQLDGMEVENDLSQSALLLTVPQAYLEYTSSDWDPPSRWDDGIPGLIADYSLNAQTRHQEQGGEDSHDISGNGTVGANLGAWRFRADWQSDYQHTRSNDDEDDDSSNSTTSKNWDWSRYYAWRALPSLKAKLSLGEDYLNSDIFDGFNYIGSSVSTDDQMLPPNLRGYAPDVSGVAHSSAKVTISQMGRVLYETQVPAGPFRIQDIGDSVSGTLHVRVEEQNGQVQEYDVTTASMPFLTRQGQVRYKVMMGRPEDWNHKTEGGFFSGGEASWGVADGWSLYGGALADEHYQSAAMGVGRDLAQFGALAFDVTHSHVNLDHDSAYGKGKLDGNSFRVSYAKDFDELNSRVTFAGYRFSEKNFMTMSEYLDANQSDMARTGNDKEMYTITYNQNFAAAGVSIYLNYSHRTYWDRPEQTNYNLMFSHYFNMGSIRNMSISVTGYRYEYDDNADKGMYLSMSIPWSDSSTVTYNGSYGSGSDSSQVGYFKRVDDATHYQVNVGTSEQHGSVDGYLSHDGSLAKVDLSANYHEGEYRSAGIALQGGATLTAHGGALHRTQSMGGTRLLIDADGIANVPVESNGAPVYTNMFGKAVVADINNYYRNQAYIDLNNLPEDAEATQSVVQATLTEGAIGYRKFKVISGQKAMAVLRLRDGSYPPFGAEVKNDEQQQVGIVDDEGNVYLAGVNAGEHMTVFWEGSAQCEIVLPKPLPADLFSGLLLPCEQKGTAAPDSSAPEIKPVIQDQTRQVTPTEAPTSISATQ

SEQ ID NO: 17548 - protein, 826 aa, Escherichia coli
MLRMTPLASAIVALLLGIEAYAAEETFDTHFMIGGMKDQQVANIRLDDNQPLPGQYDIDIYVNKQWRGKYEIIVKDNPQETCLSREVIKRLGINSDNFASGKQCLTFEQLVQGGSYSWDIGVFRLDFSVPQAWVEELESGYVPPENWERGINAFYTSYYVSQYYSDYKASGNNKSTYVRFNSGLNLLGWQLHSDASFSKTNNNPGVWKSNTLYLERGFAQLLGTLRVGDMYTSSDIFDSVRFSGVRLFRDMQMLPNSKQNFTPRVQGIAQSNALVTIEQNGFVVYQKEVPPGPFAITDLQLAGGGADLDVSVKEADGSVTTYLVPYAAVPNMLQPGVSKYDFAAGRSHIEGASKQSDFVQAGYQYGFNNLLTLYGGSMVANNYYAFTLGTGWNTRIGAISVDATKSHSKQDNGDVFDGQSYQIAYNKFVSQTSTRFGLAAWRYLSRDYRTFNDHVWANNKDNYRRDINDIYDIADYYQNDFGRKNSFSANMSQSLPEGWGSVSLSTLWRDYWGRSGSSKDYQLSYSNNWRRISYTLAASQAYDENHHEEKRFNIFISIPFDWGDDVTTPRRQIYMSNSTTFDDQGVASNNTGLSGTVGSRDQFNYGVNLSYQHQENETTAGANLTWNAPVATVNGSYSQSSTYRQAGASVSGGIVAWSGGVNLANRLSETFAVMNAPGIKDAYVNGQKYRTTNRNGVVIYDGMTPYRENHLMLDVSQSDSEAELRGNRKIAAPYRGAVVLVNFDTDQRKPWFIKALRADGQPLMFGYEVNDIHGHNIGVVGQGSQLFIRTNEVPPSVNVAIDKQQGLSCTITFGKEIDESRNYICQ

SEQ ID NO: 17549 - protein, 686 aa, Escherichia coli; identical to SEQ ID NO: 3015

SEQ ID NO: 17550 - protein, 897 aa, Escherichia coli; identical to SEQ ID NO: 1908

SEQ ID NO: 17551 - protein, 368 aa, Escherichia coli; identical to SEQ ID NO: 3933

SEQ ID NO: 17552 - protein, 368 aa, Escherichia coli; identical to SEQ ID NO: 3171

SEQ ID NO: 17553 - protein, 118 aa, Escherichia coli [sequence omitted]

SEQ ID NO: 17554 - protein, 361 aa, Escherichia coli; identical to SEQ ID NO: 3061

SEQ ID NO: 17555 - protein, 237 aa, Escherichia coli
MRKITQAISAVCLLFALNSSAVALASSPSPLNPGTNVARLAEQAPIHWVSVAQIENSLAGRPPMAVGFDIDDTVLFSSPGFWRGKKTFSPESEDYLKNPVFWEKMNNGWDEFSIPKEVARQLIDMHVRRGDAIFFVTGRSPTKTETVSKTLADNFHIPATNMNPVIFAGDKPGQNTKSQWLQDKNIRIFYGDSDNDITAACDVGARGIRILRASNSTYKPLPQAGAFGEEVIVNSEY

SEQ ID NO: 17556 - protein, 803 aa, Escherichia coli
MYSFPGYAEETFDTHFMIGGMRGEKVSEYRFDNKQPLPGNYELDFYVNHQWRGKKDITIPESPAKPCLPKVLLTTLGVKTDNLNTEDNCILLDEAVHGGQYQWDISEHRLNLTIPQAYINELERGYVPPESWDRGIDAFYTSYNLSQYRSYDSNNNSNTASYGRFNSGLNLFSWQLHSDASYSKPDDMKGKWQSNTLYLERGWSQILSTVQIGENYTSSLIFDSLRFSGIRLFRDMQMLPDSMQSFTPLVQGVAQSNALITVSQNGYIIYQKEVPPGPFTIADLQLSGSGADLDVSIKEADGSVRSFLVPYSSVPNMLQPGVSNFDFIAGRSKIYGVKNQEDFLEANYIYGLNNLLTLYGGTILSDNYNAITLGNGWNTPLGAISFDATRSSSKLNNDITHEGTSYQVAYNKYLVQTATRFSVAAWRYASQDYRTFSDHLYENDKHNHQSEYDDFYDIGRKNSLSANIMQPLSNNLGNVSLSALWRNYWGRSGNAKDYQFSYSNSWQRISYTFSASQSYDENDKEEERFNLFISIPFYWGDDITKTRHQINLSNSTSFSKDGYSSNNTGVTGIAGEHDQLNYGIYVNQQQQNNDTSLGTNLSWRTPIAIIDGSYSHSKNTWQSGGSISSGLVVWPGGINITNQLSDTFAILDAPGLEGAHINGQKYNRTNSKGQVVYDLMIPHRENHLVLDIANSESETELQGNRQIIAPYRGAVSYVQFTTDQRKPWYIQALRPDGSPLTFGYDVLDLQENNIGVVGQGSRLFIRVDEIPTGIKVALNDEQNLFCTITFQHVIDENKTYICQ

SEQ ID NO: 17557 - protein, 746 aa, Escherichia coli
MNKKIHSLALLVNLGIYGVAQAQEPTDTPVSHDDTIVVTAAEQNLQAPGVSTITADEIRKNPVARDVSEIIRTMPGVNLTGNSTSGQRGNNRQIDIRGMGPENTLILIDGKPVSSRNSVRQGWRGERDTRGDTSWVPPEMIERIEVLRGPAAARYGNGAAGGVVNIITKKGSGEWHGSWDAYFNAPEHKEEGATKRTNFSLTGPLGDEFSFRLYGNLDKTQADAWDINQGHQSARAGTYATTLPAGREGVINKDINGVVRWDFAPLQSLELEAGYSRQGNLYAGDTQNTNSDSYTRSKYGDETNRLYRQNYALTWNGGWDNGVTTSNWVQYEHTRNSRIPEGLAGGTEGKFNEKATQDFVDIDLDDVMLHSEVNLPIDFLVNQTLTLGTEWNQQRMKDLSSNTQALTGTNTGGAIDGVSTTDRSPYSKAEIFSLFAENNMELTDSTIVTLGLRFDHHSIVGNNWSPALNISQGLGDDFTLKMGIARAYKAPSLYQTNPNYILYSKGQGCYASAGGCYLQGNDDLKAETSINKEIGLEFKRDGWLAGVTWFRNDYRNKIEAGYVAVGQNAVGTDLYQWDNVPKAVVEGLEGSLNVPVSETVMWTNNITYMLKSENKTTGDRLSIIPEYTLNSTLSWQAREDLSMQTTFTWYGKQQPKKYNYKGQPAVGPETKEISPYSIVGLSATWDVTKNVSLTGGVDNLFDKRLWRAGNAQTTGDLAGANYIAGAGAYTYNEPGRTWYMSVNTHF

SEQ ID NO: 17558 - protein, 591 aa, Escherichia coli; identical to SEQ ID NO: 8247

SEQ ID NO: 17559 - protein, 242 aa, Escherichia coli; identical to SEQ ID NO: 2697

SEQ ID NO: 17560 - protein, 804 aa, Escherichia coli
MKKRYIFKLSLLALSICSQFSVATELNLDFIHGISAIPSILKTDTTLPAGQYVVDVLVNNERTGRANLVITEEDEKNNHLCLSHEWLDSAGVMMKKDAYDYAFDREKQCYVLTRNSHTKVDFDYGAQTLKFNIPQAYLLSKTDPARWDYGLNGGRLKYYTNFNKNVYDDVNVFGNLDATINLGRWVLSSNMNMSHDRDKTEITSSDLTLSTAISQVQGDLLLGKSQTRTELFSDFNFYGVALRSNSNMRPWESRGYAPGITGIASTPSRITVKQNGYTVYSKMVPAGPYRLDDLRPMGNGELVVTVEDESGNKTEQVYPVTTLPTLLRPGEFQYNVAVGKKNNNNELDKAFHSDTGLFWLGSLDYGFSTTTLNSAFILNDDYQAAGLGGTQMLGGLGALSLSANMSKASYDNGEVKTGESFSAKYAKSFTDRTDLQLLTYRYQSKGYVEFADFNPKDIWSYARYGGQRSRYEARLSHRFDGTYLSGSYWRQDYWMREGTDTGSTLSFSTSVFDSVSVFLNGAYSKYAWSDKADYAVSLSLSVPFDLKGTRHYSSNSVGYTRTGGTTFNTSVSAMPTERLNYSLSANAGSTGDRGASASASYAFDAIQTNLGVSRSYNKHGNSHTSFSGSVSGSVLGTSESGPLFTKESSDTVGIVSIPGVEGVSVNGSMPTNRDGNTVVWLSEYSENNININMDNVPDDMEFETTSFNVVPTEKAMVYRKFGFENVLRYILRVKNAQGNYLTGGDAKTEQGLNAGFISNNGVLLMNMLAEPKAVSVNIGNGKQCRFSTAGLKANTNKVQEVRCE

SEQ ID NO: 17561 - protein, 539 aa, Escherichia coli; identical to SEQ ID NO: 3146

SEQ ID NO: 17562 - protein, 359 aa, Escherichia coli; identical to SEQ ID NO: 2329

SEQ ID NO: 17563 - protein, 161 aa, Escherichia coli; identical to SEQ ID NO: 2582

SEQ ID NO: 17564 - protein, 823 aa, Escherichia coli
MTPLASAIVALLLGIEAYAAEETFDTHFMIGGMKDQQVANIRLDDNQPLPGQYDIDIYVNKQWRGKYEIIVKDNPQETCLSREVIKRLGINSDNFASGKQCLTFEQLVQGGSYSWDIGVFRLDFSVPQAWVEELESGYVPPENWERGINAFYTSYYVSQYYSDYKASGNNKSTYVRFNSGLNLLGWQLHSDASFSKTNNNPGVWKSNTLYLERGFAQLLGTLRVGDMYTSSDIFDSVRFSGVRLFRDMQMLPNSKQNFTPRVQGIAQSNALVTIEQNGFVVYQKEVPPGPFAITDLQLAGGGADLDVSVKEADGSVTTYLVPYAAVPNMLQPGVSKYDFAAGRSHIEGASKQSDFVQAGYQYGFNNLLTLYGGSMVANNYYAFTLGTGWNTRIGAISVDATKSHSKQDNGDVFDGQSYQIAYNKFVSQTSTRFGLAAWRYLSRDYRTFNDHVWANNKDNYRRDKNDIYDIADYYQNDFGRKNSFSANMSQSLPEGWGSVSLSTLWRDYWGRSGSSKDYQLSYSNNWRRISYTLAASQAYDENHHEEKRFNIFISIPFDWGDDVTTLRRQIYMSNSTTFDDQGVASNNTGLSGTVGSRDQFNYGVNLSYQHQENETTAGANLTWNAPVATVNGSYSQSSTYRQAGASVSGGIVAWSGGVNLANRLSETFAVMNAPGIKDAYVNGQKYRTTNRNGVVIYDGMTPYRENHLMLDVSQSDSEAELRGNRKIAAPYRGAVVLVNFDTDQRKPWFIKALRADGQPLMFGYEVNDIHGHNIGVVGQGSQLFIRTNEVPPSVNVAIDKQQGLSCTITFGKEIDESRNYICQ

SEQ ID NO: 17565 - protein, 360 aa, Escherichia coli
MKKLTVAISAVAASVLMAMSAQAAEIYNKDSNKLDLYGKVNAGHYFSSNDKHDGDKTYARLGFKGETQINDQLTGFGQWEYEFKGNRAESQGSSADKTRLAFAGLKFGDYGSIDYGRNYGVAYDIGAWTNVLPEFGGDTWTQTDVFMTERTTGVATYRNNDFFGLVEGLNFAAQYQGKNDHTDVTQANGDGFGFSTTYEYEGFGVGATYAKSDRTNNKVIYGNNSLNASGQNAEVWAAGLKYDANNIYLATTYSETQNMTVFADRFVANKAQNVEAVAQYQFDFGLRPSVAYLQSKGKDLGVWGAQDLVKYVDVGATYYFNKNMSTFVDYKINLIDKSDFTKASGVATDDIVAVGMVYQF

SEQ ID NO: 17566 - protein, 224 aa, Escherichia coli; identical to SEQ ID NO: 16891

SEQ ID NO: 17567 - protein, 865 aa, Escherichia coli; identical to SEQ ID NO: 2167

SEQ ID NO: 17568 - protein, 351 aa, Escherichia coli; identical to SEQ ID NO: 2519

SEQ ID NO: 17569 - protein, 227 aa, Escherichia coli; identical to SEQ ID NO: 4508

SEQ ID NO: 17570 - protein, 242 aa, Escherichia coli; identical to SEQ ID NO: 2697

SEQ ID NO: 17571 - protein, 518 aa, Escherichia coli; identical to SEQ ID NO: 2349

SEQ ID NO: 17572 - protein, 361 aa, Escherichia coli; identical to SEQ ID NO: 3061

SEQ ID NO: 17573 - protein, 869 aa, Escherichia coli
MKIPTTTDIPQRYTWCLAGICYSSLAILPSFLSYAESYFNPAFLLENGTSVADLSRFERGNHQPAGVYRVDLWRNDEFIGSQDIVFESTTENTGDKSGGLMPCFNQVLLERIGLNSSAFPELAQQQNNKCINLLKAVPDATINFDFAAMRLNITIPQIALLSSAHGYIPPEEWDEGIPALLLNYNFTGNRGNGNDSYFFSELSGINIGPWRLRNNGSWNYFRGNGYHSEQWNNIGTWVQRAIIPLKSELVMGDGNTGSDIFDGVGFRGVRLYSSDNMYPDSQQGFAPTVRGIARTAAQLTIRQNGFIIYQSYVSPGAFEITDLHPTSSNGDLDVTIDERDGNQQNYTIPYSTVPILQREGRFKFDLTAGDFRSGNSQQSSPFFFQGTVLGGLPQEFTAYGGTQLSANYTAFLLGLGRNLGNWGAVSLDVTHARSQLADDSRHEGDSIRFLYAKSMNTFGTNFQLMGYRYSTQGFYTLDDVAYRRMEGYEYDYDYDGEHRDEPIIVNYHNLRFSRKDRLQLNISQSLNDFGSLYISGTHQKYWNTSDSDTWYQVGYTSSWVGISYSLSFSWNESVGIPDNKRIVGLNVSVPFNVLTKRRYTRENALDRAYASFNANRNSNGQNSWLAGVGGTLLEGHNLSYHVSQGDTSNNGYTGSATANWQAAYGTLGVGYNYDRDQHDVNWQLSGGVVGHENGITLSQPLGDTNVLIKAPGAGGVRIENQTGILTDWRGYAVMPYATVYRYNRIALDTNTMGNSIDVEKNISSVVPTQGALVRANFDTRIGVRALITVTQGGKPVPFGSLVRENSTGITSMVGDDGQVYLSGAPLSGELLVQWGDGANSRCIAHYVLPKQSLQQAVTVISAVCTHPGS

SEQ ID NO: 17574 - protein, 203 aa, Escherichia coli; identical to SEQ ID NO: 2015

SEQ ID NO: 17575 - protein, 367 aa, Escherichia coli; identical to SEQ ID NO: 2433

SEQ ID NO: 17576 - protein, 192 aa, Escherichia coli; identical to SEQ ID NO: 5348

SEQ ID NO: 17577 - protein, 432 aa, Escherichia coli; identical to SEQ ID NO: 2026

SEQ ID NO: 17578 - protein, 696 aa, Escherichia coli
MRITTLASVVIPCLGFSASSITAAEDVMIVSASGYEKKLTNAAASVSVISQEELQSSQYHDLAEALRSVEGVDVESGTGKTGGLEISIRGMPASYTLILIDGVRQGGSSDVTPNGFSAMNTGFMPPLAAIERIEVIRGPMSTLYGSDAMGGVVNIITRKNADKWLSSVNAGLNLQESNKWGNSSQFNFWSSGPLVDDSVSLQVRGSTQQRQGSSVTSLSDTAATRIPYPTESQNYNLGARLDWKASEQDVLWFDMDTTRQRYDNRDGQLGSLTGGYDRTLRYERNKISAGYDHTFTFGTWKSYLNWNETENKGRELVRSVLKRDKWGLAGQPRELKESNLILNSLLLTPLGESHLVTVGGEFQSSSMKDGVVLASTGETFRQKSWSVFAEDEWHLTDALALTAGSRYEHHEQFGGHFSPRAYLVWDVADAWTLKGGVTTGYKAPRMGQLHKGISGVSGQGKTNLLGNPDLKPEESVSYEAGVYYDNPAGLNANVTGFMTDFSNKIVSYSINDNTNSYVNSGKARLHGVEFAGTLPLWSEDVTLSLNYTWTRSEQRDGDNKGAPLSYTPEHMVNAKLNWQITEEVASWLGARYRGKTPRFTQNYSSLSAVQKKVYDEKGEYLKAWTVVDAGLSWKMTDALTLNAAVNNLLNKDYSDVSLYSAGKSTLYAGDYFQTGSSTTGYVIPERNYWMSLNYQF

SEQ ID NO: 17579 - protein, 729 aa, Escherichia coli; identical to SEQ ID NO: 2074

SEQ ID NO: 17580 - protein, 208 aa, Escherichia coli; identical to SEQ ID NO: 1949

SEQ ID NO: 17581 - protein, 517 aa, Escherichia coli; identical to SEQ ID NO: 3116

SEQ ID NO: 17582 - protein, 351 aa, Escherichia coli; identical to SEQ ID NO: 2519

SEQ ID NO: 17583 - protein, 221 aa, Escherichia coli; identical to SEQ ID NO: 3141

SEQ ID NO: 17584 - protein, 161 aa, Escherichia coli; identical to SEQ ID NO: 2582

SEQ ID NO: 17585 - protein, 170 aa, Escherichia coli [sequence omitted]

SEQ ID NO: 17586 - protein, 274 aa, Escherichia coli; identical to SEQ ID NO: 2309

SEQ ID NO: 17587 - protein, 360 aa, Escherichia coli; identical to SEQ ID NO: 3354

SEQ ID NO: 17588 - protein, 565 aa, Escherichia coli
MKSPAPSRPQKMALIPACIFLCFAALSVQAEETPVTPQPPDILLGPLFNDVQNAKLFPDQKTFADAVPNSDPLMILADYRMQQNQSGFDLRHFVNVNFTLPKEGEKYVPPEGQSLREHIDGLWPVLTRSTENTEKWDSLLPLPEPYVVPGGRFREVYYWDSYFTMLGLAESGHWDKVANMVANFAHEIDTYGHIPNGNRSYYLSRSQPPFFALMVELLAQHEGDAALKQYLPQMQKEYAYWMDGVENLQAGQQEKRVVKLQDGTLLNRYWDDRDTPRPESWVEDIATAKSNPNRPATEIYRDLRSAAASGWDFSSRWMDNPQQLNTLRTTSIVPVDLNSLMFKMEKILARASKAAGDNAMANQYETLANARQKGIEKYLWNDQQGWYADYDLKSHKVRNQLTAAALFPLYVNAAAKDRANKMATATKTHLLQPGGLNTTSVKSGQQWDAPNGWAPLQWVATEGLQNYGQKEVAMDISWHFLTNVQHTYDREKKLVEKYDVSTTGTEGGGGEYPLQDGFGWTNGVTLKMLDLICPKEQPCDNVPATRPTVKSATTQPSTKEAQPTP

SEQ ID NO: 17589 - protein, 207 aa, Escherichia coli; identical to SEQ ID NO: 2211

SEQ ID NO: 17590 - protein, 354 aa, Escherichia coli
MKKLTVAISAVAASVLMAMSAQAAEIYNKDSNKLDLYGKVNAKHYFSSNDADDGDTTYAHLGFKGETQINDQLTGFGQWEYEFKGNRAESQGSSKDKTRLAFAGLKFGDYGSIDYGRNYGVAYDIGAWTDVLPEFGGDTWTQTDVFMTQRATGVATYRNNDFFGLVDGLNFAAQYQGKNDRSDFDNYTEGNGDGFGFSATYEYEGFGIGATYAKSDRTDTQVNAGKVLPEVFASGKNAEVWAAGLKYDANNIYLATTYSETQNMTVFADHFVANKAQNFEAVAQYQFDFGLRPSVAYLQSKGKDLGVWGDQDLVKYVDVGATYYFNKNMSTFVDYKINLLDKNDFTKALGVSTD

SEQ ID NO: 17591 - protein, 430 aa, Escherichia coli; identical to SEQ ID NO: 2617

SEQ ID NO: 17592 - protein, 119 aa, Escherichia coli
MDAVLSVQGASAPIKKKSFFSKFTRLNMLRLARAVIPAAVLMMFFPQLAMASGGQDLMQSGNSTVKATFGKDSSVVKWVVLAEVLVGAVMYMMTKNVKFLAGFAIISVFIAVGMAVVGL

SEQ ID NO: 17593 - protein, 209 aa, Escherichia coli
MAAFVLNGTRFIYEEGKKNVSFEVTNNADKTYGGQVWIDNTNQGNGVYMVPQPPFFKVGAKQKQIIRIINTDSNLPKDRESLFWLNVQEVPPKPEVKDSDEGVLAIAMNSRVKLIYRPASIKNGRQDAEKQLKMELRGDTTWLKNPTPYYMAIISVKHDGKDISLSDNVMKEIAQLRPFSDVNLGRVVRDKISVDAVNDWGGVQSYEIP

SEQ ID NO: 17594 - protein, 1024 aa, Escherichia coli
MTTITTAQIKSTLQSAKQSAANKLHSAGQSTKDALKKAAEQTRNAGNRLILLIPKDYKGQGSSLNDLVRTADELGIEVQYDEKNGTAITKQVFGTAEKLIGLTERGVTIFAPQLDKLLQKYQKAGNKLGGGAENIGDNLGKAGGILSTFQNFLGTALSSMKIDELIKKQKSGGNVSSSEMAEASIELINQLVDTVASLNNNVNSFSQQLNTLGSVLSNTKHLNGVGNKLQNLPNLDNIGAGLDTVSGILSAISASFILSNADADTRTKAAAGVELTTKVLGNVGKGISQYIIAQRAAQGLSTSAAAAGLIASAVTLAISPLSFLSIADKFKRANKIEEYSQRFKKLGYDGDSLLAAFHKETGAIDASLTMISTVLASVSSGISAAATTSLVGAPVSALVGAVTGIISGILEASKQAMFEHVASKMADVIAEWEKKHGKNYFENGYDARHAAFLEDNFKILSQYNKEYSVERSVLITQQHWDTLIGELAGVTRNGDKTLSGKSYIDYYEEGKRLEKKPDEFQKQVFDPLKGNIDLSDSKSSTLLKFVTPLLTPGEEIRERRQSGKYEYITELLVKGVDKWTVKGVQDKGAVYDYSNLIQHASVGNNQYREIRIESHLGDGDDKVFLSAGSANIYAGKGHDVVYYDKTDTGYLTIDGTKATEAGNYTVTRVLGGDVKVLQEVVKEQEVSVGKRTEKTQYRSYEFTHINGKNLTETDNLYSVEELIGTTRADKFFGSKFTDIFHGADGDDLIEGNDGNDRLYGDKGNDTLSGGNGDDQLYGGDGNDKLIGGAGNNYLNGGDGDDELQVQGNSLAKNVLFGGKGNDKLYGSEGADLLDGGEGDDLLKGGYGNDIYRYLSGYGHHIIDDDGGKEDKLSLADIDFRDVAFKREGNDLIMYKAEGNVLSIGHKNGITFRNWFEKESGDISNHQIEQIFDKGGRIITPDSLKKALEYQQRNNKASYVYGNDALAYGSQGDLNPLINEISKIISAAGNFDVKEERTAASLLQLSGNASDFSYGRNSITLTTSA

SEQ ID NO: 17595 - protein, 119 aa, Escherichia coli; identical to SEQ ID NO: 2841

SEQ ID NO: 17596 - protein, 790 aa, Escherichia coli
MLETTKSGMQTTDLSRFSKKYAQLPGTYQVDIWLNKKKVSQKKITFTANAEQLLQPQFTVEQLRELGIKVDEIPALAEKDDDSVINSLEQIIPGTAAEFDFNHQQLNLSIPQIALYRDARGYVSPSRWDDGIPTLFTNYSFTGSDNRYRQGNRSQRQYLNMQNGANFGPWRLRNYSTWTRNDQTSSWNTISSYLQRDIKALKSQLLLGESATSGSIFSSYTFTGVQLASDDNMLPNSQRGFAPTVRGIANSSAIVTIRQNGYVIYQSNVSAGAFEINDLYPSSNSGDLEVTIEESGGTQRRFIQPYSSLPMMQRPGHLKYSATAGRYRADANSDSKEPEFAEATAIYGLNNTFTLYGGLLGSEDYYALGIGIGGTLGALGALSMDINRADTQFDNQHSFHGYQWRTQYIKDIPETNTNIAVSYYRYTNDGYFSFNEANTRNWDYNSRQKSEIQFNISQTIFDGVSLYASGSQQDYWGNNDKNRNISVGVSGQQWGVGYSLNYQYSRYTDQNNDRALSLNLSIPLERWLPRSRVSYQMTSQKDRPTQHEMRLDGSLLDDGRLSYSLEQSLDDDNNHNSSLNASYRSPYGTFSAGYSYGNDSSQYNYGVTGSVVIHPHGVTLSQYLGNAFALIDANGASGVRIQNYPGIATDPFGYAVVPYLTTYQENRLSVDTTQLPDNVDLEQTTQFVVPNRGAMVAARFNANIGYRVLVTVSDRNGKPLPFGALASNDDTGQQSIVDEGGILYLSGISSKSQSWTVRWGNQADQQCQFAFSTPDSEPTTSVLQGTAQCH

SEQ ID NO: 17597 - protein, 799 aa, Escherichia coli
MPGATRMLKKTLLAYTIGFAFSPPANADGIEIAAVDFDRETLKSLGVDPNISHYFSRSARFLPGEYSLIVSVNGEKKGNIATRFDENGDICLDQAFLQQAGLKIPSEEKNGCYDYILSYPGTTITPLPNQEALDIIVSPQAIIPIGLDLTNAATGGTAALLNYSLMSSRAEFSNGSSDYSQAALEGGININDWMLRSHQFLTQTNGTFSNQNSSTYLQRTFTDLKTLMRAGEVNLNNSVLEGASIYGIEIAPDNALQTSGSGVQVTGIANTSQARVEIRQQGVLIHSILVPAGAFTIPDVPVRNGNSDLNVTVVETDGSSHNYIVPSTLFNQHVESFQGYRFAIGRVDDDYDESPWVISASSGWNLTRWSAMNGGVIVAENYQAASIRSSLVPLPDLTVSSQISTSQDTKDSLQGQKYRLDANYNLPFSLGLTTSLTRSDRHYRELSEAIDDDYTDPTKSTYALGLNWSNSILGGFNISGYKTYSYDGDNDSSNLNINWNKAFKHATVSVNWQHQLSASENNEDDGDLFYVNISIPFGRSNTATLYTRHDDHKTHYGTGVMGVVSDEMSYYVNAERDHDERETSLNGSISSNLHYTQVSLAAGASGSDSRTYNGTMSGGIAVHDQGVTFSPWTINDTFTIAKMDNNIAGVRITSQAGPVWTDFRGNAVIPSIQPWRTSGVEIDTASLPKNVDIGNGTKMIKQGRGAVGKVGFSAITQRRALLNITLSDGKKLPRGVAIEDSEGNYLTTSVDDGVVFLNNIKPDMVLDIKDEQQSCRIHLTFPEDAPKDVFYETATGECQ

SEQ ID NO: 17598 - protein, 144 aa, Escherichia coli
MVLCRIDLTCQYRSGFFVNNINGVFMNLSLFKGGRPASVKNRAWHYCQMAWRGVCNQKALSRLAALSPLLLLGMGQMAHATDLLAGGKDDVKATFGADSFVIMCIYIAEIVIGVATYIRTKNLLILLGLVVVIVFTTVGLTFVS

SEQ ID NO: 17599 - protein, 102 aa, Escherichia coli; identical to SEQ ID NO: 1829

SEQ ID NO: 17600 - protein, 432 aa, Escherichia coli; identical to SEQ ID NO: 2026

SEQ ID NO: 17601 - protein, 834 aa, Escherichia coli; identical to SEQ ID NO: 3118

SEQ ID NO: 17602 - protein, 249 aa, Escherichia coli; identical to SEQ ID NO: 2793

SEQ ID NO: 17603 - protein, 654 aa, Escherichia coli; identical to SEQ ID NO: 4042

SEQ ID NO: 17604 - protein, 897 aa, Escherichia coli; identical to SEQ ID NO: 1908

SEQ ID NO: 17605 - protein, 241 aa, Escherichia coli; identical to SEQ ID NO: 2922

SEQ ID NO: 17606 - protein, 856 aa, Escherichia coli; identical to SEQ ID NO: 3234

SEQ ID NO: 17607 - protein, 784 aa, Escherichia coli
MKKRIPTLLATMIATALYSQQGLAADLASQCMLGVPSYDRPLVQGDTNDLPVTINADHAKGDYPDDAVFTGSVDIMQGNSRLQADEVQLHQKEAPGQPEPVRTVDALGNVHYDDNQVILKGPKGWANLNTKDTNVWEGDYQMVGRQGRGKADLMKQRGENRYTILDNGSFTSCLPGSDTWSVVGSEIIHDREEQVAEIWNARFKVGPVPIFYSPYLQLPVGDKRRSGFLIPNAKYTTTNYFEFYLPYYWNIAPNMDATITPHYMHRRGNIMWENEFRYLSQAGAGLMELDYLPSDKVYEDEPPNDDSSRRWLFYWNHSGVMDQVWRFNVDYTKVSDPSYFNDFDNKYGSSTDGYATQKFSVGYAVQNFNATVSTKQFQVFSEQNTSSYSAEPQLDVNYYQNDVGPFDTRIYGQAVHFVNTRDDMPEATRVHLEPTINLPLSNNWGSINTEAKLLATHYQQTNLDWYNSRNTTKLDESVNRVMPQFKVDGKMVFERDMEMLAPGYTQTLEPRAQYLYVPYRDQSDIYNYDSSLLQSDYSGLFRDRTYGGLDRIASANQVTTGVTSRIYDDAAVERFNISVGQIYYFTESRTGDDNITWENDDKTGSLVWAGDTYWRISERWGLRGGIQYDTRLDNVATSNSSIEYRRDEDRLVQLNYRYASPEYIQATLPKDYSTAEQYKNGISQVGAVASWPIADRWSIVGAYYYDTNANKQADSMLGVQYSSCCYAIRVGYERKLNGWDNDKQHAVYDNAIGFNIELRGLSSNYGLGTQEMLRSNILPYQNTL

SEQ ID NO: 17608 - protein, 246 aa, Escherichia coli; identical to SEQ ID NO: 1985

SEQ ID NO: 17609 - protein, 266 aa, Escherichia coli; identical to SEQ ID NO: 1894

SEQ ID NO: 17610 - protein, 161 aa, Escherichia coli; identical to SEQ ID NO: 2582

SEQ ID NO: 17611 - protein, 232 aa, Escherichia coli; identical to SEQ ID NO: 2087

SEQ ID NO: 17612 - protein, 650 aa, Escherichia coli; identical to SEQ ID NO: 8603

SEQ ID NO: 17613 - protein, 828 aa, Escherichia coli
MKLSRRSFMKANAVAAAAAAAGLSVPGVARAVVGQQEAIKWDKAPCRFCGTGCGVLVGTQQGRVVACQGDPDAPVNRGLNCIKGYFLPKIMYGKDRLTQPLLRMKNGKYDKEGEFTPITWDQAFDVMEEKFKTALKEKGPESIGMFGSGQWTIWEGYAASKLFKAGFRSNNIDPNARHCMASAVVGFMRTFGMDEPMGCYDDIEQADAFVLWGANMAEMHPILWSRITNRRLSNQNVTVAVLSTYQHRSFELADNGIIFTPQSDLVILNYIANYIIQNNAINQDFFSKHVNLRKGATDIGYGLRPTHPLEKAAKNPGSDASEPMSFEDYKAFVAEYTLEKTAEMTGVPKDQLEQLAQLYADPNKKVISYWTMGFNQHTRGVWANNLVYNLHLLTGKISQPGCGPFSLTGQPSACGTAREVGTFAHRLPADMVVTNEKHRDICEKKWNIPSGTIPAKIGLHAVAQDRALKDGKLNVYWTMCTNNMQAGPNINEERMPGWRDPRNFIIVSDPYPTVSALAADLILPTAMWVEKEGAYGNAERRTQFWRQQVQAPGEAKSDLWQLVQFSRRFKTEEVWPEDLLAKKPELRGKTLYEVLYATPEVSKFPVSELAEDQLNDESRELGFYLQKGLFEEYAWFGRGHGHDLAPFDDYHKARGLRWPVVNGKETQWRYSEGNDPYVKAGEGYKFYGKPDGKAVIFALPFEPAAEAPDEEYDLWLSTGRVLEHWHTGSMTRRVPELHRAFPEAVLFIHPLDAKARDLRCGDKVKVVSRRGEVISIVETRGRNRPPQGLVYMPFFDAAQLVNKLTLDATDPLSKETDFKKCAVKLEKV

SEQ ID NO: 17614 - protein, 660 aa, Escherichia coli; identical to SEQ ID NO: 5801

SEQ ID NO: 17615 - protein, 386 aa, Escherichia coli; identical to SEQ ID NO: 3072

SEQ ID NO: 17616 - protein, 732 aa, Escherichia coli
MMRKKYMPRALGPLLLVVLSPAVAQQNDDNEIIVSASRSNRTVAEMTQTTWVIENAELEQQIQGGKELKDALAQLIPGLDVSSQSRTNYGMNMRGRPLVVLIDGVRLNSSRSDSRQLDSVDPFNIDHIEVISGATALYGGGSTGGLINIVTKKGQPETMMEFEAGTKSGFNSSKDHDERIAGAVSGGNDHISGRLSVAYQKFGGWFDGNGDATLLDNTQTGLQHSNRLDIMGTGTLNIDESRQLQLITQYYKSQGDDNYGLNLGKGFSAISGSSTPYVSKGLNSDRIPGTERHLISLQYSDSDFLRQELVGQVYYRDESLRFYPFPTVNANKQATAFSSSQQDTDQYGMKLTLNSQLMDGWQITWGLDAEHERFTSNQMFFDLAQASASGGLNNHKIYTTGRYPSYDITNLAAFLQSSYDINDIFTVSGGVRYQYTENRVDDFIDYTQQQKIAAGKAISADAIPGGSVDYDNFLFNAGLLMHITERQQAWFNFSQGVALPDPGKYYGRGIYGAAVNGHLPLTKSVNVSDSKLEGVKVDSYELGWRFTGDNLRTQIAAYYSLSNKSVERNKDLTISVKDDRRRIYGVEGAVDYLIPDTDWSTGVNFNVLKTESKVNGQWQKYDVKESSPSKATAYISWAPEPWSLRVQSTTSFDVSDAEGNDINGYTTVDFISSWLLPVGTLSFSVENLFDRDYTTVWGQRAPLYYSPGYGPASLYDYKGRGRTFGLNYSVLF

SEQ ID NO: 17617 - protein, 87 aa, Escherichia coli; identical to SEQ ID NO: 2991

SEQ ID NO: 17618 - protein, 274 aa, Escherichia coli; identical to SEQ ID NO: 2309

SEQ ID NO: 17619 - protein, 518 aa, Escherichia coli; identical to SEQ ID NO: 2349

SEQ ID NO: 17620 - protein, 793 aa, Escherichia coli; identical to SEQ ID NO: 2768

SEQ ID NO: 17621 - protein, 851 aa, Escherichia coli; identical to SEQ ID NO: 4440

SEQ ID NO: 17622 - protein, 869 aa, Escherichia coli; identical to SEQ ID NO: 3173

SEQ ID NO: 17623 - protein, 386 aa, Escherichia coli; identical to SEQ ID NO: 3072

SEQ ID NO: 17624 - protein, 686 aa, Escherichia coli
MFWRDMTLSVWRKKTTGLKTKKRLLALVLAAALCSSPVWAEEATFTANFKDTDLKSFIETVGANLNKTIIMGLGVQGKVSIRTMTPLNERQYYQLFLNLLEAQGYAVVPMENDVLKVVKSSAAKVEPLPLVGEGSDNYAGDEMVTKVVPVRNVSVRELAPILRQMIDSAGSGNVVNYDPSNVIMLTGRASVVERLTEVIQRVDHAGNRTEEVIPLDNASASEIARVLESLTKNSGENQPATLKSQIVADERTNSVIVSGDPATRDKMRRLIRRLDSEMERSGNSQVFYLKYSKAEDLVDVLKQVSGTLTAAKEEAEGTVGSGREVVSIAASKHSNALIVTAPQDIMQSLQSVIEQLDIRRAQVHVEALIVEVAEGSNINFGVQWASKDAGLMQFANGTQIPIGTLGAAISQAKPQKGSTVISENGATTINPDTNGDLSTLAQLLSGFSGTAVGVVKGDWMALVQAVKNDSSSNVLSTPSITTLDNQEAFFMVGQDVPVLTGSTVGSNNSNPFNTVERKKVGIMLNVTPQINEGNAVQMVIEQEVSKVEGQTSLDVVFGERKLKTTVLANDGELIVLGGLMDDQAGESVAKVPLLGDIPLIGNLFKSTADKKEKRNLMVFIRPTILRDGMAADGVSQRKYNYMRAEQIYRDEQGLSLMPHTAQPVLPAQNQALPPEVRAFLNAGRTR

SEQ ID NO: 17625 - protein, 478 aa, Escherichia coli; identical to SEQ ID NO: 2404

SEQ ID NO: 17626 - protein, 831 aa, Escherichia coli
MTIKYTKNYHHLTRIATFCALLYCNSAFSAELVEYDHTFLMGQNASNIDLSRYSEGNPAIPGVYDVSVYVNDQPIINQSITFVAIEGKKNAQACITLKNLLQFHINSPDINNEKAVLLARDEALGNCLNLTEIIPQASVRYDVNDQRLDIDVPQAWVMKNYQNYVDPSLWENGINAAMLSYNLNGYHSETPGRKNDSIYAAFNGGMNLGAWRLRASGNYNWMTDSGGNYDFKNRYIQRDIASLRSQFIIGESYTTGETFDSVSIRGIRLYSDSRMLPPTLASFAPIIHGVANTNAKVTITQGGYKIYETTVPPGAFVIDDLSPSGYGSDLIVTIEESDGSKRTFSQPFSSVVQMLRPGVGRWDISGGQILKDDIQDEPNLFQASYYYGLNNYLTGYTGIQLTDNNYTAGLLGLGLNTSVGAFSFDVTHSNVRIPDDKTYEGQSYRVSWNKLFEETSTSLNIAAYRYSTQNYLGLNDALTLIDEVKHPEQDLEPKSMRNYSRMKNQVTVSINQPLKFEKKDYGSFYLSGSWSDYWASGQNRSNYSIGYSNSASWGSYSISAQRSWNEDGDTDDSVYLSFTIPIEKLLGTEQRTSGFQSIDTQLSSDFKGNNQLNVSSSGYSDNARVSYSVNTGYTMNKSSEDLSYVGGYASYESPWGTLAGSVSANSDNSRQVSLSTDGGFVLHSGGLTFSNDSFSDSDTLAVVQAPGAQGARINYGNSTIDRWGYGVTSALSPYHENRIALDINDLENDVELKSTSAVAVPRQGSVVFADFETVQGQSAIMNITRSDGKNIPFAADIYDEQGNVIGNVGQGGQAFVRGIEQQGNISIKWLE

SEQ ID NO: 17627 - protein, 243 aa, Escherichia coli; identical to SEQ ID NO: 14534

SEQ ID NO: 17628 - protein, 357 aa, Escherichia coli; identical to SEQ ID NO: 2888

SEQ ID NO: 17629 - protein, 866 aa, Escherichia coli
MYRTQRQHSLLSSGGVPSFIGGLVVFVSAVFNAQAETWFDPAFFKDDPSMVADLSRFEKGQKITPGVYRVDIVLNQTIVDTRNVNFVEITPEKGIAACLTTESLDAMGVNTDAFPAFKQLDKQACAPLAEIIPDASVTFNVNKLRLEISVPQIAIKSNARGYVPPERWDEGINALLLGYSFSGANSIHSSAGSDSGDSYFLNLNSGVNLGPWRLRNNSTWSRSSGQTAEWKNLSSYLQRAVIPLKGELTVGDDYTAGDFFDSVSFRGVQLASDDNMLPDSLKGFAPVVRGIAKSNAQVTIKQNGYTIYQTYVSPGAFEISDLYSTSSSGDLLVEIKEADGSVNSYSVPFSSVPLLQRQGRIKYAVTLAKYRTNSNDQQESKFAQATLQWGGPWGTTWYGGGQYAEYYRTAMFGLGFNLGDFGAISFDATQAKSTLADQSEHKGQSYRFLYAKTLNQLGTNFQLMGYRYSTSGFYTLSDTMYKHMDGYEFNDGDDEDTPMWSRYYNLFYTKRGKLQVNISQQLGEYGSFYLSGSQQTYWHTDQQDRLLQFGYNTQIKDLSLGVSWNYSKSRGQPDADQVFALNFSLPLNLLLPKSNDSYTRKKNYAWMTSNTSIDNEGHSTQNLGLTETLLDDGNLSYSIQQGYNSEGKTANGSASMDYKGAFADARVGYNYSDNGSQQQLNYALSGSLVAHSQGITLGQSLGETNVLIAAPGAENTRVANSTGLKTDWRGYTVVPYATSYRENRIALDAASLKRNVDLENAVVNVVPTKGALVLAEFNAHAGARVLMKTSKQGMPLRFGAMATLDGAQTISGIIDDDGSLYMSGLPAKGTITVRWGDAPDQICHISYELTEQQINAAITRMDSVCE

SEQ ID NO: 17630 - protein, 118 aa, Escherichia coli [sequence omitted]

SEQ ID NO: 17631 - protein, 878 aa, Escherichia coli
MSYLNLRLYQRNTQCLHIRKHRLAGFFVRLFVACAFAAQAPLSSAELYFNPRFLADDPQAVADLSRFENGQELPPGTYRVDIYLNNGYMATRDVTFNTGDSEQGIVPCLTRAQLASMGLNTASVSGMNLLADDACVPLTSMIHDATAHLDVGQQRLNLTIPQAFMSNRARGYIPPELWDPGINAGLLNYNFSGNSVQNRIGGNSHYAYLNLQSGLNIGAWRLRDNTTWSYNSSDRSSGSKNKWQHINTWLERDIIPLRSRLTLGDGYTQGDIFDGINFRGAQLASDDNMLPDSQRGFAPVIHGIARGTAQVTIKQNGYDIYNSTVPPGPFTINDIYAAGNSGDLQVTIKEADGSTQIFTVPYSSVPLLQREGHTRYSITAGEYRSGNAQQEKPRFFQSTLLHGLPAGWTIYGGTQLADRYRAFNFGIGKNMGALGALSVDMTQANSTLPDDSQHDGQSVRFLYNKSLNESGTNIQLVGYRYSTSGYFNFADTTYSRMNGYNIETQDGVIQVKPKFTDYYNLAYNKRGKLQLTVTQQLGRTSTLYLSGSHQTYWGTSNVDEQFQAGLNTAFEDINWTLSYSLTKNAWQKGRDQMLALNVNIPFSHWLRSDSKSQWRHASASYSMSHDLNGRMTNLAGVYGTLLEDNNLSYSVQTGYAGGGDGNSGSTGYATLNYRGGYGNANIGYSHSDDIKQLYYGVSGGVLAHANGVTLGQPLNETVVLVKAPGAKDAKVENQTGVRTDWRGYAVLPYATEYRENRVALDTNTLADNVDLDNAVANVVPTRGAIVRAEFKARVGIKLLMTLTHNNKPLPFGAMVTSESSQSSGIVADNGQVYLSGMPLAGKVQVKWGEEENAHCVANYQLPPESQQQLLTQLSAECR

SEQ ID NO: 17632 - protein, 746 aa, Escherichia coli
MNKKIHSLALLVNLGIYGVAQAQEPTDTPVSHDDTIVVTAAEQNLQAPGVSTITADEIRKNPVARDVSEIIRTMPGVNLTGNSTSGQRGNNRQIDIRGMGPENTLILIDGKPVSSRNSVRQGWRGERDTRGDTSWVPPEMIERIEVLRGPAAARYGNGAAGGVVNIITKKGSGEWHGSWDAYFNAPEHKEEGATKRTNFSLTGPLGDEFSFRLYGNLDKTQADAWDINQGHQSARAGTYATTLPAGREGVINKDINGVVRWDFAPLQSLELEAGYSRQGNLYAGDTQNTNSDSYTRSKYGDETNRLYRQNYSLTWNGGWDNGVTTSNWVQYEHTRNSRIPEGLAGGTEGKFNEKATQDFVDIDLDDVMLHSEVNLPIDFLVNQTLTLGTEWNQQRMKDLSSNTQALTGTNTGGAIDGVSATDRSPYSKAEIFSLFAENNMEVTDSTIVTPGLRFDHHSIVGNNWSPALNISQGLGDDFTLKMGIARAYKAPSLYQTNPNYILYSKGQGCYASAGGCYLQGNDDLKAETSINKEIGLEFKRDGWLAGVTWFRNDYRNKIEAGYVAVGQNAVGTDLYQWDNVPKAVVEGLEGSLNVPVSETVMWTNNITYMLKSENKTTGDRLSIIPEYTLNSTLSWQAREDLSMQTTFTWYGKQQPKKYNYKGQPAVGPETKEISPYSIVGLSATWDVTKNVSLTGGVDNLFDKRLWRAGNAQTTGDLAGANYIAGAGAYTYNEPGRTWYMSVNTHF

SEQ ID NO: 17633 - protein, 753 aa, Escherichia coli; identical to SEQ ID NO: 6655

SEQ ID NO: 17634 - protein, 660 aa, Escherichia coli
MSRPQFTSLRLSLLALAVSATLPTFAFATETMTVTATGNARSSFEAPMMVSVIDTSAPENQTATSATDLLRHVPGITLDGTGRTNGQDVNMRGYDHRGVLVLVDGVRQGTDTGHLNGTFLDPALIKRVEIVRGPSALLYGSGALGGVISYDTVDAKDLLQEGQSSGFRVFGTGGTGDHSLGLGASAFGRTENLDGIVAWSSRDRGDLRQSNGETAPNDESINNMLAKGTWQIDSAQSLSGLVRYYNNDAREPKNPQTVEASDSSNPMVDRSTIQRDAQLSYKLAPQGNDWLNADAKIYWSEVRINAQNTGSSGEYREQITKGARLENRSTLFADSFASHLLTYGGEYYRQEQHPGGATTGFPQAKIDFSSGWLQDEITLRDLPITLLGGTRYDSYRGSSEGYKDVDADKWSSRAGMTINPTNWLMLFGSYAQAFRAPTMGEMYNDSKHFSIGRFYTNYWVPNPNLRPETNETQEYGFGLRFDDLMLSNDALEFKASYFDTKAKDYISTTVDFAAAKTMSYNVPNAKIWGWDVMTKYTTDLFSLDVAYNRTRGKDTDTGEYISSINPDTVTSTLNIPIAHSGFSVGWVGTFADRSTHISSSYSKQPGYGVNDFYVSYQGQQALKGMTTTLVLGNAFDKEYWSPQGIPQDGRNGKIFVSYQW

SEQ ID NO: 17635 - protein, 249 aa, Escherichia coli
MRYLNTKNIIAAGVLLSCMSSIAWGAIIPDRTRIIMNESDKGEALKLTNQSKNLPYLAQTWIEDTKGNKSRDFIVTVPPMVRLNPSEQIQIRMITQEKIAQLPKDRETLFYFNVREIPPKTDKKNVMQVTMQHALKLFWRPKAIELEDDGVMTYEKVEIIRRNDGSIRFNNKMPYHVTLGYIGTNGVTMLPQTQSLMVTPFSHADTQFKNVPSAFQVGYINDFGGLSFYEINCPTVNNSCNVSVAKQGQ

SEQ ID NO: 17636 - protein, 843 aa, Escherichia coli; identical to SEQ ID NO: 3954

SEQ ID NO: 17637 - protein, 239 aa, Escherichia coli
MIRKKILMAAIPLFVISGADAAVSLDRTRAVFDGSEKSMTLDISNDNKQLPYLAQAWIENENQEKIIAGPVIATPPVQRLEPGAKSMVRLSTTPDISKLPQDRESLFYFNLREIPPRSEKANVLQIALQTKIKLFYRPAAIKTRPNEVWQDQLILNKVSGGYRIENPTPYYVTVIGLGGSEKQAEEGEFETVMLSPRSEQTVKSANYNTPYLSYINDYGGRPVLSFICNGSRCSVKKEK

SEQ ID NO: 17638 - protein, 678 aa, Escherichia coli
MVPSTFSRLKAARCLPVVLAALIFAGCGTHTPDQSTAYMQGTAQADSAFYLQQMQQSSDDTRINWQLLAIRALVKEGKTGQAVELFNQLPQELNDSQRREKTLLAAEIKLAQKDFAGAQNLLAKITPADLEQNQQARYWQAKIDASQGRPSIDLLRALIAQEPLLGAKEKQQNIDATWQALSSMTQEQANTLVINADENILQGWLDLQRIWFDNRNDPDMMKAGIADWQKRYPNNPGAKMLPTQLVNVKAFKPASTNKIALLLPLNGQAAVFGRTIQQGFEAAKNIGTQPVAAQVAAAPAADVAEQPQPQTVDGVASPAQASVSDLTGEQPAAQPVPVSAPATSTAAVSAPANPSAELKIYDTSSQPLSQILSQVQQDGASIVVGPLLKNNVEELLKSNTPLNVLALNQPENIENRVNICYFALSPEDEARDAARHIRDQGKQAPLVLIPRSSLGDRVANAFAQEWQKLGGGTVLQQKFGSTSELRAGVNGGSGIALTGSPITPRETTDSGMTTNNPTLQTTPTDDQFTNNGGRVDAVYIVATPGEIAFIKPMIAMRNGSQSGATLYASSRSAQGTAGPDFRLEMEGLQYSEIPMLAGGNLPLMQQALSAVNNDYSLARMYAMGVDAWSLANHFSQMRQVQGFEINGNTGSLTANPDCVINRKLSWLQYQQGQVVPAS

SEQ ID NO: 17639 - protein, 232 aa, Escherichia coli; identical to SEQ ID NO: 2093

SEQ ID NO: 17640 - protein, 828 aa, Escherichia coli; identical to SEQ ID NO: 2383

SEQ ID NO: 17641 - protein, 162 aa, Escherichia coli; identical to SEQ ID NO: 1967

SEQ ID NO: 17642 - protein, 364 aa, Escherichia coli; identical to SEQ ID NO: 2848

SEQ ID NO: 17643 - protein, 368 aa, Escherichia coli
MNKTITALAIMMASFAANASVLPETPVPFKSGTGAIDNDTVYIGLGSAGTAWYKLDTQAKDKKWTALAAFPGGPRDQATSAFIDGNLYVFGGIGKNSEGLTQVFNDVHKYNPKTNSWVKLMSHAPMGMAGHVTFVHNGKAYVTGGVNQNIFNGYFEDLNEAGKDSTAIDKINAHYFDKKAEDYFFNKFLLSFDPSTQQWSYAGESPWYGTAGAAVVNKGDKTWLINGEAKPGLRTDAVFELDFTGNNLKWNKLAPVSSPDGVAGGFAGISNNSLIFAGGAGFKGSRENYQNGKNYAHEGLKKSYSTDIHLWHNGKWDKSGELSQGRAYGVSLPWNNSLLIIGGETAGGKAVTDSVLISVKDNKVTVQN

SEQ ID NO: 17644 - protein, 241 aa, Escherichia coli; identical to SEQ ID NO: 2906

SEQ ID NO: 17645 - protein, 213 aa, Escherichia coli; identical to SEQ ID NO: 2232

SEQ ID NO: 17646 - protein, 656 aa, Escherichia coli; identical to SEQ ID NO: 5574

SEQ ID NO: 17647 - protein, 565 aa, Escherichia coli; identical to SEQ ID NO: 2667

SEQ ID NO: 17648 - protein, 207 aa, Escherichia coli; identical to SEQ ID NO: 2217

SEQ ID NO: 17649 - protein, 446 aa, Escherichia coli [sequence omitted]

SEQ ID NO: 17650 - protein, 660 aa, Escherichia coli; identical to SEQ ID NO: 5801

SEQ ID NO: 17651 - protein, 231 aa, Escherichia coli; identical to SEQ ID NO: 2794

SEQ ID NO: 17652 - protein, 678 aa, Escherichia coli; identical to SEQ ID NO: 2231

SEQ ID NO: 17653 - protein, 551 aa, Escherichia coli
MDRRRFIKGSMAMAAVCGTSGIASLFSQAAFAADSDIADGQTQRFDFSILQSMAHDLAQTAWRGAPRPLPDTLATMTPQAYNSIQYDAEKSLWHNVENRQLDAQFFHMGMGFRRRVRMFSVDPATHLAREIHFRPELFKYNDAGVDTKQLEGQSDLGFAGFRVFKAPELARRDVVSFLGASYFRAVDDTYQYGLSARGLAIDTYTDSKEEFPDFTAFWFDTVKPGATTFTVYALLDSASITGAYKFTIHCEKSQVIMDVENHLYARKDIKQLGIAPMTSMFSCGTNERRMCDTIHPQIHDSDRLCMWRGNGEWICRPLNNPQKLQFNAYTDNNPKGFGLLQLDRDFSHYQDIMGWYNKRPSLWVEPRNKWGKGTIGLMEIPTTGETLDNIVCFWQPEKAVKAGDEFAFQYRLYWSAQPPVHCPLARVMATRTGMGGFPEGWAPGEHYPEKWARRFAVDFVGGDLKAAAPKGIEPVITLSSGEAKQIEILYIEPIDGYRIQFDWYPTSDSTDPVDMRMYLRCQGDAISETWLYQYFPPAPDKRQYVDDRVMS

SEQ ID NO: 17654 - protein, 359 aa, Escherichia coli; identical to SEQ ID NO: 2329

SEQ ID NO: 17655 - protein, 230 aa, Escherichia coli
MMTKIKLLMLIIFYLIISTSAHAGGGIALGATRIIYPADAKQTAVWIRNSHTNERFLVNSWIENSSGVKEKSFIITPPLFVSEPKSENTLRIIYTGPPLAADRESLFWMNVKTIPSVDKNALNGRNVLQLAILSRMKLFLRPIQLQELPAEAPDTLKFSRSGNYINVHNPSPFYVTLVNLQVGSQKLGNAMAAPRVNSQIPLPSGVQGKLKFQTVNDYGSVTPVREVNLN

SEQ ID NO: 17656 - protein, 203 aa, Escherichia coli; identical to SEQ ID NO: 2201

SEQ ID NO: 17657 - protein, 331 aa, Escherichia coli; identical to SEQ ID NO: 2705

SEQ ID NO: 17658 - protein, 191 aa, Escherichia coli; identical to SEQ ID NO: 2727

SEQ ID NO: 17659 - protein, 815 aa, Escherichia coli; identical to SEQ ID NO: 2698

SEQ ID NO: 17660 - protein, 193 aa, Escherichia coli; identical to SEQ ID NO: 2246

SEQ ID NO: 17661 - protein, 700 aa, Escherichia coli; identical to SEQ ID NO: 12163

SEQ ID NO: 17662 - protein, 203 aa, Escherichia coli; identical to SEQ ID NO: 2201

SEQ ID NO: 17663 - protein, 539 aa, Escherichia coli
MAAVCGTSGIASLFSQAAFAADSDIADGQTQRFDFSILQSMAHDLAQTAWRGAPRPLPDTLATMTPQAYNSIQYDAEKSLWHNVENRQLDAQFFHMGMGFRRRVRMFSVDPATHLAREIHFRPELFKYNDAGVDTKQLEGQSDLGFAGFRVFKAPELARRDVVSFLGASYFRAVDDTYQYGLSARGLAIDTYTDSKEEFPDFTAFWFDTVKPGATTFTVYALLDSASITGAYKFTIHCEKSQVIMDVENHLYARKDIKQLGIAPMTSMFSCGTNERRMCDTIHPQIHDSDRLSMWRGNGEWICRPLNNPQKLQFNAYTDNNPKGFGLLQLDRDFSHYQDIMGWYNKRPSLWVEPRNKWGKGIIGLMEIPTTGETLDNIVCFWQPEKAVKAGDEFAFQYRLYWSAQPPVHCPLARVMATRTGMGGFPEGWAPGEHYPEKWARRFAVDFVGGDLKAAAPKGIEPVITLSSGEAKQIEILYIEPIDGYRIQFDWYPTSDSTDPVDMRMYLRCQGDAISETWLYQYFPPAPDKRQYVDDRVMS

SEQ ID NO: 17664 - protein, 747 aa, Escherichia coli; identical to SEQ ID NO: 2072

SEQ ID NO: 17665 - protein, 696 aa, Escherichia coli
MRITTLASVVIPCLGFSASSIAAAEDVMIVSASGYEKKLTNAAASVSVISQEELQSSQYHDLAEALRSVEGVDVESGTGKTGGLEISIRGMPASYTLILIDGVRQGGSSDVTPNGFSAMNTGFMPPLAAIERIEVIRGPMSTLYGSDAMGGVVNIITRKNADKWLSSVNAGLNLQESNKWGNSSQFNFWSSGPLVDDSVSLQVRGSTQQRQGSSVTSLSDTAATRIPYPTESQNYNLGARLDWKASAQDVLWFDMDTTRQRYDNRDGQLGSLTGGYDRTLRYERNKISAGYDHTFTFGTWKSYLNWNETENKGRELVRSVLKRDKWGLAGQPRELKESNLILNSLLLTPLGESHLVTVGGEFQSSSMKDGVVLASTGETFRQKSWSVFAEDEWHLTDALALTVGSRYEHHEQFGGHFSPRAYLVWDVADAWTLKGGVTTGYKAPRMGQLHKGISGVSGQGKTNLLGNPDLKPEESVSYEAGVYYDNPAGLNANVTGFMTDFSNKIVSYSINDNTNSYVNSGKARLHGVEFAGILPLWSEDVTLSLNYTWTRSEQRDGDNKGAPLSYTPEHMVNAKLNWQITEEVASWLGARYRGKTPRFTQNYSSLSAVQKKVYDEKGEYLKAWTVVDAGLSWKMTDALTLNAAVNNLLNKDYSDVSLYSAGKSTLYAGDYFQTGSSTTGYVIPERNYWMSLNYQF

SEQ ID NO: 17666 - protein, 200 aa, Escherichia coli; identical to SEQ ID NO: 1790

SEQ ID NO: 17667 - protein, 233 aa, Escherichia coli; identical to SEQ ID NO: 2006

SEQ ID NO: 17668 - protein, 426 aa, Escherichia coli
MTIEYTKNYHHLTRIATFCALLYCNTAFSAELVEYDHTFLMGQNASNIDLSRYSEGNPAIPGVYDVSVYVNDQPIINQSITFVAIEGKKNAQACITLKNLLQFHINSPDINNEKAVLLARDETLGNCLNLTEIIPQASVRYDVNDQRLDIDVPQAWVMKNYQNYVDPSLWENGINAAMLSYNLNGYHSETPGRKNESIYAAFNGGMNLGAWRLRASGNYNWMTDSGSNYDFKNRYVQRDIASLRSQLILGESYTTGETFDSVSIRGIRLYSDSRMLPPTLASFAPIIHGVANTNAKVTITQGGYKIYETTVPPGAFVIDDLSPSGYGSDLIVTIEESDGSKRTFSQPFSSVVQMLRPGVGRWDISGGQVLKDDIQDEPNLFQASYYYGLNNYLTGYTGIQITDNNYTAGLLGKVRISRSFLPKLTR

SEQ ID NO: 17669 - protein, 207 aa, Escherichia coli; identical to SEQ ID NO: 2211

SEQ ID NO: 17670 - protein, 663 aa, Escherichia coli
MGGLLLPAIANAQTSQQDESTLVVTASKQSSRSASANNVSSTVVSAPELSDAGVTASDKLPRVLPGLNIENSGNMLFSTISLRGVSSAQDFYNPAVTLYVDGVPQLSTNTIQALTDVQSVELLRGPQGTLYGKSAQGGIINIVTQQPDSTPRGYIEGGVSSRDSYRSKFNLSGPIQDGLLYGSVTLLRQVDDGDMINPATGSDDLGGTRASIGNVKLRLAPDDQPWEMGFAASRECTRATQDAYVGWNDIKGRKLSISDGSPDPYMRRCTDSQTLSGKYTTDDWVFNLISAWQQQHYSRAFPSGSLIVNMPQRWNQDVQELRAATLGDARTVDMVFGLYRQNTREKLNSAYDMPTMPYLSSTGYTTAETLAAYSDLTWHLTDRFDIGGGVRFSHDKSSTQYHGSMLGNPFGDQGKSNDDQVLGQLSAGYMLTDDWRVYTRVAQGYKPSGYNIVPTAGLDAKPFVAEKSINYELGTRYETADVTLQAATFYTHTKDMQLYSGPVGMQTLSNAGKADATGVELEAKWRFAPGWSWDINGNVIRSEFTNDSELYHGNRVPFVPRYGAGSSVNGVIDTRYGALMPRLAVNLVGPHYFDGDNQLRQGTYATLDSSLGWQATERMNISVYVDNLFDRRYRTYGYMNGSSAVAQVNMGRTVGINTRIDFF

SEQ ID NO: 17671 - protein, 229 aa, Escherichia coli; identical to SEQ ID NO: 16879

SEQ ID NO: 17672 - protein, 366 aa, Escherichia coli; identical to SEQ ID NO: 14612

SEQ ID NO: 17673 - protein, 407 aa, Escherichia coli
MTERELSIIRALGEEFATVLADLQRTFEEKMAAQSGAFEEKLASLSALLQKHVTVDEVRPVLQAMMNDAVGAIPVPRDGRDYDPEVLQQAVNDAVAKIPVPADGKSVTADDVRPMIEQMVKDAVSHIPAPRDGRDYDPEVLQQAVNDAVAKIPVPADGKSVTADDVRPMIEQMVKDAVSHIPAPRDGRDYDPEVLLRAVNDAVGKLPVPADGKSITPDDVRPMLEQMVTDAVSHIPVPRDGRDYDPEVLQKAVLDAVSALPAPQDGRDATALEIFPAIDEQKSFPRGTYATHQGGLWRAYEKTHGMRGWECLVDGVADIDVSMTGERSFTVVVRQSSGQCTEKTFSLPVMLYRGVFRTGETYHPGDTVTWGGSLWHCNSMTGDKPGEAHSSGWTLAAKRGRDAGGGK

SEQ ID NO: 17674 - protein, 351 aa, Escherichia coli
MKKSTLALVVMGIVASASVQAAEIYNKDGNKLDVYGKVKAMHYMSDNDSKDGDQSYIRFGFKGEAQINDQLTGYGRWEAEFAGNKAESDTAQQKTRLAFAGLKYKDLGSFDYGRNLGALYDVEAWTDMFPEFGGDSSAQTDNFMTKRASGLATYRNTDFFGVIDGLNLTLQYQGKNENRDVKKQNGDGFGTSLTYDFGGSDFAISGAYTNSDRTNEQNLQSRGTGKRAEAWATGLKYDANNIYLATFYSETRKMTPISGGFANKTQNFEAVAQYQFDFGLRPSLGYVLSKGKDIEGIGDEDLVNYIDVGATYYFNKNMSAFVDYKINQLDSDNKLNINNDDIVAVGMTYQF

SEQ ID NO: 17675 - protein, 565 aa, Escherichia coli; identical to SEQ ID NO: 3088

SEQ ID NO: 17676 - protein, 241 aa, Escherichia coli
MGAMTLALLLSATSLSALASVTPDRTRLIFNESDKSISVTLRNNDPKLPYLAQSWIEDEKGNKITSPLTVLPPVQRIDSMMNGQVKVQGMPDINKLPADRESMFYFNVREIPPKSNKPNTLQIALQTRIKLFWRPKALEKVSMKSPWQHKVTLTRSGQAFTVNNPTPYYVIISNASAQKNGNPAAGFSPLVIEPKTTVPLNVKMDSVPVLTYVNDFGARMPLFFQCNGNSCQVDEEQSRKG

SEQ ID NO: 17677 - protein, 331 aa, Escherichia coli; identical to SEQ ID NO: 2705

SEQ ID NO: 17678 - protein, 518 aa, Escherichia coli; identical to SEQ ID NO: 14497

SEQ ID NO: 17679 - protein, 360 aa, Escherichia coli
MKKLTVAISAVAASVLMAMSAQAAEIYNKDSNKLDLYGKVNAKHYFSSNDADDGDTTYARLGFKGETQINDQLTGFGQWEYEFKGNRAESQGSSKDKTRLAFAGLKFGDYGSIDYGRNYGVAYDIGAWTDVLPEFGGDTWTQTDVFMTGRTTGVATYRNNDFFGLVDGLNFAAQYQGKNDRNEVTEANGDGFGFSTTYEYEGFGVGATYAKSDRTNNQVIYGNNGLNASGQNAEVWAAGLKYDANNIYLATTYSETQNMTVFGNNHIANKAQNFEVVAQYQFDFGLRPSVAYLQSKGKDLGAWGDQDLVEYIDVGATYYFNKNMSTFVDYKINLIDKSDFTKASGVATDDIVAVGMVYQF

SEQ ID NO: 17680 - protein, 700 aa, Escherichia coli; identical to SEQ ID NO: 2784

SEQ ID NO: 17681 - protein, 224 aa, Escherichia coli; identical to SEQ ID NO: 4745

SEQ ID NO: 17682 - protein, 331 aa, Escherichia coli; identical to SEQ ID NO: 2705

SEQ ID NO: 17683 - protein, 213 aa, Escherichia coli; identical to SEQ ID NO: 2232

SEQ ID NO: 17684 - protein, 224 aa, Escherichia coli; identical to SEQ ID NO: 4053

SEQ ID NO: 17685 - protein, 170 aa, Escherichia coli [sequence omitted]

SEQ ID NO: 17686 - protein, 203 aa, Escherichia coli; identical to SEQ ID NO: 2201

SEQ ID NO: 17687 - protein, 446 aa, Escherichia coli; identical to SEQ ID NO: 2182

SEQ ID NO: 17688 - protein, 837 aa, Escherichia coli
MKQMYKNLKLTTISKMIKNIYCSLSVIVIGCASAYAVEFNKDLIEAEDRENVNLSQFETDGQLPVGKYSLSTLINNKRTPIHLDLQWVLIDNQTAVCVTPEQLTLLGFTDEFIEEAQQNLIDGCYPIEKEKQITTYLDKGRMQLSISAPQAWLKYKDANWTPPELWDHGIAGAFLDYNLYASHYAPHQGDNSQNISSYGQAGVNLGAWRLRTDYQYDQSFNNGKSQANNLDFPRIYLFRPIPAINAKLTIGQYDTESSIFDSFHFSGISLKSDENMLPPDLRGYAPQITGVAQTNAKVTVSQNNRIIYQENVPPGPFSITNLFNTLQGQLDVKVEEEDGRVTQWQVASNSIPYLTRKGQIRYTTAMGKPTSVGGDSLQQPFFWTGEFSWGWLNNVSLYGGSVLTNRDYQSLATGVGFNLNSLGSLSFDVTRSDAQLHNQNKETGYSYRANYSKRFESTGSQLTFAGYRFSDKNFVSMNEYINDTNHYTNYQNEKESYIVTFNQYLESLRLNTYVSLARNTYWDASSNVNYSLSLSRDFDIGPLKNVSTSLTFSRINWEDDNQDQLYLNISIPWGTSRTLSYGMQRNQDNNISHTASWYDSSDRNNSWSVSASGDNDEFKDMEASLRASYQHNTENGRLYLSGTSQRDSYYSLNASWNGSFTATRHGAAFHDYSGSADSRFMIDADGAEDIPLNNKRAVTNRYGIGVIPSVSSYITTSLSVDTRNLPENVDIENSVITTTLTEGAIGYAKLDTRKGYQIIGVIRLPDGSHPPLGISVKDETSHKELGLVADGGFVYLNGIQDDSKLTLRWGDKSCFIQPPKSSNLTTGTVILPCISQN

SEQ ID NO: 17689 - protein, 162 aa, Escherichia coli; identical to SEQ ID NO: 1973

SEQ ID NO: 17690 - protein, 250 aa, Escherichia coli; identical to SEQ ID NO: 2761

SEQ ID NO: 17691 - protein, 380 aa, Escherichia coli
MNIYRAVTSFFYNSSKKGRTMKKLTVAISAVAASVLMAMSAQAAEIYNKDSNKLDLYGKVNAKHYFSSNDADDGDTTYARLGFKGETQINDQLTGFGQWEYDFKGNRAESQGSSKDKTRLAFAGLKFGDYGSIDYGRNFGVAYDIGAWTDVLPEFGGDTWTQTDVFMTQRATGVATYRNNDFFGLVDGLNFAAQYQGKNDRTDVAEANGDGFGFSTTYEYEGFGVGATYAKSDRTDGQVAYGKSKFNASGKNAEVWAAGLKYDANNIYLATTYSETQNMTVFGNNHIANKAQNFEAVAQYQFDFGLRPSVAYLQSKGKDLGVHGDRDLVKYVDVGATYYFNKNMSTFVDYKINLIDDSKFTKTAGIDTDDIVAVGLVYQF

SEQ ID NO: 17692 - protein, 869 aa, Escherichia coli
MKIPTTTDIPQRYTWCLAGICYSSLAILPSFLSYAESYFNPAFLLENGTSVADLSRFERGNHQPAGVYRVDLWRNDEFIGSQDIVFESTTVNTGDKSGGLMPCFNQALLERIGLNSSAFPELAQQQNNKCINLLKAVPDATINFDFAAMRLNITIPQIALLSSAHGYIPPEEWDEGIPALLLNYNFTGNRGNGNDSYFFSELSGINIGPWSLRNNGSWNYFRGNGYHSEQWNNIGTWVQRAIIPLKSELVMGDGNTGSDIFDGVGFRGVRLYSSDNMYPDSQQGFAPTVRGIARTAAQLTIRQNGFIIYQSYVSPGAFEITDLHPTSSNGDLDVTIDERDGNQQNYTIPYSTVPILQREGRFKFDLTAGDFRSGNSQQSSPFFFQGTALGGLPQEFTAYGGTQLSANYTAFLLGLGRNLGNWGAVSLDVTHARSQLADDSRHEGDSIRFLYAKSMNTFGTNFQLMGYRYSTQGFYTLDDVAYRRMEGYEYDYDYDGEHRDEPIIVNYHNLRFSRKDRLQLNISQSLNDFGSLYISGTHQKYWNTSDSDTWYQVGYTSSWVGISYSLSFSWNESVGIPDNERIVGLNVSVPFNVLTKRRYTRENALDRAYASFNANRNSNGQNSWLAGVGGTLLEGHNLSYHVSQGDTSNNGYTGSATANWQAAYGTLGGGYNYDRDQHDVNWQLSGGVVGHENGITLSQPLGDTNVLIKAPGAGGVRIENQTGILTDWRGYAVMPYATVYRYNRIALDTNTMGNSIDVEKNISSVVPTQGALVRANFDTRIGVRALITVTQGGKPVPFGSLVRENSTGITSMVGDDGQVYLSGAPLSGELLVQWGDGANSRCIAHYVLPKQSLQQAVTVISAVCTHPGS

SEQ ID NO: 17693 - protein, 862 aa, Escherichia coli
MSGSYSSVWAEDDIQFDSRFLELKGDTKIDLKRFSSQGYVEPGKYNLQVQLNKQPLAEEYDIYWYAGEDDVSKSYACLTPELVAQFGLKEDVAKNLQWSHDGKCLKPGQLEGVEIKADLSQSALVISLPQAYLEYTWPDWDPPSRWDDGISGIIADYSITAQTRHEENGGDDSNEISGNGTVGVNLGPWRMRADWQTNYQHTRSNDDDDEFGGDDTQKKWEWSRYYAWRALPSLKAKLALGEDYLNSDIFDGFNYVGGSVSTDDQMLPPNLRGYAPDISGVAHTTAKVTVSQMGRVIYETQVPAGPFRIQDLGDSVSGTLHIRIEEQNGQVQEYDISTASMPYLTRPGQVRYKIMMGRPQEWGHHVEGGFFSGAEASWGIANGWSLYGGALGDENYQSAALGVGRDLSTFGAVAFDVTHSHTKLDKDTAYGKGSLDGNSFRVSYSKDFDQLNSRVTFAGYRFSEENFMTMSEYLDASDSEMVRTGNDKEMYTATYNQNFRDAGVSVYLNYTRHTYWDREEQTNYNIMLSHYFNMGSIRNMSVSLTGYRYEYDNRADKGMYISLSMPWGDNSTVSYNGNYGSGTDSSQVGYFSRVDDATHYQLNIGTSDKHTSVDGYYSHDGSLAQVDLSANYHEGQYTSAGLSLQGGATLTTHGGALHRTQNMGGTRLLIDADGVADVPVEGNGAAVYTNMFGKAVVSDVNNYYRNQAYIDLNKLPENAEATQSVVQATLTEGAIGYRKFAVISGQKAMAVLRLQDGSHPPFGAEVKNDNEQTVGLVDDDGSVYLAGVKPGEHMSVFWSGVAHCDINLPDPLPADLFNGLLLPCQQKGNVAPVVPDDIKPVIQEQTQQVTPTDPPVSVSANQ

SEQ ID NO: 17694 - protein, 200 aa, Escherichia coli; identical to SEQ ID NO: 1793

SEQ ID NO: 17695 - protein, 230 aa, Escherichia coli; identical to SEQ ID NO: 3222

SEQ ID NO: 17696 - protein, 881 aa, Escherichia coli; identical to SEQ ID NO: 2762

SEQ ID NO: 17697 - protein, 760 aa, Escherichia coli
MENNRNFPARQFHSLTFFAGLCIGITPVAQALAAEGQTNADDTLVVEASTPSLYAPQQSADPKFSRPVADTTRTMTVISEQVIKDQGATNLTDALKNVPGVGAFFAGENGNSTTGDAIYMRGADTSNSIYIDGIRDIGSVSRDTFNTEQVEVIKGPSGTDYGRSAPTGSINMISKQPRNDSGIDASASIGSAWFRRGTLDVNQVIGDTTAVRLNVMGEKTHDAGRDKVKNERYGVAPSVAFGLGTANRLYLNYLHVTQHNTPDGGIPTIGLPGYSAPSAGTAALNHSGKVDTHNFYGTDSDYDDSTTDTATMRFEHDINDNTTIRNTTRWSRVKQDYLMTAIMGGASNITQPTSDVNSWTWSRTANTKDVSNKILTNQTNLTSTFYTGSIGHDVSTGVEFTRETQTNYGVNPVTLPAVNIYHPDSSIHPGGLTRNGANANGQTDTFAIYAFDTLQITRDFELNGGIRLDNYHTEYDSATACGGSGRGAITCPAGVAKGSPVTTVDTAKSGNLVNWKAGALYHLTENGNIYINYAVSQQPPGGNNFALAQSGSGNSANRTDFKPQKANTSEIGTKWQVLDKRLLLTAALFRTDIENEVEQNDDGTYSQYGKKRVEGYEISVAGNITPAWQVIGGYTQQKATIKNGKDVAQDGSSSLPYTPEHAFTLWSQYQATDDISVGAGARYIGSMHKGSDGAVGTPAFTEGYWVADAKLGYRVNRNLDFQLNVYNLFDTDYVASINKSGYRYHPGEPRTFLLTANMHF

SEQ ID NO: 17698 - protein, 191 aa, Escherichia coli
MKKSLLGLTFASLMFSAGSAVAADYKIDKEGQHAFVNFRIQHLGYSWLYGTFKDFDGTFTFDEKNPAADKVNVTINTTSVDTNHAERDKHLRSADFLNTAKYPQATFTSTSVKKDGDELDITGDLTLNGVTKPVTLEAKLIGQGDDPWGGKRASFEAEGKIKLKDFNIKTDLGPASQEVDLIISVEGVQQK

SEQ ID NO: 17699 - protein, 784 aa, Escherichia coli; identical to SEQ ID NO: 2244

SEQ ID NO: 17700 - protein, 213 aa, Escherichia coli; identical to SEQ ID NO: 2232

SEQ ID NO: 17701 - protein, 512 aa, Escherichia coli
MKKISFFIFTALFCCSAQAAPSSLEKRLGKNEYFIITKSSPVRAILNDFAANYSIPVFISSSVNDDFSGEIKNEKPVKVLEKLSRLYHLTWYYDENILYIYKTNEISRSIITPTYLDIDSLLKYLSDTISVNKNSCNVRKITTFNSIEVRGVPECIKYITSLSESLDKEAQSKAKNKDVVKVFKLNYASATDITYKYRDQNVVVPGVVSILKTMASNGSLPSTGKGAVERSGNLFDNSVKISADPRLNAVVVKDREITMDIYQQLISELDIEQRQIEISVSIIDVDANDLQQLGVNWSGTLNAGQGTIAFNSSAAQANISSSVISNANNFMIRVNALQQNSKAKILSQPSIITLNNMQAILDKNVTFYTKVSGEKVASLESITSGTLLRVTPRILDDTPNSLTGKRRERVRLLLDIQDGNQSTSQSNIQDTGSLLPEVQNSEMTTEATLSAGESLLLGGFIQDKESSSKDGIPLLSDIPVIGSLFSSTVKQKHSVVRLFLIKATPIKSASSE

SEQ ID NO: 17702 - protein, 76 aa, Escherichia coli
MIRQSSGQRTEKTFSLPVMLYRGVFRAGETYHPGDTVTWGGSLWHCNSMTGDKPGEAHSSGWTLAAKRGRDAGGGK

SEQ ID NO: 17703 - protein, 430 aa, Escherichia coli; identical to SEQ ID NO: 2617

SEQ ID NO: 17704 - protein, 266 aa, Escherichia coli; identical to SEQ ID NO: 1894

SEQ ID NO: 17705 - protein, 784 aa, Escherichia coli; identical to SEQ ID NO: 2244

SEQ ID NO: 17706 - protein, 838 aa, Escherichia coli
MPQRHHQGHKRTPKQLALIIKRCLPMVLTGSGMLCTTANAEEYYFDPIMLETTKSGMQTTDLSRFSKKYAQLPGTYQVDIWLNKKKVSQKKITFTANAEQLLQPQFTVEQLRELGIKVDEIPALAEKDDDSVINSLEQIIPGTAAEFDFNHQQLNLSIPQIALYRDARGYVSPSRWDDGIPTLFTNYSFTGSDNRYRQGNRSQRQYLNMQNGANFGPWRLRNYSTWTRNDQTSSWNTISSYLQRDIKALKSQLLLGESATSGSIFSSYTFTGVQLASDDNMLPNSQRGFAPTVRGIANSSAIVTIRQNGYVIYQSNVSAGAFEINDLYPSSNSGDLEVTIEESDGTQRRFIQPYSSLPMMQRPGHLKYSATAGRYRADANSDSKEPEFAEATAIYGLNNTFTLYGGLLGSEDYYALGIGIGGTLGALGALSMDINRADTQFDNQHSFHGYQWRTQYIKDIPETNTNIAVSYYRYTNDGYFSFNEANTRNWDYNSRQKSEIQFNISQTIFDGVSLYASGSQQDYWGNNDKNRNISVGVSGQQWGVGYSLNYQYSRYTDQNNDRALSLNLSIPLERWLPRSRVSYQMTSQKDRPTQHEMRLDGSLLDDGRLSYSLEQSLDDDNNHNSSLNASYRSPYGTFSAGYSYGNDSSQYNYGVTGGVVIHPHGVTLSQYLGNAFALIDANGASGVRIQNYPGIATDPFGYAVVPYLTTYQENRLSVDTTQLPDNVDLEQTTQFVVPNRGAMVAARFNANIGYRVLVTVSDRNGKPLPFGALASNDDTRQQSIVDEGGILYLSGISSKSQSWTVRWGNQADQQCQFAFSTPDSEPTTSVLQGTAQCH

SEQ ID NO: 17707 - protein, 230 aa, Escherichia coli; identical to SEQ ID NO: 2580

SEQ ID NO: 17708 - protein, 208 aa, Escherichia coli; identical to SEQ ID NO: 1949

SEQ ID NO: 17709 - protein, 111 aa, Escherichia coli; identical to SEQ ID NO: 3419

SEQ ID NO: 17710 - protein, 715 aa, Escherichia coli; identical to SEQ ID NO: 5610

SEQ ID NO: 17711 - protein, 412 aa, Escherichia coli; identical to SEQ ID NO: 15148

SEQ ID NO: 17712 - protein, 162 aa, Escherichia coli; identical to SEQ ID NO: 1973

SEQ ID NO: 17713 - protein, 353 aa, Escherichia coli
MTERELSIIRALGEEFATVLADLQHTFEEKMAAQAQAFEEKLASLSAVLQKHVTVDEVHPVLQAMVDDAVGTIPVPRDGRDYDPDVLQQAVNDAVANIPVPADGKSITPDDVRPMLEQMVKEAVSHIPAPRDGRDYDPDVLQQAVNDAVANIPVPADGKSITPDDVRPMLEQMVKEAVSHIPAPRDGRDYDPEVLKQAVLEAVNALPAPQDGRDATALEVLPAIDDQKSFPRGTYATHLGGLWRAYEKTHGMRGWECLVDGVADIDVSMTGERLFSVVIRQSSGQCTEKTFSLPVMLYRGVFRAGETYHPGDTVTWGGSLWHCNSMTADKPGDAHASGWTLAAKRGRDAGGGK

SEQ ID NO: 17714 - protein, 742 aa, Escherichia coli
MGEISVKTGNNARNGGKNSLNRLIRCVCGKKIGPDPRNFNQRVSLGRNDLLIRTFLSIPQAWLAWHSENWAPPSTWKEGVAGVLMDYNLFASSYRPQDGSSSTNLNAYGTAGINAGAWRLRSDYQLNKTDSEDNHDQSGGISRTYLFRPLPQLGSKLTLGETDFSSNIFDGFSYTGAALASDDRMLPWELRGYAPQISGIAQTNATVTISQSGRVIYQKKVPPGPFVIDDLNQSVQGTLDVKVTEEDGRVNNFQVSAASTPFLTRQGQVRYKLAAGQPRPSMSHQTENETFFSNEVSWGMLSNTSLYGGLLISDDDYHSAAMGIGQNMLWLGALSFDVTWASSHFDTQQDERGLSYRFNYSKQVDATNSTISLAAYRFSDRHFHSYANYLDHKYNDSDAQDEKQTISLSVGQPITPLNLNLYANLLHQTWWNADASTTANITAGFNVDIGDWRDISISTSFNTTHYEDKDRDNQIYLSISLPFGNGGRVGYDMQNSSHSTIHRMSWNDTLDERNSWGMSAGLQSDRPDNGAQVSGNYQHLSSAGEWDISGTYAASDYSSVSSSWSGSFTATQYGAAFHRRSSTNEPRLMVSTDGVADIPVQGNLDYTNHFGIAVVPLISSYQPSTVAVNMNDLPDGVTVAENVIKETWIEGAIGYKSLASRSGKDVNVIIRNASGQFPPLGADIRQDDSGISVGMVGEEGHAWLSGVAENQLFTVVWGEQSCIIHLPERLEDTTKRLILPCH

SEQ ID NO: 17715 - protein, 227 aa, Escherichia coli
MRIITALLMSFFILPVHAGVVIYGTRIIYPEKSREVLVQLMNQSKNASLIQAWIDDGNTTIAPEKIQVPFILTPPVSRVAGGSGQQLKIRKMPNNLPHNKESLFYLNVLDIPPNNPQNAGKNKIKLALQNRIKLLWRPSGIAPVDKKSFSQLNIKKKNNAISINNETANWITITTIKAQNVKVNNESILLPPFSNNDITLKNNHASEYELTVVDDYGNNIHSNIAAR

SEQ ID NO: 17716 - protein, 274 aa, Escherichia coli; identical to SEQ ID NO: 2301

SEQ ID NO: 17717 - protein, 749 aa, Escherichia coli
MARSKTAQPKHSLRKIAVVVATAVSGMSVYAQAAVEPKEDTITVTAAPAPQESAWGPAATIAARQSATGTKTDTPIQKVPQSISVVTAEEMALHQPKSVKEALSYTPGVAVGTRGASNTYDYLIIRGFAADGQSQNNYLNGLKMQGNFYNDAVIDPYMLERAEIMRGPVSVLYGKSSPGGLLNMVSKRPTTEPLKEVQFKAGTDSLFQTGFDFSDALDDDGVYSYRLTGLARSANAQQKGAEEQRYAIAPAFTWRPDDKTNFTFLSYFQNEPETGYYGWLPKEGTVEPLPNGKRLPTDFNEGAKNNTYSRNEKMIGYSFDHEFNDTFTVRQNLRFAQNKVSQKSVYGYGMCSDPLYSSNPSSSPCANVPQSQWGHTLTRQYVIDNEKLENFSVDTQLQSKFATGSVDHTLLTGVDFMRMRNDIDSWFGYAGSVAPSDIYNLDRSDFDFGAHPNPSGPYRVLLKQKQTGLYVQDQAQWDKVLVTLGGRYDWADQSSFNRDYGNKSDRDDKQFTWRGGVNYLFDNGVTPYFSYSESFEPASQTDANGDLFAPSKGKQYEVGVKYVPEDRPIVVTGALYQLTKTNNLMADPNGSLFSVEGGEIRARGVELEAKAALSASVNLVGSYTYTDAEYTTDTTYKGNTPAQVPKHMASLWADYTFFDGPLSGLTLGTGGRYTGSSYGDPANSFKVGSYTVVDALVRYDLARVGMAGSNVALHVNNLFDREYVASCFNTYGCFWGAERQVVATATFRF

SEQ ID NO: 17718 - protein, 213 aa, Escherichia coli
MIFPVHAGMVIFGTRIIYPAEQKEVMVQLMNQGNRSSLMQAWIDDGDTSLPPEKIQVPFMLTPPVVKVAANSGQQIKIKIMPNKLPSNKESIFYLNVLDIPPNSPEQEGKNALKFAMQNRIKLFYRPAGIAPVNKATFKKLLINRSGNGLVIKNDSANWVTISDVKANNVKVNYETIMIAPLESQSVNVKSNNANNWYLTIIDDHGNYISDKI

SEQ ID NO: 17719 - protein, 208 aa, Escherichia coli; identical to SEQ ID NO: 1949

SEQ ID NO: 17720 - protein, 226 aa, Escherichia coli; identical to SEQ ID NO: 9889

SEQ ID NO: 17721 - protein, 191 aa, Escherichia coli; identical to SEQ ID NO: 2727

SEQ ID NO: 17722 - protein, 199 aa, Escherichia coli; identical to SEQ ID NO: 3190

SEQ ID NO: 17723 - protein, 733 aa, Escherichia coli; identical to SEQ ID NO: 2881

SEQ ID NO: 17724 - protein, 673 aa, Escherichia coli
MKMTRLYPLALGGLLLPAIANAQTSQQDESTLVVTASKQSSRSASANNVSSTVVSAPELSDAGVTASDKLPRVLPGLNIENSGNMLFSTISLRGVSSAQDFYNPAVTLYVDGVPQLSTNTIQALTDVQSVELLRGPQGTLYGKSAQGGIINIVTQQPDSTPRGYIEGGVSSRDSYRSKFNLSGPIQDGLLYGSVTLLRQVDDGDMINPATGSDDLGGTRASIGNVKLRLAPDDQPWEMGFAASRECTRATQDAYVGWNDIKGRKLSISDGSPDPYMRRCTDSQTLSGKYTTDDWVFNLISAWQQQHYSRTFPSGSLIVNMPQRWNQDVQELRAATLGDARTVDMVFGLYRQNTREKLNSAYDMPTMPYLSSTGYTTAETLAAYSDLTWHLTDRFDIGGGVRFSHDKSSTQYHGSMLGNPFGDQGKSNDDQVLGQLSAGYMLTDDWRVYTRVAQGYKPSGYNIVPTAGLDAKPFVAEKSINYELGTRYETADVTLQAATFYTHTKDMQLYSGPVGMQTLSNAGKADATGVELEAKWRFAPGWSWDINGNVIRSEFTSDSELYHGNRVPFVPRYGAGSSVNGVIDTRYGALMPRLAVNLVGPHYFDGDNQLRQGTYATLDSSLGWQATERMNIFVYVDNLFDRRYRTYGYMNGSSAVAQVNMGRTVGINTRIDFF

SEQ ID NO: 17725 - protein, 246 aa, Escherichia coli
MFFNTKHTTALCFVTCMAFSSSSIADIVISGTRVIYKSDQKSVNVRLENKGNNPLLVQSWLDTGDDNAEPGSITVPFTATPPVSRIDAKRGQTIKLMYTASTSLPKDRESVFWFNVLEVPPKPDAEKVANQSLLQLAFRTRIKLFYRPDGLKGNPSEAPLALKWFWSGSEGKASLRVTNPTPYYVSFSSGDLEASGKRYPIDVKMIAPFSDEVMKVTGLNGKANSAKVHFYAINDFGGAIEGNARL

SEQ ID NO: 17726 - protein, 604 aa, Escherichia coli
MLSTQFNRDNQHQAIIKPSLLAGCIALALLPSAAFAAPATEETVIVEGSATAPDNGENDYNVTSTSAGTKMQMTQRDIPQSVTIVSQQRMEDQQLQTLGEVMENTLGISKSQADSDRALYYSRGFQIDNYMVDGIPTYFESRWNLGDALSDMALFERVEVVRGATGLMTGTGNPSAAINMIRKHATSREFKGDVSAEYGSWNKERYVADLQSPLTEDGKIRARIVGGYQNNDSWLDRYNSEKTFFSGIVDADLGDLTTLSAGYEYQRIDVNSPTWGGLPRWNTDGSSNSYDRARSTAPDWAYNDKEINKVFMTLKQRFADTWQATLNATHSEVEFDSKMMYVDAYVNKADGMLVGPYSNYGPGFDYVGGTGWNSGKRKVDALDLFADGSYELFGRQHNLMFGGSYSKQNNRYISSWANIFPDEIGSFYNFNGNFPQTDWSPQSLAQDDTTHMKSLYAATRVTLADPLHLILGARYTNWRVDTLTYSMEKNHTTPYAGLVFDINDNWSTYASYTSIFQPQNDRDSSGKYLAPITGNNYELGLKSDWMNSRLTTTLAIFRIEQDNVAQSTGTPIPGSNGETAYKAVDGTVSKGVEFELNGAITDNW

SEQ ID NO: 17727 - protein, 614 aa, Escherichia coli; identical to SEQ ID NO: 1888

SEQ ID NO: 17728 - protein, 774 aa, Escherichia coli
MTPLRVFRKTTPLVNTIRLSLLPLAGLSFSAFAAQVNIAPGSLDKALNQYAAHSGFTLSVDASLTRGKQSNGLHGDYDVESGLQQLLDGSGLQVKPLGNNSWTLEPAPAPKEDALTVVGDWLGDARENDVFEHAGARDVIRREDFAKTGATTMREVLNRIPGVSAPENNGTGSHDLAMNFGIRGLSPRLASRSTVLMDGIPVPFAPYGQPQLSLAPVSLGNMDAIDVVRGGGAVRYGPQSVGGVVNFVTRAIPQDFGIEAGVEGQLSPTSSQNNPKETHNLMVGGTADNGFGTALLYSGTRGSDWREHSATRIDDLMLKSKYAPDEVHTFNSLLQYYDGEADMPGGLSRADYDADRWQSTRPYDRFWGRRKLASLGYQFQPDSQHKFNIQGFYTQTLRSGYLEQGKRITLSPRNYWVRGIEPRYSQIFMIGPSAHEVGVGYRYLNESTHEMRYYTATSSGQLPSGSSPYDRDTRSGTEAHAWYLDDKIDIGNWTITPGMRFEHIESYQNNAITGTHEEVSYNAPLPALNVLYHLTDSWNLYANTEGSFGTVQYSQIGKAVQSGNVEPEKARTWELGTRYDDGALTAEIGLFLINFNNQYDSNQTNDTVTARGKTRHTGLETQARYDLGTLTPTLDNVSIYASYAYVNAEIREKGDTYGNLVPFSPKHKGTLGVDYKPGNWTFNLNSDFQSSQFADNANTVKESADGSTGRIPGFMLWGARVAYDFGPQMADLNLAFGVKNIFDQDYFIRSYDDNNKGIYAGQPRTLYMQGSLKF

SEQ ID NO: 17729 - protein, 828 aa, Escherichia coli; identical to SEQ ID NO: 2386

SEQ ID NO: 17730 - protein, 670 aa, Escherichia coli
MKAARCLPVVLAALIFAGCGTHTPDQSTAYMQGTAQADSAFYLQQMQQSSDDTRINWQLLAIRALVKEGKTGQAVELFNQLPQELNDAQRREKTLLAVEIKLAQKDFAGAQNLLAKITPADLEQNQQARYWQAKIDASQGRPSIDLLRALIAQEPLLGAKEKQQNIDATWQALSSMTQEQANTLVINADENILQGWLDLQRVWFDNRNDPDMMKAGIADWQKRYPNNPGAKMLPTQLVNVKAFKPASTNKIALLLPLNGQAAVFGRTIQQGFEAAKNIGTQPVAAQVAAAPAADVAEQPQPQTVDGVASPAQASVSDLTGEQPAAQPVPVSAPATSTAAVSAPANPSAELKIYDTSSQPLSQILSQVQQDGASIVVGPLLKNNVEELLKSNTPLNVLALNQPENIENRVNICYFALSPEDEARDAARHIRDQGKQAPLVLIPRSSLGDRVANAFAQEWQKLGGGTVLQQKFGSTSELRAGVNGGSGIALTGSPITLRATTDSGMTTNNPTLQTTPTDDQFTNNGGRVDAVYIVATPGEIAFIKPMIAMRNGSQSGATLYASSRSAQGTAGPDFRLEMEGLQYSEIPMLAGGNLPLMQQALSAVNNDYSLARMYAMGVDAWSLANHFSQMRQVQGFEINGNTGSLTANPDCVINRNLSWLQYQQGQVVPVS

SEQ ID NO: 17731 - protein, 656 aa, Escherichia coli
MYMNVIRNVICTLIILPIGLQAETSHSSMAKDTITVVATGNQNTVFETPSMVSVVTNDTPWSQNAVTSAGMLKGVAGLSQTGAGRTNGQTFNLRGYDKSGVLVLVDGIRQLSDMAKSSGTYLDPALVKRIEVVRGPNSSLYGSGGLGGVVDFRTADAADFLPPGETNGLSLWGNIASGDHSTGSGLTWFGKTGKTDALLSVIMRKRGNIYQSDGERAPNKEKPAALFAKGSVGITDSNKAGASLRLYRNNTTEPGNPTQTHGDSGLRDRKTVQNGVQFWYQYAPVDNSLINVKSTLYLSDITIKTNGHNKTAEWRNNRTSGVNVVNRSHTLIFPGAHQLSYGAEYYRQQQKPEGSATLYPEGNIDFTSLYFQDEMTMKSYPVNIIVGSRYDRYKSFNPRAGELKAERLSPRAAISVSPTDWLMMYGSISSAFRAPTMAEMYRDDVHFYRKGKPNYWVPNLNLKPENNITREIGAGIQLDGLLTGNDRLQLKGGYFGTDARNYIATRVDMKRMRSYSYNVSRARIWGWDMQGNYQSDYFDWMLSYNRTESMDASSREWLGSGNPDTLISDISIPVGHGGVSAGWRAELSAAATHVKKGDPHQAGYAVHSFSLSYKPVSVKGFEASVTLDNAFNKLAMNGKGVPLSGRTVSLYTRYQW

SEQ ID NO: 17732 - protein, 650 aa, Escherichia coli; identical to SEQ ID NO: 2146

SEQ ID NO: 17733 - protein, 446 aa, Escherichia coli [sequence omitted]

SEQ ID NO: 17734 - protein, 265 aa, Escherichia coli
MKMRAVAVFTGMLTGVLSVTGLLSAGAYAAGGEGNMSASATETNARVFSLHLGATRVVYNPASSGETLTVINDQDYPMLVQSEVLSEDQKSPAPFVVTPPLFRLDGQQSSRLRIVRTYGEFPSDRESLQWICVKGIPPKEDDRWAEGKDGEKKADKVSLNVQLSVSSCIKLFVRPPAVKGRPDDVAGKVEWQRAGNRLKGVNPTPFYINLSALTVGGKEVKEREYIAPFSSREYPLPAGASGKVQWKVITDYGGTSKQFEAELKG

SEQ ID NO: 17735 - protein, 250 aa, Escherichia coli
MSYKLSSSMVVSTALAALLSTVSLAAHASVTPDRTRLVFNESDKSISVTLRNNNEKLPYLAQSWLEDEKGNKITSPLAVLPPVQRIDAMMNGQVKIQALPDIHTLPSDRESLFYYNVREIPPKTGKANTLQIALQTRIKLFWRPKALEKIDMRKPWQFKVTLTRSGQDYTVNNPTPYHVIISDASTQKKGPTAAGFKPLVMSPKTSQPLKAKMDSAPVLTYINDYGARLPLIFRCEGDTCKVDEDQSSKG

SEQ ID NO: 17736 - protein, 614 aa, Escherichia coli
MIKKASLLTACSVTAFSAWAQDTSPDTLVVTANRFEQPRSTVLAPTTVVTRQDIDRWQSTSVNDVLRRLPGVDITQNGGSGQLSSIFIRGTNASHVLVLIDGVRLNLAGVSGSADLSQFPIALVQRVEYIRGPRSAVYGSDAIGGVVNIITTRDEPGTEISAGWGSNSYQNYDVSTQQQLGDKTRVTLLGDYAHTHGYDVVAYGNTGTQAQTDNDGFLSKTLYGALEHNFTDAWSGFVRGYGYDNRTNYDAYYSPGSPLLDTRKLYSQSWDAGLRYNGELIKSQLITSYSHSKDYNYDPHYGRYDSSATLDEMKQYTVQWANNVIVGHGSIGAGVDWQKQTTTPGTGYVEDGYDQRNTGIYLTGLQQVGDFTFEGAARSDDNSQFGRHGTWQTSAGWEFIEGYRFIASYGTSYKAPNLGQLYGFYGNPNLNPEKSKQWEGAFEGLTAGVNWRISGYRNDVSDLIDYDDHTLKYYNEGKARIKGVEATANFDTGPLTHTVSYDYVDARNAITDVPLLRRAKQQVKYQLDWQLYDFDWGITYQYLGTRYDKDYSSYPYQTVKMGGVSLWDLAVAYPVTSHLTVRGKIANLFDKDYETVYGYQTAGREYTLSGSYTF

SEQ ID NO: 17737 - protein, 641 aa, Escherichia coli; identical to SEQ ID NO: 3774

SEQ ID NO: 17738 - protein, 430 aa, Escherichia coli; identical to SEQ ID NO: 2617

SEQ ID NO: 17739 - protein, 230 aa, Escherichia coli; identical to SEQ ID NO: 2580

SEQ ID NO: 17740 - protein, 746 aa, Escherichia coli; identical to SEQ ID NO: 4083

SEQ ID NO: 17741 - protein, 232 aa, Escherichia coli; identical to SEQ ID NO: 2087

SEQ ID NO: 17742 - protein, 567 aa, Escherichia coli; identical to SEQ ID NO: 15273

SEQ ID NO: 17743 - protein, 774 aa, Escherichia coli
MTPLRVFRKTTPLVNAIRLSLLPLAGLSFSAFAAQVNIAPGSLDKALNQYAAHSGFTLSVDASLTRGKQSNGLHGDYDVESGLQQLLDGSGLQVKPLGNNSWTLEPAPAPKEDALTVVGDWLGDARENDVFEHAGARDVIRREDFAKTGATTMREVLNRIPGVSAPENNGTGSHDLAMNFGIRGLNPRLASRSTVLMDGIPVPFAPYGQPQLSLAPISLGNMDAIDVVRGGGAVRYGPQSVGGVVNFVTRAIPQDFGIEAGVEGQLSPTSSQNNPKETHNLMVGGTADNGFGTALLYSGTRGSDWREHSATRIDDLMLKSKYAPDEVHTFNSLLQYYDGEADMPGGLSRADYDADRWQSTRPYDHFWGRRKLASLGYQFQPDSQHKFNIQGVYTQTLRSGYLEQGKRITLSPRNYWVRGIEPRYSQIFMIGPSAHEVGVGYRYVNESTHEMRYYTATSSGQLPSGSSPYDRDTRSGTEAHAWYLDDKIDIGNWTITPGMRFEHIESYQNNAITGTHEEVSYNAPLPALNVLYHLTDSWNLYANTEGSFGTVQYSQIGKAVQSGNVEPEKARTWELGTRYDDGALTAEMGLFLINFNNQYDSNQTNDTVTARGKTRHTGLETQARYDLGTLTPTLDNVSIYASYAYVNAEIREKGDTYGNLVPFSPKHKGTLGVDYKPGNWTFNLNSDFQSSQFADNANTVKESADGSTGRIPGFMLWGARVAYDFGPQMADLNLAFGVKNIFDQDYFIRSYDDNNKGIYAGQPRTLYMQGSLKF

SEQ ID NO: 17744 - protein, 203 aa, Escherichia coli; identical to SEQ ID NO: 2008

SEQ ID NO: 17745 - protein, 102 aa, Escherichia coli; identical to SEQ ID NO: 1829

SEQ ID NO: 17746 - protein, 236 aa, Escherichia coli
MTNTWNRLALLIFAVLSLLVASELQAGVVVGGTRFIFPADRDSISISLTNTSQESWLINSKINRPTRWAGGEASTVPAPLLAAPPLILLKPGTTGTLRLLRTESDILPVDRETLFELSIASVPSGKVENQSVKVAMRSVFKLFWRPEGLPGDPLEAYQQLRWTRNSQGVQLTNPTPYYINLIQVSVNGKALSNAGVVPPKSQRQTSWCQAITPCHVSWRTINDYGGLSAKKEQNLP

SEQ ID NO: 17747 - protein, 505 aa, Escherichia coli
MYKKTTLAMLIALLTGATTVHAQTDISSIESRLAALEQRLKNAESRAQAAEARAKTAELQVQKLAETQQQNQLTTQEVAQRTVQLEQKSAENSGFEFHGYARSGLLMNDAASSSKSGPYLTPAGETGGAVGRLGNEADTYVELNVEHKQTLDNGATTRFKAMLADGQRDYNDWTGGSSNLNIRQAFAELGALPSFTGAFKDSTVWAGKRFDRDNFDIHWLDSDVVFLAGTGGGIYDVKWNDTFRSNFSLYGRNFGDLDDIDNNVQNYILTMNHYAGPFQLMVSGLRAKDNDDRKDANGDLIQTDAANTGVHALVGLHNDTFYGLREGTAKTALLYGHGLGAEVKGIGSDGALLSEANTWRFASYGTTPLGSGWYVAPAILAQSSKDRYVKGDSYEWVTFNTRLIKEVTQNFALAFEGSYQYMDLKPKGYQNHNAVNGSFYKLTFAPTLKANDINNFFSRPELRLFATWMDWSSKLDDFASNDAFGSSGFNTGGEWNFGVQMETWF

SEQ ID NO: 17748 - protein, 193 aa, Escherichia coli; identical to SEQ ID NO: 2252

SEQ ID NO: 17749 - protein, 432 aa, Escherichia coli; identical to SEQ ID NO: 2026

SEQ ID NO: 17750 - protein, 233 aa, Escherichia coli; identical to SEQ ID NO: 4744

SEQ ID NO: 17751 - protein, 511 aa, Escherichia coli; identical to SEQ ID NO: 2457

SEQ ID NO: 17752 - protein, 821 aa, Escherichia coli
MSGVVCSLLFVLPVHAVEFNVDMIDAEDRENIDISRFEKKGYIPPGRYLVRVQINKNMLPQTLILEWVKADNESGSLLCLTKENLTNFGLNTEFIESLQNIAGSECLDLSQRQELTTRLDKATMILSLSVPQAWLKYQATNWTPPEFWDAGIAGFILDYNVYASQYAPHHGDSTQNVSSYGTLGFNLGAWRLRSDYQYNQNFADGRSVNHDSEFARTYLFRPIPSWSSKFTMGQYDLSSNLYDTFHFTGASLESDESMLPPDLQGYAPQITGIAQTNAKVTVAQNGRVLYQTTVAPGPFTISDLGQSFQGQLDVTVEEEDGRTSTFQVGSASIPYLTRKGQVRYKTSLGKPTSVGHNDINNPFFWTVEASWGWLNNVSLYGGGMFTADDYQAITTGIGFNLNQFGSLSFDVTGADASLQQQNSDNLRGYSYRFNYAKHFESTGSQITFAGYRFSDKDYVSMSEYLSSRNGDESIDNEKESYVISLNQYFETLELNSYLNVTRNTYWDSASNTNYSVSVSKNFDIGEFKGISASLAVSRIRWDDDEENQYYFSFSLPLQQNRNISYSMQRTGSSNTSQMISWYDSSDRNNIWNISASATDDNIRDGEPTLRGSYQHYSPWGRLNINGSVQPNQYNSVTAGWYGSLTATRHGVALHDYSYGDNARMMVDTDGISGVEINSNRTVTNGLGIAVIPSLSNYTTSMLRVNNNDLPEGVDVENSVIRTTLTQGAIGYAKLNATTGYQIVGVIRQENGRFPPLGVNVTDKATGKDVGLVAEDGFVYLSGIQENSILHLTWGDNTCEVTPPNQSNISESAIILPCKTVK

SEQ ID NO: 17753 - protein, 869 aa, Escherichia coli; identical to SEQ ID NO: 3352

SEQ ID NO: 17754 - protein, 230 aa, Escherichia coli; identical to SEQ ID NO: 2995

SEQ ID NO: 17755 - protein, 746 aa, Escherichia coli; identical to SEQ ID NO: 2949

SEQ ID NO: 17756 - protein, 816 aa, Escherichia coli; identical to SEQ ID NO: 4456

SEQ ID NO: 17757 - protein, 826 aa, Escherichia coli; identical to SEQ ID NO: 3563

SEQ ID NO: 17758 - protein, 784 aa, Escherichia coli; identical to SEQ ID NO: 2240

SEQ ID NO: 17759 - protein, 170 aa, Escherichia coli; identical to SEQ ID NO: 2565

SEQ ID NO: 17760 - protein, 367 aa, Escherichia coli; identical to SEQ ID NO: 2431

SEQ ID NO: 17761 - protein, 161 aa, Escherichia coli; identical to SEQ ID NO: 2582

SEQ ID NO: 17762 - protein, 331 aa, Escherichia coli; identical to SEQ ID NO: 2705

SEQ ID NO: 17763 - protein, 760 aa, Escherichia coli; identical to SEQ ID NO: 2078

SEQ ID NO: 17764 - protein, 252 aa, Escherichia coli; identical to SEQ ID NO: 3543

SEQ ID NO: 17765 - protein, 361 aa, Escherichia coli; identical to SEQ ID NO: 3601

SEQ ID NO: 17766 - protein, 224 aa, Escherichia coli; identical to SEQ ID NO: 3578

SEQ ID NO: 17767 - protein, 230 aa, Escherichia coli; identical to SEQ ID NO: 3723

SEQ ID NO: 17768 - protein, 386 aa, Escherichia coli; identical to SEQ ID NO: 3094

SEQ ID NO: 17769 - protein, 650 aa, Escherichia coli; identical to SEQ ID NO: 8603

SEQ ID NO: 17770 - protein, 446 aa, Escherichia coli; identical to SEQ ID NO: 2176

SEQ ID NO: 17771 - protein, 237 aa, Escherichia coli; identical to SEQ ID NO: 13595

SEQ ID NO: 17772 - protein, 193 aa, Escherichia coli; identical to SEQ ID NO: 2246

SEQ ID NO: 17773 - protein, 243 aa, Escherichia coli; identical to SEQ ID NO: 12586

SEQ ID NO: 17774 - protein, 816 aa, Escherichia coli; identical to SEQ ID NO: 12597

SEQ ID NO: 17775 - protein, 363 aa, Escherichia coli; identical to SEQ ID NO: 3347

SEQ ID NO: 17776 - protein, 409 aa, Escherichia coli
MVVNTVASENPDEAGRYSMDVEYGQYSVILLVEGFPPSHAGTITVYEDSQPGTLNDFLGAMSEDDVRPEALRRFELMVEEAARHAEEAKKNAGEAETSARNAGISASQAEESAANADTSAGDASESARQAAESAAAAKQSEEASSSSASAAAQKASESLQSATDAELSKKTAESAAGNAARDATTAAEKARESAESAQSAEQSRIAAEEAVNRIPTVVGPPGPKGEQGPAGPQGPKGDKGERGDTGPVGATGERGPAGDAGPAGPQGPKGDRGERGETGLTGNAGPQGPKGDTGAAGPAGPQGPKGETGAAGPVGATGPQGPKGDPGETQIRFRLGPASIIETNSHGWFPGTDGALITGLTFLAPKDTTRVQGFFSICRSGLVTGRGRMLRGWMKWAVIQAEQENDMNI

SEQ ID NO: 17777 - protein, 518 aa, Escherichia coli; identical to SEQ ID NO: 2351

SEQ ID NO: 17778 - protein, 209 aa, Escherichia coli; identical to SEQ ID NO: 3547

SEQ ID NO: 17779 - protein, 232 aa, Escherichia coli; identical to SEQ ID NO: 2087

SEQ ID NO: 17780 - protein, 432 aa, Escherichia coli; identical to SEQ ID NO: 2026

SEQ ID NO: 17781 - protein, 213 aa, Escherichia coli; identical to SEQ ID NO: 2232

SEQ ID NO: 17782 - protein, 774 aa, Escherichia coli; identical to SEQ ID NO: 3122

SEQ ID NO: 17783 - protein, 591 aa, Escherichia coli; identical to SEQ ID NO: 3668

SEQ ID NO: 17784 - protein, 274 aa, Escherichia coli; identical to SEQ ID NO: 3721

SEQ ID NO: 17785 - protein, 250 aa, Escherichia coli; identical to SEQ ID NO: 3707

SEQ ID NO: 17786 - protein, 241 aa, Escherichia coli; identical to SEQ ID NO: 2922

SEQ ID NO: 17787 - protein, 203 aa, Escherichia coli; identical to SEQ ID NO: 2201

SEQ ID NO: 17788 - protein, 231 aa, Escherichia coli; identical to SEQ ID NO: 2868

SEQ ID NO: 17789 - protein, 838 aa, Escherichia coli; identical to SEQ ID NO: 2916

SEQ ID NO: 17790 - protein, 236 aa, Escherichia coli; identical to SEQ ID NO: 3970

SEQ ID NO: 17791 - protein, 446 aa, Escherichia coli; identical to SEQ ID NO: 2180

SEQ ID NO: 17792 - protein, 518 aa, Escherichia coli; identical to SEQ ID NO: 2349

SEQ ID NO: 17793 - protein, 353 aa, Escherichia coli; identical to SEQ ID NO: 10905

SEQ ID NO: 17794 - protein, 432 aa, Escherichia coli; identical to SEQ ID NO: 2026

SEQ ID NO: 17795 - protein, 203 aa, Escherichia coli; identical to SEQ ID NO: 2009

SEQ ID NO: 17796 - protein, 386 aa, Escherichia coli; identical to SEQ ID NO: 3600

SEQ ID NO: 17797 - protein, 125 aa, Escherichia coli; identical to SEQ ID NO: 3090

SEQ ID NO: 17798 - protein, 539 aa, Escherichia coli; identical to SEQ ID NO: 3050

SEQ ID NO: 17799 - protein, 721 aa, Escherichia coli; identical to SEQ ID NO: 3717

SEQ ID NO: 17800 - protein, 678 aa, Escherichia coli; identical to SEQ ID NO: 3014

SEQ ID NO: 17801 - protein, 246 aa, Escherichia coli; identical to SEQ ID NO: 3021

SEQ ID NO: 17802 - protein, 747 aa, Escherichia coli; identical to SEQ ID NO: 14675

SEQ ID NO: 17803 - protein, 266 aa, Escherichia coli; identical to SEQ ID NO: 1894

SEQ ID NO: 17804 - protein, 161 aa, Escherichia coli; identical to SEQ ID NO: 2582

SEQ ID NO: 17805 - protein, 203 aa, Escherichia coli; identical to SEQ ID NO: 2201

SEQ ID NO: 17806 - protein, 361 aa, Escherichia coli; identical to SEQ ID NO: 3061

SEQ ID NO: 17807 - protein, 591 aa, Escherichia coli; identical to SEQ ID NO: 3668

SEQ ID NO: 17808 - protein, 208 aa, Escherichia coli; identical to SEQ ID NO: 1949

SEQ ID NO: 17809 - protein, 230 aa, Escherichia coli; identical to SEQ ID NO: 3348

SEQ ID NO: 17810 - protein, 747 aa, Escherichia coli; identical to SEQ ID NO: 2072

SEQ ID NO: 17811 - protein, 615 aa, Escherichia coli; identical to SEQ ID NO: 11238

SEQ ID NO: 17812 - protein, 226 aa, Escherichia coli; identical to SEQ ID NO: 3085

SEQ ID NO: 17813 - protein, 834 aa, Escherichia coli; identical to SEQ ID NO: 3095

SEQ ID NO: 17814 - protein, 641 aa, Escherichia coli; identical to SEQ ID NO: 9297

SEQ ID NO: 17815 - protein, 478 aa, Escherichia coli; identical to SEQ ID NO: 3436

SEQ ID NO: 17816 - protein, 729 aa, Escherichia coli; identical to SEQ ID NO: 4170

SEQ ID NO: 17817 - protein, 213 aa, Escherichia coli; identical to SEQ ID NO: 4186

SEQ ID NO: 17818 - protein, 207 aa, Escherichia coli; identical to SEQ ID NO: 2211

SEQ ID NO: 17819 - protein, 838 aa, Escherichia coli; identical to SEQ ID NO: 10448

SEQ ID NO: 17820 - protein, 678 aa, Escherichia coli; identical to SEQ ID NO: 4148

SEQ ID NO: 17821 - protein, 367 aa, Escherichia coli; identical to SEQ ID NO: 4158

SEQ ID NO: 17822 - protein, 193 aa, Escherichia coli; identical to SEQ ID NO: 2246

SEQ ID NO: 17823 - protein, 351 aa, Escherichia coli; identical to SEQ ID NO: 2872

SEQ ID NO: 17824 - protein, 191 aa, Escherichia coli; identical to SEQ ID NO: 2996

SEQ ID NO: 17825 - protein, 514 aa, Escherichia coli; identical to SEQ ID NO: 3590

SEQ ID NO: 17826 - protein, 856 aa, Escherichia coli
MAGFFVRLFVACAFAAQAPLSSAELYFNPRFLADDPQAVADLSRFENGQELPPGTYRVDIYLNNGYMATRDVTFNTGDSEQGIVPCLTRAQLASMGLNTASVSGMNLLADDACVPLTSMIHDATAHLDVGQQRLNLTIPQAFMSNRARGYIPPELWDPGINAGLLNYNFSGNSVQNRIGGNSHYAYLNLQSGLNIGAWRLRDNTTWSYNRSDRSSGSKNKWQHINTWLERDIIPLRSRLTLGDGYTQGDIFDGINFRGAQLASDDNMLPDSQRGFAPVIHGIARGTAQVTIKQNGYDIYNSTVPPGPFTINDIYAAGNSGDLQVTIKEADGSTQIFTVPYSSVPLLQREGHTRYSITAGEYRSGNAQQEKPRFFQSTLLHGLPAGWTIYGGTQLADRYRAFNFGIGKNMGALGALSVDMTQANSTLPDDSQHDGQSVRFLYNKSLNESGTDIQLVGYRYSTSGYFNFADTTYSRMNGYNIETQDGVIQVKPKFTDYYNLAYNKRGKLQLTVTQQLGRTSTLYLSGSHQTYWGTSNVDEQFQAGLNTAFEDINWTLSYSLTKNAWQKGRDQMLALNVNIPFSHWLRSDSKSQWRHASASYSMSHDLNGRMTNLAGVYGTLLEDNNLSYSVQTGYAGGGDGNSGSTGYATLNYRGGYGNANIGYSHSDDIKQLYYGVSGGVLAHANGVTLGQPLNETVVLVKAPGAKDAKVENQTGVRTDWRGYAVLPYATEYRENRVELDTNTLADNVDLDNAVANVVPTRGAIVRAEFKARVGIKLLMTLTHNNKPLPFGAMVTSESSQSSGIVADNGQVYLSGMPLAGKVQVKWGEEENAHCIANYQLPPESQQQLLTQLSAECR

SEQ ID NO: 17827 - protein, 539 aa, Escherichia coli; identical to SEQ ID NO: 3050

SEQ ID NO: 17828 - protein, 871 aa, Escherichia coli
MHQVLILPRFARLTIALGLATAVFPVDAEYYFNPRFLSNDLAESVDLSAFTKGREAPPGTYRVDIYLNDEFMTSRDITFIADDNNADLIPCLSTDLLVSLGIKKSALLDNKEHSAEKHVPDNSACTPLQDRLADASTEFDVGQQHLSLSVPQIYVGRMARGYVSPELWEEGINAGLLNYSFNGNSINNRSNHNAGKSNYAYLNLQSGINIGSWRLRDNSTWSYNSGSSNSSNSNKWQHINTSAERDIIPLRSRLTVGDSYTDGDIFDSVNFRGLKINSTEAMLPDSQHGFAPVIHGIARGTAQVSVKQNGYDVYQTTVPPGPFTIDDINSAANGGDLQVTIKEADGSIQTLYVPYSSVPVLQRAGYTRYALAMGEYRSGNNLQSSPKFIQGSLMHGLEGNWTPYGGMQIAEDYQAFNLGIGKDLGLFGAFSFDITQANTTLADGTRHSGQSVKSVYSKSFYQTGTNIQVAGYRYSTQGFYNLSDSAYSRMSGYTVKPPTGDTNEQTQFIDYFNLFYSKRGQEQISISQQLGNYGTTFFSASRQSYWNTSRSDQQISFGLNVPFGDITTSLNYSYSNNIWQNDRDHLLAFTLNVPFSHWMRTDSQSAFRNSNASYSMSNDLKGGMTNLSGVYGTLLPDNNLNYSVQVGNTHGGNTSSGTSGYSSLNYRGAYGNTNVGYSRNGDSSQIYYGMSGGIIAHADGITFGQPLGDTMVLVKAPSADNVKIENQTGIHTDWRGYAILPFATEYRENRVALNANSLADNVELDETVVTVIPTHGAIARATFNAQIGGKVLMTLKYGNKSVPFGAIVTHGENKNGSIVAENGQVYLTGLPQSGKLQVSWGKDKNSNCIVEYKLPEVSPGTLLNQQTAICR

SEQ ID NO: 17829 - protein, 236 aa, Escherichia coli; identical to SEQ ID NO: 3482

SEQ ID NO: 17830 - protein, 816 aa, Escherichia coli; identical to SEQ ID NO: 9317

SEQ ID NO: 17831 - protein, 250 aa, Escherichia coli; identical to SEQ ID NO: 3048

SEQ ID NO: 17832 - protein, 104 aa, Escherichia coli
MTMKKVLGLVVAAAMGLSSAAFAAETATTPAPTATTTKAAPAKTTHHKKQHKAAPAQKAQAAKKHHKNTKAEQKAPEQKAQAAKKHAGKHSHQQPAKPAAQPAA

SEQ ID NO: 17833 - protein, 118 aa, Escherichia coli [sequence omitted]

SEQ ID NO: 17834 - protein, 224 aa, Escherichia coli; identical to SEQ ID NO: 3165

SEQ ID NO: 17835 - protein, 229 aa, Escherichia coli; identical to SEQ ID NO: 3277

SEQ ID NO: 17836 - protein, 191 aa, Escherichia coli; identical to SEQ ID NO: 4195

SEQ ID NO: 17837 - protein, 784 aa, Escherichia coli; identical to SEQ ID NO: 2244

SEQ ID NO: 17838 - protein, 729 aa, Escherichia coli; identical to SEQ ID NO: 4170

SEQ ID NO: 17839 - protein, 445 aa, Escherichia coli; identical to SEQ ID NO: 15963

SEQ ID NO: 17840 - protein, 615 aa, Escherichia coli; identical to SEQ ID NO: 3785

SEQ ID NO: 17841 - protein, 170 aa, Escherichia coli [sequence omitted]

SEQ ID NO: 17842 - protein, 367 aa, Escherichia coli; identical to SEQ ID NO: 4158

SEQ ID NO: 17843 - protein, 161 aa, Escherichia coli; identical to SEQ ID NO: 2582

SEQ ID NO: 17844 - protein, 224 aa, Escherichia coli
MLAGILMFMAMMVAGRAEAGVALGATRVIYPAGQKQVQLAVTNNDENSTYLIQSWVENADGVKDGRFIVTPPLFAMKGKRENTLRILDATNNQLPQDRESLFWMNVKAIPSMDKSKLTENTLQLAIISRIKLYYRPAKLALPPDQAAEKLRFRRSANSLTLINPTPYYLTVTELNAGTRVLENALVPPMGESTVKLPSDAGSNITYRTINDYGALTPKMTGVME

SEQ ID NO: 17845 - protein, 856 aa, Escherichia coli; identical to SEQ ID NO: 10462

SEQ ID NO: 17846 - protein, 351 aa, Escherichia coli; identical to SEQ ID NO: 9352

SEQ ID NO: 17847 - protein, 200 aa, Escherichia coli; identical to SEQ ID NO: 1784

SEQ ID NO: 17848 - protein, 861 aa, Escherichia coli; identical to SEQ ID NO: 16050

SEQ ID NO: 17849 - protein, 672 aa, Escherichia coli; identical to SEQ ID NO: 4183

SEQ ID NO: 17850 - protein, 386 aa, Escherichia coli; identical to SEQ ID NO: 3094

SEQ ID NO: 17851 - protein, 236 aa, Escherichia coli; identical to SEQ ID NO: 3482

SEQ ID NO: 17852 - protein, 843 aa, Escherichia coli; identical to SEQ ID NO: 3163

SEQ ID NO: 17853 - protein, 518 aa, Escherichia coli; identical to SEQ ID NO: 2349

SEQ ID NO: 17854 - protein, 45 aa, Escherichia coli; identical to SEQ ID NO: 6471

SEQ ID NO: 17855 - protein, 760 aa, Escherichia coli; identical to SEQ ID NO: 10453

SEQ ID NO: 17856 - protein, 826 aa, Escherichia coli; identical to SEQ ID NO: 3078

SEQ ID NO: 17857 - protein, 360 aa, Escherichia coli; identical to SEQ ID NO: 3062

SEQ ID NO: 17858 - protein, 230 aa, Escherichia coli; identical to SEQ ID NO: 3348

SEQ ID NO: 17859 - protein, 407 aa, Escherichia coli
MTERELSIIRALGEEFAMVLADLQRTFEEKIAAQAQTFEEKLASQSVVLQKCVTGDDVRPMLEQMVKEAVSHIPVPRDGRDYDPDVLQKAVNDAVANIPVPADGKSITPDDVRPMLEQMVKEAVSHIPVPRDGRDYDPDVLQKAVNDAVAKIPVPADGKSITPDDVHPMLEQMVKEAVSHIPVPRDGRDYDPDVLQKAVNDAVAKIPVPADGKSITPDDVHPMLEQMVKEAVSHIPVPRDGRDYDPDVLQKAVLEAVSALPAPQDGRDATALEILPAIDDQKSFPRGSYATHQGGLWRAYEKTYGMRGWECLVDGVADIDVSMTGERSFSVVVRQSSGQRTEKTFSLPVMLYRGVFRIGETYHPGDTVTWGGSLWHCNSMTADKPGDAHASGWTLAAKRGRDAGGGK

SEQ ID NO: 17860 - protein, 200 aa, Escherichia coli; identical to SEQ ID NO: 1784

SEQ ID NO: 17861 - protein, 746 aa, Escherichia coli
MNKKIHSLALLVNLGIYGVAQAQEPTDTPVSHDDTIVVTAAEQNLQAPGVSTITADAIRKNPVARDVSEIIRTMPGVNLTGNSTSGQRGNNRQIDIRGMGPENTLILIDGKPVSSRNSVRQGWRGERDTRGDTSWVPPEMIERIEVLRGPAAARYGNGAAGGVVNIITKKGSGEWHGSWDAYFNAPEHKEEGATKRTNFSLTGPLGDEFSFRLYGNLDKTQADAWDINQGHQSARAGTYATTLPAGREGVINKDINGVVRWDFAPLQSLELEAGYSRQGNLYAGDTQNTNSDAYTRSKYGDETNRLYRQNYALTWNGGWDNGVTTSNWVQYEHTRNSRIPEGLAGGTEGKFNEKATQDFVDIDLDDVMLHSEVNLPIDFLVNQTLTLGTEWNQQRMKDLSSNTQALTGANTGGAIDGVSATDRSPYSKAEIFSLFAENNMELTDSTIVTPGLRFDHHSIVGNNWSPALNISQGLGDDFTLKMGIARAYKAPSLYQTNPNYILYSKGQGCYASAGGCYLQGNDDLKAETSINKEIGLEFKRDGWLAGVTWFRNDYRNKIEAGYVAVGQNAVGTDLYQWDNVPKAVVEGLEGSLNVPVSETVMWTNNITYMLKSENKTTGDRLSIIPEYTLNSTLSWQAREDLSMQTTFTWYGKQQPKKYNYKGQPAVGPETKEISPYSIVGLSATWDVTKNVSLTGGVDNLFDKRLWRAGNAQTTGDLAGANYIAGAGAYTYNEPGRTWYMSVNTHF

SEQ ID NO: 17862 - protein, 224 aa, Escherichia coli; identical to SEQ ID NO: 7845

SEQ ID NO: 17863 - protein, 232 aa, Escherichia coli; identical to SEQ ID NO: 2087

SEQ ID NO: 17864 - protein, 834 aa, Escherichia coli; identical to SEQ ID NO: 3095

SEQ ID NO: 17865 - protein, 637 aa, Escherichia coli; identical to SEQ ID NO: 6148

SEQ ID NO: 17866 - protein, 274 aa, Escherichia coli; identical to SEQ ID NO: 3160

SEQ ID NO: 17867 - protein, 243 aa, Escherichia coli; identical to SEQ ID NO: 3483

SEQ ID NO: 17868 - protein, 669 aa, Escherichia coli; identical to SEQ ID NO: 3677

SEQ ID NO: 17869 - protein, 241 aa, Escherichia coli; identical to SEQ ID NO: 2887

SEQ ID NO: 17870 - protein, 208 aa, Escherichia coli; identical to SEQ ID NO: 1949

SEQ ID NO: 17871 - protein, 539 aa, Escherichia coli; identical to SEQ ID NO: 3050

SEQ ID NO: 17872 - protein, 382 aa, Escherichia coli
MAMLVPALLVAGAANAAEIYNKNGNKLDLYGKVDTRHTFSDNPGDDGDETIIELGFKGETQITDQLTGYGQALTKTKASDTEGSDNTYVKLAFAGLKFGEMGSFDYGRNYGVIYDVEAWTDMLPVFGGDSYTWTDNFMAGRANGVATYRNSDFFGLVEGLNFALQYQGNNEGSNAGEDQEGTKNGHEDVRFQNGDGFGLSTSYDFDFGLSLGAAYSNSDRTNSQVALGGYHYNEYSKFAGGDTAEAWAFGAKYDANNVYLAMMYAETRNMTPYGNVGIANKTQNFEAVAQYQFDFGLRPSLAYVYSKGKDLGGNDYNNNGHQEYVDQDLVNYVEIGATYYFNKNFSTYVDYKINLLDKDDDFYDNNGIATDDVVGVGLVYQF

SEQ ID NO: 17873 - protein, 224 aa, Escherichia coli; identical to SEQ ID NO: 3115

SEQ ID NO: 17874 - protein, 361 aa, Escherichia coli; identical to SEQ ID NO: 3061

SEQ ID NO: 17875 - protein, 331 aa, Escherichia coli; identical to SEQ ID NO: 2700

SEQ ID NO: 17876 - protein, 669 aa, Escherichia coli; identical to SEQ ID NO: 13681

SEQ ID NO: 17877 - protein, 118 aa, Escherichia coli [sequence omitted]

SEQ ID NO: 17878 - protein, 765 aa, Escherichia coli; identical to SEQ ID NO: 9275

SEQ ID NO: 17879 - protein, 45 aa, Escherichia coli; identical to SEQ ID NO: 6471

SEQ ID NO: 17880 - protein, 432 aa, Escherichia coli; identical to SEQ ID NO: 2026

SEQ ID NO: 17881 - protein, 593 aa, Escherichia coli; identical to SEQ ID NO: 7714

SEQ ID NO: 17882 - protein, 746 aa, Escherichia coli; identical to SEQ ID NO: 3695

SEQ ID NO: 17883 - protein, 161 aa, Escherichia coli; identical to SEQ ID NO: 2582

SEQ ID NO: 17884 - protein, 430 aa, Escherichia coli; identical to SEQ ID NO: 2617

SEQ ID NO: 17885 - protein, 111 aa, Escherichia coli; identical to SEQ ID NO: 2911

SEQ ID NO: 17886 - protein, 266 aa, Escherichia coli; identical to SEQ ID NO: 1894

SEQ ID NO: 17887 - protein, 650 aa, Escherichia coli; identical to SEQ ID NO: 3057

SEQ ID NO: 17888 - protein, 746 aa, Escherichia coli; identical to SEQ ID NO: 3031

SEQ ID NO: 17889 - protein, 430 aa, Escherichia coli; identical to SEQ ID NO: 2617

SEQ ID NO: 17890 - protein, 118 aa, Escherichia coli [sequence omitted]

SEQ ID NO: 17891 - protein, 274 aa, Escherichia coli; identical to SEQ ID NO: 2304

SEQ ID NO: 17892 - protein, 368 aa, Escherichia coli; identical to SEQ ID NO: 2370

SEQ ID NO: 17893 - protein, 249 aa, Escherichia coli; identical to SEQ ID NO: 3492

SEQ ID NO: 17894 - protein, 673 aa, Escherichia coli; identical to SEQ ID NO: 3719

SEQ ID NO: 17895 - protein, 360 aa, Escherichia coli; identical to SEQ ID NO: 3062

SEQ ID NO: 17896 - protein, 565 aa, Escherichia coli; identical to SEQ ID NO: 2678

SEQ ID NO: 17897 - protein, 243 aa, Escherichia coli; identical to SEQ ID NO: 2910

SEQ ID NO: 17898 - protein, 237 aa, Escherichia coli; identical to SEQ ID NO: 1814

SEQ ID NO: 17899 - protein, 231 aa, Escherichia coli; identical to SEQ ID NO: 3055

SEQ ID NO: 17900 - protein, 224 aa, Escherichia coli; identical to SEQ ID NO: 3115

SEQ ID NO: 17901 - protein, 780 aa, Escherichia coli
MKIPTTTDIPQRYTWCLAGICYSSLAILPSFLSYAESYFNPAFLLENGTSVADLSRFERGNHQPARVYRVDLWRNDEFIGSQDIVFESTTENTGDKSGGLMPCFNQVLLERIGLNSSAFPELAQQQNNKCINLLKAVPDATINFDFAAMRLNITIPQIALLSSAHGYIPPEEWDEGIPALLLNYNFTGNRGNGNDSYFFSELSGINIGPWRLRNNGSWNYFRGNGYHSEQWNNIGTWVQRAIIPLKSELVMGDGNTGSDIFDGVGFRGIRLYSSDNMYPDSQQGFAPTVRGIARTAAQLTIRQNGFIIYQSYVSPGAFEITDLHPTSSNGDLDVTIDERDGNQQNYTIPYSTVPILQREGRFKFDLTAGDFRSGNSQQSSPFFFQGTALGGLPQEFTAYGGTQLSANYTAFLLGLGRNLGNWGAVSLDVTHARSQLADDSRHEGDSIRFLYAKSMNTFGTNFQLMGYRYSTQGFYTLDDVAYRRMEGYEYDYDYDGEHRDELIIVNYHNLRFSRKDRLQLNISQSLNDFGSLYISGTHQKYWNTSDSDTWYQVGYTSSWVGISYSLSFSWNESVGIPDNERIVGLNVSVPFNVLTKRRYTRENALDRAYASFNANRNSNGQNSWLAGVGGTLLEGHNLSYHVSQGDTSNNGYTGSATANWQAAYGTLGVGYNYDRDQHDVNWQLSGGVVGHENGITLSQPLGDTNVLIKAPGAGGVRIENQTGILTDWRGYAVMPYATVYRYNRIALDTNTMGNSIDVEKISAALCRRKARWFVPILIPA

SEQ ID NO: 17902 - protein, 224 aa, Escherichia coli; identical to SEQ ID NO: 3165

SEQ ID NO: 17903 - protein, 130 aa, Escherichia coli; identical to SEQ ID NO: 3706

SEQ ID NO: 17904 - protein, 861 aa, Escherichia coli; identical to SEQ ID NO: 16050

SEQ ID NO: 17905 - protein, 368 aa, Escherichia coli; identical to SEQ ID NO: 9330

SEQ ID NO: 17906 - protein, 604 aa, Escherichia coli
MQGNFYNDAVIDPYMLERAEIMRGPVSVLYGKSSPGGLLNMVSKRPTTEPLKEVQFKAGTDSLFQTGFDFSDSLDDDGVYSYRLTGLARSANAQQKGSEEQRYAIAPAFTWRPDDKTNFTFLSYFQNEPETGYYGWLPKEGTVEPLPNGKRLPTDFNEGAKNNTYSRNEKMVGYSFDHEFNDTFTVRQNLRFAENKTSQNSVYGYGVCSDPANAYSKQCAALAPADKGHYLARKYVVDDEKLQNFSVDTQLQSKFATGDIDHTLLTGVDFMRMRNDINAWFGYDDSVPLLNLYNPVNTDFDFNAKDPANSGPYRILNKQKQTGVYVQDQAQWDKVLVTLGGRYDWADQESLNRVAGTTDKRDDKQFTWRGGVNYLFDNGVTPYFSYSESFEPSSQVGKDGNIFAPSKGKQYEVGVKYVPEDRPIVVTGAVYNLTKTNNLMADPEGSFFSVEGGEIRARGVEIEAKAALSASVNVVGSYTYTDAEYTTDTTYKGNTPAQVPKHMASLWADYTFFDGPLSGLTLGTGGRYTGSSYGDPANSFKVGSYTVVDALVRYDLARVGMAGSNVALHVNNLFDREYVASCFNTYGCFWGAERQVVATATFRF

SEQ ID NO: 17907 - protein, 233 aa, Escherichia coli; identical to SEQ ID NO: 3548

SEQ ID NO: 17908 - protein, 696 aa, Escherichia coli; identical to SEQ ID NO: 12094

SEQ ID NO: 17909 - protein, 760 aa, Escherichia coli; identical to SEQ ID NO: 10453

SEQ ID NO: 17910 - protein, 472 aa, Escherichia coli; identical to SEQ ID NO: 7769

SEQ ID NO: 17911 - protein, 869 aa, Escherichia coli; identical to SEQ ID NO: 10435

SEQ ID NO: 17912 - protein, 866 aa, Escherichia coli
MPRTHRQHSLLTSGGVPSFIGGLVVFVSAAFNAQAETWFDPAFFKDDPSMVADLSRFEKGQKITPGVYRVDIVLNQTIVDTRNVNFVEITPEKGIAACLTTESLDAMGVNIDAFPAFKQLDKQACAPLAEIIPDASVTFDVNKLRLEISVPQIAIKSNARGYVPPERWDEGINALLLGYSFSGANSIHSSSDSDSTDSYFLNLNSGVNLGPWRLRNNSTWSRSSGQTAEWKNLSSYLQRAVIPLKGELTVGDDYTAGDFFDSVSFRGVQLASDDNMLPDSLKGFAPVVRGIAKSNAQITIKQNGYTIYQTYVSPGAFEISDLYSTSSSGDLLVEIKEADGSINSYSVPFSSVPLLQRQGRIKYAVTLAKYRTNSNDQQESKFAQATLQWGGPWGTTWYGGGQYAEYYRAAMLGLGFNLGDFGAISFDATQAKSTLADQSEHKGQSYRFLYAKTLNQLGTNFQLMGYRYSTSGFYTLSDTMYKHMDGYEFNDGDDEDTPMWSRYYNLFYTKRGKLQVNISQQLGDYGSFYLSGSQQTYWHTDQQDRLLQFGYNTQIKDLSLGVSWNYSKSRGQPDADQVFALNFSLPLNLLLPRSNDSYTRKKNYAWMTSNTSIDNEGHTTQNLGLTETLLDDGNLSYSVQQGYNSEGKTANGSASMDYKGEFADARVGYNYSDSGSQQQLNYALSGSLVAHSRGITLGQSLGETNVLIAAPGAENTRVANSTGLKTDWRGYTVVPYATSYRENRIVLDAASLKRNVDLENAVVNVVPTKGALVLAEFNAHAGARVLMKTSKQGIPLRFGAIATLDGVQTNSGIIDDDGSLYMSGLPAQGAITVRWGEAPDQICHISYDLTEQQINAAITRMDAICR

SEQ ID NO: 17913 - protein, 816 aa, Escherichia coli
MLRTTRWVAAIIFLYSFPGYAEETFDTHFMIGGMRGEKVSEYRFDNKQPLPGNYELDFYVNHQWRGKKDITIPESPAKPCLPKVLLTTLGVKTDNLNTEDNCILLDEAVHGGQYQWDISEHRLNLTVPQAYINELERGYVPPESWDRGIDAFYTSYNLSQYRSYDSNNNSNTASYGRFNSGLNLFSWQLHSDASYSKPDDMKGKWQSNTLYLERGWSQILSTVQIGENHTSSLIFDSLRFSGIRLFRDMQMLPDSMQSFTPLVQGVAQSNALITVSQNGYTIYQKEVPPGPFTIADLQLSGSGSDLDVSIKEADGSVRSFLVPYSSVPNMLQPGVSNFDFIAGRSQIYGVKNQEDFLEANYIYGLNNLLTLYGGTILSDNYNAITLGNGWNTPLGAISFDATRSSSKLNNDTRHEGTSYQVAYNKYLLQTATHFSVAAWRYASQDYRTFSDHLYENDKINHQSDYDDFYDIGRKNSLSANIMQPLSNNLGNVSLSALWRNYWGRSGNAKDYQFSYSNSWQRISYTFSASQSYDENDKVEERFNLFISIPFYWGDDIAKTRHQINLSNSTSFSKDGYSSNNTGITGIAGEHDQLNYGIYVNQQQQNNDTSLSTNLSWRTPIATIDGSYSHSKNAWQSGGSISSGLVVWPGGINITNQLSDTFAILDAPGLEGAHINGQKYNRTNSKGQVVYDLIIPHRENHLVLDIANSESETELQGNRQIIAPYRGAVSYVQFTTDQRKPWYIQALRPDGSPLTFGYDVLDLQENNIGVVGQGSRLFIRVDEIPTGIKVALNDEQNLFCTITFQHVIDENKTYICQ

SEQ ID NO: 17914 - protein, 826 aa, Escherichia coli
MLRMTPLASAIVALLLGIEAYAAEETFDTHFMIGGMKDQQVANIRLDDNQPLPGQYDIDIYVNKQWRGKYEIIVKDNPQETCLSREVIKRLGINTDNFASGKQCLTFEQLVQGGSYTWDIGVFRLDFSVPQAWVEELESGYVPPENWERGINAFYTSYYVSQYYSDYKASGNSKSTYVRFNSGLNLLGWQLHSDASFSKTNNNPGTWKSNTLYLERGFAQLLGTLRVGDMYTSSDIFDSVRFSGVRLFRDMQMLPNSKQNFTPRVQGIAQSNALVTIEQNGFVVYQKEVPPGPFAITDLQLAGGGADLDVSVKEADGSVTTYLVPYAAVPNMLQPGVSKYDFAAGRSHIEGASKQSDFVQAGYQYGFNNLLTLYGGSMVANNYYAFTLGTGWNTRIGAISVDATKSHSKQDNGDVFDGQSYQIAYNKFVSQTSTRFGLAAWRYSSRDYRTFNDHVWANNKDNYRRDENDIYDIADYYQNDFGRKNSFSANMSQSLPEGWGSVSLSTLWRDYWGRSGSSKDYQLSYSNNLRRISYTLAASQAYDENHHEEKRFNIFISIPFDWGDDVTTPRRQIYMSNSTAFDDQGFASNNTGLSGTVGNRDQFNYGVNLSHQHQGNETTAGANLTWNAPVATVNGSYSQSSTYRQAGASVSGGIVAWSGGVNLANRLSETFAVMNAPGIKDAYVNGQKYRTTNRNGVVVYDGMTPYRENHLMLDVSQSDSEAELRGNRKIAAPYRGAVVLVNFDTEQRKPWFIKALRTDGQPLTFGYEVNDIHGHNIGVVGQGSQLFIRTNEVPPSVNVAIDKQQGLSCTITFGKEIDESRNYICQ

SEQ ID NO: 17915 - protein, 729 aa, Escherichia coli; identical to SEQ ID NO: 3720

SEQ ID NO: 17916 - protein, 237 aa, Escherichia coli; identical to SEQ ID NO: 3022

SEQ ID NO: 17917 - protein, 193 aa, Escherichia coli; identical to SEQ ID NO: 2250

SEQ ID NO: 17918 - protein, 715 aa, Escherichia coli; identical to SEQ ID NO: 3971

SEQ ID NO: 17919 - protein, 203 aa, Escherichia coli; identical to SEQ ID NO: 2009

SEQ ID NO: 17920 - protein, 784 aa, Escherichia coli; identical to SEQ ID NO: 2244

SEQ ID NO: 17921 - protein, 784 aa, Escherichia coli; identical to SEQ ID NO: 2244

SEQ ID NO: 17922 - protein, 860 aa, Escherichia coli; identical to SEQ ID NO: 7923

SEQ ID NO: 17923 - protein, 514 aa, Escherichia coli; identical to SEQ ID NO: 8138

SEQ ID NO: 17924 - protein, 331 aa, Escherichia coli; identical to SEQ ID NO: 2700

SEQ ID NO: 17925 - protein, 359 aa, Escherichia coli; identical to SEQ ID NO: 2328

SEQ ID NO: 17926 - protein, 816 aa, Escherichia coli; identical to SEQ ID NO: 3562

SEQ ID NO: 17927 - protein, 200 aa, Escherichia coli; identical to SEQ ID NO: 1788

SEQ ID NO: 17928 - protein, 689 aa, Escherichia coli; identical to SEQ ID NO: 12299

SEQ ID NO: 17929 - protein, 274 aa, Escherichia coli; identical to SEQ ID NO: 3160

SEQ ID NO: 17930 - protein, 735 aa, Escherichia coli
MTVNKIKNIFNNATLTTKSAFNTASSSVRSAGKKLILLIPDNYEAQGVGINELVKAADELGIEIHRTERDDTAIANQFFGAAEKVVGLTERGVAIFAPQLDKLLQKYQKVGSKIGGTAENVGNNLGKAGTVLSALQNFTGIALSGMALDELLRKQREGEDISQNDIAKSSIELINQLVDTVSSINSTVDSFSEQLNQLGSFLSSKPRLSSVGGKLQNLPDLGPLGDGLDVVSGILSAVSASFILGNSDAHTGTKAAAGIELTTQVLGNVGKAVSQYILAQRMAQGLSTTAASAGLITSAVMLAISPLSFLAAADKFERAKQLESYSERFKKLNYEGDALLAAFHKETGAIDAALTTINTVLSSVSAGVSAASSASLIGAPISMLVSALTGTISGILEASKQAMFEHVAEKFAARINEWEKEHGKNYFENGYDARHAAFLEDSLSLLADFSRQHAVERAVAITQQHWDEKIGELAGITRNADRSQSGKAYINYLENGGLLEAQPKEFTQQVFDPQKGTIDLSTGNVSSVLTFITPTFTPGEEVRERKQSGKYEYMTSLIVNGKDTWSVKGIKNHKGVYDYSKLIQFVEKNNKHYQARIISELGDKDDVVYSGAGSSEVFAGEGYDTVSYNKTDVGKLTIDATGASKPGEYIVSKNMYGDVKVLQEVVKEQEVSVGKRTEKIQYRDFEFRTGGIPYDVIDNLHSVEELIGGKHDDEFKGGKFNDIFHGADGNDYIEG

SEQ ID NO: 17931 - protein, 162 aa, Escherichia coli; identical to SEQ ID NO: 1969

SEQ ID NO: 17932 - protein, 678 aa, Escherichia coli; identical to SEQ ID NO: 4148

SEQ ID NO: 17933 - protein, 162 aa, Escherichia coli; identical to SEQ ID NO: 1973

SEQ ID NO: 17934 - protein, 641 aa, Escherichia coli; identical to SEQ ID NO: 9297

SEQ ID NO: 17935 - protein, 161 aa, Escherichia coli; identical to SEQ ID NO: 2582

SEQ ID NO: 17936 - protein, 539 aa, Escherichia coli; identical to SEQ ID NO: 7973

SEQ ID NO: 17937 - protein, 660 aa, Escherichia coli; identical to SEQ ID NO: 4092

SEQ ID NO: 17938 - protein, 170 aa, Escherichia coli [sequence omitted]

SEQ ID NO: 17939 - protein, 650 aa, Escherichia coli
MTVNKIKNIFNNATLTTKSAFNTASSSVRSAGKKLILLIPDNYEAQGVGINELVKAADELGIEIHRTERDDTAIANQFFGAAEKVVGLTERGVAIFAPQLDKLLQKYQKVGSKKGRTAENVGNNLGKAGTVLSALQNFTGIALSGMALDELLRKQREGEDISQNDIAKSSIELINQLVDTVSSINSTVDSFSEQLNQLGSFLSSKPRLSSVGGKLQNLPDLGSLGDGLDVVSGILSAVSASFILGNSDAHTGTKAAAGIELTTQVLGNVGKAVSQYILAQRMAQGLSTTAASAGLITSAVMLAISPLSFLAAADKFERAKQLESYSERFKKLNYEGDALLAAFSLKKPELIDAALTTINTVLSSVSAGVSAASSASLIGAPISMLVSALTGTISGILEASKQAMFEHVAEKFAARINEWEKEHGKNYFENGYDARHAAFLEDSLSLLADFSRQHAVERAVAITQQHWDEKIGELAGITRNADRSQSGKAYINYLENGGLLEAQPKEFTQQVFDPQKGTIDLSTGNVSSVLTFITPTFTPGEEVRERKQSGKYEYMTSLIVNGKDTWSVKGIKNHKGVYDYSKLIQFVEKNNKHYQARMISELGDKDDVVYSGAGSSEVFAGEGHDTVSYNKTDVGKLTIDATGASNLVSI

SEQ ID NO: 17940 - protein, 227 aa, Escherichia coli; identical to SEQ ID NO: 3570

SEQ ID NO: 17941 - protein, 351 aa, Escherichia coli; identical to SEQ ID NO: 3691

SEQ ID NO: 17942 - protein, 224 aa, Escherichia coli; identical to SEQ ID NO: 3165

SEQ ID NO: 17943 - protein, 359 aa, Escherichia coli; identical to SEQ ID NO: 2329

SEQ ID NO: 17944 - protein, 826 aa, Escherichia coli; identical to SEQ ID NO: 3078

SEQ ID NO: 17945 - protein, 162 aa, Escherichia coli; identical to SEQ ID NO: 1973

SEQ ID NO: 17946 - protein, 359 aa, Escherichia coli; identical to SEQ ID NO: 2328

SEQ ID NO: 17947 - protein, 230 aa, Escherichia coli; identical to SEQ ID NO: 3019

SEQ ID NO: 17948 - protein, 729 aa, Escherichia coli; identical to SEQ ID NO: 2948

SEQ ID NO: 17949 - protein, 203 aa, Escherichia coli; identical to SEQ ID NO: 2201

SEQ ID NO: 17950 - protein, 191 aa, Escherichia coli; identical to SEQ ID NO: 2727

SEQ ID NO: 17951 - protein, 883 aa, Escherichia coli; identical to SEQ ID NO: 15231

SEQ ID NO: 17952 - protein, 505 aa, Escherichia coli
MSQYGNPTTCEIDNGGVIVADGFQASKAYSADSIVDYNDAHYKTSVDQGAWGFVPGGDNPWKKYEPAKAWSASTVYVKGDRVVVDGQAYEALFWTQSDNPALVANQNATGSNSRPWKPLGKAQSYSNEELNNAPQFNPETLYTSDTLIRFNGANYISQSKVQKVSPSDSNPWRVFVDWTGTKERVGTPKKAWPKHVYAPYVDFTLNTIPDLAALAKNHNVNHFTLAFVVSKDANTCLPTWGTAYGMQNYAQYSKIKALREAGGDVMLSIGGANNAPLAASCKNVDDLMQHYYDIVDNLNLRVLDFDIEGTWVADQASIERRNLAVKKVQDKWKSEGKDIAIWYTLPILPTGLTPEGMNVLSDAKAKGVELAGVNVMTMDYGNAICQSANTEGQNIHGKCATSAIANLHSQLKGLHPNKSDAEIDAMMGTTPMVGVNDVQGEVFYLSDARLVMQDAQKRNLGMVGIWSIARDLPGGTNLSPEFHGLTKEQAPKYAFSEIFAPFTKQ

SEQ ID NO: 17953 - protein, 387 aa, Escherichia coli; identical to SEQ ID NO: 3101

SEQ ID NO: 17954 - protein, 614 aa, Escherichia coli; identical to SEQ ID NO: 3301

SEQ ID NO: 17955 - protein, 359 aa, Escherichia coli; identical to SEQ ID NO: 2332

SEQ ID NO: 17956 - protein, 49 aa, Escherichia coli; identical to SEQ ID NO: 8101

SEQ ID NO: 17957 - protein, 806 aa, Escherichia coli
MLCTTANAEEYYFDPIMLETTKSGMQTTDLSRFSKKYAQLPGTYQVDIWLNKKKVSQKKITFTANAEQLLQPQFTVEQLRELGIKVDEIPALAEKDDDSVINSLEQIIPGTAAEFDFNHQRLNLSIPQIALYRDARGYVSTSRWDDGIPTLFTNYSFTGSDNRYRQGNRSQRQYLNMQNGANFGPWRLRNYSTWTRNDQASSWNTISSYLQRDIKALKSQLLLGESATSGSIFSSYTFTGVQLASDDNMLPNSQRGFAPTVRGIANSSAIVTIRQNGYVIYQSNVPAGAFEINDLYPSSNSGDLEVTIEESDGTQRRFIQPYSSLPMMQRPGHLKYSATAGRYRADANSDSKEPEFAEATAIYGLNNTFTLYGGLLGSEDYYALGIGIGGTLGALGALSMDINRADTQFDNRHSFHGYQWRTQYIKDIPETNTNIAVSYYRYTNDGYFSFDEANTRNWDYNSRQKSEIQFNISQTIFDGVSLYASGSQQDYWGNNDKNRNISVGVSGQQWGIGYSLNYQYSRYTDQNNDRALSLNLSIPLERWLPRSRVSYQMTSQKDRPTQHEMRLDGSLLDDGRLSYSLEQSLDDDNNHNSSLNASYRSPYGTFSAGYSYGNDSSQYNYGVTGGVVIHPHGVTLSQYLGNAFALIDANGASGVRIQNYPGIATDPFGYAVVPYLTTYQENRLSVDTTQLPDNVDLEQTTQFVVPNRGAMVAARFNANIGYRVLVTVSDRNGKPLPFGALASNDETGQQSIVDEGGILYLSGISSKSQSWTVRWGNQADQQCQFAFSTPDSEPTTSVLQGTAQCH

SEQ ID NO: 17958 - protein, 430 aa, Escherichia coli; identical to SEQ ID NO: 2617

SEQ ID NO: 17959 - protein, 446 aa, Escherichia coli; identical to SEQ ID NO: 9296

SEQ ID NO: 17960 - protein, 89 aa, Escherichia coli; identical to SEQ ID NO: 2812

SEQ ID NO: 17961 - protein, 229 aa, Escherichia coli; identical to SEQ ID NO: 3589

SEQ ID NO: 17962 - protein, 208 aa, Escherichia coli; identical to SEQ ID NO: 1949

SEQ ID NO: 17963 - protein, 565 aa, Escherichia coli; identical to SEQ ID NO: 2662

SEQ ID NO: 17964 - protein, 565 aa, Escherichia coli; identical to SEQ ID NO: 2662

SEQ ID NO: 17965 - protein, 193 aa, Escherichia coli; identical to SEQ ID NO: 2246

SEQ ID NO: 17966 - protein, 366 aa, Escherichia coli; identical to SEQ ID NO: 3520

SEQ ID NO: 17967 - protein, 221 aa, Escherichia coli; identical to SEQ ID NO: 3672

SEQ ID NO: 17968 - protein, 207 aa, Escherichia coli; identical to SEQ ID NO: 2211

SEQ ID NO: 17969 - protein, 203 aa, Escherichia coli; identical to SEQ ID NO: 2009

SEQ ID NO: 17970 - protein, 351 aa, Escherichia coli; identical to SEQ ID NO: 9352

SEQ ID NO: 17971 - protein, 241 aa, Escherichia coli; identical to SEQ ID NO: 2851

SEQ ID NO: 17972 - protein, 203 aa, Escherichia coli; identical to SEQ ID NO: 2009

SEQ ID NO: 17973 - protein, 700 aa, Escherichia coli; identical to SEQ ID NO: 3128

SEQ ID NO: 17974 - protein, 191 aa, Escherichia coli; identical to SEQ ID NO: 4195

SEQ ID NO: 17975 - protein, 208 aa, Escherichia coli; identical to SEQ ID NO: 7992

SEQ ID NO: 17976 - protein, 614 aa, Escherichia coli
MIKKASLLTACSVTAFSAWAQDISPDTLVVTANRFEQPRSTVLAPTTVVTRQDIDRWQSTSVNDVLRRLPGVDITQNGGSGQLSSIFIRGTNASHVLVLIDGVRLNLAGVSGSADLSQFPIALVQRVEYIRGPRSAVYGSDAIGGVVNIITTRDEPGTEISAGWGSNSYQNYDVSTQQQLGDKTRVTLLGDYAHAHGYDVVAYGNTGTQAQTDNDGFLSKTLYGALEHNFTDAWSGFVRGYGYDNRTNYDAYYSPGSPLLDTRKLYSQSWDAGLRYNGELIKSQLITSYSHSKDYNYDPHFGRYDSSATLDEMKQYTVQWANNVIVGHGSIGAGVDWQKQTTTPGTGYVENGYDQRNTGIYLTGLQQVGDFTFEGAARSDDNSQFGRHGTWQTSAGWEFIEGYRFIASYGTSYKAPNLGQLYGFYGNPNLDPEKSKQWEGAFEGLTAGVNWRISGYRNDVSDLIDYDDHTLKYYNEGKARIKGVEATANFDTGPLTHTVSYDYVDARNAITDTPLLRRAKQQVKYQLDWQLYDFDWGITYQYLGTRYDKDYSSYPYQTVKMGGVSLWDLAVAYPVTSHLTVRGKIANLFDKDYETVYGYQTAGREYTLSGSYTF

SEQ ID NO: 17977 - protein, 866 aa, Escherichia coli; identical to SEQ ID NO: 3688

SEQ ID NO: 17978 - protein, 232 aa, Escherichia coli; identical to SEQ ID NO: 2087

SEQ ID NO: 17979 - protein, 866 aa, Escherichia coli
MKTTTSTKRHNLTRIAMYCSIMYSGATIGAESVEYDPTFLMGGNASSIDVSRYSDGNPTLPGVYDVSIYVNEQPVANLEIPFIAIPDKKNAQACITLKNLLQLHIKTPPADEENTILLPRDETLGNCLDLSLAIPKSSVSYDPSEQRLDINVPQAWVMKNYQNYVDPSLWENGINAATLSYNINAYRSENSNYTNDSVYTSFNGGVNLGAWRLRSSGNYSWRNDAGSNVEFMNRYVQRDITAIRSQLIMGESYTTGETFDSVSIRGIRLYSDSRMLPPVLANFAPTIRGVANTNAKVSITQSGYKIYETTVPPGPFVIDDLSPSGYGSDLIVTIEEADGSKRTFSQPFSSVIQMLRPGVSRWDISGGQINKDDLHHEPNLLQATYYRGLSNLFTGYTGFQVTDNHYAAGLLGIGMNTSVGAISFDVTHSSVDIPDDKRYQGQSYRISWNKFFDLTDTSLNIAAYRYSTQDYLGLNDALTLIDEVEHPTQDLDPKTMRNYGRMKNQFTVSINQPLRFGKDDYGSFYTSGSWSDYWGGGKSRSNYSVGYSNSASWGSYSISAQRSWDEYSQTENSIYLSFSIPIEKLMGTEHRDSGFQSIDTQLSTNMDGNNQFNMSSSGYSNDNRVSYSVNAGYGMNKTGKDLSNIGGYASYESPWGTLAGSASATSDNNRQYSVNTDGGFVLHSGGLTFSNDSFSDNDTIALVKAPGAKGARINYGNNTVDRWGYGVTSALSPYQENKIALDTENLENDIEMKSTSTVAVPRQGSVIFAGFETNQGQSAIMNIKRSDGKGIPFAADIHDETNAIIGNVGQGGQAFVRGIQQQGTIKITWLEASMPKTCIAQYQQPNVTSEKIQQTIILNNILCQLQ

SEQ ID NO: 17980 - protein, 205 aa, Escherichia coli; identical to SEQ ID NO: 3940

SEQ ID NO: 17981 - protein, 816 aa, Escherichia coli
MNIYRLSFISCLVMAIPSALAVEFNLNVLDKSMRDRIDISLLKEKGVIAPGEYFVSVAVNNNQISNGQKIDWKKNGDQTIPCINDLLVDKFGLKPEVRQSLPRLNQCVDFSSRPEILFIFDQASQQLNITIPQAWLAWHSDNWTPPSTWKEGVAGVLMDYNLFASSYRPQDGSNSTNLNAYGTAGINAGAWRLRSDYQLNQTDSDDNHEQSGEISRTYLFRPLPQLGSKLTLGETDFSSNIFDGFSYTGAALASDDRMLPWELRGYAPQISGIAQTNATVTVSHSGRVIYQKKVPPGPFIIDDLNQSVQGTLDVKVTEEDGRVNNFQVSAASTPFLTRQGQVRYKLAAGQPRPSMSHQTENETFFSNEVSWGMLSNTSLYGGLLISGDDYHSAAMGIGQNMLWLGALSFDVTWASSQFDTQQDERGLSYRFNYSKQVDATNSTISLAAYRFSDRHFHSYANYLDHKYNDNDAQDEKQTISLSVGQPITPLNLNLYANLLHQTWWNADASTTANITAGFNVDIGNWRDISISTSFNTTHYEDKDRDNQIYLSISLPFGNGGRVGYDMQNSSQSTTHRMSWNDTLDERNSWGMSTGLQSDRPDNGAQVSGNYQHLSSAGEWDISGTYAANDYSSVSSSWSGSFTATQYGAAFHRRSTTNEPRLMVSTDGVADIPVQGNLDYTNHFGIAVVPLISSYQPSTVAVNMNDLPDGVTVAENVIKETWIEGAIGYKSLASRSGKDVNVIIRNASGQFPPLGADIRQDNSGISVGMVGEEGHAWLSGVAENQMLTVVWGDSQHCSLHLPEHMEDTANRLILPCH

SEQ ID NO: 17982 - protein, 871 aa, Escherichia coli
MHQVLLLPRFARLTIALSLATAVFPVDAEYYFNPRFLSNDLAESVDLSAFTKGREAPPGTYRVDIYLNDEFMTSRDITFIADDNNADLIPCLSTDLLVSLGIKKSALLDNKENSAEKHVPDNSACTPLQDRLADASTEFDVGQQHLSLSVPQIYVGRMARGYVSPDLWEEGINAGLLNYSFNGNSINNRSNHNAGKSNYAYLNLQSGINIGSWRLRDNSTWSYNSGSSNSSDSNKWQHINTSAERDIIPLRSRLTVGDSYTDGDIFDSVNFRGLKINSTEAMLPDSQHGFAPVIHGIARGTAQVSVKQNGYDIYQTTVPPGPFNIDDINSAANGGDLQVTIKEADGSIQTLYVPYSSVPVLQRAGYTRYALAMGEYRSGNNLQSSPKFIQGSLMHGLEGNWTPYGGMQIAEDYQAFNLGIGKDLGLFGAFSFDITQANTTLADGTRHSGQSIKSVYSKSFYQTGTNIQVAGYRYSTQGFYNLSDSAYSRMSGYTVKPPTGDSNEQTQFIDYFNLFYSKRGQEQISISQQLGNYGTTFFSASRQSYWNTSRSDQQISFGLNVPFGDITTSLNYSYSNNIWQNDRDHLLAFTLNVPFSHWMRTDSQSAFRNSNASYSMSNDLKGGMTNLSGVYGTLLPDNNLNYSVQVGNTHGGNTSSATSGYSSLNYRGAYGNTNVGYSRSGDSSQIYYGMSGGIIAHADGITFGQPLGDTMVLVKAPGADNVKIENQTGIHTDWRGYAILPFATEYRENRVALNANSLADNVELDETVVTVIPTHGAIARATFNAQIGGKVLMTLKYGNKSVPFGAIVTHGENKNGSIVAENGQVYLTGLPQSGKLQVSWGKDKNSNCIVEYKLPEVSPGTLLNQQTAICR

SEQ ID NO: 17983 - protein, 760 aa, Escherichia coli
MENNRNFPARQFHSLTFFAGLCIGITPVAQALAAEGQTNADDTLVVEASTPSLYAPQQSADPKFSRPVADTTRTMTVISEQVIKDQGATNLTDALKNVPGVGAFFAGENGNSTTGDAIYMRGADTSNSIYIDGIRDIGSVSRDTFNTEQVEVIKGPSGTDYGRSAPTGSINMISKQPRNDSGIDASASIGSAWFRRGTLDVNQVIGDTTAVRLNVMGEKTHDAGRDKVKNERYGVAPSIAFGLGTANRLYLNYLHVTQHNTPDGGIPTIGLPGYSAPSAGTAALNHSGKVDTHNFYGTDSDYDDSTTDTATMRFEHDINDNTTIRNTTRWSRVKQDYLMTAIMGGASNITQPTSDVNSWTWSRTANTKDVSNKILTNQTNLTSTFYTGSIGHDVSTGVEFTRETQTNYGVNPVTLPAVNIYHPDSSIHPGGLTRNGANANGQTDTFAIYAFDTLQITRDFELNGGIRLDNYHTEYDSATACGGSGRGAITCPTGVAKGSPVTTVDTAKSGNLVNWKVGALYHLTENGNVYINYAVSQQPPGGNNFALAQSGSGNSANRTDFKPQKANTSEIGTKWQVLDKRLLLTAALFRTDIENEVEQNDDGTYSQYGKKRVEGYEISVAGNITPAWQVIGGYTQQKATIKNGKDVAQDGSSSLPYTPEHAFTLWSQYQATDDISVGAGARYIGSMHKGSDGAVGTPAFTEGYWVADAKLGYRVNRNLDFQLNVYNLFDTDYVASINKSGYRYHPGEPRTFLLTANMHF

SEQ ID NO: 17984 - protein, 228 aa, Escherichia coli; identical to SEQ ID NO: 7538

SEQ ID NO: 17985 - protein, 173 aa, Escherichia coli; identical to SEQ ID NO: 4418

SEQ ID NO: 17986 - protein, 228 aa, Escherichia coli; identical to SEQ ID NO: 4179

SEQ ID NO: 17987 - protein, 567 aa, Escherichia coli; identical to SEQ ID NO: 3518

SEQ ID NO: 17988 - protein, 111 aa, Escherichia coli; identical to SEQ ID NO: 3370

SEQ ID NO: 17989 - protein, 700 aa, Escherichia coli; identical to SEQ ID NO: 2926

SEQ ID NO: 17990 - protein, 630 aa, Escherichia coli; identical to SEQ ID NO: 4909

SEQ ID NO: 17991 - protein, 614 aa, Escherichia coli; identical to SEQ ID NO: 1883

SEQ ID NO: 17992 - protein, 231 aa, Escherichia coli; identical to SEQ ID NO: 3055

SEQ ID NO: 17993 - protein, 199 aa, Escherichia coli; identical to SEQ ID NO: 3906

SEQ ID NO: 17994 - protein, 232 aa, Escherichia coli; identical to SEQ ID NO: 2087

SEQ ID NO: 17995 - protein, 430 aa, Escherichia coli; identical to SEQ ID NO: 2617

SEQ ID NO: 17996 - protein, 432 aa, Escherichia coli; identical to SEQ ID NO: 2026

SEQ ID NO: 17997 - protein, 250 aa, Escherichia coli; identical to SEQ ID NO: 3048

SEQ ID NO: 17998 - protein, 360 aa, Escherichia coli; identical to SEQ ID NO: 3694

SEQ ID NO: 17999 - protein, 191 aa, Escherichia coli; identical to SEQ ID NO: 2727

SEQ ID NO: 18000 - protein, 162 aa, Escherichia coli; identical to SEQ ID NO: 1965

SEQ ID NO: 18001 - protein, 130 aa, Escherichia coli; identical to SEQ ID NO: 7391

SEQ ID NO: 18002 - protein, 266 aa, Escherichia coli; identical to SEQ ID NO: 1892

SEQ ID NO: 18003 - protein, 863 aa, Escherichia coli; identical to SEQ ID NO: 7822

SEQ ID NO: 18004 - protein, 614 aa, Escherichia coli; identical to SEQ ID NO: 9373

SEQ ID NO: 18005 - protein, 840 aa, Escherichia coli
MHLPLYHYRAHFSFSLLALTIASSLPAYGGKFNPKFLENVQGIDQHIDLSVYDSPVDQQIPGKYRVSVFVNEEKMASRTLDFSTASEAKRKASGESLMPCLSRVQLEEMGVRVDSFPALKMSPPEACVAFDEIIPQATSRFDFNTQTLHLSFPQAAMMMTARGTVDPSRWDEGIPALLLDYSFSGSNGRNEGTGSSSDSTSDSYYLNLRSGLNVGPWRLRNNSIWNRTDGKNQWDNVGTSLNRAIIPLKSQITLGDTATPGEIFDSVQMRGALLASDDEMLPDSQRGFAPVVRGIAKSNAEVSIEQNGYVIYRTFVQPGAFEINDLYATSGSGDLTVIIKEADGSEQRFIQPFSAVAIFQREGYLKYSLAAGEYRAGNYDSDKPHFGQFTAMYGLPWGMTAYGGALLSADYNALALGLGKNFGTIGAVSVDVTQAKSQLRNNEKEEGQSYRFLYSKSFEGGTDLRLLGYKYSTSGYYTFQEATDVRSDADSDYRRYHKRSQIQGNITQQLGDYGSVYFNMTQQDYWNVDGKENSLSAGYHGHIGRVNYSVAYTWTRSPEWEEDDRLWSFSVSIPLGGAWSSYRMTTDQNGKTSQQASVSGTLLEDRNLSYNVQQGYTSNGVGYSGSVNMGYMGGSGNIDVGYNYSKDNQQVNYGVRGGVIVHSEGITLSQPLGESLAIVSAPGARGGHVVNSSGVEVDWMGNAVVPYLTPYRETIVELRSDTLGQNVELQEAFQKVVPTRGAVVRSRFDTRVGYRVLMSLKQANGNAVPFGATAALIDESKPASSIVGEEGQLYISGMPEEGELQVSWGNEQAQRCRVPFRLPENKDNAAIVMVNAVCEK

SEQ ID NO: 18006 - protein, 875 aa, Escherichia coli
MNLRLYQRNTQCLHIRKHRLAGLFVRLFVACAFAAQAPLSSAELYFNPRFLADDPQAVADLSRFENGQELPPGTYRVDIYLNNGYMATRDVTFNTGDSEQGIVPCLTRAQLASMGLNTASVSGMNLLADDACVPLTSMIHDATAHLDVGQQRLNLTIPQAFMSNRARGYIPPELWDPGINAGLLNYNFSGNSVQNRIGGNSHYAYLNLQSGLNIGAWRLRDNTTWSYNSSDRSSGSKNKWQHINTWLERDIIPLRSRLTLGDGYTQGDIFDGINFRGAQLASDDNMLPDSQRGFAPVIHGIARGTAQVTIKQNGYDIYNSTVPPGPFTINDIYAAGNSGDLQVTIKEADGSTQIFTVPYSSVPLLQREGHTRYSITAGEYRSGNAQQEKPRFFQSTLLHGLPAGWTIYGGTQLADRYRAFNFGIGKNMGALGALSVDMTQANSTLPDDSQHDGQSVRFLYNKSLNESGTNIQLVGYRYSTSGYFNFADTTYSRMNGYNIETQDGVIQVKPKFTDYYNLAYNKRGKLQLTVTQQLGRTSTLYLSGSHQTYWGTSNVDEQFQAGLNTAFEDINWTLSYSLTKNAWQKGRDQMLALNVNIPFSHWLRSDSKSQWRHASASYSMSHDLNGRMTNLAGVYGTLLEDNNLSYSVQTGYAGGGDGNSGSTGYATLNYRGGYGNANIGYSHSDDIKQLYYGVSGGVLAHANGVTVGQPLNDTVVLVKAPGAKDAKVENQTGVRTDWRGYAVLPYATEYRENRVALDTNTLADNVDLDNAVANVVPTRGAIVRAEFKARVGIKLLMTLTHNNKPLPFGAMVTSESSQSSGIVADNGQVYLSGMPLAGKVQVKWGEEENAHCVANYQLPPESQQQLLTQLSAECR

SEQ ID NO: 18007 - protein, 368 aa, Escherichia coli
MNKTITALAIMMASFAANASVLPETPVPFKSGTGAIDNDTVYIGLGSAGTAWYKLDTQAKDKRWTALAAFPGGPRDQATSAFIDGNLYVFGGIGKNSEGLTQVFNDVHKYNPKTNSWVKLMSHAPMGMAGHVTFVHNGKAYVTGGVNQNIFNGYFEDLNEAGKDSTAIDKINAHYFDKKAEDYFFNKFLLSFDPSTQQWSYAGESPWYGTAGAAVVNKGDKTWLINGEAKPGLRTDAVFELDFTGNNLKWNKLAPVSSPDGVAGGFAGMSNDSLIFVGGAGFKGSRENYQNGKNYAHEGLKKSYSTDIHLWHNGKWDKSGELSQGRAYGVSLPWNNSLLIIGGETAGGKAVTDSVLISVKDNKVTVQN

SEQ ID NO: 18008 - protein, 200 aa, Escherichia coli; identical to SEQ ID NO: 1784

SEQ ID NO: 18009 - protein, 224 aa, Escherichia coli; identical to SEQ ID NO: 3115

SEQ ID NO: 18010 - protein, 386 aa, Escherichia coli; identical to SEQ ID NO: 3094

SEQ ID NO: 18011 - protein, 213 aa, Escherichia coli; identical to SEQ ID NO: 4186

SEQ ID NO: 18012 - protein, 207 aa, Escherichia coli; identical to SEQ ID NO: 2211

SEQ ID NO: 18013 - protein, 368 aa, Escherichia coli; identical to SEQ ID NO: 3171

SEQ ID NO: 18014 - protein, 111 aa, Escherichia coli; identical to SEQ ID NO: 3096

SEQ ID NO: 18015 - protein, 249 aa, Escherichia coli; identical to SEQ ID NO: 3492

SEQ ID NO: 18016 - protein, 236 aa, Escherichia coli; identical to SEQ ID NO: 3286

SEQ ID NO: 18017 - protein, 118 aa, Escherichia coli [sequence omitted]

SEQ ID NO: 18018 - protein, 700 aa, Escherichia coli
MKIFSVRQTVLPALLALSPVVFAADEQTMIVSAAPQVVSELDTPAAVSVVDGEEMRLATPRINLSESLTGVPGLQVQNRQNYAQDLQLSIRGFGSRSTYGIRGIRLYMDGIPATMPDGQGQTSNIDLSSVQNVEVLRGPFSALYGNASGGVMNVTTQTGQQPPTIEASSYYGSFGSWRYGLKATGATGDGTQPGDVDYTVSTTRFTTHGYRDHSGAQKNLANAKLGVRIDEASKLSLIFNSVDIKADDPGGLTKAEWKANPQQAPRAEQYDTRKTIKQTQAGLHYERSLSAQDDMSVMMYAGERETTQYQSIPMAPQLNPSHAGGVITLQRHYQGVDSRWTHRGELGVPVTFTTGLNYENMSENRKGYNNFRLNSGVPEYGQKGELRRDERNLMWNVDPYLQTQWQLSEKLSLDAGVRYSSVWFDSNDHYVTPGNGDDSGDASYHKWLPAGSLKYAMTDAWNIYLAAGRGFETPTINELSYRADGQSGMNFGLKPSTNDTIEIGSKTRIGDGLLSLALFQTDTDDEIVVDSSSGGRTTYKNAGKTRRQGAELAWDQRFAGDFRVKASWTWLDATYRSNVCNEQDCNGNRMPGIARNMGFASIGYVPEDGWYAGTEARYMGDIMADDENTAKAPSYTLVGLFTGYKYNYHNLTVDLFGRVDNLFDKEYVGSVIVNESNGRYYEPSPGRNYGVGMNIAWRFE

SEQ ID NO: 18019 - protein, 203 aa, Escherichia coli; identical to SEQ ID NO: 2201

SEQ ID NO: 18020 - protein, 591 aa, Escherichia coli; identical to SEQ ID NO: 3668

SEQ ID NO: 18021 - protein, 237 aa, Escherichia coli; identical to SEQ ID NO: 3022

SEQ ID NO: 18022 - protein, 678 aa, Escherichia coli; identical to SEQ ID NO: 2902

SEQ ID NO: 18023 - protein, 237 aa, Escherichia coli; identical to SEQ ID NO: 2816

SEQ ID NO: 18024 - protein, 869 aa, Escherichia coli
MKIPTTTDIPQRYTWCLAGICYSSLAILPSFLSYAESYFNPAFLLENGTFVADLSRFERGNHQPAGVYRVDLWRNDEFIGSQDIVFESTTENTGDKSGGLMPCFNQVLLERIGLNSSAFPELAQQQNNKCINLLKAVPDATINFDFAAMRLNITIPQIALLSSAHGYIPPEEWDEGIPALLLNYNFTGNRGNGNDSYFFSELSGINIGPWRLRNNGSWNYFRGNGYHSEQWNNIGTWVQRAIIPLKSELVMGDGNTGSDIFDGVGFRGVRLYSSDNMYPDSQQGFAPTVRGIARTAAQLTIRQNGFIIYQSYVSPGAFEITDLHPTSSNGDLDVTIDERDGNQQNYTIPYSTVPILQREGRFKFDLTAGDFRSGNSQQSSPFFFQGTALGGLPQEFTAYGGTQLSANYTAFLLGLGRNLGNWGAVSLDVTHARSQLADDSRHEGDSIRFLYAKSMNTFGTNFQLMGYRYSTQGFYTLDDVAYRRMEGYEYDYDYDGEHRDEPIIVNYHNLRFSRKDRLQLNISQSLNDFGSLYISGTHQKYWNTSDSDTWYQVGYTSSWVGISYSLSFSWNESVGIPDNERIVGLNVSVPFNVLTKRRYTRENALDRAYASFNANRNSNGQNSWLAGVGGTLLEGHNLSYHVSQGDTSNNGYTGSATANWQAAYDTLGVGYNYDRDQHDVNWQLSGGVVGHENGITLSQPLGDTNVLIKAPGAGGVRIENQTGILTDWRGYAVMPYATVYRYNRIALDTNTMGNSIDVEKNISSVVPTQGALVRANFDTRIGVRALITVTQGGKPVPFGSLVRENSTGITSMVGDDGQVYLSGAPLSGELLVQWGDGANSRCIAHYVLPKQSLQQAVTVISAVCTHPGS

SEQ ID NO: 18025 - protein, 243 aa, Escherichia coli; identical to SEQ ID NO: 3561

SEQ ID NO: 18026 - protein, 816 aa, Escherichia coli; identical to SEQ ID NO: 9317

SEQ ID NO: 18027 - protein, 108 aa, Escherichia coli; identical to SEQ ID NO: 3602

SEQ ID NO: 18028 - protein, 266 aa, Escherichia coli; identical to SEQ ID NO: 1894

SEQ ID NO: 18029 - protein, 843 aa, Escherichia coli; identical to SEQ ID NO: 3163

SEQ ID NO: 18030 - protein, 170 aa, Escherichia coli [sequence omitted]

SEQ ID NO: 18031 - protein, 324 aa, Escherichia coli; identical to SEQ ID NO: 3579

SEQ ID NO: 18032 - protein, 243 aa, Escherichia coli; identical to SEQ ID NO: 3483

SEQ ID NO: 18033 - protein, 863 aa, Escherichia coli; identical to SEQ ID NO: 3156

SEQ ID NO: 18034 - protein, 826 aa, Escherichia coli; identical to SEQ ID NO: 3700

SEQ ID NO: 18035 - protein, 243 aa, Escherichia coli; identical to SEQ ID NO: 2910

SEQ ID NO: 18036 - protein, 222 aa, Escherichia coli; identical to SEQ ID NO: 7372

SEQ ID NO: 18037 - protein, 840 aa, Escherichia coli; identical to SEQ ID NO: 3591

SEQ ID NO: 18038 - protein, 207 aa, Escherichia coli; identical to SEQ ID NO: 2211

SEQ ID NO: 18039 - protein, 275 aa, Escherichia coli
MSHWCRNWHMAKSLFRALVALSFLAPLWLNAAPRVITLSPANTELAFAAGITPVGVSSYSDYPPQAQKIEQVSTWQGMNLERIVALKPDLVIAWRGGNAERQVDQLASLGIKVMWVDATSIEQIANALRQLAPWSPQPDKAEQAAQSLLDQYAQLKAQYADKPKKRVFLQFGINPPFTSGKESIQNQVLEVCGGENIFKDSRVPWPQVSREQVLARSPQAIVITGGPDQIPKIKQYWGEQLKIPVIPLTSDWFERASPRIILAAQQLCNALSQVD

SEQ ID NO: 18040 - protein, 213 aa, Escherichia coli; identical to SEQ ID NO: 2232

SEQ ID NO: 18041 - protein, 478 aa, Escherichia coli; identical to SEQ ID NO: 3436

SEQ ID NO: 18042 - protein, 747 aa, Escherichia coli; identical to SEQ ID NO: 2954

SEQ ID NO: 18043 - protein, 240 aa, Escherichia coli; identical to SEQ ID NO: 2934

SEQ ID NO: 18044 - protein, 191 aa, Escherichia coli; identical to SEQ ID NO: 13179

SEQ ID NO: 18045 - protein, 266 aa, Escherichia coli
MMYNQEMRMHQFPLSSLMINVLICILICCTNAQAGVVVGGTRFVYPEKQSSISVELKNTASKDMLVKISVTPDDGRQLKGTLESQPLLPDKAFIATPPLLVLKQDKNTKIRINRVGGQLPIDRESLFILNVAALPAQEQNSQLKNENQLQVAVRNRMKIFYRPETLSGNPLDAYQQLRWSRKNEAVTVFNPTPWYVTLYNLSIDGKSINGGMVAPFSHRQQDWCQRQGYCEINWQTLDLYNNALPVWSVKLTVLQNNVMSAVAIHG

SEQ ID NO: 18046 - protein, 208 aa, Escherichia coli; identical to SEQ ID NO: 1949

SEQ ID NO: 18047 - protein, 111 aa, Escherichia coli; identical to SEQ ID NO: 3996

SEQ ID NO: 18048 - protein, 650 aa, Escherichia coli
MKGLNKITCCLLAALLMPCAGHAENEQYGANFNNADIRQFVEIVGQHLGKTILIDPSVQGTISVRSNDTFSQQEYYQFFLSILDLYGYSVITLDNGFLKVVRSANVKTSPGMIADSSRPGAGDELVTRIVPLENVPARDLAPLLRQMMDAGSVGNVVHYEPSNVLILTGRASTINKLIEVIKRVDVIGTEKQQIIHLEYASAEDLAEILNQLISESHGKSQMPALLSAKIVADKRTNSLIISGPEKARQRIASLLKSLDVEESEEGNTRVYYLKYAKATNLVEVLTGVSEKLKDEKGNERKPSSSGAMDNVAITADEQTNSLVITADQSVQEKLATVIARLDIRRAQVLVEAIIVEVQDGNGLNLGVQWANKNVGAQQFTNTGLPIFNAAQGVADYKKNGGITSANPAWDMFSAYNGMAAGFFNGDWGVLLTALASNNKNDILATPSIVTLDNKLASFNVGQDVPVLSGSQTTSGDNVFNTVERKTVGTKLKVTPQVNEGDAVLLEIEQEVSSVDSSSNSTLGPTFNTRTIQNAVLVKTGETVVLGGLLDDFSKEQVSKVPLLGDIPLVGQLFRYTSTERAKRNLMVFIRPTIIRDDDVYRSLSKEKYTRYRQEQQQRIDGKSKALVGSEDLPVLDENTFNSHTPAPSAR

SEQ ID NO: 18049 - protein, 478 aa, Escherichia coli; identical to SEQ ID NO: 2404

SEQ ID NO: 18050 - protein, 224 aa, Escherichia coli
MTVSLTAILLSCSFTWAAGKGGVGLAATRLVYSEGEEQISLGVRNTSPDVPYLIQSWVMTPDNKKSADFIITPPLFVLNPANENLLRIMYIGAPLAKDRETFFFTSVRAVPSTTKREEGNTLKIATQSVIKLFWRPKGLAYPLGEAPAKLRCTSSADMVTVSNPTPYFITLTDLKIGGKVVKNQMISPFDKYQFPLPKGAQNSSVTYRTINDYGAETPQLNCKS

SEQ ID NO: 18051 - protein, 660 aa, Escherichia coli
MSRPQFTSLRLSLLALAVSATLPTFAFATETMTVTATGNARSSFEAPMMVSVIDTSAPENQTATSASDLLRHVPGITLDGTGRTNGQDVNMRGYDHRGVLVLVDGVRQGTDTGHLNGTFLDPALIKRVEIVRGPSALLYGSGALGGVISYDTVDAKDLLQEGQSSGFRVFGTGGTGDHSLGLGASAFGRTENLDGIVAWSSRDRGDLRQSNGETAPNDESINNMLAKGTWQIDSAQSLSGLVRYYNNDAREPKNPQTVEASDSSNPMVDRSTIQRDAQLSYKLAPQGNDWLNADAKIYWSEVRINAQNTGSSGEYREQITKGTRLENRSTLFADSFASHLLTYGGEYYRQEQHPGGATTGFPQAKIDFSSGWLQDEITLRDLPITLLGGTRYDSYRGSSDGYKDVDADKWSSRAGMTINPTNWLMLFGSYAQAFRAPTMGEMYNDSKHFSIGRFYTNYWVPNPNLRPETNETQEYGFGLRFDDLMLSNDALEFKASYFDTKAKDYISTTVDFAAATTMSYNVPNAKIWGWDVMTKYTTDLFSLDVAYNRTRGKDTDTGEYISSINPDTVTSTLNIPIAHSGFSVGWVGTFADRSTHISSSYSKQPGYGVNDFYVSYQGQQALKGMTTTLVLGNAFDKEYWSPQGIPQDGRNGKIFVSYQW

SEQ ID NO: 18052 - protein, 430 aa, Escherichia coli; identical to SEQ ID NO: 2617

SEQ ID NO: 18053 - protein, 567 aa, Escherichia coli; identical to SEQ ID NO: 4028

SEQ ID NO: 18054 - protein, 397 aa, Escherichia coli
MKRKVLAMLVPALLVAGAANAAEVYNKDGNKLDLYGKVAGLHYFSDDAGSDGDMSYARIGFKGETQIADQFTGYGQWEFNIGANGPESDKGNTATRLAFAGLGFGQNGTFDYGRNYGVVYDIEAWTDMLPEFGGDTYAGADNFLNGRANGVATYRNNGFFGQVDGLNFALQYQGNNEGSGGLWDQEGSGNGNNRKLSKENGDGFGMSTSYDFDFGLSLGAAYSNSDRTDNQRATGLGEQRSNKYAGGETAEAWTVGAKYDANNVYLAAMYAETRNMTAYGSGKDNNDIDRGGIANKTQNFEVVAQYQFDFGLRPSIAYLQSKGKDLGGWAHDGNGDPRYTNKDLVKYVDIGATYYFNKNMSTYVDYKINLLDNDDDFYKANGIATDDIVAVGLVYQF

SEQ ID NO: 18055 - protein, 243 aa, Escherichia coli
MTFMKGLPLLLLVASLCSHAALQPDRTRIVFNANDKATSLRVDNRSDKLPYLAYSWLENEKGEKSDDLLVALPPIQRLEPKATTQVRIVKQASTTKLPGDRETLFFYNMREIPPAPEKNSDHAVLQVAIQSRIKVFWRPSALRKKAGEKVELQLQVSQQGNQLNLKNPTGYYLTIAYLGRNEQGILPGFKTVMVAPFSTVITNTGSYSGSQFYLGYMDDYGALRMTTLNCNGHCRLQAVEAKK

SEQ ID NO: 18056 - protein, 366 aa, Escherichia coli; identical to SEQ ID NO: 3901

SEQ ID NO: 18057 - protein, 828 aa, Escherichia coli; identical to SEQ ID NO: 2388

SEQ ID NO: 18058 - protein, 169 aa, Escherichia coli; identical to SEQ ID NO: 4593

SEQ ID NO: 18059 - protein, 192 aa, Escherichia coli
MKSKKYFIILLALTAIAGLGTHAAWSSNGLPRIDNKTLARLAQQHPVVVLFRHAERCDRSTNQCLSDKTGITVKGTQDARELGNAFSADIPDFDLYSSNTVRTIQSATWFSAGKKLTVDKRLLQCGNEIYSAIKDLQSKAPDKNIVIFTHNHCLTYIAKDKRDATFKPDYLDGLVMHVEKGKVYLDGEFVNH

SEQ ID NO: 18060 - protein, 678 aa, Escherichia coli
MVPSTFSRLKAARCLPVVLAALIFAGCGTHTPDQSTAYMQGTAQADSAFYLQQMQQSSDDTRINWQLLAIRALVKEGKTGQAVELFNQLPQELNDSQRREKTLLAAEIKLAQKDFAGAQNLLAKITPADLEQNQQARYWQVKIDASQGRPSIDLLRALIAQEPLLGAKEKQQNIDATWQALSSMTQEQANTLVINADENILQGWLDLQRIWFDNRNDPDMMKAGIADWQKRYPNNPGAKMLPTQLVNVKAFKPASTNKIALLLPLNGQAAVFGRTIQQGFEAAKNIGTQPVATQVAAAPAADVAEQPQPQTVDGVASPAQASVSDLTGEQPAAQPVPVSAPAATTAAVSAPANPSAELKIYDTSSQPLSQILNQVQQDGASIVVGPLLKNNVEELLKSNTPLNVLALNQPENIENRVNICYFALSPEDEARDAARHIRDQGKQAPLVLIPRSSLGDRVANAFAQEWQKLGGGTVLQQKFGSTSELRAGVNGGSGIALTGSPITPRATTDSGMTTNNPTLQTTPTDDQFTNNGGRVDAVYIVATPGEIAFIKPMIAMRNGSQSGATLYASSRSAQGTAGPDFRLEMEGLQYSEIPMLAGGNLPLMQQALSAVNNDYSLARMYAMGVDAWSLANHFSQMRQVQGFEINGNTGSLTANPDCVINRKLSWLQYQQGQVVPAS

SEQ ID NO: 18061 - protein, 517 aa, Escherichia coli; identical to SEQ ID NO: 2462

SEQ ID NO: 18062 - protein, 565 aa, Escherichia coli
MKSPAPSRPQKMALIPACIFLCFAALSVQAEETPVTPQPPDILLGPLFNDVQNAKLFPDQKTFADAVPNSDPLMILADYRMQQNQSGFDLRHFVNVNFTLPKEGEKYVPPEGQSLREHIDGLWPVLTRSTESTEKWDSLLPLPEPYVVPGGRFREVYYWDSYFTMLGLAESGHWDKVADMVANFAHEIDTYGHIPNGNRSYYLSRSQPPFFALMVELLAQHEGDAALKQYLPQMQKEYAYWMDGVENLQAGQQEKRVVKLQDGTLLNRYWDDRDTPRPESWLEDIATAKSNPNRPATEIYRDLRSAAASGWDFSSRWMDDPQQLNTLRTTSIVPVDLNSLMFKMEKILARASKAAGDNAMANQYETLANARQKGIEKYLWNDQQGWYADYDLKSHKVRNQLTAAALFPLYVNAAAKDRASKMATATKTHLLQPGGLNTTSVKSGQQWDAPNGWAPLQWVATEGLQNYGQKEVAMDISWHFLTNVQHTYDREKKLVEKYDVSTTGTGGGGGEYPLQDGFGWTNGVTLKMLDLICPKEQPCDNVPATRPLSESTTQPVKQKEAEPTP

SEQ ID NO: 18063 - protein, 360 aa, Escherichia coli
MMKKYLALALIAPLLISCSTTKKGDTYNEAWVKDTNGFDILMGQFAHNIENIWGFKEVVIAGPKDYVKYTDQYQTRSHINFDDGTITIETIAGTEPAAHLRRAIIKTLLMGDDPGSVDLYSDVDDITISKEPFLYGQVVDNTGQPIRWEGRASNFADYLLKNRLKSRSNGLRIIYSVTINMVPNHLDKRAHKYLGLVRQASRKYGIDESLILAIMQTESSFNPYAVSRSDALGLMQVVQHTAGKDVFRSQGKSGTPSRSFLFDPASNIDTGTAYLAMLNNVYLGGIDNPTSRRYAVITAYNGGAGSVLRVFSNDKIQAANIINTMTPGDVYQTLTTRHPSAESRRYLYKVNTAQKSYRRR

SEQ ID NO: 18064 - protein, 729 aa, Escherichia coli
MLSTQFNRDNQHQTTSKPSLLAACIALALLPSAAFAAPATEETVIVEGSATTPVDDENDYSVTSTSAGTKMQMTQRDIPQSVTIVSQQRMEDQQLQTLGEVMENTLGISKSQADSDRALYYSRGFQIDNYMVDGIPTYFESRWNLGDALSDMALFERVEVVRGATGLMTGTGNPSAAINMVRKHATSREFKGDVSAEYGSWNKERYVADLQSPLTEDGKIRARIVGGYQNNDSWLDRYNSEKTFFSGIVDADLGDLTTLSAGYEYQRIDVNSPTWGGLPRWNTDGSSNSYDRARSTAPDWAYNDKEINKVFMTLKQRFADTWQATLNATHSEVEFDSKMMYVDAYVNKADGMLVGPYSNYGPGFDYVGGTGWNSGKRKVDALDLFADGSYELFGRQHNLMFGGSYSKQNNRYFSSWANIFPDEIGSFYNFNGNFPQTDWSPQSLAQDDTTHMKSLYAATRVTLADPLHLILGARYTNWRVDTLTYSMEKNHTTPYAGLVFDINDNWSTYASYTSIFQPQNDRDSSGKYLAPITGNNYELGLKSDWMNSRLTTTLAIFRIEQDNVAQSTGTPIPGSNGETAYKAVDGTVSKGVEFELNGAITDNWQLTFGATRYIAEDNEGNAVNPNLPRTTVKMFTSYRLPVMPELTVGGGVNWQNRVYTDTVTPYGTFRAEQGSYALVDLFTRYQVTKNFSLQGNVNNLFDKTYDTNVEGSIVYGAPRNFSITGTYQF

SEQ ID NO: 18065 - protein, 784 aa, Escherichia coli; identical to SEQ ID NO: 2244

SEQ ID NO: 18066 - protein, 236 aa, Escherichia coli
MTNTWNRLTLAIFAVLSLLVVGKLQAGVVVGGMRFIFPADRESISISLTNTSQESWLINSKINRPTRWAGGEASTGSAPLLVAPPLVLLKPGTTGTLRLLRTESDILPVDRETLFELSIASVPSGKVENQSVKVAMRSVFKLFWRPEGLPGDPLEAYQQLRWTRNSQGVQLTNPTPYYINLIQVSVNGKALSNAGVVPPKSQRQTSWCQAIAPCHVSWRTINDYGGLSAKKEQNLL

SEQ ID NO: 18067 - protein, 122 aa, Escherichia coli; identical to SEQ ID NO: 2915

SEQ ID NO: 18068 - protein, 747 aa, Escherichia coli
MARSKTAQPKHSLRKIAVVVATAVSGMSVYAQAAVEPKEDTITVTAAPAPQESAWGPAATIAARQSATGTKTDTPIQKVPQSISVVTAEEMALHQPKSVKEALSYTPGVSVGTRGASNTYDHLIIRGFAAEGQSQNNYLNGLKLQGNFYNDAVIDPYMLERAEIMRGPVSVLYGKSSPGGLLNMVSKRPTTEPLKEVQFKAGTDSLFQTGFDFSDALDDDGVYSYRLIGLARSANAQQKGSEEQRYAIAPAFTWRPDDKTNFTFLSYFQNEPETGYYGWLPKEGTVEPLPNGKRLPTDFNEGAKNNTYSRNEKMVGYSFDHEFNDTFTVRQNLRFAENKTSQNSVYGYGVCSDPANAYSKQCAALAPADKGHYLARKYVVDDEKLQNFSVDTQLQSQFATGDIDHTLLTGVDFMRMRNDINAWFGYDDSVPLLDLYNPVNTDFDFNAKDPANSGPYRILNKQKQTGVYVQDQAQWDKVLVTLGGRYDWADQESLNRVAGTTDKRDDKQFTWRGGVNYLFDNGVTPYFSYSESFEPSSQVGKDGNIFAPSKGKQYEVGVKYVPEDRPIVVTGAVYNLTKTNNLMADPEGSFFSVEGGEIRARGVEIEAKAALSASVNVVGSYTYTDAEYTTDTTYKGNTPAQVPKHMASLWADYTFFDGPLSGLTLGTGGRYTGSSYGDPANSFKVGSYTVVDALVRYDLARVGMAGSNVALHVNNLFDREYVASCFNTYGCFWGAERQVVATATFRF

SEQ ID NO: 18069 - protein, 230 aa, Escherichia coli; identical to SEQ ID NO: 2580

SEQ ID NO: 18070 - protein, 650 aa, Escherichia coli
MSAISCAWPVLAVDDDGETMVVTASSVEQNLKDAPASISVITQEDLQRKPVQNLKDVLKEVPGVQLTNEGDNRKGVSIRGLDSSYTLILVDGKRVNSRNAVFRHNDFDLNWIPVDSIERIEVVRGPMSSLYGSDALGGVVNIITKKIGQKWSGTVTVDTTIQEHRDRGDTYNGQFFTSGPLIDGVLGMKAYGSLAKREKDDPQNSTTTDTGETPRIEGFSSRDGNVEFAWTPNQNHDFTAGYGFDRQDRDSDSLDKNRLERQNYSVSHNGRWDYGTSELKYYGEKVENKNPGNSSPITSESNTVDGKYTLPLTAINQFLTVGGEWRHDKLSDAVNLTGGTSSKTSASQYALFVEDEWRIFEPLALTTGVRMDDHETYGEHWSPRVYLVYNATDTVTVKGGWATAFKAPSLLQLSPDWTSNSCRGACKIVGSPDLKPETSESWELGLYYMGEEGWLEGVESSVTVFRNDVKDRISISRTSDVNAAPGYQNFVGFETGANGRRIPVFSYYNVNKARIQGVETELKIPFNDEWKLSLNYTYNDGRDVSNGENKPLSDLPFHTANGTLDWKPLALEDWSFYVSGHYTGQKRADSATAKTPGGYTIWNTGAAWQVTKDVKLRAGVLNLGDKDLSRDDYSYNEDGRRYFMAVDYRF

SEQ ID NO: 18071 - protein, 368 aa, Escherichia coli; identical to SEQ ID NO: 13861

SEQ ID NO: 18072 - protein, 760 aa, Escherichia coli
MENNRNFPARQFHSLTFFAGLCIGITPVAQALAAEGQANADDTLVVEASTPSLYAPQQSADPKFSRPVADTTRTMTVISEQVIKDQGATNLTDALKNVPGVGAFFAGENGNSTTGDAIYMRGADTSNSIYIDGIRDIGSVSRDTFNTEQVEVIKGPSGTDYGRSAPTGSINMISKQPRNDSGIDASASIGSAWFRRGTLDVNQAIGDTTAVRLNVMGEKTHDAGRDKIKNERYGVAPSVAFGLGTANRLYLNYLHVTQHNTPDGGIPTIGLPGYSAPSAGTAALNHSGKVDTHNFYGTDSDYDDSTTDTATMRFEHDINDNTTIRNTTRWSRVKQDYLMTAIMGGASNITQPTSDVNSWTWSRTANTKDVSNKILTNQTNLTSTFYTGSIGHDVSTGVEFTRETQTNYGVNPVTLPAVNIYHPDNSIHPGGLTRNGANANGQTDTFAIYAFDTLQITRDFELNGGIRLDNYHTEYDSATACGGSGRGAITCPAGVAKGSPVTTVDTAKSGNLVNWKAGALYHLTENGNVYINYAVSQQPPGGNNFALAQSGSGNSANRTDFKPQKANTSEIGTKWQVLDKRLLLTAALFRTDIENEVEQNDDGTYSQYGKKRVEGYEISVAGNITPAWQVIGGYTQQKATIKNGKDVAQDGSSSLPYTPEHAFTLWSQYQATDDISVGAGARYIGSMHKGSDGAVGTPAFTEGYWVADTKLGYRVNRNLDFQLNVYNLFDTDYVASINKSGYRYHPGEPRTFLLTANMHF

SEQ ID NO: 18073 - protein, 704 aa, Escherichia coli
MAFFMKIFSVRQTVLPALLVLSPVVFAADEQTMIVSATPQVVSELDTPAAVSVVDGEEMRLATPRINLSESLTGVPGLQVQNRQNYAQDLQLSIRGFGSRSTYGIRGIRLYVDGIPATMPDGQGQTSNIDLSSVQNVEVLRGPFSALYGNASGGVMNVITQTGQQPPTIEASSYYGSFGSWRYGLKATGATGDGTQPGDVDYTVSTTRFTTHGYRDHSGAQKNLANAKLGVRIDDASKLSLIFNSVDIKADDPGGLTEAEWKANPQQAPRAEQYDTRKTIKQTQAGLRYERSLSSRDDMSMMMYAGERETTQYQPIPMLPQLNPSHAGGVITLQRHYQGIDSRWTHRGELGVPVTFTTGLNYENMSENRKGYNNFRLNSGVPEYGQKGELRRDERNLMWNVDPYLQTQWQLSEKLSLDAGVRYSSVWFDSNDHYVTPGNGDDSGDVSYHKWLPAGSLKYAMTDAWNIYLAAGRGFETPTINELSYLADGQSGMNFGLKPSTNDTIEIGSKTRIGYGLLSLALFQTDTDDEIVVDSSSGGRTTYKNAGKTRRQGAELAWDQRFAEDFRVKASWTWLDATYRSNVCNEQDCNGNRMPGIARNMGFASIGYVPEDGWYAGTEARYMGDIMADDENTAKAPSYTLVGLFTGYKYNYHNLTVDLFGRVDNLFDKEYVGSVIVNESNGRYYEPAPGRNYGVGMNIAWRFE

SEQ ID NO: 18074 - protein, 656 aa, Escherichia coli; identical to SEQ ID NO: 10533

SEQ ID NO: 18075 - protein, 446 aa, Escherichia coli; identical to SEQ ID NO: 2182

SEQ ID NO: 18076 - protein, 412 aa, Escherichia coli
MKQWIAALLLMLIPGAQAAKPQKVTLMVDDVPVAQVLQALAEQEKLNLVVSPDVSGTVSLHLTDVPWKQALQTVVKSAGLITRQEGNILSVHSVAWQNDNIARQEAEQARAQANLPLENRSITLKYADAGELAKAGEKLLSAKGSMTVDKRTNRLLLRDNKTALSALEQWVAQMDLPVGQVELSAHIVTINEKSLRELGVKWTLADAQHAGGVGQVTTLGSDLSVATATTHVGFNIGRINGRLLDLELSALEQKQQLDIIASPRLLASHLQPASIKQGSEIPYQVSSGESGATSVEFKEAVLGMEVTPTVLQKGRIRLKLHISQNVPGQVLQQADGEVLAIDKQEIETQVEVKSGETLALGGIFTRKNKSGQDSVPLLGDIPWFGQLFRHDGKEDERRELVVFITPRLVSSE

SEQ ID NO: 18077 - protein, 232 aa, Escherichia coli
MQKNAAHTYAISSLLVLSLTSCAWIPSTPLVQGATSAQPVPGPTPVANGSIFQSAQPINYGYQPLFEDRRPRNIGDTLTIVLQENVSASKSSSANASRDGKTNFGFDTVPRYLQGLFGNARADVEASGGNTFNGKGGANASNTFSGTLTVTVDQVLVNGNLHVVGEKQIAINQGTEFIRFSGVVNPRTISGSNTVPSTQVADARIEYVGNGYINEAQNMGWLQRFFLNLSPM

SEQ ID NO: 18078 - protein, 679 aa, Escherichia coli; identical to SEQ ID NO: 11543

SEQ ID NO: 18079 - protein, 249 aa, Escherichia coli
MTKHLSAKTLTAVLSLLAATVSYSTQASVTPDRTRLIFNESDKSISVTLRNNDPKLPYLAQSWIEDEKGVKISSPLAVLPPVQRIDAMMNGQVKIQGLPDIHKLPADRESMFYFNVREIPPKSNKSNTLQIALQTRIKLFWRPKALEKNTTQNPWQHKVTLTRNGQEFTVNNPTPYYVIFSNASAQKNGNPAAGFSPIVMSPKTSAPLNVKMGSVPVLTYVNDYGARMPLFFTCNGNSCQVDEEQSRKG

SEQ ID NO: 18080 - protein, 203 aa, Escherichia coli; identical to SEQ ID NO: 2009

SEQ ID NO: 18081 - protein, 518 aa, Escherichia coli; identical to SEQ ID NO: 2349

SEQ ID NO: 18082 - protein, 746 aa, Escherichia coli; identical to SEQ ID NO: 17389

SEQ ID NO: 18083 - protein, 203 aa, Escherichia coli; identical to SEQ ID NO: 9490

SEQ ID NO: 18084 - protein, 249 aa, Escherichia coli; identical to SEQ ID NO: 9840

SEQ ID NO: 18085 - protein, 213 aa, Escherichia coli; identical to SEQ ID NO: 2232

SEQ ID NO: 18086 - protein, 351 aa, Escherichia coli; identical to SEQ ID NO: 2872

SEQ ID NO: 18087 - protein, 224 aa, Escherichia coli
MKGLLALLISSMVLPAHAGIVIYGTRIIYPAENKEVMVQLMNQGNRSSLLQAWIDDGDTSLPPEKIQVPFMLTPPVAKIGANSGQQVKIKIMPNKLPTNKESIFYLNVLDIPPNSPEQEGKNALKFAMQNRIKLFYRPAGIAPVNKVTFKKLLVNRSGNGLVIKNDSANWVTISDVKANNVKVNYETIMIAPLESQSINVKSNNANNWHLTIIDDHGNYISDKI

SEQ ID NO: 18088 - protein, 551 aa, Escherichia coli
MDRRRFIKGSMAMAAVCGTSGIASLFSQAAFAADSDIADGQTQRFDFSILQSMAHDLAQTAWRGAPRPLPDTLATMTPQAYNSIQYDAEKSLWHNVENRQLDAQFFHMGMGFRRRVRMFSVDPATHLAREIHFRPELFKYNDAGVDTKQLEGQSDLGFAGFRVFKAPELARRDVVSFLGASYFRAVDDTYQYGLSARGLAIDTYTDSKEEFPDFTAFWFDTVKPGATTFTVYALLDSASITGAYKFTIHCEKSQVIMDVENHLYARKDIKQLGIAPMTSMFSCGTNERRMCDTIHPQIHDSDRLSMWRGNGEWICRPLNNPQKLQFNAYTDNNPKGFGLLQLDRDFSHYQDIMGWYNKRPSLWVEPRNKWGKGTIGLMEIPTTGETLDNVVCFWQPEKAVKAGDEFAFQYRLYWSAQPPVHCPLARVMATRTGMGGFPEGWAPGEHYPEKWARRFAVDFVGGDLKAAAPKGIEPVITLSSGEAKQIEILYIEPIDGYRIQFDWYPTSDSTDPVDMRMYLRCQGDAISETWLYQYFPPAPDKRQYVDDRVMS

SEQ ID NO: 18089 - protein, 713 aa, Escherichia coli
MAKFTPSFSGIKGRALFSLLFAAPMIHATDTATTKDGETITVTADANTATEATDGYQPLSTSTATLTDMPMLDIPQVVNTVSDQVLENQNATTLDEALYNVSNVVQTNTLGGTQDAFVRRGFGANRDGSIMTNGLRTVLPRSFNAATERVEVLKGPASTLYGILDPGGLINVVTKRPEKTFHGSVSATSSSFGGGTGQLDITGPIEGTQLAYRLTGEVQDEDYWRNFGKERSTFIAPSLTWFGDNATVTMLYSHRDYKTPFDRGTIFDLTTKQPVNVDRKIRFDEPFNITDGQSDLAQLNAEYHLNSQWTARFDYSYSQDKYSDNQARVTAYDATTGTLTRRVDATQGSTQRMHSTRADLQGNVDIAGFYNEILGGVSYEYYDLLRTDMIRCKNAKDFNIYNPVYGNTSKCTTVSASDSDQTIKQESYSAYAQDALYLTDNWIAVAGIRYQYYTQYAGKGRPFNVNTDSRDEQWTPKLGLVYKLTPSVSLFANYSQTFMPQSSIASYIGDLPPESSNAYEVGAKFELFDGITADIALFDIHKRNVLYTESIGDETIAKTAGRVRSRGVEVDFAGALTENINIIASYGYTDAKVLEDPDYAGKPLPNVPRHTGSLFLTYDIHNMPGNNTLTFGGGGHGVSRRSATNGADYYLPGYFVADAFAAYKMKLQYPVTLQLNVKNLFDKTYYTSSIATNNLGNQIGDPREVQFTVKMEF

SEQ ID NO: 18090 - protein, 241 aa, Escherichia coli; identical to SEQ ID NO: 2922

SEQ ID NO: 18091 - protein, 193 aa, Escherichia coli; identical to SEQ ID NO: 2246

SEQ ID NO: 18092 - protein, 243 aa, Escherichia coli
MLNKKNIVALCVASSMAFSMPVMADIVISGTRVIYKSDQKSVSVRLENKGNSHLLVQSWLDTGDDNAEPGSINVPFTATPPVSRIDAKRGQTIKLMYTGSTVLPSDKESVFWFNVLEVPPKPDASKVENQSLLQLAFRTRIKLFYRPAGLNGNPSEAPLALKWKWAEGKSGLSVYNPTPYYVSFNNAELIAGGKSNPLNVKMVAPKSEEIFTISGSGGKATSGKVHFSAINDFGGAIEGDVNL

SEQ ID NO: 18093 - protein, 362 aa, Escherichia coli; identical to SEQ ID NO: 2827

SEQ ID NO: 18094 - protein, 432 aa, Escherichia coli; identical to SEQ ID NO: 2026

SEQ ID NO: 18095 - protein, 250 aa, Escherichia coli; identical to SEQ ID NO: 17403

SEQ ID NO: 18096 - protein, 221 aa, Escherichia coli
MKNYLWLVALFPLLSGCESQAILVKKDDAYFAPPTTEAPPPADGRAGGVFETGYNWSLTADRRAYRVGDILTVILEESTQSSKQAKTNFGKSNTVDIGAPTIFGHTKDKLSGSIDANRDFDGSATSQQQNSLRGEITVSVHAVQPNGILEIRGEKWLTLNQGDEYIRLSGLVRADDIQNDNSVSSQRIADARISYAGRGALSDANAAGWLTRLFNHPLFPI

SEQ ID NO: 18097 - protein, 331 aa, Escherichia coli; identical to SEQ ID NO: 2705

SEQ ID NO: 18098 - protein, 227 aa, Escherichia coli; identical to SEQ ID NO: 4009

SEQ ID NO: 18099 - protein, 89 aa, Escherichia coli; identical to SEQ ID NO: 2810

SEQ ID NO: 18100 - protein, 236 aa, Escherichia coli; identical to SEQ ID NO: 3482

SEQ ID NO: 18101 - protein, 274 aa, Escherichia coli; identical to SEQ ID NO: 9502

SEQ ID NO: 18102 - protein, 814 aa, Escherichia coli
MCAGKKAVAEPVSSVFFRRAALALAVSAAFASATGIAGEKLDMSFIQGGAGVNPEVWAALNGSYAPGRYLVDLSLNGKEAGKQILDVTPQDSNELCLTEAWLTKAGVYVSADYFREGYDATRQCYVLTKAPSVKVDFDVSTQSLALSIPQKGLVKMPENVDWDYGTSAFRVNYNANANTGRNNTSAFGSADLKANIGHWVVSSSATASGGDSGDNSTTINMFTATRAIRALSADLAVGKTSTGDSLLGSTGTYGVSLSRNNSMKPGNLGYTPVFSGIANGPSRVTLTQNGRLLHSEMVPAGPFSITDVPLYTSGDVTMKITGEDGREQVQNFPLSVMAGQLSPGQHEFSVAAGLPDDDSDLKGGVFAASYGYGLDGLTLRAGGVFNQDWQGASAGVVAGLGYLGAVSADGAYATAKYRDGSHSGNKVQLSWSKQLETTNTGLRVSWSRQSEEYEGMSSFDPTELWSQSNHGRRTKDEWNAGISQPVGGLFSLSVSGWQRSYYPASMTGSYRYSDDNGKETGITGSLSTQIKGVSLNLGWSGSRNSRGENNWSASASVSVPFTLFDRRYSSSASVSTSKGGGTGFSTGVSGSLNDRFSYGLGGGRDGDGGTSSYLNASYSGDRAYLNGVLNHSQSGGTSGSVSVSGSVLAVPAAKDIMFSRTTGDTVAVVNVKDTPGVKVTSGDGQTDSDGNLVVPLNSYDWNTVTIDAGTLPLSTELTNTSQKVVPTDKAVVWMPFDALKVKRYLLQVKQRDGEFVPGGTWARDSKNTPLGFVANNGVLMINTVDAPGDITLGQCRIPAARLQDTEKLQEITCE

SEQ ID NO: 18103 - protein, 233 aa, Escherichia coli; identical to SEQ ID NO: 3276

SEQ ID NO: 18104 - protein, 367 aa, Escherichia coli; identical to SEQ ID NO: 4285

SEQ ID NO: 18105 - protein, 663 aa, Escherichia coli; identical to SEQ ID NO: 1910

SEQ ID NO: 18106 - protein, 784 aa, Escherichia coli
MKKRIPTLLATMIATALYSQQGLAADLASQCMLGVPSYDRPLVQGDTNDLPVTINADHAKGDYPDDAVFTGSVDIMQGNSRLQADEVQLHQKEAPGQPEPVRTVDALGNVHYDDNQVILKGPKGWANLNTKDTNVWKGDYQMVGRQGRGKADLMKQRGENRYTILDNGSFTSCLPGSDTWSVVGSEIIHDREEQVAEIWNARFKVGPVPIFYSPYLQLPVGDKRRSGFLIPNAKYTTTNYFEFYLPYYWNIAPNMDATITPHYMHRRGNIMWENEFRYLSQAGAGLMELDYLPSDKVYEDEHPNDDSSRRWLFYWNHSGVMDQVWRFNVDYTKVSDPSYFNDFDNKYGSSTDGYATQKFSVGYAVQNFNATVSTKQFQVFSEQNTSSYSAEPQLDVNYYQNDVGPFDTRIYGQAVHFVNTRDDMPEATRVHLEPTINLPLSNNWGSINTEAKLLATHYQQTNLDWYNSRNTTKLDESVNRVMPQFKVDGKMVFERDMEMLAPGYTQTLEPRAQYLYVPYRDQSNIYNYDSSLLQSDYSGLFRDRTYGGLDRIASANQVTTGVTSRIYDDAAVERFNISVGQIYYFTESRTGDDNITWENDDKTGSLVWAGDTYWRISERWGLRGGIQYDTRLDNVATSNSSIEYRRDEDRLVQLNYRYASPEYIQATLPKYYSTAEQYKNGISQVGAVASWPIADRWSIVGAYYYDTNANKQADSMLGVQYSSCCYAIRVGYERKLNGWDNDKQHAVYDNAIGFNIELRGLSSNYGLGTQEMLRSNILPYQNTL

SEQ ID NO: 18107 - protein, 208 aa, Escherichia coli; identical to SEQ ID NO: 1949

SEQ ID NO: 18108 - protein, 161 aa, Escherichia coli; identical to SEQ ID NO: 2582

SEQ ID NO: 18109 - protein, 746 aa, Escherichia coli; identical to SEQ ID NO: 3031

SEQ ID NO: 18110 - protein, 565 aa, Escherichia coli; identical to SEQ ID NO: 2678

SEQ ID NO: 18111 - protein, 368 aa, Escherichia coli
MNKTITALAIMMASFAANASVLPETPVPFKSGTGAIDNDTVYIGLGSAGTAWYKLDTQAKDKKWTALAAFPGGPRDQATSAFIDGNLYVFGGIGKNSKGLTQVFNDVHKYNPKTNSWVKLMSHAPMGMAGHVTFVHNGKAYVTGGVNQNIFNGYFEDLNEAGKDSATIDKINAHYFDKKAEDYFFNKFLLSFDPSTQQWSYAGESPWYGTAGAAVVNKGDKTWLINGEAKPGLRTDAVFELDFTGNNLKWNKLAPVSSPDGVAGGFAGISNDSLIFAGGAGFKGSRENYQNGKNYAHEGLKKSYSTDIHLWHNGKWDKSGELSQGRAYGVSLPWNNSLLIIGGESAGGKAVTDSVLISVKDNKVTVQN

SEQ ID NO: 18112 - protein, 843 aa, Escherichia coli; identical to SEQ ID NO: 3042

SEQ ID NO: 18113 - protein, 224 aa, Escherichia coli; identical to SEQ ID NO: 3115

SEQ ID NO: 18114 - protein, 237 aa, Escherichia coli; identical to SEQ ID NO: 3605

SEQ ID NO: 18115 - protein, 820 aa, Escherichia coli
MKIPTTTDIPQRYTWCLAGICYSSLAILPSFLSYAESYFNPAFLLENGTSVADLSRFERGNHQPAGVYRVDLWRNDEFIGSQDIVFESTTENTGDKSGGLMPCFNQVLLERIGLNSSAFPELAQQQNNKCINLLKAVPDATINFDFAAMRLNITIPQIALLSSAHGYIPPEEWDEGIPALLLNYNFTGNRGNGNDSYFFSELSGINIGPWRLRNNGSWNYFRGNGYHSEQWNNIGTWVQRAIIPLKSELVMGDGNTGSDIFDGVGFRGIRLYSSDNMYPDSQQGFAPTVRGIARTAAQLTIRQNGLIIYQSYVSPGAFEITDLHPTSSNGDLDVTIDERDGNQQNYTIPYSTVPILQREGRFKFDLTAGDFRSGNSQQSSPFFFQGTALGGLPQEFTAYGGTQLSANYTAFLLGLGRNLGNWGAVSLDVTHARSQLADDSRHEGDSIRFLYAKSMNTFGTNFQLMGYRYSTQGFYTLDDVAYRRMEGYEYDYDYDGEHRDEPIIVNYHNLRFSRKDRLQLNISQSLNDFGSLYISGTHQKYWNTSDSDTWYQVGYTSSWVGISYSLSFSWNESVGIPDNERIVGLNVSVPFNVLTKRRYTRENALDRAYASFNANRNSNGQNSWLAGVGGTLLEGHNLSYHVSQGDTSNNGYTGSATANWQATYGTLGVGYNYDRDQHDVNWQLSGGVVGHENGITLSQPLGDTNVLIKAPGAGGVRIENQTGILTDWRGYAVMPYATVYRYNRIALDTNTMGNSIDVEKNISSVVPTQGALVRANFDTRIGVRALITVTQGGKPVPFGSLVRENSIGITSMWVMTGKFI

SEQ ID NO: 18116 - protein, 880 aa, Escherichia coli; identical to SEQ ID NO: 3110

SEQ ID NO: 18117 - protein, 366 aa, Escherichia coli
MQNWIKAAAIAVSLALPGVVLAQSLESLVNVQGVRENQLVGYSLVVGLDGTGDKNQVKFTNQTITNMLRQFGVQLPNKIDPKVKNVAAVAVSATLPPMYSRGQTIDVTVSSIGDAKSIRGGTLLLTQLHGADGEVYALAQGSVVVGGMNATGASGSSVTVNTPTAGLIPNGATVEREIPSDFQMGDTITLNLKRPSFKDANNIAAAINASFGGIATAQSSTNVTVRAPTSPGARVAFMSQLDDVQVQAEKIRARVVFNSRTGTVVMGDGVALHAAAVSHGSLTVSINETSNVSQPNAFAGGRTAVTPQSNIAVNHARPGVVSLPESSSLKTLVNALNSLGATPDDIMSILQALHEAGALDADLEVI

SEQ ID NO: 18118 - protein, 700 aa, Escherichia coli
MKIFSVRQTVLPALLALSPVVFAADEQTMIVSAAPQVVSELDTPAAVSVVDGEEMRLATPRINLSESLTGVPGLQVQNRQNYAQDLQLSIRGFGSRSTYGIRGIRLYMDGIPATMPDGQGQTSNIDLSSVQNVEVLRGPFSALYGNASGGVMNVTTQTGQQPPTIEASSYYGSFGSWRYGLKATGATGDGTQPGDVDYTVSTTRFTTHGYRDHSGAQKNLANAKLGVRIDEASKLSLIFNSVDIKADDPGGLTKAEWKANPQQAPRAEQYDTRKTIKQTQAGLRYERSLSAQDDMSVMMYAGERETTQYQSIPMAPQLNPSHAGGVITLQRHYQGIDSRWTHRGELGVPVTFTTGLNYENMSENRKGYNNFRLNSGMPEYGQKGELRRDERNLMWNIDPYLQTQWQLSEKLSLDAGVRYSSVWFDSNDHYVTPGNGDDSGDASYHKWLPAGSLKYAMTDAWNIYLAAGRGFETPTINELSYRADGQSGMNLGLKPSTNDTIEIGSKTRIGDGLLSLALFQTDTDDEIVVDSSSGGRTTYKNAGKTRRQGAELAWDQRFAGDFRVNASWTWLDATYRSNVCNEQDCNGNRMPGIARNMGFASIGYVPEDGWYAGTEARYMGDIMADDENTAKAPSYTLVGLFTGYKYNYHNLTVDLFGRVDNLFDKEYVGSVIVNESNGRYYEPSPGRNYGVGMNIAWRFE

SEQ ID NO: 18119 - protein, 365 aa, Escherichia coli; identical to SEQ ID NO: 2102

SEQ ID NO: 18120 - protein, 478 aa, Escherichia coli; identical to SEQ ID NO: 2404

SEQ ID NO: 18121 - protein, 243 aa, Escherichia coli; identical to SEQ ID NO: 3483

SEQ ID NO: 18122 - protein, 207 aa, Escherichia coli; identical to SEQ ID NO: 2211

SEQ ID NO: 18123 - protein, 258 aa, Escherichia coli
MSKRNAVTTFFTNRVTKALGMTLALMMTCQSAMASLAADQTRYIFRGDKDALTITVTNNDKERTFGGQAWVDNIVEKDTRPTFVVTPSFFKVKPNGQQTLRIIMASDHLPKDKESVYWLNLQDIPPALEGSGIAVALRTKLKLFYRPKALLEGRKGAEEGISLQSRPDGRTMLVNTTPYIFAIGSLLDGNGKKIATDNGTTQKLLMFMPGDEVQVKGNVVKVDSLNDYGELQTWTINKKKPAAPEAAKAEKADTAEQK

SEQ ID NO: 18124 - protein, 203 aa, Escherichia coli; identical to SEQ ID NO: 2201

SEQ ID NO: 18125 - protein, 246 aa, Escherichia coli; identical to SEQ ID NO: 3021

SEQ ID NO: 18126 - protein, 266 aa, Escherichia coli; identical to SEQ ID NO: 1894

SEQ ID NO: 18127 - protein, 334 aa, Escherichia coli; identical to SEQ ID NO: 2756

SEQ ID NO: 18128 - protein, 362 aa, Escherichia coli; identical to SEQ ID NO: 2434

SEQ ID NO: 18129 - protein, 614 aa, Escherichia coli; identical to SEQ ID NO: 1888

SEQ ID NO: 18130 - protein, 191 aa, Escherichia coli; identical to SEQ ID NO: 4195

SEQ ID NO: 18131 - protein, 678 aa, Escherichia coli; identical to SEQ ID NO: 3014

SEQ ID NO: 18132 - protein, 826 aa, Escherichia coli
MLRMTPLASAIVALLLGIEAYAAEETFDTHFMIGGMKDQQVANIRLDDNQPLPGQYDIDIYVNKQWRGKYEIIVKDNPQETCLSREVIKRLGINSDNFASGKQCLTFEQLVQGGSYTWDIGVFRLDFSVPQAWVEELESGYVPPENWERGINAFYTSYYVSQYYSDYKASGNSKSTYVRFNSGLNLLGWQLHSDASFSKTNNNPGVWKSNTLYLERGFAQLLGTLRVGDMYTSSDIFDSVRFRGVRLFRDMQMLPNSKQNFTPRVQGIAQSNALVTIEQNGFVVYQKEVPPGPFAITDLQLAGGGADLDVSVKEADGSVTTYLVPYAAVPNMLQPGVSKYDFAAGRSHIEGASKHSDFVQAGYQYGFNNLLTLYGGSMVANNYYAFTLGTGWNTRIGAISVDATKSHSKQDNGDVFDGQSYQIAYNKFVSQTSTRFGLAAWRYSSRDYRTFNDHVWANNKDNYRRDENDVYDIADYYQNDFGRKNSFSANMSQSLPEGWGSVSLSTLWRDYWGRSGSSKDYQLSYSNNWRRISYILAASQAYDENHHEEKRFNIFISIPFDWGDDVTTPRRQIYMSNSTTFDDQGFASNNTGLSGTVGSRDQFNYGVNLSYQNQGNETTAGANLTWNAPVATVNGSYSQSSTYRQAGASVSGGIVAWSGGVNLANRLSETFAVMNAPGIKDAYVNGQKYRTTNRNGVVVYDGMTPYRENHLMLDVSQSDSEAELRGNRKIAAPYRGAVVLVNFDTDQRKPWFIKALRADGQPLMFGYEVNDIHGHNIGVVGQGSQLFIRTNEVPPSVNVAIDKQQGLSCTITFGKEIDESRNYICQ

SEQ ID NO: 18133 - protein, 213 aa, Escherichia coli; identical to SEQ ID NO: 2232

SEQ ID NO: 18134 - protein, 407 aa, Escherichia coli; identical to SEQ ID NO: 11408

SEQ ID NO: 18135 - protein, 274 aa, Escherichia coli; identical to SEQ ID NO: 6497

SEQ ID NO: 18136 - protein, 686 aa, Escherichia coli; identical to SEQ ID NO: 3129

SEQ ID NO: 18137 - protein, 432 aa, Escherichia coli; identical to SEQ ID NO: 2026

SEQ ID NO: 18138 - protein, 402 aa, Escherichia coli
MLIPGVQAAKPQKVTLMVDDVPVAQVLQALAEQEKLNLVVSPDVSGTVSLHLTDVPWKQALQTVVKSAGLITRQEDNILSVHSIAWQNNNIARQEAEQARAQANLPLENRSITLQYADAGELAKAGEKLLSAKGSMTVDKRTNRLLLRDNKTALSALEQWVAQMDLPVGQVELSAHIVTINEKSLRELGVKWTLADAQHAGGVGQVTTLGSDLSVATATTHVGFNIGRINGRLLDLELSALEQKQQLDIIASPRLLASHLQPASIKQGSEIPYQVSSGESGATSVEFKEAVLGMEVTPTVLQKGRIRLKLHISQNVPGQVLQQADGEVLAIDKQEIETQVEVKSGETLALGGIFTRKNKSGQDSVPLLGDIPWFGQLFRHDGKEDERRELVVFITPRLVSSE

SEQ ID NO: 18139 - protein, 446 aa, Escherichia coli; identical to SEQ ID NO: 2176

SEQ ID NO: 18140 - protein, 828 aa, Escherichia coli; identical to SEQ ID NO: 2380

SEQ ID NO: 18141 - protein, 250 aa, Escherichia coli; identical to SEQ ID NO: 3048

SEQ ID NO: 18142 - protein, 200 aa, Escherichia coli; identical to SEQ ID NO: 1784

SEQ ID NO: 18143 - protein, 118 aa, Escherichia coli [sequence omitted]

SEQ ID NO: 18144 - protein, 518 aa, Escherichia coli; identical to SEQ ID NO: 2349

SEQ ID NO: 18145 - protein, 230 aa, Escherichia coli; identical to SEQ ID NO: 3019

SEQ ID NO: 18146 - protein, 351 aa, Escherichia coli; identical to SEQ ID NO: 2872

SEQ ID NO: 18147 - protein, 331 aa, Escherichia coli; identical to SEQ ID NO: 2700

SEQ ID NO: 18148 - protein, 866 aa, Escherichia coli; identical to SEQ ID NO: 4866

SEQ ID NO: 18149 - protein, 243 aa, Escherichia coli; identical to SEQ ID NO: 2910

SEQ ID NO: 18150 - protein, 203 aa, Escherichia coli; identical to SEQ ID NO: 2009

SEQ ID NO: 18151 - protein, 878 aa, Escherichia coli
MSYLNLRLYQRNTQCLHIRKHRLAGFFVRLFVACAFAAQAPLSSAELYFNPRFLADDPQAVADLSRFENGQELPPGTYRVDIYLNNGYMATRDVTFNTGDSEQGIVPCLTRAQLASMGLNTASVSGMNLLADDACVPLTSMIHDATAHLDVGQQRLNLTIPQAFMSNRARGYIPPELWDPGINAGLLNYNFSGNSVQNRIGGNSHYAYLNLQSGLNIGAWRLRDNTTWSYNSSDRSSGSKNKWQHINTWLERDIIPLRSRLTLGDGYTQGDIFDGINFRGAQLASDDNMLPDSQRGFAPVIHGIARGTAQVTIKQNGYDIYNSTVPPGPFTINDIYAVGNSGDLQVTIKEADGSTQIFTVPYSSVPLLQREGHTRYSITAGEYRSGNAQQEKPRFFQSTLLHGLPAGWTIYGGTQLADRYRAFNFGIGKNMGALGALSVDMTQANSTLPDDSQHDGQSVRFLYNKSLNESGTNIQLVGYRYSTSGYFNFADTTYSRMNGYNIETQDGVIQVKPKFTDYYNLAYNKRGKLQLTVTQQLGRSSTLYLSGSHQTYWGTSNVDEQFQAGLNTAFEDINWTLSYSLTKNAWQKGRDQMLALNVNIPFSHWLRSDSKSQWRHASASYSMSHDLNGRMTNLAGVYGTLLEDNNLSYSVQTGYAGGGDGNSGSTGYATLNYRGGYGNANIGYSHSDDIKQLYYGVSGGVLAHANGVTLGQPLNDTVVLVKAPGAKDAKVENQTGVRTDWRGYAVLPYATEYRENRVALDTNTLADNVDLDNAVANVVPTRGAIVRAEFKARVGIKLLMTLTHNNKPLPFGAMVTSESSQSSGIVADNGQVYLSGMPLAGKVQVKWGEEENAHCIANYQLPPESQQQLLTQLSAECR

SEQ ID NO: 18152 - protein, 430 aa, Escherichia coli; identical to SEQ ID NO: 2617

SEQ ID NO: 18153 - protein, 866 aa, Escherichia coli
MTIKPTKNYHNHLTRIATFCALLYCNSAFCAELVEYDHTFLMGQNASNIDLSRYSEGNPAIPGMYDVSVYVNDQPIINQSITFIEIEGKKNAQACITLKNLLQFHINSPDINNEKAVLLARDETLGNCLNLTEIIPQASVRYDVNEQRLDIDVPQAWVMKNYQNYVDPSLWENGINAAMLSYNLNGYHSETPGRRNDSIYAAFNGGMNLGAWRLRASGNYNWMTDSGSNYDFKNRYIQRDIASLRSQLILGESYTTGETFDSVSIRGIRLYSDSRMLPPTLASFAPIIHGVANTNAKVTIMQGGYKIYETTVPPGAFVIDDMSPSGYGSDLIVTVEESDGSKRTFSQPFSSVVQMLRPGVGRWDISGGQVLKDDIQDEPNLFQASYYYGLNNCLTGYTGIQITDNNYTAGLLGLGLNTSVGAFSFDVTHSNVRIPDDKTYQGQSYRVSWNKLFEETSTSLNIAAYRYSTQNYLGLNDALTLIDEVKHPEQDLEPKSMRNYSRMKNQVTVSINQPLKFEKKDYGSFYLSGSWSDYWASGQNRSNYSIGYSNSASWGSYSVSAQRSWNEDGDTDDSVYLSFTIPIEKLLGTEQRTSGFQSIDTQMSSDFKGNNQLNVSSSGYSDNARVSYSVNTGYTMNKASKDLSYVGGYASYESPWGTLAGSVSANSDNSRQVSLSTDGGFVLHSGGLTFSNDSFSDSDTLAVVQAPGAQGARINYGNSTIDRWGYGVTSALSPYHENRIALDINDLENDVELKSTSAVAVPRQGSVVFADFETVQGQSAIMNITRSDGKNIPFAADIYDEKGNVIGNVGQGGQAFVRGIEQQGNISIKWLEESKPVSCLAHYQQSSEAEKIAQSIILNGIRCQIQ

SEQ ID NO: 18154 - protein, 102 aa, Escherichia coli; identical to SEQ ID NO: 1824

SEQ ID NO: 18155 - protein, 249 aa, Escherichia coli; identical to SEQ ID NO: 3492

SEQ ID NO: 18156 - protein, 162 aa, Escherichia coli; identical to SEQ ID NO: 1965

SEQ ID NO: 18157 - protein, 539 aa, Escherichia coli; identical to SEQ ID NO: 3050

SEQ ID NO: 18158 - protein, 747 aa, Escherichia coli; identical to SEQ ID NO: 4394

SEQ ID NO: 18159 - protein, 193 aa, Escherichia coli; identical to SEQ ID NO: 2246

SEQ ID NO: 18160 - protein, 241 aa, Escherichia coli; identical to SEQ ID NO: 2851

SEQ ID NO: 18161 - protein, 838 aa, Escherichia coli; identical to SEQ ID NO: 6105

SEQ ID NO: 18162 - protein, 760 aa, Escherichia coli; identical to SEQ ID NO: 3923

SEQ ID NO: 18163 - protein, 228 aa, Escherichia coli; identical to SEQ ID NO: 3034

SEQ ID NO: 18164 - protein, 729 aa, Escherichia coli; identical to SEQ ID NO: 6108

SEQ ID NO: 18165 - protein, 231 aa, Escherichia coli; identical to SEQ ID NO: 3055

SEQ ID NO: 18166 - protein, 236 aa, Escherichia coli; identical to SEQ ID NO: 3286

SEQ ID NO: 18167 - protein, 881 aa, Escherichia coli; identical to SEQ ID NO: 3936

SEQ ID NO: 18168 - protein, 869 aa, Escherichia coli; identical to SEQ ID NO: 4609

SEQ ID NO: 18169 - protein, 231 aa, Escherichia coli; identical to SEQ ID NO: 4031

SEQ ID NO: 18170 - protein, 250 aa, Escherichia coli; identical to SEQ ID NO: 4023

SEQ ID NO: 18171 - protein, 233 aa, Escherichia coli; identical to SEQ ID NO: 2006

SEQ ID NO: 18172 - protein, 208 aa, Escherichia coli; identical to SEQ ID NO: 1949

SEQ ID NO: 18173 - protein, 213 aa, Escherichia coli; identical to SEQ ID NO: 2232

SEQ ID NO: 18174 - protein, 430 aa, Escherichia coli; identical to SEQ ID NO: 2617

SEQ ID NO: 18175 - protein, 191 aa, Escherichia coli; identical to SEQ ID NO: 2727

SEQ ID NO: 18176 - protein, 686 aa, Escherichia coli
MKLNIFTKSMIGMGLVCSALPALAMEAWNNQQGGNKYQVIFDGKIYENAWWVSSTNCPGKAKANDATNPWRLKRTATAAEISQFGNTLSCEKSGSSSSSNSNTPASNTPANSEPSTPADSGNDYSLQAWSGQEGSEIYHVIFNGNVYKNAWWVGSKDCPRGTSAENSNNPWRLERTATAAELSQYGNPTTCEIDNGGVIVADGFQASKAYSADSIVDYNDAHYKTSVDQDAWGFVPGGDNPWKKYEPAKAWSASTVYVKGDRVVVDGQAYEALFWTQSDNPALVANQNATGSNSRPWKPLGKAQSYSNEELNNAPQFNPETLYASDTLIRFNGVNYISQSKVQKVSPSDSNPWRVFVDWTGTKERVGTPKKAWPKHVYAPYVDFTLNTIPDLAALAKNHNVNHFTLAFVVSKDANTCLPTWGTAYGMHNYAQYSKIKALREAGGDVMLSIGGANNAPLAASCKNVDDLMQHYYDIVDNLNLKVLDFDIEGTWVADQASIERRNLAVKKVQDKWKSEGKDIAIWYTLPILPTGLTPEGMNVLSDAKAKGVELAGVNVMTMDYGNAICQSANTEGQNIHGKCATSAIANLHSQLKGLHPNKSDAEIDAMMGTTPMVGVNDVQGEVFYLSDARLVMQDAQKRNLGMVGIWSIARDLPGGTNLSPEFHGLTKEQAPKYAFSEIFAPFTKQ

SEQ ID NO: 18177 - protein, 274 aa, Escherichia coli
MNKTAIALLALLASSASLAATPWQKITQPVPGSAQSIGSFSNGCIVGADMLPIQSEHYQVMRTDQRRYFGHPDLVMFIQRLSSQVSNLGMGTVLIGDMGMPAGGRFNGGHASHQTGLDVDIFLQLPKTRWTSAQLLRPQALDLVSRDGKHVVSTLWKPEIFSLIKLAAQDKDVTRIFVNPAIKQQLCLDAGTDRDWLRKVRPWFQHRAHMHVRLRCPADSLECEDQPLPPSGDGCGAELQSWFEPPKPGTTKPEKKTPPPLPPSCQALLDEHVI

SEQ ID NO: 18178 - protein, 412 aa, Escherichia coli; identical to SEQ ID NO: 4058

SEQ ID NO: 18179 - protein, 359 aa, Escherichia coli; identical to SEQ ID NO: 2328

SEQ ID NO: 18180 - protein, 203 aa, Escherichia coli; identical to SEQ ID NO: 2015

SEQ ID NO: 18181 - protein, 236 aa, Escherichia coli; identical to SEQ ID NO: 2726

SEQ ID NO: 18182 - protein, 72 aa, Escherichia coli; identical to SEQ ID NO: 2162

SEQ ID NO: 18183 - protein, 207 aa, Escherichia coli; identical to SEQ ID NO: 2211

SEQ ID NO: 18184 - protein, 102 aa, Escherichia coli
MKKVLALVVAAAMGLSSAAFAAETATTPAPTATTTKAAPAKTTHHKKQHKAAPAQKAQAAKKHHKNAKAEQKAPEQKAQAAKKHAGKHSHQQPAKPAAQPAA

SEQ ID NO: 18185 - protein, 241 aa, Escherichia coli; identical to SEQ ID NO: 2922

SEQ ID NO: 18186 - protein, 700 aa, Escherichia coli; identical to SEQ ID NO: 3991

SEQ ID NO: 18187 - protein, 478 aa, Escherichia coli; identical to SEQ ID NO: 2404

SEQ ID NO: 18188 - protein, 243 aa, Escherichia coli; identical to SEQ ID NO: 4043

SEQ ID NO: 18189 - protein, 193 aa, Escherichia coli; identical to SEQ ID NO: 2246

SEQ ID NO: 18190 - protein, 565 aa, Escherichia coli; identical to SEQ ID NO: 2669

SEQ ID NO: 18191 - protein, 121 aa, Escherichia coli; identical to SEQ ID NO: 4037

SEQ ID NO: 18192 - protein, 878 aa, Escherichia coli; identical to SEQ ID NO: 3957

SEQ ID NO: 18193 - protein, 760 aa, Escherichia coli; identical to SEQ ID NO: 3992

SEQ ID NO: 18194 - protein, 511 aa, Escherichia coli; identical to SEQ ID NO: 2466

SEQ ID NO: 18195 - protein, 510 aa, Escherichia coli; identical to SEQ ID NO: 3982

SEQ ID NO: 18196 - protein, 774 aa, Escherichia coli; identical to SEQ ID NO: 3426

SEQ ID NO: 18197 - protein, 729 aa, Escherichia coli; identical to SEQ ID NO: 3979

SEQ ID NO: 18198 - protein, 162 aa, Escherichia coli; identical to SEQ ID NO: 1973

SEQ ID NO: 18199 - protein, 838 aa, Escherichia coli
MPQRHHQGHKRTPKQLALIIKRCLPMVLTGSGMLCTTANAEEYYFDPIMLETTKSGMQTTDLSRFSKKYAQLPGTYQVDIWLNKKKVSQKKITFTANAEQLLQPQFTVEQLRELGIKVDEIPALAEKDDDSVINSLEQIIPGTAAEFDFNHQRLNLSIPQIALYRDARGYVSPSRWDDGIPTLFTNYSFTGSDNRYRQGNRSQRQYLNMQNGANFGPWRLRNYSTWTRNDQTSSWNTISSYLQRDIKALKSQLLLGESATSGSIFSSYTFTGVQLASDDNMLPNSQRGFAPTVRGIANSSAIVTIRQNGYVIYQSNVPAGAFEINDLYPSSNSGDLEVTIEESDGTQRRFIQPYSSLPMMQRPGHLKYSATAGRYRADANSDSKEPEFAEATAIYGLNNTFTLYGGLLGSEDYYALGIGIGGTLGALGALSMDINRADTQFDNQHSFHGYQWRTQYIKDIPETNTNIAVSYYRYTNDGYFSFNEANTRNWDYNSRQKSEIQFNISQTIFDGVSLYASGSQQDYWGNNDKNRNISVGVSGQQWGVGYSLNYQYSRYTDQNNDRALSLNLSIPLERWLPRSRVSYQMTSQKDRPTQHEMRLDGSLLDDGRLSYSLEQSLDDDNNHNSSLNASYRSPYGTFSAGYSYGNDSSQYNYGVTGGVVIHPHGVTLSQYLGNAFALIDANGASGVRIQNYPGIATDPFGYAVVPYLTTYQENRLSVDTTQLPDNVDLEQTTQFVVPNRGAMVAARFNANIGYRVLVTVSDRNGKPLPFGALASNDETGQQSIVDEGGILYLSGISSKSQSWTVRWGNQADQQCQFAFSTPDSEPTTSVLQGTAQCH

SEQ ID NO: 18200 - protein, 200 aa, Escherichia coli
MLAFCRSSLKSKKYIIILLALAAIAGLGTHAAWSSNGLPRIDNKTLARLAQQHPVVVLFRHAERCDRSTNQCLSDKTGITVKGTQDARELGNAFSADIPDFDLYSSNTVRTIQSATWFSAGKKLTVDKRLLQCGNGIYSAIKDLQSKAPDKNIVIFTHNHCLTYIAKDKRDATFKPDYLDGLVMHVEKGKVYLDGEFVNH

SEQ ID NO: 18201 - protein, 828 aa, Escherichia coli
MKLSRRSFMKANAVAAAAAAAGLSVPGVARAVVGQQEAIKWDKAPCRFCGTGCGVLVGTQQGRVVACQGDPDAPVNRGLNCIKGYFLPKIMYGKDRLTQPLLRMKNGKYDKEGEFTPITWDQAFDVMEEKFKTALKEKGTESIGMFGSGQWTIWEGYAASKLFKAGFRSNNIDPNARHCMASAVVGFMRTFGMDEPMGCYDDIEQADAFVLWGANMAEMHPILWSRITNRRLSNQNVTVAVLSTYQHRSFELADNGIIFTPQSDLVILNYIANYIIQNNAINQDFFSKHVNLRKGATDIGYGLRPTHPLEKAAKNPGSDASEPMSFEDYKAFVAEYTLEKTAEMTGVPKDQLEQLAQLYADPNKKVISYWTMGFNQHTRGVWANNLVYNLHLLTGKISQPGCGPFSLTGQPSACGTAREVGTFAHRLPADMVVTNEKHRDICEKKWNIPSGTIPAKIGLHAVAQDRALKDGKLNVYWTMCTNNMQAGPNINEERMPGWRDPRNFIIVSDPYPTVSALAADLILPTAMWVEKEGAYGNAERRTQFWRQQVQAPGEAKSDLWQLVQFSRRFKTEEVWPEELLAKKPELRGKTLYEVLYATPEVSKFPVSELAEDQLNDESRELGFYLQKGLFEEYAWFGRGHGHDLAPFDDYHKARGLRWPVVNGKETQWRYSEGNDPYVKAGEGYKFYGKPDGKAVIFALPFEPAAEAPDEEYDLWLSTGRVLEHWHTGSMTRRVPELHRAFPEAVLFIHPLDAKARDLRRGDKVKVVSRRGEVISIVETRGRNRPPQGLVYMPFFDAAQLVNKLTLDATDPLSKETDFKKCAVKLEKV

SEQ ID NO: 18202 - protein, 161 aa, Escherichia coli; identical to SEQ ID NO: 2582

SEQ ID NO: 18203 - protein, 118 aa, Escherichia coli [sequence omitted]

SEQ ID NO: 18204 - protein, 338 aa, Escherichia coli
MKGLNKITCCLLAALLMPCAGHAENEQYGANFNNADIRQFVEIVGQHLGKTILIDPSVQGTISVRSNDTFSQQEYYQFFLSILDLYGYSVITLDNGFLKVVRSANVKTSPGMIADSSRPGVGDELVTRIVPLENVPARDLAPLLRQMMDAGSVGNVVHYEPSNVLILTGRASTINKLIEVIKRVDVIGTEKQQIIHLEVSSVDSSSNSTLGPTFNTRTIQNAVLVKTGETVVLGGLLDDFSKEQVSKVPLLGDIPLVGQLFRYTSTERAKRNLMVFIRPTIIRDDDVYRSLSKEKYTRYRQEQQQRIDGKSKALVGSEDLPVLDENTFNSHAPAPSSR

SEQ ID NO: 18205 - protein, 345 aa, Escherichia coli
MKKSTLALVVMGIVASASVQAAEIYNKDGNKLDVYGKVKAMHYMSDNDSKDGDQSYIRFGFKGETQINDQLTGYGRWEAEFAGNKAESDTAQQKTRLAFAGLKYKDLGSFDYGRNLGALYDVEAWTDMFPEFGGDSSAQTDNFMTKRASGLATYRNTDFFGVIDGLNLTLQYQGKNENRDVKKQNGDGFGTSLTYDFGGSDFAISGAYTNSDRTNEQNLQSRGTGKRAEAWATGLKYDANNIYLATFYSETRKMTPITGGFANKTQNFEAVAQYQFDFGLRPSLGYVLSKGKDIEGIGDEDLVNYIDVGATYYFNKNMSAFVDYKINQLDSDNKLNINNDDIVAG

SEQ ID NO: 18206 - protein, 237 aa, Escherichia coli
MRKITQAISAVCLLFALNSSAVALASSPSPLNPGTNVARLAEQAPIHWVSVAQIENSLAGRPPMAVGVDIDDTVLFSSPGFWRGKKTFSPESEDYLKNPVFWEKMNNGWDEFSIPKEVARQLIDMHVRRGDAIFFVTGRSPTKTETVSKTLADNFHIPATNMNPVIFAGDKPGQNTKSQWLQDKNIRIFYGDSDNDITAARDVGARGIRILRASNSTYKPLPQAGAFGEEVIVNSEY

SEQ ID NO: 18207 - protein, 686 aa, Escherichia coli; identical to SEQ ID NO: 3015

SEQ ID NO: 18208 - protein, 816 aa, Escherichia coli; identical to SEQ ID NO: 5482

SEQ ID NO: 18209 - protein, 249 aa, Escherichia coli; identical to SEQ ID NO: 2793

SEQ ID NO: 18210 - protein, 246 aa, Escherichia coli; identical to SEQ ID NO: 3021

SEQ ID NO: 18211 - protein, 866 aa, Escherichia coli
MTIKPTKNYHNHLTRIATFCALLYCNSAFCAELVEYDHTFLMGQNASNIDLSRYSEGNPAIPGMYDLSVYVNDQPIINQSITFIEIEGKKNAQACITLKNLLQFHINSPDINNEKAVLLARDETLGNCLNLTKIIPQASVRYDVNEQRLDIDVPQAWVMKNYQNYVDPSLWENGINAAMLSYNLNGYHSETPGRRNDSIYAAFNGGMNLGAWRLRASGNYNWMTDSGSNYDFKNRYIQRDIASLRSQLILGESYTTGETFDSVSIRGIRLYSDSRMLPPTLASFAPIIHGVANTNAKVTITQGGYKIYETTVPPGAFVIDDLSPSGYGSDLIVTVEESDGSKRTFSQPFSSVVQMLRPGVGRWDISGGQVLKDDIQDEPNLFQASYYYGLNNYLTGYTGIQITDNNYTAGLLGLGLNTSVGAFSFDVTHSNVRIPDDKTYQGQSYRVSWNKLFEETSTSLNIAAYRYSTQNYLGLNDALTLIDEVKHPEQDLEPKSMRNYSRMKNQVTVSINQPLKFEKKDYGSFYLSGSWSDYWASGQNRSNYSIGYSNSASWGSYSVSAQRSWNEDGDTDDSVYLSFTIPIEKLLGTEQRTSGFQSIDTQMSSDFKGNNQLNVSSSGYSDNARVSYSVNTGYTMNKASKDLSYVGGYASYESPWGTLAGSVSANSDNSRQVSLSTDGGFVLHSGGLTFSNDSFSDSDTLAVVQAPGAQGARINYGNSTIDRWGYGVTSALSPYHENRIALDINDLENDVELKSTSAVAVPRQGSVVFADFETVQGQSAIMNITRSDGKNIPFAADIYDEQGNVIGNVGQGGQAFVRGIEQQGNISIKWLEESKPVSCLAHYQQSSEAEKIAQSIILNGIRCQIQ

SEQ ID NO: 18212 - protein, 365 aa, Escherichia coli; identical to SEQ ID NO: 2102

SEQ ID NO: 18213 - protein, 266 aa, Escherichia coli
MAKSLFRALVALSFLAPLWLNAAPRVITLSPANTELAFAAGITPVGVSSYSDYPPQAQKIEQVSTWQGMNLERIVALKPDLVIAWRGGNAERQVDQLASLGIKVMWVDATSIEQIANALRQLAPWSPQPDKAEQAAQSLLDQYAQLKTQYADKPKKRVFLQFGINPPFTSGKESIQNQVLEVCGGENIFKDSRVPWPQVSREQVLARSPQAIVITGGPDQIPKIKQYWGEQLKIPVIPLTSDWFERASPRIILAAQQLCNALSQVD

SEQ ID NO: 18214 - protein, 230 aa, Escherichia coli; identical to SEQ ID NO: 2580

SEQ ID NO: 18215 - protein, 432 aa, Escherichia coli; identical to SEQ ID NO: 2026

SEQ ID NO: 18216 - protein, 362 aa, Escherichia coli; identical to SEQ ID NO: 2434

SEQ ID NO: 18217 - protein, 866 aa, Escherichia coli
MYRTHRQHSLLSSGGVPSFIGGLVVFVSAAFNAQAETWFDPAFFKDDPSMVADLSRFEKGQKITPGGYRVDIVLNQTIVDTRNVNFVEITPEKGIAACLTTESLDAMGVNTDAFPAFKQLDKQACVPLAEIIPDASVTFNVNKLRLEISVPQIAIKSNARGYVPPERWDEGINALLLGYSFSGANSIHSSADSDSGDSYFLNLNSGVNLGPWRLRNNSTWSRSSGQTAEWKNLSSYLQRAVIPLKGELTVGDDYTAGDFFDSVSFRGVQLASDDNMLPDSLKGFAPVVRGIAKSNAQITIKQNGYTIYQTYVSPGAFEISDLYSTSSSGDLLVEIKEADGSVNSYSVPFSSVPLLQRQGRIKYAVTLAKYRTNSNEQQESKFAQATLQWGGPWGTTWYGGGQYAEYYRAAMFGLGFNFGDFGAISFDATQAKSTLADQSEHKGQSYRFLYAKTLNHLGTNFQLMGYRYSTSGFYTLSDTMYKHMDGYEFNDGDDEDTPMWSRYYNLFYTKRGKLQVNISQQLGEYGSFYLSGSQQTYWHTDQQDRLLQFGYNTQIKDLSLGISWNYSKSRGQPDADQVFALNFSLPLNLLLPRSNDSYTRKKNYAWMTSNTSIDNEGHTTQNLGLTETLLDDGNLSYSVQQGYNSEGKTANGSASMDYKGAFADARVGYNYSDNGSQQQLNYALSGSLVAHSQGITLGQSLGETNVLIAAPGAENTRVANSTGLKTDWRGYTVVPYATSYRENRIALDAASLKRNVDLENAVVNVVPTKGALVLAEFNAHAGARVLMKTSKQGIPLRFGAIATLDGVQANSGIIDDDGSLYMAGLPAKGTISVRWGEAPDQICHINYELTEQQINSAITRMDAICR

SEQ ID NO: 18218 - protein, 204 aa, Escherichia coli; identical to SEQ ID NO: 2957

SEQ ID NO: 18219 - protein, 663 aa, Escherichia coli; identical to SEQ ID NO: 4631

SEQ ID NO: 18220 - protein, 678 aa, Escherichia coli; identical to SEQ ID NO: 3993

SEQ ID NO: 18221 - protein, 784 aa, Escherichia coli; identical to SEQ ID NO: 2244

SEQ ID NO: 18222 - protein, 446 aa, Escherichia coli [sequence omitted]

SEQ ID NO: 18223 - protein, 746 aa, Escherichia coli; identical to SEQ ID NO: 4083

SEQ ID NO: 18224 - protein, 332 aa, Escherichia coli; identical to SEQ ID NO: 2701

SEQ ID NO: 18225 - protein, 368 aa, Escherichia coli; identical to SEQ ID NO: 2374

SEQ ID NO: 18226 - protein, 721 aa, Escherichia coli; identical to SEQ ID NO: 9824

SEQ ID NO: 18227 - protein, 721 aa, Escherichia coli; identical to SEQ ID NO: 9824

SEQ ID NO: 18228 - protein, 721 aa, Escherichia coli; identical to SEQ ID NO: 9824

SEQ ID NO: 18229 - protein, 89 aa, Escherichia coli; identical to SEQ ID NO: 2833

SEQ ID NO: 18230 - protein, 127 aa, Escherichia coli; identical to SEQ ID NO: 5431

SEQ ID NO: 18231 - protein, 678 aa, Escherichia coli; identical to SEQ ID NO: 2902

SEQ ID NO: 18232 - protein, 351 aa, Escherichia coli; identical to SEQ ID NO: 2872

SEQ ID NO: 18233 - protein, 227 aa, Escherichia coli; identical to SEQ ID NO: 3570

SEQ ID NO: 18234 - protein, 512 aa, Escherichia coli; identical to SEQ ID NO: 2813

SEQ ID NO: 18235 - protein, 189 aa, Escherichia coli; identical to SEQ ID NO: 14931

SEQ ID NO: 18236 - protein, 826 aa, Escherichia coli; identical to SEQ ID NO: 3563

SEQ ID NO: 18237 - protein, 713 aa, Escherichia coli; identical to SEQ ID NO: 5996

SEQ ID NO: 18238 - protein, 241 aa, Escherichia coli; identical to SEQ ID NO: 2887

SEQ ID NO: 18239 - protein, 747 aa, Escherichia coli; identical to SEQ ID NO: 6089

SEQ ID NO: 18240 - protein, 660 aa, Escherichia coli; identical to SEQ ID NO: 6740

SEQ ID NO: 18241 - protein, 859 aa, Escherichia coli; identical to SEQ ID NO: 10388

SEQ ID NO: 18242 - protein, 696 aa, Escherichia coli; identical to SEQ ID NO: 4038

SEQ ID NO: 18243 - protein, 231 aa, Escherichia coli; identical to SEQ ID NO: 2868

SEQ ID NO: 18244 - protein, 230 aa, Escherichia coli; identical to SEQ ID NO: 2995

SEQ ID NO: 18245 - protein, 252 aa, Escherichia coli; identical to SEQ ID NO: 3543

SEQ ID NO: 18246 - protein, 412 aa, Escherichia coli; identical to SEQ ID NO: 2908

SEQ ID NO: 18247 - protein, 237 aa, Escherichia coli; identical to SEQ ID NO: 2816

SEQ ID NO: 18248 - protein, 362 aa, Escherichia coli; identical to SEQ ID NO: 2998

SEQ ID NO: 18249 - protein, 366 aa, Escherichia coli; identical to SEQ ID NO: 3520

SEQ ID NO: 18250 - protein, 367 aa, Escherichia coli; identical to SEQ ID NO: 6155

SEQ ID NO: 18251 - protein, 243 aa, Escherichia coli; identical to SEQ ID NO: 3561

SEQ ID NO: 18252 - protein, 998 aa, Escherichia coli; identical to SEQ ID NO: 2918

SEQ ID NO: 18253 - protein, 816 aa, Escherichia coli; identical to SEQ ID NO: 4456

SEQ ID NO: 18254 - protein, 746 aa, Escherichia coli; identical to SEQ ID NO: 2949

SEQ ID NO: 18255 - protein, 838 aa, Escherichia coli; identical to SEQ ID NO: 2916

SEQ ID NO: 18256 - protein, 567 aa, Escherichia coli; identical to SEQ ID NO: 3518

SEQ ID NO: 18257 - protein, 89 aa, Escherichia coli; identical to SEQ ID NO: 2810

SEQ ID NO: 18258 - protein, 387 aa, Escherichia coli
MKKMTVALSAVAAAVIFAAGAQAAEVYNKDGNKLDVYGRATALHYFSSDKGDDGDKTYARLGFKGETQINDQLTGFGQWEYQFSGNKAESEGAAGNKTRLAFAGLKFGEFGTIDYGRNYGIAYDVGSYTDVLPEFGGDGWTQTDNFMTARTSGVLTYRNTDFFGLVDGLNFAAQYQGKNDRGDLRKANGDGHGFSASYEYEGFGIVAAYINADRTNNQEKGLNGTLTIEQTDPLTGKVTEKQIVVDSGSVAKGKHAEMWGVGLKYDADNLYLATTYSETQNLTTFGDKGVADKAQNFEAVLQYQFDFGLRPSLAFLQSRAQDVIVGGKNYGDQDLVKYVDVGAKYYFNKNMSTYVDYKINLVDENKFTRDAGIATDDIVAVGMTYQF

SEQ ID NO: 18259 - protein, 407 aa, Escherichia coli
MNERELSIIRALGEEFSAVLADLQRTFEGKIAAQAQQSEEKLASLSAVLQKHVTLDEVRSVLQAMVDDAVGAIPVPRDGRDYDPDVLQKAVNDAVANIPLPADGKSITPDDVRPMLEQMVKEAVSHIPVPRDGRDYDPDVLQKAVNDAVANIPLPADGKSITPDDVRPMLEQMVKEAVSHIPVPRDGRDYDPDVLQKAVNDAVANIPLPADGKSITPDDVRPMLEQMVKEAVSHIPVPRDGRDYDPDVLQKAVNDAVSALPVPQDGRDATALEILPAIDDQKSFPRGTYATHQGGLWRAYEKTHGMRGWECLVDGVADIDVSMIGERSFSVVIRQSSGQCTEKTFSLPVMLYRGVFRAGEIYHPGDTVTWGGSLWHCNSMTGDKPGDIHSSGWTLAAKRGRDAGGGK

SEQ ID NO: 18260 - protein, 360 aa, Escherichia coli
MMKKYLALALIAPLLISCSTTKKGDTYNEAWVKDTNGFDILMGQFAHNIENIWGFKEVVIAGPKDYVKYTDQYQTRSHINFDDGTITIETIAGTEPAAHLRRAIIKTLLMGDDPSSVDLYSDVDDITISKEPFLYGQVVDNTGQPIRWEGRANNFADYLLKNRLKSRSNGLRIIYSVTINMVPNHLDKRAHKYLGMVRQASRKYGVDESLILAIMQTESSFNPYAVSRSDALGLMQVVQHTAGKDVFRSQGKSGTPSRSFLFDPASNIDTGTAYLAMLNNVYLGGIDNPTSRRYAVITAYNGGAGSVLRVFSNDKIQAANIINTMTPGDVYQTLTTRHPSAESRRYLYKVNTAQKSYRRR

SEQ ID NO: 18261 - protein, 242 aa, Escherichia coli; identical to SEQ ID NO: 2697

SEQ ID NO: 18262 - protein, 249 aa, Escherichia coli; identical to SEQ ID NO: 2793

SEQ ID NO: 18263 - protein, 878 aa, Escherichia coli; identical to SEQ ID NO: 2077

SEQ ID NO: 18264 - protein, 565 aa, Escherichia coli; identical to SEQ ID NO: 2669

SEQ ID NO: 18265 - protein, 793 aa, Escherichia coli; identical to SEQ ID NO: 2768

SEQ ID NO: 18266 - protein, 213 aa, Escherichia coli; identical to SEQ ID NO: 2232

SEQ ID NO: 18267 - protein, 517 aa, Escherichia coli; identical to SEQ ID NO: 3116

SEQ ID NO: 18268 - protein, 231 aa, Escherichia coli; identical to SEQ ID NO: 2794

SEQ ID NO: 18269 - protein, 191 aa, Escherichia coli; identical to SEQ ID NO: 2727

SEQ ID NO: 18270 - protein, 161 aa, Escherichia coli; identical to SEQ ID NO: 2582

SEQ ID NO: 18271 - protein, 678 aa, Escherichia coli; identical to SEQ ID NO: 2231

SEQ ID NO: 18272 - protein, 208 aa, Escherichia coli; identical to SEQ ID NO: 1949

SEQ ID NO: 18273 - protein, 246 aa, Escherichia coli
MFFNTKHTTALCFVTCMAFSSSSIADIVISGTRVIYKSDQKSVNARLENKGNNPLLVQSWLDTGDDNAEPGSITVPFTATPPVSRIDAKRGQTIKLMYTASTSLPKDRESVFWFNVLEVPPKPDAEKVANQSLLQLAFRTRIKLFYRPDGLKGNPSEAPLALKWFWSGSEGKASLRVTNPTPYYVSFSSGDLEASGKRYPIDVKMIAPFSDEVMKVNGLNGKANSAKVHFYAINDFGGAIEGNARL

SEQ ID NO: 18274 - protein, 207 aa, Escherichia coli; identical to SEQ ID NO: 2211

SEQ ID NO: 18275 - protein, 362 aa, Escherichia coli; identical to SEQ ID NO: 2434

SEQ ID NO: 18276 - protein, 162 aa, Escherichia coli; identical to SEQ ID NO: 1973

SEQ ID NO: 18277 - protein, 518 aa, Escherichia coli; identical to SEQ ID NO: 2349

SEQ ID NO: 18278 - protein, 368 aa, Escherichia coli; identical to SEQ ID NO: 2374

SEQ ID NO: 18279 - protein, 746 aa, Escherichia coli; identical to SEQ ID NO: 2069

SEQ ID NO: 18280 - protein, 774 aa, Escherichia coli; identical to SEQ ID NO: 2066

SEQ ID NO: 18281 - protein, 821 aa, Escherichia coli; identical to SEQ ID NO: 2792

SEQ ID NO: 18282 - protein, 478 aa, Escherichia coli; identical to SEQ ID NO: 2404

SEQ ID NO: 18283 - protein, 432 aa, Escherichia coli; identical to SEQ ID NO: 2026

SEQ ID NO: 18284 - protein, 250 aa, Escherichia coli; identical to SEQ ID NO: 2761

SEQ ID NO: 18285 - protein, 430 aa, Escherichia coli; identical to SEQ ID NO: 2617

SEQ ID NO: 18286 - protein, 266 aa, Escherichia coli; identical to SEQ ID NO: 1894

SEQ ID NO: 18287 - protein, 865 aa, Escherichia coli; identical to SEQ ID NO: 2167

SEQ ID NO: 18288 - protein, 747 aa, Escherichia coli; identical to SEQ ID NO: 2072

SEQ ID NO: 18289 - protein, 721 aa, Escherichia coli; identical to SEQ ID NO: 9824

SEQ ID NO: 18290 - protein, 351 aa, Escherichia coli; identical to SEQ ID NO: 2519

SEQ ID NO: 18291 - protein, 760 aa, Escherichia coli; identical to SEQ ID NO: 2080

SEQ ID NO: 18292 - protein, 614 aa, Escherichia coli; identical to SEQ ID NO: 1888

SEQ ID NO: 18293 - protein, 866 aa, Escherichia coli; identical to SEQ ID NO: 2004

SEQ ID NO: 18294 - protein, 826 aa, Escherichia coli; identical to SEQ ID NO: 2758

SEQ ID NO: 18295 - protein, 241 aa, Escherichia coli; identical to SEQ ID NO: 2076

SEQ ID NO: 18296 - protein, 367 aa, Escherichia coli; identical to SEQ ID NO: 2433

SEQ ID NO: 18297 - protein, 729 aa, Escherichia coli; identical to SEQ ID NO: 2074

SEQ ID NO: 18298 - protein, 828 aa, Escherichia coli; identical to SEQ ID NO: 2386

SEQ ID NO: 18299 - protein, 897 aa, Escherichia coli; identical to SEQ ID NO: 1908

SEQ ID NO: 18300 - protein, 867 aa, Escherichia coli; identical to SEQ ID NO: 2581

SEQ ID NO: 18301 - protein, 446 aa, Escherichia coli [sequence omitted]

SEQ ID NO: 18302 - protein, 193 aa, Escherichia coli; identical to SEQ ID NO: 2246

SEQ ID NO: 18303 - protein, 412 aa, Escherichia coli; identical to SEQ ID NO: 2161

SEQ ID NO: 18304 - protein, 118 aa, Escherichia coli; identical to SEQ ID NO: 2737

SEQ ID NO: 18305 - protein, 237 aa, Escherichia coli; identical to SEQ ID NO: 1814

SEQ ID NO: 18306 - protein, 274 aa, Escherichia coli; identical to SEQ ID NO: 2309

SEQ ID NO: 18307 - protein, 230 aa, Escherichia coli; identical to SEQ ID NO: 2580

SEQ ID NO: 18308 - protein, 334 aa, Escherichia coli; identical to SEQ ID NO: 2748

SEQ ID NO: 18309 - protein, 365 aa, Escherichia coli; identical to SEQ ID NO: 2102

SEQ ID NO: 18310 - protein, 784 aa, Escherichia coli; identical to SEQ ID NO: 2244

SEQ ID NO: 18311 - protein, 203 aa, Escherichia coli; identical to SEQ ID NO: 2015

SEQ ID NO: 18312 - protein, 200 aa, Escherichia coli; identical to SEQ ID NO: 1793

SEQ ID NO: 18313 - protein, 233 aa, Escherichia coli; identical to SEQ ID NO: 2006

SEQ ID NO: 18314 - protein, 359 aa, Escherichia coli; identical to SEQ ID NO: 2328

SEQ ID NO: 18315 - protein, 880 aa, Escherichia coli; identical to SEQ ID NO: 3110

SEQ ID NO: 18316 - protein, 362 aa, Escherichia coli; identical to SEQ ID NO: 2434

SEQ ID NO: 18317 - protein, 878 aa, Escherichia coli; identical to SEQ ID NO: 18151

SEQ ID NO: 18318 - protein, 243 aa, Escherichia coli; identical to SEQ ID NO: 3483

SEQ ID NO: 18319 - protein, 826 aa, Escherichia coli; identical to SEQ ID NO: 18132

SEQ ID NO: 18320 - protein, 614 aa, Escherichia coli; identical to SEQ ID NO: 1888

SEQ ID NO: 18321 - protein, 203 aa, Escherichia coli; identical to SEQ ID NO: 2009

SEQ ID NO: 18322 - protein, 266 aa, Escherichia coli; identical to SEQ ID NO: 1894

SEQ ID NO: 18323 - protein, 193 aa, Escherichia coli; identical to SEQ ID NO: 2246

SEQ ID NO: 18324 - protein, 162 aa, Escherichia coli; identical to SEQ ID NO: 1965

SEQ ID NO: 18325 - protein, 250 aa, Escherichia coli; identical to SEQ ID NO: 3048

SEQ ID NO: 18326 - protein, 334 aa, Escherichia coli; identical to SEQ ID NO: 2756

SEQ ID NO: 18327 - protein, 565 aa, Escherichia coli; identical to SEQ ID NO: 2678

SEQ ID NO: 18328 - protein, 828 aa, Escherichia coli; identical to SEQ ID NO: 2380

SEQ ID NO: 18329 - protein, 407 aa, Escherichia coli; identical to SEQ ID NO: 11408

SEQ ID NO: 18330 - protein, 230 aa, Escherichia coli; identical to SEQ ID NO: 3019

SEQ ID NO: 18331 - protein, 203 aa, Escherichia coli; identical to SEQ ID NO: 2201

SEQ ID NO: 18332 - protein, 191 aa, Escherichia coli; identical to SEQ ID NO: 4195

SEQ ID NO: 18333 - protein, 229 aa, Escherichia coli; identical to SEQ ID NO: 2815

SEQ ID NO: 18334 - protein, 478 aa, Escherichia coli; identical to SEQ ID NO: 2404

SEQ ID NO: 18335 - protein, 233 aa, Escherichia coli; identical to SEQ ID NO: 3276

SEQ ID NO: 18336 - protein, 208 aa, Escherichia coli; identical to SEQ ID NO: 1949

SEQ ID NO: 18337 - protein, 118 aa, Escherichia coli [sequence omitted]

SEQ ID NO: 18338 - protein, 816 aa, Escherichia coli; identical to SEQ ID NO: 2817

SEQ ID NO: 18339 - protein, 834 aa, Escherichia coli; identical to SEQ ID NO: 2818

SEQ ID NO: 18340 - protein, 746 aa, Escherichia coli; identical to SEQ ID NO: 2069

SEQ ID NO: 18341 - protein, 866 aa, Escherichia coli; identical to SEQ ID NO: 4866

SEQ ID NO: 18342 - protein, 366 aa, Escherichia coli; identical to SEQ ID NO: 18117

SEQ ID NO: 18343 - protein, 161 aa, Escherichia coli; identical to SEQ ID NO: 2582

SEQ ID NO: 18344 - protein, 367 aa, Escherichia coli; identical to SEQ ID NO: 4285

SEQ ID NO: 18345 - protein, 213 aa, Escherichia coli; identical to SEQ ID NO: 2232

SEQ ID NO: 18346 - protein, 351 aa, Escherichia coli; identical to SEQ ID NO: 2872

SEQ ID NO: 18347 - protein, 236 aa, Escherichia coli; identical to SEQ ID NO: 3286

SEQ ID NO: 18348 - protein, 231 aa, Escherichia coli; identical to SEQ ID NO: 3055

SEQ ID NO: 18349 - protein, 838 aa, Escherichia coli; identical to SEQ ID NO: 6105

SEQ ID NO: 18350 - protein, 193 aa, Escherichia coli; identical to SEQ ID NO: 2246

SEQ ID NO: 18351 - protein, 246 aa, Escherichia coli; identical to SEQ ID NO: 3021

SEQ ID NO: 18352 - protein, 232 aa, Escherichia coli; identical to SEQ ID NO: 2087

SEQ ID NO: 18353 - protein, 432 aa, Escherichia coli; identical to SEQ ID NO: 2026

SEQ ID NO: 18354 - protein, 518 aa, Escherichia coli; identical to SEQ ID NO: 2349

SEQ ID NO: 18355 - protein, 729 aa, Escherichia coli; identical to SEQ ID NO: 6108

SEQ ID NO: 18356 - protein, 843 aa, Escherichia coli; identical to SEQ ID NO: 3042

SEQ ID NO: 18357 - protein, 331 aa, Escherichia coli; identical to SEQ ID NO: 2700

SEQ ID NO: 18358 - protein, 430 aa, Escherichia coli; identical to SEQ ID NO: 2617

SEQ ID NO: 18359 - protein, 678 aa, Escherichia coli; identical to SEQ ID NO: 3014

SEQ ID NO: 18360 - protein, 784 aa, Escherichia coli; identical to SEQ ID NO: 18106

SEQ ID NO: 18361 - protein, 241 aa, Escherichia coli; identical to SEQ ID NO: 2851

SEQ ID NO: 18362 - protein, 274 aa, Escherichia coli; identical to SEQ ID NO: 6497

SEQ ID NO: 18363 - protein, 368 aa, Escherichia coli; identical to SEQ ID NO: 18111

SEQ ID NO: 18364 - protein, 883 aa, Escherichia coli; identical to SEQ ID NO: 2900

SEQ ID NO: 18365 - protein, 243 aa, Escherichia coli; identical to SEQ ID NO: 2910

SEQ ID NO: 18366 - protein, 224 aa, Escherichia coli; identical to SEQ ID NO: 3115

SEQ ID NO: 18367 - protein, 228 aa, Escherichia coli; identical to SEQ ID NO: 3034

SEQ ID NO: 18368 - protein, 663 aa, Escherichia coli; identical to SEQ ID NO: 1910

SEQ ID NO: 18369 - protein, 866 aa, Escherichia coli; identical to SEQ ID NO: 18153

SEQ ID NO: 18370 - protein, 746 aa, Escherichia coli; identical to SEQ ID NO: 3031

SEQ ID NO: 18371 - protein, 365 aa, Escherichia coli; identical to SEQ ID NO: 2102

SEQ ID NO: 18372 - protein, 760 aa, Escherichia coli; identical to SEQ ID NO: 3923

SEQ ID NO: 18373 - protein, 686 aa, Escherichia coli; identical to SEQ ID NO: 3129

SEQ ID NO: 18374 - protein, 237 aa, Escherichia coli; identical to SEQ ID NO: 3605

SEQ ID NO: 18375 - protein, 249 aa, Escherichia coli; identical to SEQ ID NO: 3492

SEQ ID NO: 18376 - protein, 266 aa, Escherichia coli; identical to SEQ ID NO: 1894

SEQ ID NO: 18377 - protein, 161 aa, Escherichia coli; identical to SEQ ID NO: 2582

SEQ ID NO: 18378 - protein, 826 aa, Escherichia coli
MLRMTPLASAIVALLLGIEAYAAEETFDTHFMIGGMKDQQVANIRLDDNQPLPGQYDIDIYVNKQWRGKYEIIVKDNPQETCLSREIIKRLGINTDNFASGKQCLTFEQLVQGGSYTWDIGVFRLDFSVPQAWVEELESGYVPPENWERGINAFYTSYYVSQYYSDYKASGNSKSTYVRFNSGLNLLGWQLHSDASFSKTNSNPGVWKSNTLYLERGFAQLLGTLRVGDMYTSSDIFDSVRFSGVRLFRDMQMLPNSKQNFTPRVQGIAQSNALVTIEQNGFVVYQKEVPPGPFAITDLQLAGGGADLDVSVKEADGSVTTYLVPYAAVPNMLQPGVSKYDFAAGRSHIEGASKQSDFVQAGYQYGFNNLLTLYGGSMVANNYYAFTLGTGWNTRIGAISVDATKSHSKQDNGDVFDGQSYQIAYNKFVSQTSTRFGLAAWRYSSRDYRTFNDHVWANNKDNYRRDENDIYDIADYYQNDFGRKNSFSANMSQSLPEGWGSVSLSTLWRDYWGRSGSSKDYQLSYSNNLRRISYTLAASHAYDENHHEEKRFNIFISIPFDWGDDVTTPRRQIYMSNSTTFDDQGVASNNTGLSGTVGSRDQFNYGVNLSYQYQGNETTAGANLTWNAPVATVNGSYSQSSAYRQAGASVSGGIVAWSGGVNLANRLSETFAVMNAPGIKDAYVNGQKYRTTNRNGVVVYDGMTPYRENYLMLDVSQSDSEAELRGNRKIAAPYRGAVVLVNFDTDQRKPWFIKALRADGQPLTFGYEVNDIHGHNIGVVGQGSQLFIRTNEVPPSVNVAIDKQQGLSCTITFGKEIDESRNYICQ

SEQ ID NO: 18379 - protein, 869 aa, Escherichia coli
MKIPTTTDIPQRYTWCLAGICYSSLAILPSFLSYAESYFNPAFLLENGTSVADLSRFERGNHQPAGVYRVDLWRNDEFIGSQDIVFESTTVNTGDKSGGLMPCFNQALLERIGLNSSAFPELAQQQNNKCINLLKAVPDATINFDFAAMRLNITIPQIALLSSAHGYIPPEEWDEGIPALLLNYNFTGNRGNGNDSYFFSELSGINIGPWRLRNNGSWNYFRGNGYHSEQWNNIGTWVQRAIIPLKSELVMGDGNTGSDIFDGVGFRGVRLYSSDNMYPDSQQGFAPTVRGIARTAAQLTIRQNGFIIYQSYVSPGAFEITDLHPTSSNGDLDVTIDERDGNQQNYTIPYSTVPILQREGRFKFDLTAGDFRSGNSQQSSPFFFQGTALGGLPQEFTAYGGTQLSANYTAFLLGLGRNLGNWGAVSLDVTHARSQLADDSRHEGDSIRFLYAKSMNTFGTNFQLMGYRYSTQGFYTLDDVAYRRMEGYEYDYDYDGEHRDEPIIVNYHNLRFSRKDRLQLNISQSLNDFGSLYISGTHQKYWNTSDSDTWYQVGYTSSWVGISYSLSFSWNESVGIPDNERIVGLNVSVPFNVLTKRRYTRENALDRAYASFNANRNSNGQNNWLAGVGGTLLEGHNLSYHVSQGDTSNNGYTGSATANWQAAYGTLGVGYNYDRDQHDVNWQLSGGVVGHENGITLSQPLGDTNVLIKAPGAGGVRIENQTGILTDWRGYAVMPYATVYRYNRIALDTNTMGNSIDVEKNISSVVPTQGALVRANFDTRIGVRALITVTQGGKPVPFGSPVRENSTGITSMVGDDGQVYLSGAPLSGELLVQWGDGANSRCIAHYVLPKQSLQQAVTVISAVCTHPGS

SEQ ID NO: 18380 - protein, 866 aa, Escherichia coli
MYRTQRQHSLLSSGGVPSFIGGLVVFVSAAFNAQAETWFDPAFFKDDPSMVADLSRFEKGQKITPGVYRVDIVLNQTIVDTRNVNFVEITPEKGIAACLTTESLDAMGVNTDAFPAFKQLDKQACAPLAEIIPDASVTFNVNKLRLEISVPQIAIKSNARGYVPPERWDEGINALLLGYSFSGANSIHSSAGSDSGDSYFLNLNSGVNLGPWRLRNNSTWSRSSGQTAEWKNLSSYLQRAVIPLKGELTVGDDYTAGDFFDSVSFRGVQLASDDNMLPDSLKGFAPVVRGIAKSNAQVTIKQNGYTIYQTYVSPGAFEISDLYSTSSSGDLLVEIKEADGSVNSYSVPFSSVPLLQRQGRIKYAVTLAKYRTNSNDQQESKFAQATLQWGGPRGTTWYGGGQYAEYYRAAMFGLGFNLGDFGAISFDATQAKSTLADQSEHKGQSYRFLYAKTLNQLGTNFQLMGYRYSTSGFYTLSDTMYKHMDGYEFNDGDDEDTPMWSRYYNLFYTKRGKLQVNISQQLGEYGSFYLSGSQQTYWHTDQQDRLLQFGYNTQIKDLSLGVSWNYSKSRGQPDADQVFALNFSLPLNLLLPKSNDSYTRKKNYAWMTSNTSIDNEGHTTQNLGLTETLLDDGNLSYSVQQGYNSEGKTANGSASMDYKGAFADARVGYNYSDNGSQQQLNYALSGSLVAHSQGITLGQSLGETNVLIAAPGAENTRVANSTGLKTDWRGYTVVPYATSYRENRIALDAASLKRNVDLENAVVNVVPTKGALVLAEFNAHAGARVLMKTSKQGMPLRFGAMATLDGAQTISGIIDDDGSLYMSGLPAKGTITVRWGDAPDQICHISYELTEQQINAAITRMDSVCE

SEQ ID NO: 18381 - protein, 785 aa, Escherichia coli
MKKEIFIAAIIFHLLSKGALAEEFNYSFIRGGSKDIPDVLNSNKENVPGKYVVDVVFNGSKIASSTEMSIAKEDAEGICLSDEWLTENGIIINKDFYKNVYNSARQCYLLGNEANSKVAFDQSLQEVSIDLPQAGFQDAAKDGGVWDYGSNGFKIAYDVNTAKNSNQERTTYSSIDGQVNLGEWVLLGRGYAYQGENFDTNNLLLTRAIKSLKSDLQLGKTQLYNSLNNGFTFYGAQLKSNQDMYPWNSRAYSPVINGIARTHARVTIEQSGYTLKSIVVPPGPFVINDLNGVYSGDLIMKIYEEDGSVREQRFPVAVLPNLLRPGTYNYALAMGSKVNQDNGERDKESLFAQMSYDYGFEPFTLNSSLLLDKNYNNIGLGLIRSFGWFGAMSFSGNLSQAKYHNGKNLKGYSTSLKYAKALGDNANLQLIGYRFNSEDYIDYADFTYNSYSFIRNRPKQRYESIVTYQLPEKGMFLNFSAWKEDYWDNYNEVGANLSLTKSFDQITMTLNGGYSRLQNMDADYNVGLSLSVPLSLFDKTHYSFSNVNYDRRTGTSMNTGISGMINQRLSYNASVNQTRDTIGGTLSASYLFDWMQTSATYSQTGKNSSTSLQLGGSVIGVPEGGIIFTPVKNDQLAIVQMKDVPGVMFNGSLPGDKYGRAVIPLTAYNNNTISVNAEKLPKNIELTDNAINVTPTGNAIIYKNVKFKKINTYVVKLYGKNGYVVPMGSIAKNTQGKEVGYVNNGGILLMNLETHDEGVISLDQCQFNTQSLKKNYDQTQEIHCE

SEQ ID NO: 18382 - protein, 856 aa, Escherichia coli
MAGFFVRLFVACAFAAQAPLSSAELYFNPRFLADDPQAVADLSRFENGQELPPGTYRVDIYLNNGYMATRDVTFNTGDSEQGIVPCLTRAQLASMGLNTASVSGMNLLADDACVPLTSMIHDATAQLDVGQQRLNLTIPQAFMSNRARGYIPPELWDPGINAGLLNYNFSGNSVQNRIGGNSHYAYLNLQSGLNIGAWRLRDNTTWSYNSSDSSSGSKNKWQHINTWLERDIIPLRSRLTLGDGYTQGDIFDGINFRGAQLASDDNMLPDSQRGFAPVIHGIARGTAQVTIKQNGYDIYNSTVPPGPFTINDIYAAGNSGDLQVTIKEADGSTQIFTVPYSSVPLLQREGHTRYSITAGEYRSGNAQQEKPRFFQSTLLHGLPAGWTIYGGTQLADRYRAFNFGIGKNMGALGALSVDMTQANSTLPDDSQHDGQSVRFLYNKSLNESGTNIQLVGYRYSTSGYFNFADTTYSRMNGYNIETQDGVIQVKPKFTDYYNLAYNKRGKLQLTVTQQLGRSSTLYLSGSHQTYWGTNNVDEQFQAGLNTAFEDINWTLSYSLTKNAWQKGRDQMLALNVNIPFSHWLRSDSKSQWRHASASYSMSHDLNGRMTNLAGVYGTLLEDNNLSYSVQTGYAGGGDGNSGSTGYATLNYRGGYGNANIGYSHSDDIKQLYYGVSGGVLAHANGVTLGQPLNDTVVLVKAPGAKDAKVENQTGVRTDWRGYAVLPYATEYRENRVALDTNTLADNVDLDNSVANVVPTRGAIVRAEFKARVGIKLLMTLTHNNKPLPFGAMVTSESSQSSGIVADNGQVYLSGMPLAGKVQVKWGEEENAHCVANYQLPPESQQQLLTQLSAECR

SEQ ID NO: 18383 - protein, 819 aa, Escherichia coli; identical to SEQ ID NO: 3875

SEQ ID NO: 18384 - protein, 871 aa, Escherichia coli
MHQVLLLPRFARLTIALGLATAVFPVDAEFYFNPRFLSNDLAESVDLSAFTKGREAPPGTYRVDIYLNDEFMTSRDITFIADDNNADLIPCLSTDLLVSLGIKKSALLDNKEHSAEKHVSDNSACTPLRDRLADASSEFNVGQQHLSLSVPQIYVGRMARGYVSPDLWEEGINAGLLNYSFNGNSINNRGNHNAGKSNYAYLNLQSGINIGSWRLRDNSTWSYNSGSSNSSDSNKWQHINTSAERDIIPLRSRLTVGDSYTDGDIFDSVNFRGLKINSTEAMLPDSQHGFAPVIHGIARSTAQVSVKQNGYDVYQTTVPPGPFTIDDINSAANGGDLQVTIKEADGSIQTLYVPYSSVPVLQRAGYTRYALAMGEYRSGNNLQSSPKFIQGSLMHGLEGNWTPYGGMQIAEDYQAFNLGIGKDLGLFGAFSFDITQANTTLADGTRHSGQSIKSVYSKSFYQTGTNIQVAGYRYSTQGFYNLSDSAYSRMSGYTVKPPTGDSNEQTQFIDYFNLFYSKRGQEQISISQQLGNYGTTFFSASRQSYWNTSRSDQQISFGLNVPFSDITTSLNYSYSNNIWQNDRDHLLAFTLNVPFSHWMRTDSQSAFRNSNASYSMSNDLKGGMTNLSGVYGTLLPDNNLNYSVQVGNTHGGNTSSGTSGYSSLNYRGAYGNTNIGYSRSGDSSQIYYGMSGGIIAHADGITFGQPLGDTMVLVKAPGADNVKIENQTGIHTDWRGYAILPFATEYRENRVALNANSLADNVELDETVVTVIPTHGAIARATFNAQIGGKVLMTLKYGNKSVPFGAIVTHGENKNGSIVAENGQVYLTGLPQSGKLQVSWGNDKNSNCIVDYKLPAVSPGTLLNQQTAICR

SEQ ID NO: 18385 - protein, 837 aa, Escherichia coli
MEQMYKKLKLTTISELIKNIYCSLSVLIIGCASAYAVEFNKDLIEAEDRENVNLSQFETDGQLPVGKYSLNALINNKRTPIHLDLQWVLIDNQTAVCLTPEQLTLLGFTDEIIEEAQQNLIDGCYPIEKEKQITTYLDKGKMQLSISAPQAWLKYKDANWTPPELWDHGIAGAFLDYNLYASHYAPHQGDNSQNISSYGQAGVNLGAWRLRTDYQYDQSFNNGKSQANNLDFPRIYLFRPIPAINAKLTIGQYDTESSIFDSFHFSGVSLKSDENMLPPDLRGYAPQITGVAQTNAKVTVSQNNRIIYQENVPPGPFAITNLFNTLQGQLDVKVEEEDGQVTQWQVASNSIPYLTRKGQIRYTTAMGKPTSVGGDSLQQPFFWTGEFSWGWLNNVSLYGGSVLTNRDYQSLAAGVGFNLNSLGSLSFDVTRSDAQLHNQDKETGYSYRANYSKRFESTGSQLTFAGYRFSDKNFVTMNEYINDTNHYTNYQNEKESYIVTFNQYLESLRLNTYVSLARNTYWDASSNVNYSLSLSRDFDIGPLKNVSTSLTFSRINWEEDNQDQLYLNISIPWGTSRTLSYGMQRNQDNKISHTASWYDSSGRNNSWSVSASGDNDEFKDMKASLRASYQHNTENGRLYLSGTSQRDSYYSLNASWNGSFTATRHGAAFHDYSGSADSRFMIDADGAEDIPLNNKRAVTNRYGIGVIPSVSSYITTSLSVDTRNLPENVDIENSVITTTLTEGAIGYAKLDTRKGYQIMGVIRLADGSHPPLGISVKDKTSHKELGLVADGGFVYLNGIQDDSKLTLRWGDKSCFIQPPNSSNLTTGTVILPCISQN

SEQ ID NO: 18386 - protein, 882 aa, Escherichia coli
MPNHSNFRLRGIACYIALAISGGSVNAWADDSIQFDPRFLELKGDTKIDLGKFSKKGYVDAGKYNLRVFINKQPLSDEYDINWYVSENDPTKTYACLTPELVAALGLKEGIAKSLQWTHNDECLKPGQLDGMEVENDLSQSALLLTVPQAYLEYTSSDWDPPSRWDDGIPGLIADYSLNAQTRHQEQGGEDSHDISGNGTVGANLGAWRFRADWQSDYQHTRSNDDDDDSSNSTTSKNWDWSRYYAWRALPSLKAKLSLGEDYLNSDIFDGFNYIGSSVSTDDQMLPPNLRGYAPDVSGVAHSSAKVTISQMGRVLYETQVPAGPFRIQDIGDSVSGTLHVRVEEQNGQVQEYDVTTASMPFLTRQGQVRYKVMMGRPEDWNHKTEGGFFSGGEASWGVADGWSLYGGALADEHYQSAAMGVGRDLAQFGALAFDVTHSHVNLDHDSAYGKGKLDGNSFRVSYAKDFDELNSRVTFAGYRFSEKNFMTMSEYLDANQSDMARTGNDKEMYTITYNQNFAAAGVSIYLNYSHRTYWDRPEQTNYNLMFSHYFNMGSIRNVSISVTGYRYEYDDNADKGMYLSMSIPWSDSSTVTYNGSYGSGSDSSQVGYFKRVDDATHYQVNVGTSEQHGSVDGYLSHDGSLAKVDLSANYHEGEYRSAGIALQGGATLTAHGGALHRTQSMGGTRLLIDADGIANVPVESNGAPVYTNMFGKAVVADINNYYRNQAYIDLNNLPEDAEATQSVVQATLTEGAIGYRKFKVISGQKAMAVLRLRDGSYPPFGAEVKNDEQQQVGIVDDEGNVYLAGVNAGEHMTVFWEGSAQCEIVLPKPLPADLFSGLLLPCEQKGTAAPDSSAPEIKPVIQDQTRQVTPTEAPTSISATQ

SEQ ID NO: 18387 - protein, 368 aa, Escherichia coli
MNKTIMALAIMMASFAANASVLPETPVPFKSGTGAIDNDTVYIGLGSAGTAWYKLDTQAKDKKWTALAAFPGGPRDQATSAFIDGNLYVFGGIGKNSEGLTQVFNDVHKYNPKTNSWVKLMSHAPMGMAGHVTFVHNGKAYVTGGVNQNIFNGYFEDLNEAGKDSTAIDKINAHYFDKKAEDYFFNKFLLSFDPSTQQWSYAGESPWYGTAGAAVVNKGDKTWLINGEAKPGLRTDAVFELDFTGNNLKWNKLDPVSSPDGVAGGFAGISNDSLIFAGGAGFKGSRENYQNGKNYAHEGLKKSYSTDIHLWHNGKWDKSGELSQGRAYGVSLPWNNSLLIIGGETAGGKAVTDSVLISVKDNKVTVQN

SEQ ID NO: 18388 - protein, 866 aa, Escherichia coli
MSRKIIKTHNNKLTYIASFCALLLSPCAISAEHVEYDNTFLMGQDAFNIDLSRYTEGNPTLPGVYDVSVYINDQPVINQSISFITLEGKKNAQACITLKNLLQFHINKPDINAENSILLQREGELGDCLDLANIIPQASVHYDVNDQRLDINVPQAWVMKNYQNYVDSSLWENGINAAMLAYNVNAYHSEIPDRKNDSVYAAFNGGINLGAWRLRATGNYNWMTNVGSDYDFQNRYLQRDLASLRSQLIVGESYTTGETFDAVSIRGIRLYSDSRMLPPALASFAPIIHGVANTNAKVTITQGGYKIYETTVPPGAFVIDDLSPSGYGSDLIITIEESDGIKRTFSQPFSSVIQMQRPGVGRWDISAGQVLKDDIQNEPNLFQASYYYGLNNYLTGYTGIQITDNNYTAGLLGLGLNTAYGAFSVDVTHSDVQIPDDKTYRGQSYRISWNKLFEDTRTSLNIAAYRYSTQNYLGLNDALTLIDEVKHPEQDLEPKNMRNYSRMKNQVTVSINQPLKFEKKDYGSFYLAGSWSDYWADGQNNTNYSIGYSNSASWGSYSISAQRSWSQDGGNEDSIYLSFSIPIEKLLGSEHRDSGFQSIDTQLNSDFNGSNQLSISSSGYSTENHISYSVNTGYSMMKSSDDLGYIGGYASYESPWGTLSSSVSASSDNSRQISFNTDGGFVLHSGGLTFSNDSFSDSDTLAVVQAPGAKGARINYGNSTIDRWGYGVTNALSPYHENRIALDINGLENDVELKSTSAITVPRQGSVVFAGFETVQGQSAIMNIKRTDGKNIPFAADIYDENGNIIGNVGQGGQAFVRGIEQQGNIRINWLDDGKPVTCLAHYQQSAAPEKIAQTIILNGISCQIQ

SEQ ID NO: 18389 - protein, 387 aa, Escherichia coli; identical to SEQ ID NO: 3908

SEQ ID NO: 18390 - protein, 236 aa, Escherichia coli
MQTTRIPYSISFMATVLLLLLFACHSTIANAAVALGATRVIYPANQKQVLLPVTNNDPASVYLIQSWIENAGDQKDTQFVITPPLFSMQGKKENTLRIINATNHQLPGDRESLFWVNVKAIPAMEKDQKNENTLQLAIISRIKMFYRPTNLAMAPEEAPAMLRFRRSGSKLTLINPTPYFITVTNMKAGNSNLPNTMVPPKGEVSVDIPHAATGDISFQTINDYGALTPRIKATMQ

SEQ ID NO: 18391 - protein, 246 aa, Escherichia coli
MFLNAKHTAAVCFATCMSLSASAIADIVISGTRVIYKSNEKSVNVRLENKGNNPLLVQSWLDTGDDSAEPGSITVPFTATPPVSRIDAKRGQTIKLMYTASSPLPKDRESVFWFNVLEVPPKPDADKVANQSLLQLAFRTRIKLFYRPEGLNGLPSDAPAALKWSWATSAGKTALRVANPTPYHVSFSSGDLVANGKTYPLDVKMVAPLSEETFDIKGMSGKASSAKVHFFAINDFGGAIEGNASL

SEQ ID NO: 18392 - protein, 213 aa, Escherichia coli; identical to SEQ ID NO: 2232

SEQ ID NO: 18393 - protein, 365 aa, Escherichia coli
MIKFLSALILLLVTTAVQAERIRDLTSVQGVRQNSLIGYGLVVGLDGTGDQTTQTPFTTQTLNNMLSQLGITVPTGTNMQLKNVAAVMVTASLPPFGRQGQTIDVVVSSMGNAKSLRGGTLLMTPLKGVDSQVYALAQGNILVGGAGASAGGSSVQVNQLNGGRITNGAVIERELPSQFGVGNTLNLQLNDEDFSMAQQIADTINRVRGYGSATALDARTIQVRVPSGNSSQVRFLADIQNMQVNVTPQDAKVVINSRTGSVVMNREVTLDSCAVAQGNLSVTVNRQANVSQPDTPFGGGQTVVTPQTQIDLRQSGGSLQSVRSSASLNNVVRALNALGATPMDLMSILQSMQSAGCLRAKLEII

SEQ ID NO: 18394 - protein, 641 aa, Escherichia coli
MLAVDDDGETMVVTASSVEQNLKDAPASISVITQEDLQRKPVQNLKDVLKEVPGVQLTNEGDNRKGVSIRGLDSSYTLILVDGKRVNSRNAVFRHNDFDLNWIPVDSIERIEVVRGPMSSLYGSDALGGVVNIITKKIGQKWSGTVTVDTTVQEHRDRGDTYNGQFFTSGPLIDGVLGMKAYGSLAKREKDDPQNSTTTDTGETPRIEGFSSRDGNVEFAWTPNQNHDFTAGYGFDRQDRDSDSLDKNRLERQNYSVSHNGRWDYGTSELKYYGEKVENKNPGYSSPITSESNTVDGKYTLPLTAINQFLTVGGEWRHDKLSDAVNLTGGTSSKTSASQYALFVEDEWRIFEPLALTTGVRMDDHETYGEHWSPRAYLVYNATDTVTVKGGWATAFKAPSLLQLSPDWTSNSCRGACKIVGSPDLKPETSESWELGLYYMGEEGWLEGVESSVTVFRNDVKDRISISRTSDVNAAPGYQNFVGFETGANGRRIPVFSYYNVNKARIQGVETELKIPFNDEWKLSINYTYNDGRDVSNGENKPLSDLPFHTANGTLDWKPLALEDWSFYVSGHYTGQKRADSATAKTPGGYTIWNTGAAWQVTKDVKLRAGVLNLGDKDLSRDDYSYNEDGRRYFMAVDYRF

SEQ ID NO: 18395 - protein, 230 aa, Escherichia coli; identical to SEQ ID NO: 4803

SEQ ID NO: 18396 - protein, 733 aa, Escherichia coli
MMISKKYTLWALNPLLLTMMAPAVAQQTDDETFVVSANRSNRTVAEMAQTTWVIENAELEQQIQGGKELKDALAQLIPGLDVSSRSRTNYGMNVRGRPLVVLVDGVRLNSSRTDSRQLDSIDPFNIDHIEVISGATSLYGGGSTGGLINIVTKKGQPETMMEFEAGTKSGFSSSKDHDERIAGAVSGGNEHISGRLSVAYQKFGGWFDGNGDATLLDNTQTGLQYSDRLDIMGTGTLNIDESRQLQLITQYYKSQGDDDYGLNLGKGFSAIRGTSTPFVSNGLNSDRIPGTERHLISLQYSDSAFLGQELVGQVYYRDESLRFYPFPTVNANKQVTAFSSSQQDTDQYGMKLTLNSKPMDGWQITWGLDADHERFTSNQMFFDLAQASASGGLNNKKIYTTGRYPSYDITNLAAFLQSGYDINNLFTLNGGVRYQYTENKIDDFIGYAQQRQIAAGKATSADAIPGGSVDYDNFLFNAGLLMHITERQQAWLNFSQGVELPDPGKYYGRGIYGAAVNGHLPLTKSVNVSDSKLEGVKVDSYELGWRFTGNNLRTQIAAYYSISDKSVVANKDLTISVVDDKRRIYGVEGAVDYLIPDTDWSTGVNFNVLKTESKVNGTWQKYDVKTASPSKATAYIGWAPDPWSLRVQSTTSFDVSDAQGYKVDGYTTADLLGSYQLPVGTLSFSIENLFDRDYTTVWGQRAPLYYSPGYGPASLYGYKGRGRTFGLSYSVLF

SEQ ID NO: 18397 - protein, 412 aa, Escherichia coli
MKQWIAALLLMLIPGVQAAKPQKVTLMVDDVPVAQVLQALAEQEKLNLVVSPDVSGTVSLHLTDVPWKQALQTVVKSAGLITRQEGNILSVHSIAWQNDNIARQEAEQARAQANLPLENRNITLQYADAGELAKAGEKLLSAKGSMTVDKRTNRLLLRDNKTALSALEQWVAQMDLPVGQVELSAHIVTINEKSLRELGVKWTLADAQQAGGVGQVTTLGSDLSVATATTHVGFNIGRINGRLLDLELSALEQKQQLDIIASPRLLASHLQPASIKQGSEIPYQVSSGESGATSVEFKEAVLGMEVTPTVLQKGRIRLKLHISQNVPGQVLQQADGEVLAIDKQEIETQVEVKSGETLALGGIFTRKNKSGQDSVPLLGDIPWFGQLFRHDGKEDERRELVVFITPRLVSSE

SEQ ID NO: 18398 - protein, 224 aa, Escherichia coli
MTVSLTAILLSCSFTWAAGKGGVGLAATRLVYSEGEEQISLGVRNTSPDVPYLIQSWVMTPDNKKSADFIITPPLFVLNPANENLLRIMYIGAPLAKDRETLFFTSVRAVPSTTKREEGNTLKIATQSVIKLFWRPKGLAYPLAEAPAKLRCTSSADMVTVSNPTPYFITLTDLKIGGKVVKNQMISPFDKYQFSLPMGAKNSSVTYRTINDYGAETPQLNCKS

SEQ ID NO: 18399 - protein, 357 aa, Escherichia coli; identical to SEQ ID NO: 2888

SEQ ID NO: 18400 - protein, 364 aa, Escherichia coli; identical to SEQ ID NO: 2848

SEQ ID NO: 18401 - protein, 232 aa, Escherichia coli; identical to SEQ ID NO: 13195

SEQ ID NO: 18402 - protein, 216 aa, Escherichia coli
MAMVVAGRAEAGVALGATRVIYPAGQKQVQLAVTNNDENSTYLIQSWVENADGVKDGRFIVTPPLFAMKGKKENTLRILDATNNQLPQDRESLFWMNVKAIPSMDKSKLTENTLQLAIISRIKLYYRPAKLALPPDQAAEKLRFRRSANSLTLINPTPYYLTVTELNAGTRVLENALVPPMGESTVKLPSDAGSNITYRTINDYGALTPKMTGVME

SEQ ID NO: 18403 - protein, 746 aa, Escherichia coli
MNKKIHSLALLVNLGIYGVAQAQEPTDTPVSHDDTIVVTAAEQNLQAPGVSTITADEIRKNPVARDVSEIIRTMPGVNLTGNSTSGQRGNNRQIDIRGMGPENTLILIDGKPVSSRNSVRQGWRGERDTRGDTSWVPPEMIERIEVLRGPAAARYGNGAAGGVVNIITKKGSGEWHGSWDAYFNAPEHKEEGATKRTNFSLTGPLGDEFSFRLYGNLDKTQADAWDINQGHQSARAGTYATTLPAGREGVINKDINGVVRWDFAPLQSLELEAGYSRQGNLYAGDTQNTNSDAYTRSKYGDETNRLYRQNYSLTWNGGWDNGVTTSNWVQYEHTRNSRIPEGLAGGTEGKFNEKAAQDFVDIDLDDVMLHSEVNLPIDFLVNQTLTLGTEWNQQRMKDLSSNTQALTGTNTGGAIDGVSATDRSPYSKAEIFSLFAENNMELTDSTIVTPGLRFDHHSIVGNNWSPALNISQGLGDDFTLKMGIARAYKAPSLYQTNPNYILYSKGQGCYASAGGCYLQGNDDLKAETSINKEIGLEFKRDGWLAGVTWFRNDYRNKIEAGYVAVGQNAAGTDLYQWDNVPKAVVEGLEGSLNVPVSETVMWTNNITYMLKSENKTTGDRLSIIPEYTLNSTLSWQAREDLSMQTTFTWYGKQQPKKYNYKGQPAVGPETKEISPYSIVGLSATWDVTKNVSLTGGVDNLFDKRLWRAGNAQTTGDLAGANYIAGAGAYTYNEPGRTWYMSVNTHF

SEQ ID NO: 18404 - protein, 360 aa, Escherichia coli; identical to SEQ ID NO: 6933

SEQ ID NO: 18405 - protein, 122 aa, Escherichia coli; identical to SEQ ID NO: 2915

SEQ ID NO: 18406 - protein, 371 aa, Escherichia coli
MPESAMQNWIKAAVITVSLALPGVALAQSLESLVNVQGVRENQLVGYSLVVGLDGTGDKNQVKFTNQTITNMLRQFGVQLPNKIDPKVKNVAAVAVSATLPPMYSRGQTIDVTVSSIGDAKSIRGGTLLLTQLHGADGEVYALAQGSVVVGGMNATGASGSSVTVNTPTAGLIPNGATVEREIPSDFQMGDTITLNLKRPSFKDANNIAAAINASFGGIATAQSSTNVSVRAPTSPGARVAFMSQLDDVQVQAEKIRARVVFNSRTGTVVMGDGVALHAAAVSHGSLTVSINETSNVSQPNAFAGGRTAVTPQSNIAVNHARPGVVSLPESSSLKTLVNALNSLGATPDDIMSILQALHEAGALDADLEVI

SEQ ID NO: 18407 - protein, 539 aa, Escherichia coli; identical to SEQ ID NO: 3050

SEQ ID NO: 18408 - protein, 191 aa, Escherichia coli; identical to SEQ ID NO: 2727

SEQ ID NO: 18409 - protein, 237 aa, Escherichia coli; identical to SEQ ID NO: 1814

SEQ ID NO: 18410 - protein, 752 aa, Escherichia coli; identical to SEQ ID NO: 4012

SEQ ID NO: 18411 - protein, 222 aa, Escherichia coli; identical to SEQ ID NO: 14490

SEQ ID NO: 18412 - protein, 785 aa, Escherichia coli; identical to SEQ ID NO: 4716

SEQ ID NO: 18413 - protein, 119 aa, Escherichia coli; identical to SEQ ID NO: 2841

SEQ ID NO: 18414 - protein, 351 aa, Escherichia coli
MKKSTLALVVMGIVASASVQAAEIYNKDGNKLDIYGKVKAMHYMSDNDSKDGDQSYIRFGFKGETQINDQLTGYGRWEAEFAGNKAESDTAQQKTRLAFAGLKYKDLGSFDYGRNLGALYDVEAWTDMFPEFGGDSSAQTDNFMTKRASGLATYRNTDFFGVIDGLNLTLQYQGKNENRDVKKQNGDGFGTSLTYDFGGSDFAISGAYTNSDRTNEQNLQSRGTGKRAEAWATGLKYDANNIYLATFYSETRKMTPITGGFANKTQNFEAVAQYQFDFGLRPSLGYVLSKGKDIEGIGDEDLVNYIDVGATYYFNKNMSAFVDYKINQLDSDNKLNINNDDIVAVGMTYQF

SEQ ID NO: 18415 - protein, 221 aa, Escherichia coli; identical to SEQ ID NO: 5595

SEQ ID NO: 18416 - protein, 678 aa, Escherichia coli
MVPSTFSRLKAARCLPVVLAALIFAGCGTHTPDQSTAYMQGTAQADSAFYLQQMQQSSDDTRINWQLLAIHALVKEGKTGQAVELFNQLPQELNDSQRREKTLLAAEIKLAQKDFAGAQNLLAKITPADLEQNQQARYWQAKIDASQGRPSIDLLRALIAQEPLLGAKEKQQNIDATWQALSSMTQEQANTLVINADENILQGWLDLQRIWFDNRNDPDMMKAGIADWQKRYPNNPGAKMLPTQLVNVKAFKPASTNKIALLLPLNGQAAVFGRTIQQGFEAAKNIGTQPVAAQVAAAPAADVAEQPQPQTVDGVASPAQASVSDLTGEQPAAQPVPVSAPATSTAAVSAPANPSAELKIYDTSSQPLSQILSQVQQDGASIVVGPLLKNNVEELLKSNTPLNVLALNQPENIENRVNICYFALSPEDEARDAARHIRDQGKQAPLVLIPRSSLGDRVANAFAQEWQKLGGGTVLQQKFGSTSELRAGVNGGSGIALTGSPITPRETTDSGMTTNNPTLQTTPTDDQFTNNGGRVDAVYIVATPGEIAFIKPMIAMRNGSQSGATLYASSRSAQGTAGPDFRLEMEGLQYSEIPMLAGGNLPLMQQALSAVNNDYSLARMYAMGVDAWSLANHFSQMRQVQGFEINGNTGSLTANPDCVINRKLSWLQYQQGQVVPAS

SEQ ID NO: 18417 - protein, 760 aa, Escherichia coli
MENNRNFPARQFHSLTFFAGLCIGITPVAQALAAEGQINADDTLVVEASTPSLYAPQQSADPKFSRPVADTTRTMTVISEQVIKDQGATNLTDALKNVPGVGAFFAGENGNSTTGDAIYMRGADTSNSIYIDGIRDIGSVSRDTFNTEQVEVIKGPSGTDYGRSAPTGSINMISKQPRNDSGIDASASIGSAWFRRGTLDVNQVIGDTTAVRLNVMGEKTHDAGRDKVKNERYGVAPSVAFGLGTANRLYLNYLHVTQHNTPDGGIPTIGLPGYSAPSAGTAALNHSGKVDTHNFYGTDSDYDDSTTDTATMRFEHDINDNTTIRNTTRWSRVKQDYLMTAIMGGASNITQPTSDVNSWTWSRTANTKDVSNKILTNQTNLTSTFYTGAIGHDVSTGVEFTRETQTNYGVNPVTLPAVNIYHPDSSIHPGGLTRNGANANGQTDTFAIYAFDTLQITRDFELNGGIRLDNYHTEYDSATACGGSGRGAITCPAGVAKGSPVTTVDTARSGNLVNWKAGALYHLTENGNVYINYAVSQQPPGGNNFALAQSGSGNSANRTDFKPQKANTSEIGTKWQVLDKRLLLTAALFRTDIENEVEQNDDGTYSQYGKKRVEGYEISGAGNITPAWQVIGGYTQQKATIKNGKDVAQDGSSSLPYTPEHAFTLWSQYQATDDISVGAGARYIGSMHKGSDGAVGTPAFTEGYWVADAKLGYRVNRNLDFQLNVYNLFDTDYVASINKSGYRYHPGEPRTFLLTANMHF

SEQ ID NO: 18418 - protein, 366 aa, Escherichia coli; identical to SEQ ID NO: 4014

SEQ ID NO: 18419 - protein, 729 aa, Escherichia coli
MLSTQFNRDNQHQAIIKSSLLAGCIALALLPSAAFAAPVTEETVIVEGSATAPDDGENDYNVTSTSAGTKMQMTQRDIPQSVTIVSQQRMEDQQLQTLGEVMENTLGISKSQADSDRALYYSRGFQIDNYMVDGIPTYFESRWNLGDALSDMALFERVEVVRGATGLMTGTGNPSAAINMVRKHATSREFKGDVSAEYGSWNKERYVADLQSPLTEDGKIRARIVGGYQNNDSWLDRYNSEKTFFSGIVDADLGDLTMLSAGYEYQRIDVNSPTWGGLPRWNTDGSSNSYDRARSTAPDWAYNDKEINKVFMTLKQRFADTWQATLNATHSEVEFDSKMMYVDAYVNKADGMLVGPYSNYGPGFDYVGGTGWNSGKRKVDALDLFADGSYELFGRQHNLMFGGSYSKQNNRYFSSWANIFPDEIGSFYNFNGNFPQTDWSPQSLAQDDTTHMKSLYAATRVTLADPLHLILGARYTNWRVDTLTYSMEKNHTTPYAGLVFDINDNWSTYASYTSIFQPQNDRDSSGKYLTPITGNNYELGLKSDWMNSRLTTTLAIFRIEQDNVAQSTGTPIPGSNGETAYKAVDGTVSKGVEFELNGAITDNWQLTFGATRYIAEDNEGNAVNPNLPRSTIKMFTSYRLPVMLELTVGGGVNWQNRVYTDTVTPYGTFRAEQGSYALVDLFTRYQVTKNFSLQGNVNNLFDKTYDTNVEGSIVYGAPRNFSITGTYQF

SEQ ID NO: 18420 - protein, 243 aa, Escherichia coli; identical to SEQ ID NO: 14534

SEQ ID NO: 18421 - protein, 235 aa, Escherichia coli; identical to SEQ ID NO: 4365

SEQ ID NO: 18422 - protein, 226 aa, Escherichia coli
MKKINLMPVLALLLICFNSHAAFVLNSTRYIFAGDKDNISVQVNNESSQEYGGQIWIDNANARDQNVYFAPSPTFFKVSGGHKQILRLLKINDSLPKDKESLFWVNVQEIPKAPKEGTNSLAIALHTQVKMIYRPESLKEGREDAEKNIKIIHEGGNTILYNNSPYYFAVINVKQNGHDVKLSEETKNKIAAFAPFEKVSLGSKLSGKDISIVSFDDYGVDREYKL

SEQ ID NO: 18423 - protein, 250 aa, Escherichia coli; identical to SEQ ID NO: 17735

SEQ ID NO: 18424 - protein, 208 aa, Escherichia coli
MKKIWLALAGLVLAFSASAAQYEDGKQYTTLEKPVAGAPQVLEFFSFFCPHCYQFEEVLHISDNVKKKLPEGVKMTKYHVNFMGGDLGKDLTQAWAVAMALGVEDKVTVPLFEGVQKTQTIRSASDIRDVFINAGIKGEEYDAAWNSFVVKSLVAQQEKAAADVQLRGVPAMFVNGKYQLNPQGMDTSNMEVFVQQYADTVKYLSEKK

SEQ ID NO: 18425 - protein, 229 aa, Escherichia coli
MALLIFAVLSLLVASELQAGVVVGGTRFIFPADRDSISILLTNTSQESWLINSKINRPTRWAGGEASTVPAPLLAAPPLILLKPGTTGTLRLLRTESDILPVDRETLFELSIASVPSGKVENQSVKVAMRSVFKLFWRPEGLPGDPLEAYQQLRWTRNSQGVQLTNPTPYYINLIQVSVNGKALSNAGVVPPKSQRQTSWCQAITPCHVSWRTINDYGGLSAKKEQNLP

SEQ ID NO: 18426 - protein, 686 aa, Escherichia coli
MFWRDMTLSVWRKKTTGLKTKKRLLPLVLAAALCSSPVWAEEATFTANFKDTDLKSFIETVGANLNKTIIMGPGVQGKVSIRTMTPLNERQYYQLFLNLLEAQGYAVVPMENDVLKVVKSSAAKVEPLPLVGEGSDNYAGDEMVTKVVPVRNVSVRELAPILRQMIDSAGSGNVVNYDPSNVIMLTGRASVVERLTEVIQRVDHAGNRTEEVIPLDNASASEIARVLESLTKNSGENQPATLKSQIVADERTNSVIVSGDPATRDKMRRLIRRLDSEMERRGNSQVFYLKYSKAEDLVDVLKQVSGTLTAAKEEAEGTVGSGREVVSIAASKHSNALIVTAPQDIMQSLQSVIEQLDIRRAQVHVEALIVEVAEGSNINFGVQWGSKDAGLMQFANGTQIPIGTLGAAISAAKPQKGSTVISENGATTINPDTNGDLSTLAQLLSGFSGTAVGVVKGDWMALVQAVKNDSSSNVLSTPSITTLDNQEAFFMVGQDVPVLTGSTVGSNNSNPFNTVERKKVGIMLKVTPQINEGNAVQMVIEQEVSKVEGQTSLDVVFGERKLKTTVLANDGELIVLGGLMDDQAGESVAKVPLLGDIPLIGNLFKSTADKKEKRNLMVFIRPTILRDGMAADGVSQRKYNYMRAEQIYRDEQGLSLMPHTAQPILPAQNQALPPEVRAFLNAGRTR

SEQ ID NO: 18427 - protein, 656 aa, Escherichia coli
MRLKKRYLCTALSLAFTQQAVAAQESDTLTVWSSPVSSTTTTVLDQPTMKALDKQNVAQALSVVPGVVLQKSGSRNEEQVKVRGFDSRQVPVYFEGVPIYVPYDGNLDLARILTNNLGAVEVSKGYSSLLQGPNQMGGAINITTQKPTKPLEANLGYRQGWSRSQDNAYDMHASFAASSDLGYLQVSGSQLKQDFLGLPHGVNNDIAGKHGKMINSSADDKRGIVKLGFTPRENDEYTLTYIKQDGEKDNPPYSGNSGQKSRYWQWPEYDKESFYYQGTTQLNDRFTLKSRLYRDTFENTLMMYNSLADLKNKKGSYSHYSDYSDGAGLQLAADVRENDLLSFAVNWKDDVHREKGAPHAAYDRYEDRTWSLASEYQWAAADNVDVVAGISYDWRDSVEAKKHEKDGSITHYDDNNQSAFNWQVMGKYHFANEDTLALSYYDRTRFPTLKERYTTSKPAYNQIAIVNPQLKPERARGVDLTWNGAFTHDWGFEVSVYYNRVSDAILSHNIDADTIQNQNSGTVDYSGLDAGIKGKISNILDVGLSYALIHADAKRKDIGKITDLPTQTMTAWMTLKPWEPLSVTLSEEARSSSYSNSDGSQKAAGFAVTHIRADYTLGHGFSVNASVNNLFDTKYAYSEGFIEEGRNFWAGIAYTF

SEQ ID NO: 18428 - protein, 695 aa, Escherichia coli
MRVTTLASVAIPCLGFSVSSMAAEDVMVVTASGYEKKLTSAAASVSVISQEDLRSSQYHDLGEALRSVEGVDVESGTGKTGGLEISIRGMPASYTLILIDGVRQGGSSDVTPNGYAAMNTGFMPPLAAIERIEIIRGPMSTLYGSDAMGGVVNIITKKNADKWRSSVNAGLNLQESNKWGNSSQFNFWSSGPLVDDSLSLQVRGSTQQRQGSSVTSLSDTSATRIPYPTESQNYNAGGRLDWKATDKDVLWIDMDIARQRYDNRDGQLGSLTGGYDRTLRYERNKISAGYDHTFTFGAWKSSLNWNETENKGRQLVRSVLQRDKWGLAGQPRELKESNLILSSLLFAPLGESHKVTVGGEYQNSSMKDGVVLASTGETFRQKSWSAFVEDEWYITDAFALTAGSRYERYEVFGGHFSPRAYMVWDVTDAWTLKGGVTTGYKAPSMGQLHKGISGVSGQGRTNLLGNPDLKPEESVSYEAGVYYDNHAGLNANITGFMTEFSNKIVSYSIDDNTRSYTNSGKARTQGVEFAGTLPLLSEDVTLSLNYTWTQSEQRDGDNKGAPLSYTPEHMVNAKLNWQITEEVTSWLGARYRGKTPRFTQNYSSLSAVQKKVYDEKGEYLKAWTVLDAGMSWKVTDALMLNAAVNNVLNKDYSDVSLYRAGSGTLYAGDYFQTGASTTGYVIPERNYWMSLNYQF

SEQ ID NO: 18429 - protein, 713 aa, Escherichia coli
MAMFTPSFSGLKGRALFSLLFAAPMIHATDSVTTKDGETITVTADANTATEATDGYQPLSTSTATLTDMPMLDIPQVVNTVSDQVLENQNATTLDEALYNVSNVVQTNTLGGTQDAFVRRGFGANRDGSIMTNGLRTVLPRSFNAATERVEVLKGPASTLYGILDPGGLINVVTKRPEKTFHGSVSATSSSFGGGTGQLDITGPIEGTQLAYRLTGEVQDEDYWRNFGKERSTFIAPSLTWFGDNATVTMLYSHRDYKTPFDRGTIFDLTTKQPVNVDRKIRFDEPFNITDGKSDLAQLNAEYHLNSQWTARFDYSYSQDKYSDNQARVTAYDATTGTLTRRVDATQGSTQRMHATRADLQGNVDIAGFYNEILGGVSYEYYDLLRTDMIRCKKAKDFNIYNPVYGNTSKCTTVSASDSDQTIKQESYSAYAQDALYLTDNWIAVAGIRYQYYTQYAGKGRPFNVNTDSRDEQWTPKLGLVYKLTPSVSLFANYSQTFMPQSSIASYIGDLPPESSNAYEVGAKFELFDGITADIALFDIHKRNVLYTESVGDETIAKTAGRVRSRGVEVDLAGALTENINIIASYGYTDAKVLEDPDYAGKPLPNVPRHTGSLFLTYDIHNMPGNNTLTFGGGGHGVSRRSATNGADYYLPGYFVADAFAAYKMKLQYPVTLQLNVKNLFDKTYYTSSIATNNLGNQIGDPREVQFTVKMEF

SEQ ID NO: 18430 - protein, 236 aa, Escherichia coli; identical to SEQ ID NO: 7940

SEQ ID NO: 18431 - protein, 431 aa, Escherichia coli; identical to SEQ ID NO: 3408

SEQ ID NO: 18432 - protein, 660 aa, Escherichia coli; identical to SEQ ID NO: 5588

SEQ ID NO: 18433 - protein, 614 aa, Escherichia coli
MIKKASLLTACSVTAFSAWAQDTSPDTLVVTANRFEQPRSTVLAPTTVVTRQDIDRWQSTSVNDVLRRLPGVDITQNGGSGQLSSIFIRGTNASHVLVLIDGVRLNLAGVSGSADLSQFPIALVQRIEYIRGPRSAVYGSDAIGGVVNIITTRDEPGTEISAGWGSNSYQNYDVSTQQQLGDKTRVTLLGDYAHTHGYDVVAYGNTGTQAQTDNDGFLSKTLYGALEHNFTDAWSGFVRGYGYDNRTNYDAYYSPGSPLLDTRKLYSQSWDAGLRYNGELIKSQLITSYSHSKDYNYDPHYGRYDSSATLDEMKQYTVQWANNVTVGHGNIGAGVDWQKQTTTPGTGYVEDGYDQRNTGIYLTGLQQVGDFTFEGAARSDDNSQFGRHGTWQTSAGWEFIEGYRFIASYGTSYKAPNLGQLYGFYGNPNLNPEKSKQWEGAFEGLTAGVNWRISGYRNDVSDLIDYDDHTLKYYNEGKARIKGVEATANFDTGPLTHTVSYDYVDARNAITDVPLLRRAKQQVKYQLDWQLYDFDWGITYQYLGTRYDKDYSSYPYQTVKMGGVSLWDLAVAYPVTSHLTVRGKIANLFDKDYETVYGYQTAGREYTLSGSYTF

SEQ ID NO: 18434 - protein, 700 aa, Escherichia coli
MKIFSVRQTVLPALLVLSPVVFAADEQTMIVSAAPQVVSELDTPAAVSVVDGEEMRLATPRINLSESLTGVPGLQVQNRQNYAQDLQLSIRGFGSRSTYGIRGIRLYVDGIPATMPDGQGQTSNIDLSSVQNVEVLRGPFSALYGNASGGVMNVITQTGQQPPTIEASSYYGSFGSWRYGLKATGATGDGTQPGDVDYTVSTTRFTTHGYRDHSGAQKNLANAKLGVRIDEASKLSLIFNSVDIKADDPGGLTEAEWKANPQQAPRAEQYDTRKTIKQTQAGLRYERSLSAQDDMSVMMYAGERETTQYQSIPMAPQLNPSHAGGVITLQRHYQGIDSRWTHHGELGVPVTFTTGLNYENMSENRKGYNNFRLNSGVPEYGQKGELRRDERNLMWNVDPYLQTQWQLSEKLSLDAGVRYSSVWFDSNDHYVTPGNGDDSGDASYHKWLPAGSLKYAMNDAWNIYLAAGRGFETPTINELSYRADGQSGMNFGLKPSTNDTIEIGSKTRIGDGLLSLALFQTDTDDEIVVDSSSGGRTTYKNAGKTRRQGAELAWDQRFAGDFRVKASWTWLDATYRSNVCNEQDCNGNRMPGIARNMGFASIGYVPEEGWYAGTEARYMGDIMADDENTAKAPSYTLVGLFTGYKYNYHNLTVDLFGRVDNLFDKGYVGSVIVNESNGRYYEPAPGRNYGVGMNIAWRFE

SEQ ID NO: 18435 - protein, 876 aa, Escherichia coli
MFSGDGGQLLSDKSLTGSAGGGNNRMKFNILPLAFFIGIIVSPARAELYFNPRFLSDDPDAVADLSAFTQGQELPPGVYRVDIYLNDTYISTRDVQFQMSQDGKQLAPCLSPEHMSAMGVNRYAVPGMERLPADTCTSLNSMIQGATFRFDVGQQRLYLTVPQLYMSNQARGYIAPEYWDNGITAALLNYDFSGNRVRDSYGGTSDYAYLNLKTGLNIGSWRLRDNTSWSYSAGKGYSQNNWQHINTWLERDIVPLRSRLTMGDSYTRGDIFDGVNFRGIQLASDDNMVPDSQRGYAPTIHGISRGTSRISIRQNGYEIYQSTLPPGPFEINDIYPAGSGGDLQVTLQEADGSVQRFNVPWSSVPVLQREGHLKYALSAGEFRSGGHQQDNPRFAEGTLKYGLPAGWTVYGGAWIAERYRAFNLGMGKNMGWLGAVSLDATRANARLPDESRHDGQSYRFLYNKSLTETGTNIQLIGYRYSTRGYFSFADTAWKKMSGYSVLTQDGVIQIQPKYTDYYNLAYNKRGRVQVSISQQTGESSTLYLSGSHQSYWGTDRTDRQLNAGFNSSVNDISWSLNYSLSRNAWQHETDRILSFDVSIPFSHWMRSDSTSAWRNASARYSQTLEAHGQAASTAGLYGTSLGDNNLGYSIQSGYTRGGYEGSSKTGYASLNYRGGYGNASAGYSHSGGYRQLYYGLSGGILAHANGLTLSQPLGDTLILVRAPGASDTRIENQTGVSTDWRGYAVLPYATDYRENRVALDTNTLADNVDIENTVVSVVPTHGAVVRADYKTRVGVKVLMTLMRNGKAVPFGSVVTARNGGSSIAGENGQVYLSGMPLSGQVSVKWGSQTTDQCTADYKLPKESAGQILSHVTVSCR

SEQ ID NO: 18436 - protein, 900 aa, Escherichia coli; identical to SEQ ID NO: 4548

SEQ ID NO: 18437 - protein, 161 aa, Escherichia coli; identical to SEQ ID NO: 2582

SEQ ID NO: 18438 - protein, 878 aa, Escherichia coli; identical to SEQ ID NO: 3957

SEQ ID NO: 18439 - protein, 883 aa, Escherichia coli; identical to SEQ ID NO: 13884

SEQ ID NO: 18440 - protein, 833 aa, Escherichia coli
MAASSPPFFKYLSGMDTVNIYRLSFISCLVMAIPSALAVEFNLNVLDKSMRDRIDISLLKGKGGIAPGEYFVSVAVNNNQISNGQKIDWKKNGDQTIPCINDLLVDKFGLKPEVRQSLPRLNQCVDFSSRPEILFIFDQASQQLNITIPQAWLAWHSDNWTPPSTWKEGVAGVLMDYNLFASSYRPQDGSNSTNLNAYGTAGINAGAWRLRSDYQLNQTDSDDNHEQSGEISRTYLFRPLPQLGSKLTLGETDFSSNIFDGFSYTGAALASDDRMLPWELRGYAPQISGIAQTNATVTVSHSGRVIYQKKVPPGPFIIDDLNQSVQGTLDVKVTEEDGRVNNFQVSAASTPFLTRQGQVRYKLAAGQPRTSMSHQTENETFFSNEVSWGMLSNTSLYGGLLISGDNYHSAAMGIGQNMLWLGALSFDVTWASSQFDTQQDERGLSYRFNYSKQVDATNSTISLAAYRFSDRHFHSYANYLDHKYNDNDAQDEKQTISLSVGQPITPLNLNLYANLLHQTWWNADASTTANITAGFNVDIGNWRDISISTSFNTTHYEDKDRDNQIYLSISLPFGNGGRVGYDMQNSNHSTTHRMSWNDTLDERNSWGMSTGLQSDRPDNGAQVSGNYQHLSSAGEWDISGTYAANDYSSVSSSWSGSFTATQYGAAFHRRSSTNEPRLMVSTDGVADIPVQGNLDYTNHFGIAVVPLISSYQPSTVAVNMNDLPDGVTVADNVIKETWIEGAIGYKSLASRSGKDVNLIIRNASGQFPPLGADIRQEDSGISVGMVGEEGHAWLSGVAENQQFTVIWGDSQRCSIHLPEHMEDTANRLILPCH

SEQ ID NO: 18441 - protein, 826 aa, Escherichia coli; identical to SEQ ID NO: 3951

SEQ ID NO: 18442 - protein, 843 aa, Escherichia coli; identical to SEQ ID NO: 3954

SEQ ID NO: 18443 - protein, 826 aa, Escherichia coli; identical to SEQ ID NO: 3791

SEQ ID NO: 18444 - protein, 883 aa, Escherichia coli
MTAFRAAFKAYRMHQVLILPRFARLTFALGLATAVFPVDAEYYFNPRFLSNDLAESVDLSAFTKGREAPPGTYRVDIYLNDEFMASRDITFIADDNNADLIPCLSTDLLVSLGIKKSALLDNKEHSADKHVPDNSACTPLQDRLADASSEFDVGQQHLSLSVPQIYVGRMAHGYVSPDLWEEGINAGLLNYSFNGNSINNRSNHNAGKSNYAYLNLQSGINIGSWRLRDNSTWSYNSGSSNSSDSNKWQHINTSAERDIIPLRSRLTVGDSYTDGDIFDSVNFRGLKINSTEAMLPDSQHGFAPVIHGIARGTAQVSVKQNGYDVYQTTVPPGPFTIDDINSAANGGNLQVTIKEADGSIQTLYVPYSSVPVLQRAGYTRYALAMGEYRSGNNLQSTPKFVQASLMHGLKGNWTPYGGMQIAEDYQAFNLGIGKDLGLFGAFSFDITQANTTLADDTRHSGQSVKSVYSKSFYQTGTNIQVAGYRYSTQGFYNLSDSAYSRMSGYTVKPPTGDTSEQTLFIDYFNLFYSKRGQEQISISQQLGNYGTTFFSASRQSYWNTSRSDQQISFGLNVPFGDITTSLNYSYSNNIWQNDRDHLLAFTLNVPFSHWMRTDSQSAFHNSNASYSMSNDLKGGMTNLSGVYGTLLPDNNLNYSVQVGNTQGGNTSSGTSGYSSLNYRGAYGNTNVGYSRSGDSSQIYYGMSGGIIAHADGITFGQPLGDTMVLVKAPGADNVKIENQTGIHTDWRGYAILPFATEYRENRVALNANSLADNVELDETVVTVIPTHGAIARATFNAQIGGKVLMTLKYGNKSVPFGAIVTHGENKNGSIVAENGQVYLTGLPQSGKLQVSWGKDKNSNCIVDYKLPVVSPGTLLNQQTAICR

SEQ ID NO: 18445 - protein, 883 aa, Escherichia coli; identical to SEQ ID NO: 13893

SEQ ID NO: 18446 - protein, 816 aa, Escherichia coli; identical to SEQ ID NO: 3939

SEQ ID NO: 18447 - protein, 161 aa, Escherichia coli; identical to SEQ ID NO: 2582

SEQ ID NO: 18448 - protein, 207 aa, Escherichia coli; identical to SEQ ID NO: 2213

SEQ ID NO: 18449 - protein, 266 aa, Escherichia coli; identical to SEQ ID NO: 3338

SEQ ID NO: 18450 - protein, 869 aa, Escherichia coli; identical to SEQ ID NO: 3938

SEQ ID NO: 18451 - protein, 882 aa, Escherichia coli
MPNHSNFRLRGIACYIALAISGGSVNAWADDSIQFDPRFLELKGDTKIDLGKFSKKGYVDAGKYNLRVFINKQPLSDEYDINWYVSENDPTKNYACLTPELVAALGLKEGIAKSLQWTHNDECLKPGQLDGMEVENDLSQSALLLTVPQAYLEYTSSDWDPPSRWDDGIPGLIADYSLNAQTRHQEQGGEDSHDISGNGTVGANLGAWRFRADWQSDYQHTRSNDDDDDSSNSTTSKNWDWSRYYAWRALPSLKAKLSLGEDYLNSDIFDGFNYIGSSVSTDDQMLPPNLRGYAPDVSGVAHSSAKVTISQMGRVLYETQVPAGPFRIQDIGDSVSGTLHVRVEEQNGQVQEYDVTTVSMPFLTRQGQVRYKVMMGRPEDWNHKTEGGFFSGGEASWGVADGWSLYGGALADKHYQSAAMGVGRDLAQFGALAFDVTHSHVNLDHDSAYGKGKLDGNSFRVSYAKDFDELNSRVTFAGYRFSEKNFMTMSEYLDANQSDMARTGNDKEMYTITYNQNFAAAGVSIYLNYSHRTYWDRPEQTNYNLMFSHYFNMGSIRNMSISVTGYRYEYDDNADKGMYLSMSIPWSDSSTVTYNGSYGSGSDSSQVGYFKRVDDATHYQVNVGTSEQHGSVDGYLSHDGSLAKVDLSANYHEGEYRSAGIALQGGATLTAHGGALHRTQNMGGTRLLIDADGIANVPVESNGAPVYTNMFGKAVVADINNYYRNQAYIDLNNLPEDAEATQSVVQATLTEGAIGYRKFKVISGQKAMAVLRLRDGSYPPFGAEVKNDEQQQVGIVDDEGNVYLAGVNAGEHMMVFWEGSAQCEIVLPKPLPADLFSGLLLPCEQKGTAAPDSSAPEIKPVIQDQTRQVTPTEAPTSISATQ

SEQ ID NO: 18452 - protein, 863 aa, Escherichia coli
MHIRKHRLAGFFVRLFVACAFAAQAPLSSAELYFNPRFLADDPQAVADLSRFENGQELPPGTYRVDIYLNNGYMATRDVTFNTGDSEQGIVPCLTRAQLASMGLNTASVSGMNLLADDACVPLTSMIHDATAQLDVGQQRLNLTIPQAFMSNRARGYIPPELWDPGINAGLLNYNFSGNSVQNRIGGNSHYAYLNLQSGLNIGAWRLRDNTTWSYNSSDSSSGSKNKWQHINTWLERDIIPLRSRLTLGDGYTQGDIFDGINFRGAQLASDDNMLPDSQRGFAPVIHGIARGTAQVTIKQNGYDIYNSTVPPGPFTINDIYAAGNSGDLQVTIKEADGSTQIFTVPYSSVPLLQREGHTRYSITAGEYRSGNAQQEKPRFFQSTLLHGLPAGWTIYGGTQLADRYRAFNFGIGKNMGALGALSVDMTQANSTLPDDSQHDGQSVRFLYNKSLNESGTNIQLVGYRYSTSGYFNFADTTYSRMNGYNIETQDGVIQVKPKFTDYYNLAYNKRGKLQLTVTQQLGRTSTLYLSGSHQTYWGTSNVDEQFQAGLNTAFEDINWTLSYSLTKNAWQKGRDQMLALNVNIPFSHWLRSDSKSQWRHASASYSMSHDLNGRMTNLAGVYGTLLEDNNLSYSVQTGYAGGGDGNSGSTGYATLNYRGGYGNANIGYSHSDDIKQLYYGVSGGVLAHANGVTLGQPLNDTVVLVKAPGAKDAKVENQTGVRTDWRGYAVLPYATEYRENRVALDTNTLADNVDLDNAVANVVPTRGAIVRAEFKARVGIKLLMTLTHNNKPLPFGAMVTSESSQSSGIVADNGQVYLSGMPLAGKVQVKWGEEENAHCVANYQLPPESQQQLLTQLSAECR

SEQ ID NO: 18453 - protein, 891 aa, Escherichia coli; identical to SEQ ID NO: 13898

SEQ ID NO: 18454 - protein, 840 aa, Escherichia coli; identical to SEQ ID NO: 4545

SEQ ID NO: 18455 - protein, 862 aa, Escherichia coli; identical to SEQ ID NO: 7218

SEQ ID NO: 18456 - protein, 368 aa, Escherichia coli; identical to SEQ ID NO: 2372

SEQ ID NO: 18457 - protein, 266 aa, Escherichia coli; identical to SEQ ID NO: 3745

SEQ ID NO: 18458 - protein, 368 aa, Escherichia coli; identical to SEQ ID NO: 2374

SEQ ID NO: 18459 - protein, 430 aa, Escherichia coli; identical to SEQ ID NO: 2617

SEQ ID NO: 18460 - protein, 686 aa, Escherichia coli; identical to SEQ ID NO: 3806

SEQ ID NO: 18461 - protein, 654 aa, Escherichia coli; identical to SEQ ID NO: 3854

SEQ ID NO: 18462 - protein, 747 aa, Escherichia coli; identical to SEQ ID NO: 3857

SEQ ID NO: 18463 - protein, 274 aa, Escherichia coli; identical to SEQ ID NO: 2301

SEQ ID NO: 18464 - protein, 250 aa, Escherichia coli; identical to SEQ ID NO: 3855

SEQ ID NO: 18465 - protein, 362 aa, Escherichia coli; identical to SEQ ID NO: 4554

SEQ ID NO: 18466 - protein, 746 aa, Escherichia coli; identical to SEQ ID NO: 4597

SEQ ID NO: 18467 - protein, 673 aa, Escherichia coli; identical to SEQ ID NO: 2919

SEQ ID NO: 18468 - protein, 236 aa, Escherichia coli; identical to SEQ ID NO: 3821

SEQ ID NO: 18469 - protein, 359 aa, Escherichia coli; identical to SEQ ID NO: 2329

SEQ ID NO: 18470 - protein, 213 aa, Escherichia coli; identical to SEQ ID NO: 2232

SEQ ID NO: 18471 - protein, 715 aa, Escherichia coli; identical to SEQ ID NO: 5610

SEQ ID NO: 18472 - protein, 663 aa, Escherichia coli; identical to SEQ ID NO: 9256

SEQ ID NO: 18473 - protein, 446 aa, Escherichia coli; identical to SEQ ID NO: 2177

SEQ ID NO: 18474 - protein, 111 aa, Escherichia coli; identical to SEQ ID NO: 3419

SEQ ID NO: 18475 - protein, 266 aa, Escherichia coli; identical to SEQ ID NO: 7272

SEQ ID NO: 18476 - protein, 232 aa, Escherichia coli; identical to SEQ ID NO: 2087

SEQ ID NO: 18477 - protein, 713 aa, Escherichia coli; identical to SEQ ID NO: 4590

SEQ ID NO: 18478 - protein, 118 aa, Escherichia coli [sequence omitted]

SEQ ID NO: 18479 - protein, 237 aa, Escherichia coli; identical to SEQ ID NO: 3793

SEQ ID NO: 18480 - protein, 412 aa, Escherichia coli; identical to SEQ ID NO: 7283

SEQ ID NO: 18481 - protein, 200 aa, Escherichia coli; identical to SEQ ID NO: 1785

SEQ ID NO: 18482 - protein, 203 aa, Escherichia coli; identical to SEQ ID NO: 2201

SEQ ID NO: 18483 - protein, 686 aa, Escherichia coli; identical to SEQ ID NO: 14004

SEQ ID NO: 18484 - protein, 700 aa, Escherichia coli; identical to SEQ ID NO: 4029

SEQ ID NO: 18485 - protein, 760 aa, Escherichia coli; identical to SEQ ID NO: 4114

SEQ ID NO: 18486 - protein, 249 aa, Escherichia coli; identical to SEQ ID NO: 4132

SEQ ID NO: 18487 - protein, 204 aa, Escherichia coli; identical to SEQ ID NO: 2957

SEQ ID NO: 18488 - protein, 244 aa, Escherichia coli; identical to SEQ ID NO: 4064

SEQ ID NO: 18489 - protein, 696 aa, Escherichia coli; identical to SEQ ID NO: 4065

SEQ ID NO: 18490 - protein, 230 aa, Escherichia coli; identical to SEQ ID NO: 4004

SEQ ID NO: 18491 - protein, 221 aa, Escherichia coli; identical to SEQ ID NO: 4116

SEQ ID NO: 18492 - protein, 614 aa, Escherichia coli; identical to SEQ ID NO: 4016

SEQ ID NO: 18493 - protein, 784 aa, Escherichia coli; identical to SEQ ID NO: 2244

SEQ ID NO: 18494 - protein, 122 aa, Escherichia coli; identical to SEQ ID NO: 2915

SEQ ID NO: 18495 - protein, 362 aa, Escherichia coli; identical to SEQ ID NO: 2827

SEQ ID NO: 18496 - protein, 541 aa, Escherichia coli; identical to SEQ ID NO: 3377

SEQ ID NO: 18497 - protein, 759 aa, Escherichia coli
MAQRQPEKTAAGGCCFNSLYNKYSGITMMRKKYMPRALGPLLLVVLSPAVAQQNDDNEIIVSASRSNRTVAEMAQTTWVIENAELEQQIQGGKELKDALAQLIPGLDVSSQSRTNYGMNMRGRPLVVLIDGVRLNSSRSDSRQLDSVDPFNIDHIEVISGATALYGGGSTGGLINIVTKKGQPETMMEFEAGTKSGFNSSKDHDERIAGAVSGGNDHISGRLSVAYQKFGGWFDGNGDATLLDNTQTGLQHSNRLDIMGTGTLNIDESRQLQLITQYYKSQGDDNYGLNLGKGFSAISGSSTPYVSKGLNSDRIPGTERHLISLQYSDSDFLRQELVGQVYYRDESLRFYPFPTVNANKQATAFSSSQQDTDQYGMKLTLNSQLMDGWQITWGLDAEHERFTSNQMFFDLAQASASGGLNNHKIYTTGRYPSYDITNLAAFLQSSYDINDIFTVSGGVRYQYTENRVDDFIDYTQQQKIAAGKAISADAIPGGSVDYDNFLFNAGLLMHITERQQAWFNFSQGVALPDPGKYYGRGIYGAAVNGHLPLTKSVNVSDSKLEGVKVDSYELGWRFTGDNLRTQIAAYYSLSNKSVERNKDLTISVKDDRRRIYGVEGAVDYLIPDTDWSTGVNFNVLKTESKVNGQWQKYDVKESSPSKATAYINWAPEPWSLRVQSTTSFDVSDAEGNDINGYTTVDFISSWQLPVGTLSFSVENLFDRDYTTVWGQRAPLYYSPGYGPASLYDYKGRGRTFGLNYSVLF

SEQ ID NO: 18498 - protein, 752 aa, Escherichia coli; identical to SEQ ID NO: 4012

SEQ ID NO: 18499 - protein, 213 aa, Escherichia coli; identical to SEQ ID NO: 2232

SEQ ID NO: 18500 - protein, 774 aa, Escherichia coli; identical to SEQ ID NO: 2066

SEQ ID NO: 18501 - protein, 367 aa, Escherichia coli; identical to SEQ ID NO: 3998

SEQ ID NO: 18502 - protein, 239 aa, Escherichia coli
MHQMQTTRTPYSISFMATVLLLLLFACHSTIANAAVALGATRVIYPANQKQVLLPVTNNDPASVYLIQSWIENAGDQKDTQFVITPPLFSMQGKKENTLRIINATNHQLPGDRESLFWVNVKAIPAMEKDQKNENTLQLAIISRIKMFYRPTNLAMAPEEAPAMLRFRRSGSKLTLINPTPYFITVTNMKAGNSNLPNTMVPPKGEVSVDIPHAATGDISFQTINDYGALTPRIKATMQ

SEQ ID NO: 18503 - protein, 250 aa, Escherichia coli; identical to SEQ ID NO: 4096

SEQ ID NO: 18504 - protein, 250 aa, Escherichia coli; identical to SEQ ID NO: 3811

SEQ ID NO: 18505 - protein, 222 aa, Escherichia coli; identical to SEQ ID NO: 4102

SEQ ID NO: 18506 - protein, 243 aa, Escherichia coli; identical to SEQ ID NO: 4001

SEQ ID NO: 18507 - protein, 360 aa, Escherichia coli; identical to SEQ ID NO: 4018

SEQ ID NO: 18508 - protein, 208 aa, Escherichia coli; identical to SEQ ID NO: 1949

SEQ ID NO: 18509 - protein, 663 aa, Escherichia coli
MLNGIYSMRLKKRYLCTALSLAFTQQAVAAQESDTLTVWSSPVSSTTTTVLDQPTMKALDKQNVAQALSVVPGVVLQKSGSRNEEQVKVRGFDSRQVPVYFDGVPIYVPYDGNLDLARILTNNLGAVEVSKGYSSLLQGPNQMGGAINITTQKPTKPLEANLGYRQGWSRSQDNAYDMHASFAASSDLGYLQVSGSQLKQDFLGLPHGVNNDIAGKHGKMINSSADDKRGIVKLGFTPRENDEYTLTYIKQDGEKDNPPYSGNSGQKSRYWQWPEYDKESFYYQGTTQLNDRFTLKSRLYRDTFENTLMMYNSLADLKNKKGSYSHYSDYSDGAGLQLAADVRENDLLSFAVNWKDDVHREKGAPHAAYDRYEDRTWSLASEYQWAAADNVDVVAGISYDWRDSVEAKKHEKDGSITHYDDNNQSAFNWQVMGKYHFANEDTLALSYYDRTRFPTLKERYTTSKPAYNQIAIVNPQLKPERARGVDLTWNGAFTHDWGFEVSVYYNRVSDAILSHNIDADTIQNQNSGTVDYSGLDAGIKGKISNILDVGLSYALIHADAKRKDIGKITDLPTQTITAWMTLKPWEPLSVTLSEEARSSSYSNSDGSQKAAGFAVTHIRADYTLGHGFSVNASVNNLFDTKYAYSEGFIEEGRNFWAGIEYTF

SEQ ID NO: 18510 - protein, 760 aa, Escherichia coli; identical to SEQ ID NO: 2081

SEQ ID NO: 18511 - protein, 565 aa, Escherichia coli; identical to SEQ ID NO: 2664

SEQ ID NO: 18512 - protein, 700 aa, Escherichia coli; identical to SEQ ID NO: 4566

SEQ ID NO: 18513 - protein, 363 aa, Escherichia coli; identical to SEQ ID NO: 3839

SEQ ID NO: 18514 - protein, 654 aa, Escherichia coli
MNVIRTVICTLIILPVGLQAATSHSSMVKDTITIVATGNQNTVFETPSMVSVVTNDTPWSQNAVTSAGMLKGVAGLSQTGAGRTNGQTFNLRGYDKSGVLVLVDGVRQLSDMAKSSGTYLDPALVKRIEVVRGPNSSLYGSGGLGGVVDFRTADAADFLPPGETNGLSLWGNIASGDHSTGSGLTWFGKTGKTDALLSVIMRKRGNIYQSDGERAPNKEKPAALFAKGSVGITDSNKAGASLRLYRNNTTEPGNSTQTHGDSGLRDRKTVQNDVQFWYQYAPVDNSLINVKSTLYLSDITIKTNGHNKTAEWRNNRTSGVNVVNRSHTLIFPGAHQLSYGAEYYRQQQKPEGSATLYPEGNIDFTSLYFQDEMTMKSYPVNIIVGSRYDRYKSFNPRAGELKAERLSPRAAISVSPTDWLMMYGSISSAFRAPTMAEMYRDDVHFYRKGKPNYWVPNLNLKPENNITREIGAGIQLDGLLTDNDRLQLKGGYFGTDARNYIATRVDMKRMRSYSYNVSRARIWGWDMQGNYQSDYVDWMLSYNRTESMDASSREWLGSGNPDTLISDISIPFGHRGVYAGWRAELSASATHVKKGDPHQAGYTIHSFSLSYKPVSVKGFEASVTLDNAFNKLAMNGKGVPLSGRTVSLYTRYQW

SEQ ID NO: 18515 - protein, 241 aa, Escherichia coli; identical to SEQ ID NO: 2075

SEQ ID NO: 18516 - protein, 784 aa, Escherichia coli; identical to SEQ ID NO: 2241

SEQ ID NO: 18517 - protein, 711 aa, Escherichia coli
MPALASFIPLHAHASSTSEDEMIVTGNTAADTTDSAAGAGFKTNDIDVGPLGTKSWIETPYSSTTVTKEMIENQQAQSVSEMLKYSPSTQMQARGGMDVGRPQSRGMQGSVVANSRLDGLNIVSTTAFPVEMLERMDVLNSLTGALYGPASPAGQFNFVAKRPTEETLRKVTLGYQSRSAFTGHADLGGHFDENKRFGYRVNLLDQEGEGNVDDSTLRRKLVSVALDWNIQPGTQLQLDASHYEFIQKGYVGSFNYGPNVKLPSAPNPKDKNLALSTAGNDLTTDTISTRLIHYFNDDWSMNAGVGWQQADRAMRSVSSKILNNQGDISRSMKDSTAAGRFRVLSNTAGLNGHIDTGSIGHDLSLSTTGYVWSLYSAKGTGSSYSWGTTNMYHPDAIDEQGDGKIRTGGPRYRSSVNTQQSVTLGDTVTFTPQWSAMFYLSQSWLQTKNYDKHGNQTNQVDENGLSPNAALMYKITPNTMAYVSYADSLEQGGTAPTDESVKNAGQTLNPYRSKQYEVGLKSDIGEMNLGAALFRLERPFAYLDTDNVYKEQGNQVNNGLELTAAGNVWQGLNIYSGVTFLDPKLKDTANASTSNKQVVGVPKVQANLLAEYSLPSIPEWVYSANVHYTGKRAANDTNTSYASSYTTWDLGTRYTTKVSNVPTTFRVVVNNVFDKHYWASIFPSGTDGDNGSPSAFIGGGREVRASVTFDF

SEQ ID NO: 18518 - protein, 237 aa, Escherichia coli; identical to SEQ ID NO: 1814

SEQ ID NO: 18519 - protein, 241 aa, Escherichia coli; identical to SEQ ID NO: 2922

SEQ ID NO: 18520 - protein, 746 aa, Escherichia coli; identical to SEQ ID NO: 4130

SEQ ID NO: 18521 - protein, 660 aa, Escherichia coli; identical to SEQ ID NO: 4097

SEQ ID NO: 18522 - protein, 432 aa, Escherichia coli; identical to SEQ ID NO: 2026

SEQ ID NO: 18523 - protein, 656 aa, Escherichia coli; identical to SEQ ID NO: 6715

SEQ ID NO: 18524 - protein, 351 aa, Escherichia coli; identical to SEQ ID NO: 9084

SEQ ID NO: 18525 - protein, 725 aa, Escherichia coli; identical to SEQ ID NO: 11980

SEQ ID NO: 18526 - protein, 246 aa, Escherichia coli; identical to SEQ ID NO: 3838

SEQ ID NO: 18527 - protein, 222 aa, Escherichia coli; identical to SEQ ID NO: 4595

SEQ ID NO: 18528 - protein, 472 aa, Escherichia coli; identical to SEQ ID NO: 3900

SEQ ID NO: 18529 - protein, 828 aa, Escherichia coli; identical to SEQ ID NO: 2379

SEQ ID NO: 18530 - protein, 331 aa, Escherichia coli
MELLCPAGNLPALKAAIENGADAVYIGLKDDTNARHFAGLNFTEKKLQEAVSFVHQHRRKLHIAINTFAHPDGYARWQRAVDMAAQLGADALILADLAMLEYAAERYPHIERHVSVQASATNEEAIHFYHRHFDVARVVLPRVLSIHQVKQLARVTPVPLEVFAFGSLCIMSEGRCYLSSYLTGESPNTVGACSPARFVRWQQTPQGLESRLNEVLIDRYQDGENAGYPTLCKGRYLVDGERYHALEEPTSLNTLELLPELMAANIASVKIEGRQRSPAYVSQVAKVWRQAIDRCKADPQNFVPQSAWMETLGSMSEGTQTTLGAYHRKWQ

SEQ ID NO: 18531 - protein, 249 aa, Escherichia coli; identical to SEQ ID NO: 4602

SEQ ID NO: 18532 - protein, 162 aa, Escherichia coli; identical to SEQ ID NO: 1967

SEQ ID NO: 18533 - protein, 412 aa, Escherichia coli; identical to SEQ ID NO: 4002

SEQ ID NO: 18534 - protein, 231 aa, Escherichia coli
MMKHMRIWAVLASFLVFFYIPQSYAGVALGATRVIYPEGQKQVQLAVTNNDDKSSYLIQSWIENVEGKKDARFVITPPLFSMQGKKENTLRIIDATNGQMPEDRESLFWVNVKAIPAMDKAKTGENYLQFAIVSRIKLLYRPQGLVIPPEQAPGKLEFTRENGGLTLFNPTPYYLTVTDLKAGNKSLENTMVPPQGKVTVNIPGGYTGGDITYKTINDYGALTEQVRGVVK

SEQ ID NO: 18535 - protein, 729 aa, Escherichia coli; identical to SEQ ID NO: 4557

SEQ ID NO: 18536 - protein, 551 aa, Escherichia coli; identical to SEQ ID NO: 2452

SEQ ID NO: 18537 - protein, 360 aa, Escherichia coli; identical to SEQ ID NO: 3862

SEQ ID NO: 18538 - protein, 365 aa, Escherichia coli
MIKFLSALILLLVTTAAQAERIRDLTSVQGVRQNSLIGYGLVVGLDGTGDQTTQTPFTTQTLNNMLSQLGITVPTGTNMQLKNVAAVMVTASLPPFGRQGQTIDVVVSSMGNAKSLRGGTLLMTPLKGVDSQVYALAQGNILVGGAGASAGGSSVQVNQLNGGRITNGAVIERELPSQFGVGNTLNLQLNDEDFSMAQQIADTINRVRGYGSATALDARTIQVRVPSGNSSQVRFLADIQNMQVNVTPQDAKVVINSRTGSVVMNREVTLDSCAVAQGNLSVTVNRQANVSQPDTPFGGGQTVVTPQMQIDLRQSGGSLQSVRSSASLNNVVRALNALGATPMDLMSILQSMQSAGCLRAKLEII

SEQ ID NO: 18539 - protein, 232 aa, Escherichia coli; identical to SEQ ID NO: 2087

SEQ ID NO: 18540 - protein, 659 aa, Escherichia coli; identical to SEQ ID NO: 4027

SEQ ID NO: 18541 - protein, 660 aa, Escherichia coli; identical to SEQ ID NO: 7233

SEQ ID NO: 18542 - protein, 729 aa, Escherichia coli; identical to SEQ ID NO: 4015

SEQ ID NO: 18543 - protein, 478 aa, Escherichia coli; identical to SEQ ID NO: 2405

SEQ ID NO: 18544 - protein, 365 aa, Escherichia coli; identical to SEQ ID NO: 2102

SEQ ID NO: 18545 - protein, 402 aa, Escherichia coli; identical to SEQ ID NO: 4017

SEQ ID NO: 18546 - protein, 511 aa, Escherichia coli; identical to SEQ ID NO: 2457

SEQ ID NO: 18547 - protein, 360 aa, Escherichia coli; identical to SEQ ID NO: 4018

SEQ ID NO: 18548 - protein, 334 aa, Escherichia coli; identical to SEQ ID NO: 2741

SEQ ID NO: 18549 - protein, 673 aa, Escherichia coli; identical to SEQ ID NO: 2919

SEQ ID NO: 18550 - protein, 678 aa, Escherichia coli; identical to SEQ ID NO: 4005

SEQ ID NO: 18551 - protein, 567 aa, Escherichia coli; identical to SEQ ID NO: 4028

SEQ ID NO: 18552 - protein, 366 aa, Escherichia coli; identical to SEQ ID NO: 4014

SEQ ID NO: 18553 - protein, 656 aa, Escherichia coli; identical to SEQ ID NO: 4560

SEQ ID NO: 18554 - protein, 243 aa, Escherichia coli; identical to SEQ ID NO: 4044

SEQ ID NO: 18555 - protein, 331 aa, Escherichia coli; identical to SEQ ID NO: 4559

SEQ ID NO: 18556 - protein, 753 aa, Escherichia coli; identical to SEQ ID NO: 6655

SEQ ID NO: 18557 - protein, 267 aa, Escherichia coli; identical to SEQ ID NO: 14939

SEQ ID NO: 18558 - protein, 193 aa, Escherichia coli; identical to SEQ ID NO: 2246

SEQ ID NO: 18559 - protein, 208 aa, Escherichia coli; identical to SEQ ID NO: 1948

SEQ ID NO: 18560 - protein, 371 aa, Escherichia coli
MPESAMQNWIKAAAIAVSLALPGVALAQSLESLVNVQGVRENQLVGYSLVVGLDGTGDKNQVKFTNQTITNMLRQFGVQLPNKIDPKVKNVAAVAVSATLPPMYSRGQTIDVTVSSIGDAKSIRGGTLLLTQLHGADGEVYALAQGSVVVGGMNATGASGSSVTVNTPTAGLIPNGATVEREIPSDFQMGDTITLNLKRPSFKDANNIAAAINASFGGIATAQSSTNVTVRAPTSPGARVAFMSQLDDVQVQAEKIRARVVFNSRTGTVVMGDGIALHAAAVSHGSLTVSINETSNVSQPNAFAGGRTAVTPQSNIAVNHARPGVVSLPESSSLKTLVNALNSLGATPDDIMSILQALHEAGALDADLEVI

SEQ ID NO: 18561 - protein, 224 aa, Escherichia coli; identical to SEQ ID NO: 4063

SEQ ID NO: 18562 - protein, 191 aa, Escherichia coli; identical to SEQ ID NO: 2727

SEQ ID NO: 18563 - protein, 678 aa, Escherichia coli; identical to SEQ ID NO: 2230

SEQ ID NO: 18564 - protein, 224 aa, Escherichia coli; identical to SEQ ID NO: 3792

SEQ ID NO: 18565 - protein, 119 aa, Escherichia coli; identical to SEQ ID NO: 5512

SEQ ID NO: 18566 - protein, 227 aa, Escherichia coli; identical to SEQ ID NO: 4009

SEQ ID NO: 18567 - protein, 472 aa, Escherichia coli; identical to SEQ ID NO: 7769

SEQ ID NO: 18568 - protein, 351 aa, Escherichia coli; identical to SEQ ID NO: 2872

SEQ ID NO: 18569 - protein, 243 aa, Escherichia coli; identical to SEQ ID NO: 4122

SEQ ID NO: 18570 - protein, 869 aa, Escherichia coli
  MOD_RES (681)..(681): Any amino acid
MKIPTTTDIPQRYTWCLAGICYSSLAILPSFLSYAESYFNPAFLLENGTFVADLSRFERGNHQPAGVYRVDLWRNDEFIGSQDIVFESTTENTGDKSGGLMPCFNQVLLERIGLNSSAFPELAQQQNNKCINLLKAVPDATINFDFAAMRLNITIPQIALLSSAHGYIPPEEWDEGIPALLLNYNFTGNRGNGNDSYFFSELSGINIGPWRLRNNGSWNYFRGNGYHSEQWNNIGTWVQRAIIPLKSELVMGDGNTGSDIFDGVGFRGVRLYSSDNMYPDSQQGFAPTVRGIARTAAQLTIRQNGFIIYQSYVSPGAFEITDLHPTSSNGDLDVTIDERDGNQQNYTIPYSTVPILQREGRFKFDLTAGDFRSGNSQQSSPFFFQGTALGGLPQEFTAYGGTQLSANYTAFLLGLGRNLGNWGAVSLDVTHARSQLADDSRHEGDSIRFLYAKSMNTFGTNFQLMGYRYSTQGFYTLDDVAYRRMEGYEYDYDYDGEHRDEPIIVNYHNLRFSRKDRLQLNISQSLNDFGSLYISGTHQKYWNTSDSDTWYQVGYTSSWVGISYSLSFSWNESVGIPDNERIVGLNVSVPFNVLTKRRYTRENALDRAYASFNANRNSNGQNSWLAGVGGTLLEGHNLSYHVSQGDTSNNGYTGSATANWQAAYGTLGVGYNYDRDQHDVXWQLSGGVVGHENGITLSQPLGDTNVLIKAPGAGGVRIENQTGILTDWRGYAVMPYATVYRYNRIALDTNTMGNSIDVEKNISSVVPTQGALVRANFDTRIGVRALITVTQGGKPVPFGSLVRENSTGITSMVGDDGQVYLSGAPLSGELLVQWGDGANSRCIAHYVLPKQSLQQAVTVISAVCTHPGS

SEQ ID NO: 18571 - protein, 878 aa, Escherichia coli; identical to SEQ ID NO: 2855

SEQ ID NO: 18572 - protein, 883 aa, Escherichia coli; identical to SEQ ID NO: 2822

SEQ ID NO: 18573 - protein, 368 aa, Escherichia coli; identical to SEQ ID NO: 2374

SEQ ID NO: 18574 - protein, 878 aa, Escherichia coli; identical to SEQ ID NO: 2077

SEQ ID NO: 18575 - protein, 161 aa, Escherichia coli; identical to SEQ ID NO: 2582

SEQ ID NO: 18576 - protein, 866 aa, Escherichia coli; identical to SEQ ID NO: 2004

SEQ ID NO: 18577 - protein, 838 aa, Escherichia coli; identical to SEQ ID NO: 2795

SEQ ID NO: 18578 - protein, 897 aa, Escherichia coli; identical to SEQ ID NO: 1908

SEQ ID NO: 18579 - protein, 879 aa, Escherichia coli
  MOD_RES (5)..(5): Any amino acid
  MOD_RES (205)..(205): Any amino acid
  MOD_RES (582)..(582): Any amino acid
MPDHXLFRLRVLPCCVALAMSGSYVNAWAENEIQFDSRFLELKGDTKIDLKRFSSQGYVEPGKYNLQVQLNKQPLTEEYDIYWYASENDASKTYACLTPELVAQFGLKEDVAKNLQWIHDGKCLKPGQLEGIDIKADLSQSALVISLPQAYLEYTDINWDPPSRWDDGISGLIADYSITAQTRHEENGGDDSNEISGNGTVGVNXGAWRLRADWQTDYLHSKSNDDDVINGDDTQKNWEWSRYYAWRALPSLKAKLGLGEDYLNSDIFDGFNYVGGSISTDDQMLPPNLRGYAPDISGVAHTTAKVTVSQLGRVIYETQVPAGPFRIQDLGDSVSGTLHIRIEEQNGQVQEYDINTASMPFLTRPGQVRYKLMMGRPQEWGHHVEGGFFSGGEASWGIANGWSLYGGALADEHYQSAALGVGRDLSVFGAVAFDITHSHTRLDKETAYGKGSLDGNSFRLSYSKDFDELNSRVTFAGYRFSEENFMTMSEYLDASDSEMVRTGNDKEMYTATYNQNFRDAGVSVYLNYTRHTYWDRDEQTNYNVMLSHYFNLGSIRNMSISMTGYRYEYDNQADKGVYISLXMPWGDSSTISYNGNYGSGSDSSQVGYFSRVDDATHYQLNVGTSDNHSSVDGYYSHDGSLAQVDLSANYHEGQYTSAGISLQGGATLTAQGGALHRTQNMGGTRLLIDADGVAGVPVEGNGAAVYTNMFGKAVVADVNNYYRNQAYIDLNNLPENAEATQSVVQGTLTEGAIGYRKFSVISGQKAMAVLRLQDGSYPPFGAEVKNDSAQNVGLVDDDGNVYLAGVKPGEHMIVSWGGVAHCDIHLPDPLPADLFNGLLLPCQQTGAISPSMPHEIKPVIQEQTQQVMPTEAPVSVSAN

SEQ ID NO: 18580 - protein, 826 aa, Escherichia coli; identical to SEQ ID NO: 2758

SEQ ID NO: 18581 - protein, 878 aa, Escherichia coli
  MOD_RES (647)..(647): Any amino acid
MSYLNLRLYQRNTQCLHIRKHRLAGFFVRLFVACAFAVQAPLSSAELYFNPRFLADDPQAVADLSRFENGQELPPGTYRVDIYLNNGYMATRDVTFNTGDSEQGIVPCLTRAQLASMGLNTASVAGMNLLADDACVPLTTMVQDATAHLDVGQQRLNLTIPQAFMSNRARGYIPPELWDPGINAGLLNYNFSGNSVQNRIGGNSHYAYLNLQSGLNIGAWRLRDNTTWSYNSSDRSSGSKNKWQHINTWLERDIIPLRSRLTLGDGYTQGDIFDGINFRGAQLASDDNMLPDSQRGFAPVIHGIARGTAQVTIKQNGYDIYNSTVPPGPFTINDIYAAGNSGDLQVTIKEADGSTQIFTVPYSSVPLLQREGHTRYSITAGEYRSGNAQQEKPRFFQSTLLHGLPAGWTIYGGTQLADRYRAFNFGIGKNMGALGALSVDMTQANSTLPDDSQHDGQSVRFLYNKSLNESGTNIQLVGYRYSTSGYFNFADTTYSRMNGYNIETQDGVIQVKPKFTDYYNLAYNKRGKLQLTVTQQLGRSSTLYLSGSHQTYWGTSNVDEQFQAGLNTAFEDINWTLSYSLTKNAWQKGRDQMLARNVNIPFSHWLRSDSKSQWRHASASYSMSHDLNGRMTNLAGVYGTLLEDNNXSYSVQTGYAGGGDGNSGSTGYATLNYRGGYGNANIGYSHSDDIKQLYYGVSGGVLAHANGVTLGQPLNDTVVLVKAPGAKDAKVENQTGVRTDWRGYAVLPYATEYRENRVALDTNTLADNVDLDNAVANVVPTRGAIVRAEFKARVGIKLLMTLTHNNKPLPFGAMVTSESSQSSGIVADNGQVYLSGMPLAGKVQVKWGEEENAHCVANYQLPPESQQQLLTQLSAECR

SEQ ID NO: 18582 - protein, 879 aa, Escherichia coli
MPDHSLFRLRVLPCCVALAMSGSYVNAWAENEIQFDSRFLELKGDTKIDLKRFSSQGYVEPGKYNLQVQLNKQPLTEEYDIYWYASENDASKTYACLTPELVAQFGLKEDVAKNLQWIHDGKCLKPGQLEGIDIKADLSQSALVISLPQAYLEYTDINWDPPSRWDDGISGLIADYSITAQTRHEENGGDDSNEISGNGTVGVNLGAWRLRADWQTDYLHSKSNDDDVINGDDTQKNWEWSRYYAWRALPSLKAKLGLGEDYLNSDIFDGFNYVGGSISTDDQMLPPNLRGYAPDISGVAHTTAKVTVSQLGRVIYETQVPAGPFRIQDLGDSVSGTLHIRIEEQNGQVQEYDINTASMPFLTRPGQVRYKLMMGRPQEWGHHVEGGFFSGGEASWGIANGWSLYGGALADEHYQSAALGVGRDLSVFGAVAFDITHSHTRLDKETAYGKGSLDGNSFRLSYSKDFDELNSRVTFAGYRFSEENFMTMSEYLDASDSEMVRTGNDKEMYTATYNQNFRDAGVSVYLNYTRHTYWDRDEQTNYNVMLSHYFNLGSIRNMSISMTGYRYEYDNQADKGVYISLSMPWGDSSTISYNGNYGSGSDSSQVGYFSRVDDATHYQLNVGTSDNHSSVDGYYSHDGSLAQVDLSANYHEGQYTSAGISLQGGATLTAQGGALHRTQNMGGTRLLIDADGVAGVPVEGNGAAVYTNMFGKAVVADVNNYYRNQAYIDLNNLPENAEATQSVVQGTLTEGAIGYRKFSVISGQKAMAVLRLQDGSYPPFGAEVKNDSAQNVGLVDDDGNVYLAGVKPGEHMIVSWGGVAHCDIHLPDPLPADLFNGLLLPCQQTGAISPSMPHEIKPVIQEQTQQVMPTEAPVSVSAN

SEQ ID NO: 18583 - protein, 840 aa, Escherichia coli; identical to SEQ ID NO: 3591

SEQ ID NO: 18584 - protein, 723 aa, Escherichia coli
MDAVNIYRLSVLSCLAMVTPPALTAEFNLNVLDKSIRDSVDISLLNQKGVVAPGDYFVSVTVNNNKISNGQQIRWQKSGDKIIPCINESLIELFGLKSDFRKKLPAIKECVDFSVFPEIIFTFDQANQQLNITIPQAWLAWHSENWTPPSTWNNGIPGFLMDYNLFASTYRPQSGSSSNNLNAYGTTGLNAGAWRLRSDYQLSQSDSGDNREQSGAISRTYLFRPLPQIGSRLTLGETDFSSNIFDGFSYTGAALASDDRMLPWELRGYAPQISGIAQTNATVTISHSGRVIYQKKVPPGPFIIDDLNQSVQGTLDVKVSEEDGRVNNFQVSAASTPFLTRQGQVRYKLAAGRPRSSMSHHTEDETFISHEVSWGMLSNTSLYGGMLLAGDDYRSGALGIGQNMLWMGALSFDVTWADSHFDTQQDEQGYSYRFNYSKQVDATNSTISLAAYRFSDRHFHSYANYIDHKYNDADAQDEKQTISLSFGQPITLLNLNLYANILHQSWWNADTSTTANITVGFNVDIGDWKDISVSTSFNTTHYEDKDRDNQIYFSISLPIGESGRLGYDMQNNSNTTTHRMSWNDTLDERNSWGMSAGIQSDRPDNGAQVSGNYQHLSSAGEWDLTGTYAANDYTSASASWSGSFTATQHGAAFHRRSSTNEPRLMVSTDGVGDIPIQGNIDYTNRFGIAVVPFVSSYQPTTVAVNMNDLPDGVTVSENVVKET

SEQ ID NO: 18585 - protein, 865 aa, Escherichia coli; identical to SEQ ID NO: 2167

SEQ ID NO: 18586 - protein, 237 aa, Escherichia coli; identical to SEQ ID NO: 1814

SEQ ID NO: 18587 - protein, 793 aa, Escherichia coli; identical to SEQ ID NO: 2768

SEQ ID NO: 18588 - protein, 867 aa, Escherichia coli; identical to SEQ ID NO: 2581

SEQ ID NO: 18589 - protein, 869 aa, Escherichia coli; identical to SEQ ID NO: 2903

SEQ ID NO: 18590 - protein, 840 aa, Escherichia coli
  MOD_RES (811)..(811): Any amino acid
MNKSVVSISAAMLVLLCQPVMGSEISPATPSDEDNYTFDPQLFRGSRFSQSSLAKLTTRESVAPGNYKMDIYTNNKLSGSWNVTFKEAADGRVLPCLTPEVADAIGLKTGEDKGEKDPVCTFAKELAPGITSQTQLSQLRLDLSVPQSQLISRPRGYVPPSELDTGASLAFMNYIANYYNVAYSGQNAHSQRSLWASFNGGINLGAWQYRQLSNMTWDNDKGNQWNNIRSYLQRPLPAINSQLMMGQLITSGRFFSGLSYHGVSLATDERMLPDSMRGYAPTIRGVAATNARVSVMQNGHEIYQTTVAPGPFEINDLYPTSYSGDLDVTVTEANGAVSRFSVPFSAVPESMRPGTSRYNVEVGKTQDSGDDSMFGDLTWQHGMTNTLTFNSGSRIADGYQALMLGGVYGSSLGAFGANLTWSHARVPESEAQSGWMSQLTWSKTFQPTSTTVSLAGYRYSTSGYRDLADVLGERHAASNKQSWDSSQWRQQSRFDLTLSQSLANYGNLFVSGSTQNYRGGKSRDTQLQLGYSNSFSHGISMNLSVGRQRMGGYKDNSDDMQTVTSLSFSFPLGGNGPRVPSLSNSWTHSTDGSSQLQSSLTGMLDEAQTTNYSLNVMRDQQYKQTTLSGNMQKRFSQTTVGLNASKGQDYWQASGNVQGAMAVHGGGITFGPYLGETFALVEAKGAEGAKVYNSSQLEINDSGYALVPAVTPYRYNRISLDPQGMDGDAELVDSERQVAPVAGAAVKVIFRTRPGKALLIKSRMADGSELPMGADVLDENNTVVGIAGQGGQIYLRTEQTKGHLSVRWGEXANDSCQLPFDISGKDSNSPIIRLNETCQS

SEQ ID NO: 18591 - protein, 266 aa, Escherichia coli; identical to SEQ ID NO: 1894

SEQ ID NO: 18592 - protein, 815 aa, Escherichia coli; identical to SEQ ID NO: 2698

SEQ ID NO: 18593 - protein, 720 aa, Escherichia coli; identical to SEQ ID NO: 6178

SEQ ID NO: 18594 - protein, 861 aa, Escherichia coli
  MOD_RES (48)..(48): Any amino acid
  MOD_RES (50)..(50): Any amino acid
  MOD_RES (57)..(57): Any amino acid
  MOD_RES (302)..(302): Any amino acid
  MOD_RES (483)..(483): Any amino acid
  MOD_RES (485)..(485): Any amino acid
  MOD_RES (487)..(487): Any amino acid
  MOD_RES (491)..(491): Any amino acid
  MOD_RES (497)..(497): Any amino acid
  MOD_RES (499)..(499): Any amino acid
  MOD_RES (501)..(501): Any amino acid
  MOD_RES (506)..(506): Any amino acid
  MOD_RES (509)..(509): Any amino acid
  MOD_RES (511)..(511): Any amino acid
  MOD_RES (515)..(515): Any amino acid
  MOD_RES (518)..(518): Any amino acid
  MOD_RES (521)..(522): Any amino acid
  MOD_RES (525)..(526): Any amino acid
MWNLLRRTRKNQKSGRDVREVGWRSLFQAVAEPFAGAWQQGVKADPEXVXSFHAVFXCISLISQDIAKMRLRLMQTDAHGIRRETRRGDIARLCRRPNAQQNRIQFFELWLNAKLRHGNTVVLKIRNARGQIKELRILDWSRVEPLVADDGEVFYRITPDRNCGITEAVTVPAREVIHDRFNCFFHPLIGLPPVYAAGLAATQGHHIQENSTSFFRNGGRPSGVIEIPGSITEENAKKLKSNWDSGYTGENAGKTAILSNGAKYNPTTFSPVDAQTVEQLKMTAEIVCSVFRVPAYKIGVGXPPSSDNVEALEQQYYSQCLQTLIESIELLLDEALETGENESTEFDVTTLLRMDSERRMKTLGDAVKNTLLTPNEARKRENLPPLAGGDALYLQQQNYSLEALSRRDAREDPFASAGKTVSSQLPDGASDGNKAISETEHDAVKAMFRGDTEKMTERELSIIRALGEEFSTVLADLQRTFEXKXAXQAQXFEEKLXSXSXVLQKXVTXDXVRPXLZXMVXXAVXXIPVPRDGRDYDPDVLQKAVNDAVANIPVPADGKSITPDDVRPMLEQMVKEAVSHIPVPRDGRDYDPDVLQKAVNDAVAKIPVPADGKSITPDDVHPMLEQMVKEAVSHIPVPRDGRDYDPDVLQKAVNDAVAKIPVPADGKSITPDDVHPMLEQMVKEAVSHIPVPRDGRDYDPDVLQKAVLEAVSALPAPQDGRDATALEILPAIDDQKSFPRGSYATHQGGLWRAYEKTYGMRGWECLVDGVADIDVSMTGERSFSVVVRQSSGQRTEKTFSLPVMLYRGVFRIGETYHPGDTVTWGGSLWHCNSMTGDKPGEAHSSGWTLAAKRGRDAGGGK

SEQ ID NO: 18595 - protein, 407 aa, Escherichia coli; identical to SEQ ID NO: 10982

SEQ ID NO: 18596 - protein, 229 aa, Escherichia coli; identical to SEQ ID NO: 4047

SEQ ID NO: 18597 - protein, 232 aa, Escherichia coli
  MOD_RES (223)..(223): Any amino acid
MDRMMKSKFVALALSLFLSQSVLAGGVGLSSTRVIYDGSKKEASLTVQNKSKTEEFLIQSWVDDAAGSKKTPFIITPPLFKLDPEKNNILRIVNITPGLPQDRESVYWVNVKAIPSKSDDSENKNVLQIAVRTRIKLFYRPAGLKGDVKTAPNELRFTRNGNQLRVDNPTVFNITFNQFFANDKEIEKAGMVPAKGALNITLPAGVGSVSKIKYNTINDFGSXAEMITKNVD

SEQ ID NO: 18598 - protein, 715 aa, Escherichia coli; identical to SEQ ID NO: 3971

SEQ ID NO: 18599 - protein, 229 aa, Escherichia coli; identical to SEQ ID NO: 3589

SEQ ID NO: 18600 - protein, 209 aa, Escherichia coli; identical to SEQ ID NO: 3547

SEQ ID NO: 18601 - protein, 241 aa, Escherichia coli; identical to SEQ ID NO: 3582

SEQ ID NO: 18602 - protein, 642 aa, Escherichia coli
MFTTVILGAIPGWGAEFSANFKDTDIQEFINTVSKNLHKTVIINPDVQGTITVRSYDMLNEEQYYQFFLSVLDVYGFAVVDMHNGILKVVRSKDAKTSAVPVASDVSPGTGDEVVTRVVPVSNVAARDLAPLLRQLNDNAGAGSVVHYEPSNVLLMTGRAAVMKRLMEIVERVDKVGNRSVATVPLTYASATDVARLVTELTKETDKTAIPAWMTAKLVADERTNSVLVSGEPISQQRIISIIKQLDRQEDVQGNTKVIYLKYAKAKDLVEVLTGISSSIENDSKKSPSTEALRKGVTIKSHEQTNALILTGAPDVIRDLENVISQLDIRRPQVLVEAIIAEIQDADGLNLGIQWVNKHAGVAQFTSTGLPITTMVQTRQNEILDSDQSNALSMFNGIAAGFYQGNWAMLLTALSTSSKNDILATPSIVTLDNMEATFNVGQEVPVLSGSQTTSGDNIFNTVERKTVGIKLRVKPQINEGDSVLLEIEQEVSGVADTAVATTTDLGATFNTRTVTNAMLVGNGETVVVGGLLDKSIRGSESKVPLLGDIPVLGHLFRAKSEQTAKRNLMLFIRPTIIRERDGFRHASAEKYQSFNQEQVQSRGKETTALTLNEEQLRLSPDQDDTAFRKVKAAIAAFYAQEM

SEQ ID NO: 18603 - protein, 243 aa, Escherichia coli
MLMFPLVKKTVSALFVSTLLASAPAFADIIISGTRIIYNADKKDVNVRLENKGNRPLLIQNWLDTGDDNADPSQIKVPFTATPPVSRVEPKRGQTVKVMYTGATALPKDRESVYWFNVLEVPPKPKDAEADKNLLQLAFRTRIKLFYRPSGLQGEPAEAPAKITWKLNNAQLQANNPTPYYVSFNEVKLESGGKTYNVNSSMVTPFSQASFGVTSLPGSVSSGKVVFKAINDFGGNIDGSATF

SEQ ID NO: 18604 - protein, 239 aa, Escherichia coli; identical to SEQ ID NO: 4453

SEQ ID NO: 18605 - protein, 518 aa, Escherichia coli; identical to SEQ ID NO: 2349

SEQ ID NO: 18606 - protein, 774 aa, Escherichia coli; identical to SEQ ID NO: 2066

SEQ ID NO: 18607 - protein, 747 aa, Escherichia coli; identical to SEQ ID NO: 2072

SEQ ID NO: 18608 - protein, 784 aa, Escherichia coli; identical to SEQ ID NO: 2244

SEQ ID NO: 18609 - protein, 191 aa, Escherichia coli; identical to SEQ ID NO: 2727

SEQ ID NO: 18610 - protein, 239 aa, Escherichia coli; identical to SEQ ID NO: 2759

SEQ ID NO: 18611 - protein, 249 aa, Escherichia coli; identical to SEQ ID NO: 2793

SEQ ID NO: 18612 - protein, 663 aa, Escherichia coli; identical to SEQ ID NO: 1910

SEQ ID NO: 18613 - protein, 650 aa, Escherichia coli; identical to SEQ ID NO: 2146

SEQ ID NO: 18614 - protein, 678 aa, Escherichia coli; identical to SEQ ID NO: 2231

SEQ ID NO: 18615 - protein, 331 aa, Escherichia coli [sequence omitted]

SEQ ID NO: 18616 - protein, 240 aa, Escherichia coli
  MOD_RES (24)..(24): Any amino acid
MAAIFMAASINIRGIKMKGLLSLXISSMIFPAHAGMVIFGTRIIYPAEQKEVMVQLMNQGNRSSLMQAWIDDGDTSLPPEKIQVPFMLTPPVVKVAANSGQQIKIKIMPNKLPSNKESIFYLNVLDIPPNSPEDEGKNALKFAMQNRIKLFYRPAGIAPVNKTTFKKLRVSRSGNNVVIKNDSPNWVTISDVKANNVKVNYETIMIAPQESQNVSEKNNNANGWQLTIIDDHGNYISDKI

SEQ ID NO: 18617 - protein, 316 aa, Escherichia coli
  MOD_RES (107)..(107): Any amino acid
MMRLRIFRYRRTAKCITPDDVRPMLEQMVKKAVSHIPAPRDGRDYDPEVLKQAVNDAVANIPVPADGKSITPDDVRPMLEQMVKEAVSHIPAPRDGRDYDPEVLKQXVNDAVANIPVPADGKSITPBDVRPMLEQMVKEAVSHIPVPRDGRDYDPDVLQKAVLDAVRALPAPQDGRDATALEIIPAIDDQKSFPRGTYATHQGGLWRAYEKTHGMRGWECLVDGVADIDVSMTGERSFTVVVRQSSGQRTEKTFSLPVMLYRGVFRAGETYHPGDTVTWGGSLWHCNSMTGDKPGEAHSSGWTLAAKRGRDAGGGK

SEQ ID NO: 18618 - protein, 760 aa, Escherichia coli; identical to SEQ ID NO: 2080

SEQ ID NO: 18619 - protein, 236 aa, Escherichia coli; identical to SEQ ID NO: 3970

SEQ ID NO: 18620 - protein, 118 aa, Escherichia coli; identical to SEQ ID NO: 2737

SEQ ID NO: 18621 - protein, 224 aa, Escherichia coli; identical to SEQ ID NO: 3604

SEQ ID NO: 18622 - protein, 213 aa, Escherichia coli; identical to SEQ ID NO: 2232

SEQ ID NO: 18623 - protein, 233 aa, Escherichia coli; identical to SEQ ID NO: 3548

SEQ ID NO: 18624 - protein, 231 aa, Escherichia coli; identical to SEQ ID NO: 2794

SEQ ID NO: 18625 - protein, 241 aa, Escherichia coli; identical to SEQ ID NO: 2076

SEQ ID NO: 18626 - protein, 230 aa, Escherichia coli; identical to SEQ ID NO: 2580

SEQ ID NO: 18627 - protein, 700 aa, Escherichia coli; identical to SEQ ID NO: 2926

SEQ ID NO: 18628 - protein, 729 aa, Escherichia coli
  MOD_RES (35)..(35): Any amino acid
MLSTQFNRDNQYQAITKPSLLAGCIALALLPSAAXAAPATEETVIVEGSATAPDDGENDYSVTSTSAGTKMQMTQRDIPQSVTIVSQQRMEDQQLQTLGEVMENTLGISKSQADSDRALYYSRGFQIDNYMVDGIPTYFESRWNLGDALSDMALFERVEVVRGATGLMTGTGNPSAAINMVRKHATSREFKGDVSAEYGSWNKERYVADLQSPLTEDGKIRARIVGGYQNNDSWLDRYNSEKTFFSGIVDADLGDLTTLSAGYEYQRIDVNSPTWGGLPRWNTDGSSNSYDRARSTAPDWAYNDKEINKVFMTLKQRFADTWQATLNATHSEVEFDSKMMYVDAYVNKADGMLVGPYSNYGPGFDYVGGTGWNSGKRKVDALDLFADGSYELFGRQHNLMFGGSYSKQNNRYFSSWANIFPDEIGSFYNFNGNFPQTDWSPQSLAQDDTTHMKSLYAATRVTLADPLHLILGARYTNWRVDTLTYSMEKNHTTPYAGLVFDINDNWSTYASYTSIFQPQNDRDSSGKYLAPITGNNYELGLKSDWMNSRLTTTLAIFRIEQDNVAQSTGTPIPGSNGETAYKAVDGTVSKGVEFELNGAITDNWQLTFGATRYIAEDNEGNAVNPNLPRTTVKMFTSYRLPVMPELTVGGGVNWQNRVYTDTVTPYGTFRAEQGSYALVDLFTRYQVTKNFSLQGNVNNLFDKTYDTNVEGSIVYGAPRNFSITGTYQF

SEQ ID NO: 18629 - protein, 240 aa, Escherichia coli
MDMEKIRMNIFAYLLVLVFSMSMSSSAFASVVMTGTRIIFPGDAKEKTIQLRNTSDQPYIINIHVEDERGSDKNVPFMPTPQTFRMEAAAGQALRLLYTGNNLPQDRESVFWFSFSQLPYLNKNDKSQNQLILALTNRVKIFYRPSSIVGKSSDAPKNLTYQVKQNRIEVTNPTGYYVTIRAAELLNNGKKVPLANSVMIAPQSTTEWTLPSGISVAPGAQIHLVTVNDYGVNVTSEHAL

SEQ ID NO: 18630 - protein, 659 aa, Escherichia coli; identical to SEQ ID NO: 2942

SEQ ID NO: 18631 - protein, 250 aa, Escherichia coli; identical to SEQ ID NO: 2761

SEQ ID NO: 18632 - protein, 236 aa, Escherichia coli; identical to SEQ ID NO: 2726

SEQ ID NO: 18633 - protein, 242 aa, Escherichia coli; identical to SEQ ID NO: 2697

SEQ ID NO: 18634 - protein, 585 aa, Escherichia coli; identical to SEQ ID NO: 2889

SEQ ID NO: 18635 - protein, 729 aa, Escherichia coli; identical to SEQ ID NO: 2948

SEQ ID NO: 18636 - protein, 367 aa, Escherichia coli; identical to SEQ ID NO: 2433

SEQ ID NO: 18637 - protein, 362 aa, Escherichia coli; identical to SEQ ID NO: 2434

SEQ ID NO: 18638 - protein, 614 aa, Escherichia coli
MIKKASLLTACSVTAFSAWAQDTSPDTLVVTANRFEQPRSTVLAPTTVVTRQDIDRWQSTSVNDVLRRLPGVDITQNGGSGQLSSIFIRGTNASHVLVLIDGVRLNLAGVSGSADLSQFPIALVQRVEYIRGPRSAVYGSDAIGGVVNIITTRDEPGTEISGGWGSNSYQNYDVSTQQQLGDKTRVTLLGDYAHTHGYDVVAYGNTGTQAQTDNDGFLSKTLYGALEHNFTDAWSGFVRGYGYDNRTNYDAYYSPGSPLLDTRKLYSQSWDAGLRYNGELIKSQLITSYSHSKDYNYDPHYGRYDSSATLDEMKQYTVQWANNVIVGHGSIGAGVDWQKQTTTPGTGYVEDGYDQRNTGIYLTGLQQVGDFTFEGAARSDDNSQFGRHGTWQTSAGWEFIEGYRFIASYGTSYKAPNLGQLYGFYGNPNLDPEKSKQWEGAFEGLTAGVNWRISGYRNDVSDLIDYDDHTLKYYNEGKARIKGVEATANFDTGPLTHTVSYDYVDARNAITDTPLLRRAKQQVKYQLDWQLYDFDWGITYQYLGTRYDKDYSSYPYQTVKMGGVSLWDLAVAYPVTSHLTVRGKIANLFDKDYETVYGYQTAGREYTLSGSYTF

SEQ ID NO: 18639 - protein, 233 aa, Escherichia coli; identical to SEQ ID NO: 2006

SEQ ID NO: 18640 - protein, 191 aa, Escherichia coli
  MOD_RES (109)..(109): Any amino acid
MSTSYDFDFGLSLGAAYSNSDRTDNQVHKGTHNTRYGDRFDATAGGETAEAWTVGAKYDANNVYLAAMYAEPRNMTGYGDADAIANKTQNFEVVAQYQFDFGLRPSIAXLQSKGKDLGGVNSDNFDSQGNHHYTNKDLVKYVDIGMTYYFNKNMSTYVDYKINLLDNDDDFYKENGIATDDIVAVGLVYQF

SEQ ID NO: 18641 - protein, 246 aa, Escherichia coli; identical to SEQ ID NO: 1985

SEQ ID NO: 18642 - protein, 412 aa, Escherichia coli; identical to SEQ ID NO: 2161

SEQ ID NO: 18643 - protein, 746 aa, Escherichia coli; identical to SEQ ID NO: 2069

SEQ ID NO: 18644 - protein, 351 aa, Escherichia coli; identical to SEQ ID NO: 2519

SEQ ID NO: 18645 - protein, 719 aa, Escherichia coli
  MOD_RES (702)..(702): Any amino acid
MRDEMLYNIPCRIYILSTLSLCISGIVSTATATSSETKISNEETLVVTTNRSASNLWESPATIQVIDQQTLQNSTNASIADNLQDIPGVEITDNSLAGRKQIRIRGEASSRVLILIDGQEVTYQRAGDNYGVGLLIDESALERVEVVKGPYSVLYGSQAIGGIVNFITKKGGDKLASGVVKAVYNSATAGWEESIAVQGSIGGFDYRINGSYSDQGNRDTPDGRLPNTNYRNNSQGVWLGYNSGNHRFGLSLDRYRLATQTYYEDPDGSYEAFSVKIPKLEREKVGVFYDTDVDGDYLKKIHFDAYEQTIQRQFANEVKTTQPVPSPMIQALTVHNKTDTHDKQYTQAVTLQSHFSLPANNELVTGAQYKQDRVSQRSGGMTSSKSLTGFINKETRTRSYYESEQSTVSLFAQNDWQFADHWTWTMGVRQYWLSSKLTRGDGVSYTAGIISDTSLARESASDHEMVTSTSLRYSGFDNLELRAAFAQGYVFPTLSQLFMQTSAGGSVTYGNPDLKAEHSNNFELGARYNGNQWLIDSAVYYSEAKDYIASLICDGSIVCNGNTNSSRSSYYYYDNIDRAKTWGLEISAEYNGWVFSPYISGNLIRRQYETSTLKTTNTGEPAINGRIGLKHTLVMGQANIISDVFIRAASSAKDDSNGTETNVPGWATLNFAVNTEFGNEDQYRINLALNNLTDKRYRTAHXTIPAAGFNAAIGFVWNF

SEQ ID NO: 18646 - protein, 656 aa, Escherichia coli; identical to SEQ ID NO: 4901

SEQ ID NO: 18647 - protein, 656 aa, Escherichia coli
  MOD_RES (87)..(87): Any amino acid
MRLKKHYLCTALSLAFTQQAVAAQESDSLTVWSSPVSSTTTTVLDQPTMKALDKQNVAQALSVVPGVVLQKSGSRNEEQVKVRGFDXRQVPVYFDGVPIYVPYDGNLDLARILTNNLGAVEVSKGYSSLLQGPNQMGGAINITTQKPTKPLEASLGYRQGWSRSQDNAYDMHASFAASSELGYLQVSGSQLKQDFLGLPHGVNNDIAGKHGKMINSSADDKRGIVKLGFTPRENDEYTLTYIKQDGEKDNPPYSGNSGQKSRYWQWPEYDKESFYYQGTTQLNDRFTLKSRLYRDTFENTLMMYNSLADLKNKKGSYSHYSDYSDGAGLQLAADVRENDLLTFAVNWKDDVHREKGAPHAAYDRYEDRTWSLASEYQWAAADNVDVVAGISYDWRDSVEAKKHEKDGSITHYDDNNQSAFNWQVMGKYHFVNEDTLALSYYDRKRFPTLKERYTTSKPAYNQIAIVNPQLKPERARGVDLTWNGAFTHDWGFEVSVYYNRVSDAILSHNIDADTIQNQNSGTVDYSGLDAGIKGKISNILDVGLSYALIHADAKRKDIGKITDLPTQTMTAWMTLKPWEPLSVTLSEEARSSSYSNSDGSQKAAGFAVTHIRADYTLGHGFSVNASVNNLFDTQYAYSEGFVEEGRNFWAGVEYTF

SEQ ID NO: 18648 - protein, 208 aa, Escherichia coli; identical to SEQ ID NO: 1949

SEQ ID NO: 18649 - protein, 659 aa, Escherichia coli
  MOD_RES (421)..(421): Any amino acid
MFRLNPFVRVGLCLSAISCAWPVLAVDDDGETMVVTASSVEQNLKDAPASISVITQEDLQRKPVQNLKDVLKEVPGVQLTNEGDNRKGVSIRGLDSSYTLILVDGKRVNSRNAVFRHNDFDLNWIPVDSIERIEVVRGPMSSLYGSDALGGVVNIITKKIGQKWSGTVTVDTTIQEHRDRGDTYNGQFFTSGPLIDGVLGMKAYGSLAKREKDDPQNSTTTDTGETPRIEGFSSRDGNVEFAWTPNQNHDFTAGYGFDRQDRDSDSLDKNRLERQNYSVSHNGRWDYGTSELKYYGEKVENKNPGNSSPITSESNTVDGKYTLPLTAINQFLTVGGEWRHDKLSDAVNLTGGTSSKTSASQYALFVEDEWRIFEPLALTTGVRMDDHETYGEHWSPRAYLVYNATDTVTVKGGWATAFKAXSLLQLSPDWTSNSCRGACKIVGSPDLKPETSESWELGLYYMGEEGWLEGVESSVTVFRNDVKDRISISRTSDVNAAPGYQNFVGFTANGVPVFSYYNVNKARIQGVETELKIPFNDEWKLSLNYTYNDGRDVSNGENKPLSDLPFHTANGTLDWKPLALEDWSFYVSGHYTGQKRADSATAKTPGGYTIWNTGAAWQVTKDVKLRAGVLNLGDKDLSRDDYSYNEDGRRYFMAVDYRF

SEQ ID NO: 18650 - protein, 729 aa, Escherichia coli; identical to SEQ ID NO: 2074

SEQ ID NO: 18651 - protein, 700 aa, Escherichia coli
  MOD_RES (113)..(113): Any amino acid
  MOD_RES (265)..(265): Any amino acid
MKIVFVRQTVLPALLVLSPVVFAADEQTMIVSAAPQVVSELDTPAAVSVVDGEEMRLATPRINLSESLTGVPGLQVQNRQNYAQDLQLSIRGFGSRSTYGIRGIRLYVDGIPXTMPDGQGQTSNIDLSSVQNVEVLRGPFSALYGNASGGVMNVTTQTGQQPPTIEASSYYGSFGSWRYGLKATGATGDGTQPGDVDYTVSTTRFTTHGYRDHSGAQKNLANAKLGVRIDDASKLSLIFNSVDIKADDPGGLTKAEWKANPQQAXRAEQYDTRKTIKQTQAGLRYERSLSSRDDMSVMMYAGERETTQYQSIPMAPQLNPSHAGSVITLQRHYQGIDSRWTHRGELGVPVTFTTGLNYENMSENRKGYNNFRLNSGMPEYGQKGELRRDERNLMWNIDPYLQTQWQLSEKLSLDAGVRYSSVWFDSNDHYVTPGNGDDSGDASYHKWLPAGSLKYAMTDAWNIYLAAGRGFETPTINELSYRADGQSGMNFGLKPSTNDTIEIGSKTRIGDGLLSLALFQTDTDDEIVVDSSSGGRTTYKNAGKTRRQGAELAWDQRFAGDFRVNASWTWLDATYRSNVCNEQDCNGNRMPGIARNMGFASIGYVPEDGWYAGMEARYMGDIMADDENTAKAPSYTLVGLFTGYKYNYHNLTVDLFGRVDNLFDKEYVGSVIVNESNGRYYEPAPGRNYGVGVNIAWRFE

SEQ ID NO: 18652 - protein, 191 aa, Escherichia coli; identical to SEQ ID NO: 2996

SEQ ID NO: 18653 - protein, 700 aa, Escherichia coli; identical to SEQ ID NO: 2784

SEQ ID NO: 18654 - protein, 826 aa, Escherichia coli
MLRMTPLASAIVALLIGIEAYAAEETFDTHFMIGGMKDQQVVNIRLEDNQPLPGQYDIDIYVNKQWRGKYEIIVKDNPQETCLSREMIKRLGINTDNFASGKQCLTFKQLIQGGSYTWDIGVFRLDFSVPQAWVEELESGYVPPENWERGINAFYTSYYVSQYYSDYKASGNSKSTYVRFNSGLNLQEWQLHSDASFSKTNNNPGVWKSNTLYLERGFAQLLGTLRVGDMYTSSDIFDSVRFSGVRLFRDMQMLPNSKQNFTPRVQGIAQSNALVTIEQNGFVVYQKEVPPGPFAITDLQLAGGGADLDVSVKEADGSVTTYLVPYAAVPNMLQPGVSKYDFAAGRSHIEGASKQSDFVQAGHQYGFNNLLTLYGGSMVANNYYAFTLGTGWNTRIGAISVDATKSHSKQDNGDVFDGQSYQIAYNKFVSQTSTRFGLAAWRYSSRDYRTFNDHVWANNKDNYRHDENDIYDIADYYQNDFGRKNSFSANMSQSLPEGWGSVSLSTLWRDYWGRSGSSKDYQLSYSNNLRRISYTLAASHAYDENHHEEKRFNIFISIPFDWGDDVTTPRRQIYMSNSTTFDDQGVASNNTGLSGTVGSRDQFNYGVNLSYQYQGNETTAGANLTWNAPVATVNGSYSQSSAYRQAGASVSGGIVAWSGGVNLANRLSETFAVMNAPGIKDAYVNGQKYRTTNRNGVVVYDGMTPYRENYLMLDVSQSDSEAELRGNRKIAAPYRGAVVLVNFDTDQRKPWFIKALRADGQPLTFGYEVNDIHGHNIGVVGQGSQLFIRTNEVPPSVNVAIDKQQGLSCTITFGKEIDESKNYICQ

SEQ ID NO: 18655 - protein, 368 aa, Escherichia coli
MNKTITALAILMASFAANASVLPETPVPFKSGTGVIDNDTVYIGLGSAGTAWYKLDTQAKDKRWTALAAFPGGPRDQATSAFIDGNLYVFGGIGKNSEGLTQVFNDVHKYNPKTNSWVKLMSHAPMGMAGHVTFVHNGKAYVTGGVNQNIFNGYFEDLNEAGKDSTAIDKINAYYFDKKAEDYFFNKFLLSFDPSTQQWSYAGESPWYGTAGAAVVNKGDKTWLINGEAKPGLRTDAVFELDFTGNNLKWNKLAPVASPDGVAGGFAGMSNDSLIFAGGAGFKGSRENYQNGKNYAHEGLKKSYSADIHLWHNGKWDKSGELSQGRAYGVSLPWNNSLLIIGGETAGGKAVTDSVLISVKDNKVTVQN

SEQ ID NO: 18656 - protein, 266 aa, Escherichia coli
MAKSLFRALVALSFLAPLWLNAAPRVITLSPANTELAFAAGITPVGVSSYSDYPPQAQKIEQVSTWQGMNLERIVALKPDLVIAWRGGNAERQVDQLASLGIKVMWVDATSIEQIANALRQLAPWSPQPDKAEQAAQSLLDQYAQLKAQYADKPKKRVFLQFGINPPFTSGKESIQNQVLEVCGGENIFKDSRVPWPQVSREQVLARSPQAIVMTGGPDQIPKIKQYWGEQLKIPVIPLTSDWFERASPRIILAAQQLCNALSQVD

SEQ ID NO: 18657 - protein, 884 aa, Escherichia coli
MCMPNHSNFRLRGIACYIALAISGGSVNAWADDSIQFDPRFLELKGDTKIDLGKFSKKGYVDAGKYNLRVFINKHPLSDEYDINWYVSENDPTKNYACLTPELVAALGLKEGIAKSLQWTHNDECLKPGQLDGMEVENDLSQSALLLTVPQAYLEYTSSDWDPPSRWDDGIPGLIADYSLNAQTRHQEQGGEDSHDISGNGTVGANLGAWRFRADWQSDYQHTRSNDDDDDSSNSTTSKHWDWSRYYAWRALPSLKAKLSLGEDYLNSDIFDGFNYIGSSVSTDDQMLPPNLRGYAPDVSGVAHSSAKVTISQMGRVLYETQVPAGPFRIQDIGDSVSGTLHVRVEEQNGQVQEYDVTTASMPFLTRQGQVRYKVMMGRPEDWNHKTEGGFFSGGEASWGVADGWSLYGGALADKHYQSAAMGVGRDLAQFGALAFDVTHSHVNLDHDSAYGKGKLDGNSFRVSYAKDFDELNSRVTFAGYRFSEKNFMTMSEYLDANQSDMARTGNDKEMYTITYNQNFAAAGVSIYLNYSHRTYWDRPEQTNYNLMFSHYFNMGSIRNMSISVTGYRYEYDDNADKGMYLSMSIPWSDSSTVTYNGSYGSGSDSSQVGYFKRVDDATHYQVNVGTSEQHGSADGYLSHDGSLAKVDLSANYHEGEYRSAGIALQGGATLTAHGGALHRTQNMGGTRLLIDADGIANVPVESNGAPVYTNMFGKAVVADINNYYRNQAYIDLNNLPEDAEATQSVVQATLTEGAIGYRKFKVISGQKAMAVLRLRDGSYPPFGAEVKNDEQQQVGIVDDEGNVYLAGVNADEHMMVFWEGSAQCEIVLPKPLPADLFSGLLLPCEQKGTAAPDSSAPEIKPVIQGQTRQVTPTEAPRSISATQ

SEQ ID NO: 18658 - protein, 862 aa, Escherichia coli
MTIKSTNHLTHIATFCALLYSNSALCAELVEYDHTFLMGKDASNIDLSRYTEGNPTLPGIYDVSVYVNDQPIMSQSIAFAVIEGKKNAQACITQKNLLQFHISSPDKNSEKAILLKRDEDLGDCLNLAEMIPQSSIRYDVNDQRLDIDVPQAWIMKNYQNYVDPSLWENGINAAMLSYNLNGYHSESPGRTNDSIYAAFNGGINLGAWRLRASGNYNWMTNVHSDYDFQNRYLQRDLASLRSQLVIGESYTTGETFDSVSIRGIRLYSDSRMLPPVLASFAPIIHGVANTNAKVTVMQNGYKIYETTVPPGAFAIDDLSPSGYGSDLIVTIEEADGTKRTFSQPFSSVVQMLRPGVGRWDISAGQVLKDSIQDEPNLFQASYYYGLNNYLTGYTGIQLTDNNYTAGLLGLGMNTPVGAFSVDVTHSNVSIPDDKTYQGQSYRISWNKLFENTSTSLNIAAYRYSTQHYLGLNDALTLIDEVEHPEQELEPKSMRNYSRMKNQVTVSINQPLKFEKKDYGSFYLSGSWSDYWASGQNSTNYSIGYSNSASWGSYSISAQRSLNEDGQTDDSIYLSFTIPIENLLGTEHRSSGFQSIDTQLNSDFKGNNQLNISSSGYSDTNRISYSVNTGYMMNKSSDDLSYIGGYASYESPWGTLSGSASASSDNSRQFSLNTDGGFVLHSGGLTFSNDSFSDSDTLAVIQAPGAKGARINYGNSTVDRWGYGVTSALSPYHENRIALDINDLENDVELKSTSTVAVPRQGAVVFADFETVQGQSAIMNIVRSDGKNIPFAADIYDEQNNIIGNVGQGGQAFVRGIGQEGNIRITWIEEGKPVSCFAHYQQNTTSEKIAQSIIMNGLRCQIQ

SEQ ID NO: 18659 - protein, 840 aa, Escherichia coli
MNNKNTFSRDKLSHAIKNALSGVVCSLLFVLPVHAVEFNVDMIDAEDRENIDISRFEKKGYILPGRYLVRVQINKNMLPQTLILEWVKADNESGSLLCLTKENLTNFGLNTEFIESLQNIAGSECLDLSQRQELTTRLDKATMILSLSVPQAWLKYQATNWTPPEFWDTGIAGFILDYNVYASQYAPHHGDSTQNVSSYGTLGFNLGAWRLRSDYQYNQNFADGRSVNRDSEFARTYLFRPIPSWSSKFTMGQYDLSSNLYDTFHFTGASLESDESMLPPDLQGYAPQITGIAQTNAKVTVAQNGRVLYQTTVAPGPFTISDLGQSFQGQLDVTVEEEDGRTSTFQVGSASIPYLTRKGQVRYKTSLGKPTSVGHNDINNPFFWTAEASWGWLNNVSLYGGGMFTADDYQAITTGIGFNLNQFGSLSFDVTGADASLQQQNSGNLRGYSYRFNYAKHFESTGSQITFAGYRFSDKDYVSMSEYLSSRNGDESIDNEKESYVISLNQYFETLELNSYLNVTRNTYWDSASNTNYSVSVSKNFDIGDFKGISASLAVSRIRWDDDEENQYYFSFSLPLQQNRNISYSMQRTGSSNTSQMISWYDSSDRNNIWNISASATDDNIRDGEPTLRGSYQHYSPWGRLNINGSVQPNQYNSVTAGWYGSLTATRHGVALHDYSYGDNARMMVDTDGISGIEINSNRTVTNGLGIAVIPSLSNYTTSMLRVNNNDLPEGVDVENSVIRTTLTQGAIGYAKLNATTGYQIVGVIRQENGRFPPLGVNVTDKATGKDVGLVAEDGFVYLSGIQENSTLHLTWGDNTCEVTPPNQSNISESAIILPCKTVK

SEQ ID NO: 18660 - protein, 843 aa, Escherichia coli
MHWMHLPLDHYRAHFSFSLLALTIASALPAYGGKFNPKFLENVQGIDQHVDLSVYDFPVGQQIPGKYRVFVFVNEEKMASRTLDFSTASEAQRKASGESLMPCLSRVQLEEMGVRVDSFPALKILPPEACVAFDEIIPQATSRFDFNTQTLHLTFPQAAMMMTARGTVDPSRWDEGIPALLLDYSFSGSNGRNEGSGSSPDSTSDSYYLNLRSGLNVGPWRLRNNSIWNRTDGKNQWDNVGTSLNRAIIPLKSQITLGDTATPGEIFDSVQMRGALLASDDEMLPDSQRGFAPVVRGIAKSNAEVSIEQNGYVIYRTFVQPGAFEINDLYATSGSGDLTVIIKESDGSEQRFIQPFSAVAIFQREGYLKYSLAAGEYRAGNYDSGKPRFGQFTAMYGLPWGMTAYGGALLSADYNALALGLGKNFGTIGAVSVDVTQAKSQLRNNEKDEGQSYRFLYSKSFEGGTDLRLLGYKYSTSGYYTFQEATDVRSDADSDYRRYHKRSQIQGNITQQLGDYGSVYFNMTQQDYWNVDGKENSLSAGYHGHIGRVNYSIAYTWTRSPEWDEDDRLWSFSLSIPLGGAWGSYRMTTDQNGKTSQQASVSGTLLEDRNLNYNVQQGYTSNGVGNSGSVNMGYMGGSGNIDVGYNYSKDNQQVNYGVRGGVIVHSEGITLSQPLGESLAIVSAPGARGGHVVNSSGVEVDWMGNAVVPYLTPYRETIVELRSDTLGQNVELQEAFQKVVPTRGAIVRSRFDTRVGYRVLMSLKRANGNAVPFGATAALSDESKPASSIVGEEGQLYISGMPEEGELQVSWGHEQAQRCRVPFRLPEKKDNSGIVMVNAVCDK

SEQ ID NO: 18661 - protein, 161 aa, Escherichia coli; identical to SEQ ID NO: 2582

SEQ ID NO: 18662 - protein, 841 aa, Escherichia coli
MKLNIFTKSMIGMGLVCSALPALAMEAWNNQQGGNKYQVIFDGKIYENAWWVSSTNCPGKAKANDATNPWRLKRTATAAEISQFGNTLSCEKSGSSSSSTSNTPASNTPANGGSATPAQGTVPSNSSVVAWNKQQGGQTWYVVFNGAVYKNAWWVASSNCPGDAKGNDASNPWRYVRAATATEISETSNPQSCTSAPQPAPDVKPAPDVKPAPDVQPAPADKSNDNYAVVAWKGQEGSSTWYVIYNGSIYKNAWWVGAANCPGDAKENDASNPWRYVRAATATEITQYGNPGSCSVKPDNNGGAVTPVDPTPETPETPVTPTPDNNEPSTPADSSNDYSLQAWSGQEGSEIYHVIFNGNVYQNAWWVGSEDCPRGTSVENSNNPWRLVRTATAAEMSQYGNPTTCEIDNGGVIIADGFQASKAYSASSIVDYNDAHYKTSVDQDAWGFVPGGDNPWKKYEPAKAWSASTVYVKGDRVVVDGQAYEALFWTQSDNPALIANQNATGSNSRPWKPLGKTQSYSNEELNNAPQFNPETLYASDTLIRFNGENYISQSKVQKVSPSDSNPWRVFVDWTGTKERVGTPKKAWPKHVYAPYVDFTLNTIPDLAALAKNHNVNHFTLAFVVSKDANTCLPTWGTAYGMQNYAQYSKIKALREAGGDVMLSIGGANNAPLAASCKNVDDLMQHYYDIVDNLNLRVLDFDIEGTWVADQASIERRNLAVKKVQDKWKSEGKDIAIWYTLPILPTGLTPEGMNVLSDAKAKGVELAGVNVMTMDYGNAICQSANTEGQNIHGKCATSAIANLHAQLKGLYGAMARRRLALVKVIFCAVKAWRIIGINIVSD

SEQ ID NO: 18663 - protein, 241 aa, Escherichia coli
MSNKNVNVRKSQEITFCLLAGILMFMAMMVAGRAEAGVALGATRVIYPAGQKQVQLAVTNNDENSTYLIQSWVENADGVKDGRFIVTPPLFAMKGKKENTLRILDATNNQLPQDREILFWMNVKAIPSMDKSKLTENTLQLAIISRIKLYYRPAKLALPPDQAAEKLRFRRSANSLTLINPTPYYLTVTELNAGTRVLENALVPPMGESAVKLPSDAGSNITYRTINDYGALTPKMTGVME

SEQ ID NO: 18664 - protein, 686 aa, Escherichia coli
MFWRDMTLSIWRKKTTGLKTKKRLLPLMLAAALCSSPVWAEEATFTANFKDTDLKSFIETVGANLNKTIIMGPGVQGKVSIRTMTPLNERQYYQLFLNLLEAQGYAVVPMENDVLKVVKSSAVKVEPLPLVGEGSDNYAGDEMVTKVVPVRNVSVRELAPILRQMIDSAGSGNVVNYDPSNVIMLTGRASVVERLTEVIQRVDHAGNRTEEVIPLDNASASEIARVLESLTKNSGENQPATLKSQIVADERTNSVIVSGDPATRDKMRRLIRRLDSEMERSGNSQVFYLKYSKAEDLVDVLKQVSGTLTAAKEEAEGTVGSGREVVSIAASKHSNALIVTAPQDIMQSLQSVIEQLDIRRAQVHVEALIVEVAEGSNINFGVQWGSKDAGLMQFANGTQIPIGTLGAAISAAKPQKGSTVISENGATTINPDTNGDLSTLAQLLSGFSGTAVGVVKGDWMALVQAVKNDSSSNVLSTPSITTLDNQEAFFMVGQDVPVLTGSTVGSNNSNPFNTVERKKVGIMLKVTPQINEGNAVQMVIEQEVSKVEGQTSLDVVFGERKLKTTVLANDGELIVLGGLMDDQAGESVAKVPLLGDIPLIGNLFKSTADKKEKRNLMVFIRPTILRDGMAADGVSQRKYNYMRAEQIYRDEQGLSLMPHTAQPILPAQNQALPPEVRAFLNAGRTR

SEQ ID NO: 18665 - protein, 682 aa, Escherichia coli
MKTKSIIAPGIAVICSTVISSGYASSDKKEDTLVVTASGFTQQLRNAPASVSVITSEQLQKKPVSDLVDAVKDVEGISITGGNEKPDISIRGLSGDYTLILVDGRRQSGRESRPNGSGGFEAGFIPPVEAIERIEVIRGPMSSLYGSDAIGGVINIITKPVNNQTWDGVLGLGGIIQEHGKFGNSTTNDFYLSGPLVKDKLGLQLYGGMNYRKEDSISQGTPAKNNKNITATLQFTPTESQKFVFEYGKNNQEHTLTPGDSLDAWTMRGNLKQPNSKRETHNSRSHWVAAWNAQGEILHPEIAVYQEKVIREVKSGKKDKYNHWDLNYESRKPEITNTIIDAKVTAFLPENVLTIGGQFQHAELRDDSATGKKTTETQSVSVKQKAVFIENEYAATDSLALTGGLRLDNHEIYGSYWNPRLYAVYNLTDNLTLKGGIAKAFRAPSIREVSPGFGTLTQGGASIMYGNRDLKPETSVTEEIGIIYNNDSGFSASATLFNTDFKNKLTSYDIGTKDPVTGLNTFIYDNVGEANIRGVELATQIPVYDKWRVSANYTFTDSRRESDDESLNGKSLKGEPLERTPRHAANAKLEWDYTQDITFYSSLNYTGKQIWAAQRNGAKVPRVRNGFTSMDIGMNYQFLPGTLINFAVLNVTDRKSEDIDTIDGNWQVDEGRRYWANVRISF

SEQ ID NO: 18666 - protein, 222 aa, Escherichia coli; identical to SEQ ID NO: 1956

SEQ ID NO: 18667 - protein, 264 aa, Escherichia coli
MSNQGMPMRQYRLLSPMIKVVIVLFSLLFSTAQAGLVIGGTRFAYPENQSSISVELKNTSDRDMLVKVAVSPDDARQLTGTVESLPSYSETVFIATPPLFVLKPDKNTKIRINRVGGSLPTDRESLFILNVAALPTLENSHSVKIDNQLQIAVRNRMKIFYRPSNLSEDPNMSYQKLRWARKNEMVTVYNPGPRYVTLYNLHVDGKVIDGGMVAPFSHRQQSWCKSQGVCEIAWQTLDVYNNVLPILKVKLNPSQLGNAANLLI

SEQ ID NO: 18668 - protein, 752 aa, Escherichia coli; identical to SEQ ID NO: 9714

SEQ ID NO: 18669 - protein, 249 aa, Escherichia coli
MNIMKSPLITTGMICLLGICNFAQATVSPDRTRIIFNASNKSATVRLTNQSKIDPYLAQSWIEDASGKKTRDYISTLPPMERIEPDEQIQIRLMALASLNDLPQDRETLFYYNVREIPPRAKEQNVMQIAMQSRLKLFWRPKAIELKEGEMIPLQKVTITRTAAGLTLNNPTPYHITVGYIGTNGKTLMPGADSIMVAPFTSATQHLSSLPSTFQLGFVADYGGLEMFKVECSSIQSLCQSSPAKKGKI

SEQ ID NO: 18670 - protein, 753 aa, Escherichia coli; identical to SEQ ID NO: 6655

SEQ ID NO: 18671 - protein, 412 aa, Escherichia coli
MKQWIAALLLMLIPGVQAAKPQKVTLMVDDVPVAQVLQVLAEQEKLNLVVSPDVSGTVSLHLTDVPWKQALQTVVKSAGLITRQEGNILSVHSVAWQNDNIARQEAEQTRAQANLPLENRNITLQYADAGELAKAGEKLLSAKGSMTVDKRTNRLLLRDNKTALSTLEQWVSQMDLPVGQVELSAHIVTINEKSLRELGVKWTLADAQQAGGVGQVTTLGSDLSVATATTHIGFNIGRINGRLLDLELSALEQKQQLDIIASPRLLASHLQPASIKQGSEIPYQVSSGESGATSVEFKEAVLGMEVTPTVLQKGRIRLKLHISQNVPGQVLQQADGEVLAIDKQEIETQVEVKSGETLALGGIFTRKNKSGQDSVPLLGDIPWFGQLFHHDGKEDERRELVVFITPRLVSSE

SEQ ID NO: 18672 - protein, 122 aa, Escherichia coli; identical to SEQ ID NO: 2915

SEQ ID NO: 18673 - protein, 673 aa, Escherichia coli; identical to SEQ ID NO: 14755

SEQ ID NO: 18674 - protein, 696 aa, Escherichia coli
MRITTLASVIIPCLGFSASSMAAAEDVMIVSASGYEKKLTNAAASVSVISQEELQSRQYHDLAEALRSVEGVDVESGTGKTGGLEISIRGMPASYTLILIDGVRQGGSSDVTPNGFSAMNTGFMPPLAAIERIEVIRGPMSTLYGSDAMGGVVNIITRKNADKWLSSVNAGLNLQESNKWGNSSQFNFWTSGPLVDDSVSLQVRGSTQQRQGSSVTSLSDTAATRIPYPTESQNYNIGARLDWKATEQDVLWFDMDTTRQRYDNRDGQLGSLTGGYDRTLRYERNKISAGYDHSFTFGTWKSYLNWNETENKGRELVQSVLKRDKWELAGQPRELKESNFILNSLLLTPLGESHLVTVGGEYQSSSMKDGVVLASTGETFRQKSWSVFAEDEWHLTDALALTAGSRYEHHEQFGGHFSPRAYLVWDVADAWTLKGGVTTGYKAPTMGQLHKGISGVSGQGRTNLLGNPELKPEESVSYEAGVYYDNLSGLNANITGFITDFSNKIVSYSIDDNTNSYTNSGKARLHGVEFAGTLPLWSEDVTLSLNYTWTRSEQRDGDNKGAPLSYTPEHMVNAKLNWQITEEVASWLGARYRDKTPRFTRNYSSLSAVQKKVYDEKGEYLKAWTVVDAGLSWKVTDALTLNAAVNNLLNKDYSDVSLYSAGKSTLYAGDYFQTGSSTTGYVIPERNYWMSLNYQF

SEQ ID NO: 18675 - protein, 759 aa, Escherichia coli
MAQRQPEKTAAGGCFFNSLYSKYSGITMMRKKYMPRALGPLLLVVLSPAVAQQNDDNEIIVSASRSNRTVAEMAQTTWVIENAELEQQIQGGKELKDALAQLIPGLDVSSQSRTNYGMNMRGRPLVVLIDGVRLNSSRSDSRQLDSVDPFNIDHIEVISGATALYGGGSTGGLINIVTKKGQPETMMEFEAGTKSGFNSSKDHDERIAGAVSGGNDHISGRLSVAYQKFGGWFDGNGDATLLDNTQTGLQHSNRLDIMGTGTLNIDESRQLQLITQYYKSQGDDNYGLNLGKGFSAISGSSTPYVSKGLNSDRIPGTERHLISLQYSDSDFLGQELVGQVYYRDESLRYYPFPTVNANKQATAFSSSQQDTDQYGMKLTLNSQLMDGWQITWGLDAEHERFTSNQMFFDLAQASASGGLNNHKIYTTGRYPSYDITNLAAFLQSSYDINDIFTVSGGVRYQYTENRVDDFIDYTQQQKIAAGKAISADAIPGGSVDYDNFLFNAGLLMHITERQQAWFNFSQGVALPDPGKYYGRGIYGAAVNGHLSLTKSVNVSDSKLEGVKVDSYELGWRFTGDNLRTQIAAYYSLSNKSVERNKDLTISVKDDRRRIYGVEGAVDYLIPDTDWSTGVNFNVLKTESKVNGQWQKYDVKESSPSKATAYINWAPEPWSLRVQSTTSFDVSDAEGNDINGYTTVDFISSWQLPVGTLSFSVENLFDRDYTTVWGQRAPLYYSPGYGPASLYDYKGRGRTFGLNYSVLF

SEQ ID NO: 18676 - protein, 774 aa, Escherichia coli; identical to SEQ ID NO: 17728

SEQ ID NO: 18677 - protein, 259 aa, Escherichia coli
MLFHQQGCCMKCIIGNKKWVYGFRDELKVSQNIIRSGILFLLSILFINNASAGGFGLGVTRLIYPAESKQITLSVQNSGDNTSYLIQSWVDDSKTEKKSQDFVITPPLFMLPTRKEASLRIMFLGKTNLPTDRETLYWMNVKAIPPTDEKNTQKNTLQLALQNKIKLFYRPENLPVQPGKARNMLRFKYEGKQLKVINPSPYYLTLTGIKVQGSKLPNMFVPPKSDITVSSPVTLAGEITYQTINDFGATTERQKGIMQ

SEQ ID NO: 18678 - protein, 713 aa, Escherichia coli
MAMFTPSFSGLKGRALFSLLFAAPMIHATDSVTTKDGETITVTADANTATEATDGYQPLSTSTATLTDMPMLDIPQVVNTVSDQVLENQNATMLDEALYNVSNVVQTNTLGGTQDAFVRRGFGANRDGSIMTNGLRTVLPRSFNAATERVEVLKGPASTLYGILDPGGLINVVTKRPEKTFHGSVSATSSSFGGGTGQLDITGPIEGTQLAYRLTGEVQDEDYWRNFGKERSTFIAPSLTWFGDNATVTMLYSHRDYKTPFDRGTIFDLTTKQPVNVDRKIRFDEPFNITDGQSDLAQLNAEYHLNSQWTARFDYSYSQDKYSDNQARVTAYDATTGTLTRRVDATQGSTQRMHATRADLQGNVDIAGFYNEILGGVSYEYYDLLRTDMIRCKKAKDFNIYNPVYGNTSKCTTVSASDSDQTIKQESYSAYAQDALYLTDNWIAVAGIRYQYYTQYAGKGRPFNVNTDSRDEQWTPKLGLVYKLTPSVSLFANYSQTFMPQSSIASYIGDLPPESSNAYEVGAKFELFDGITADIALFDIHKRNVLYTESIGDETIAKTAGRVRSRGVEVDLAGALTENINIIASYGYTDAKVLEDPDYAGKPLPNVPRHTGSLFLTYDIHNMPGNNTLTFGGGGHGVSRRSATNGADYYLPGYFVADAFAAYKMKLQYPVTLQLNVKNLFDKTYYTSSIATNNLGNQIGDPREVQFTVKMEF

SEQ ID NO: 18679 - protein, 784 aa, Escherichia coli; identical to SEQ ID NO: 2241

SEQ ID NO: 18680 - protein, 204 aa, Escherichia coli; identical to SEQ ID NO: 2957

SEQ ID NO: 18681 - protein, 362 aa, Escherichia coli; identical to SEQ ID NO: 4554

SEQ ID NO: 18682 - protein, 700 aa, Escherichia coli; identical to SEQ ID NO: 12225

SEQ ID NO: 18683 - protein, 228 aa, Escherichia coli; identical to SEQ ID NO: 6714

SEQ ID NO: 18684 - protein, 696 aa, Escherichia coli; identical to SEQ ID NO: 4038

SEQ ID NO: 18685 - protein, 250 aa, Escherichia coli
MSYKLSCPMLVSTALMAQLTTASLTAHASVTPDRTRLVFNESDKSISVTLRNNNEKLPYLAQSWLEDEKGNKITSPLAVLPPVQRIDAMMNGQVKIQALPDIHTLPSDRESLFYYNVREIPPKSGKANTLQIALQTRIKLFWRPKALEKIDMRKPWQFKVTLTRSGQDYTVNNPTPYHVIISDASTQKKGLTAAGFKPLVMPPKTSQPLKAKMASAPVLTYINDYGARMPLIFRCEGNTCKVDEDQSSKG

SEQ ID NO: 18686 - protein, 472 aa, Escherichia coli
MSTIHTPLTYNEINGKPFGLDYELAKQFADYLGVKLKVTVRQNISQLFDDLDNGNADLLAAGLVYNSERVKNYQPGPTYYSVSQQLVYKVGQYRPRTLGNLTAEQLTVAPGHVVVNDLQTLKDTKFPELSWKVDDKKGSAELMEDVIEGKLDYTIADSVAISLFQRVHPELAVALDITDEQPVTWFSPLDGDNTLSAALLDFFNEMNEDGTLARIEEKYLGHGDDFDYVDTRTFLRAVDAVLPQLKPLFEKYAEEIDWRLLAAIAYQESHWDAQATSPTGVRGMMMLTKNTAQSLGITDRTDAEQSISGGVRYLQDMMSKVPESVPENERIWFALAAYNMGYAHMLDARALTAKTKGNPDSWADVKQRLPLLSQKPYYSKLTYGYARGHEAYAYVENIRKYQISLVGYLQEKEKQATEAAMQLAQDYPAVSPTKLGKEKFPFLSFLSQSSSNYLTHTPSLLFSRKGSEEKQN

SEQ ID NO: 18687 - protein, 331 aa, Escherichia coli; identical to SEQ ID NO: 2856

SEQ ID NO: 18688 - protein, 541 aa, Escherichia coli; identical to SEQ ID NO: 4576

SEQ ID NO: 18689 - protein, 641 aa, Escherichia coli; identical to SEQ ID NO: 3794

SEQ ID NO: 18690 - protein, 224 aa, Escherichia coli; identical to SEQ ID NO: 6697

SEQ ID NO: 18691 - protein, 678 aa, Escherichia coli
MVPSTFSRLKAARCLPVVLAALIFAGCGTHTPDQSTAYMQGTAQADSAFYLQQMQQSSDDTRINWQLLAIRALVKEGKTGQAVELFNQLPQELNDTQRREKTLLAAEIKLAQKDFAGAQNLLAKITPADLEQNQQARYWQAKIDASQGRPSIDLLRALIAQEPLLGAKEKQQNIDATWQALSSMTQEQANTLVINADENILQGWLDLQRVWFDNRNDPDMMKAGIADWQKRYPNNPGAKMLPTQLVNVKAFKPASTNKIALLLPLNGQAAVFGRTIQQGFEAAKNIGTQPVAAQVAAAPAADVAEQPQPQTVNGVASPAQASVSDLTGEQPATQPVPVSAPATSTAAVSAPANPSAELKIYDTSSQPLSQILSQVQQDGASIVVGPLLKNNVEELLKSNTPLNVLALNQPENIENRVNICYFALSPEDEARDAARHIRDQGKQAPLVLIPRSSLGDRVANAFAQEWQKLGGGTVLQQKFGSTSELRAGVNGGSGIALTGSPITPRETTDSGMTTNNPTLQTTPTDDQFTNNGGRVDAVYIVATPGAIAFIKPMIAMRNGSQSGATLYASSRSAQGTAGPDFRLEMEGLQYSEIPMLAGGNLPLMQQALSAVNNDYSLARMYAMGVDAWSLANHFSQMRQVQGFEINGNTGSLTANPDCVINRKLSWLQYQQGQVVPAS

SEQ ID NO: 18692 - protein, 650 aa, Escherichia coli; identical to SEQ ID NO: 15024

SEQ ID NO: 18693 - protein, 663 aa, Escherichia coli
MLNGIYSMRLKKRYLCTVLSLAFTQQSVAAQESDTLTVWSSPVSSTTTTVLDQPTMKALDKQNVAQALSVVPGVVLQKSGSRNEEQVKVRGFDSRQVPVYFDGVPIYVPYDGNLDLARILTNNLGAVEVSKGYSSLLQGPNQMGGAINITTQKPTKPLEASLGYRQGWSRSQDNAYDMHASFAASSDLGYLQVSGSQLKQDFLGLPHGVNNDIAGKHGKMINSSADDKRGIVKLGFTPRENDEYTLTYIKQDGEKDNPPYSGNSGQKSRYWQWPEYDKESFYYQGTTQLNDRFTLKSRLYRDTFENTLMMYNSLADLKNKKGSYSHYSDYSDGAGLQLAADVRENDLLSFAVNWKDDVHREKGAPHAAYDRYEDRTWSLASEYQWAAADNVDVVAGISYDWRDSVEAKKHEKDGSITHYDDNYQSAFNWQVMGKYHFANEDTLALSYYDRTRFPTLKERYTTSKPAYNQIAIVNPQLKPERARGVDLTWNGAFTHDWGFEVSVYYNRVSDAILSHNIDADTIQNQNSGTVDYSGLDAGIKGKISNILDVGLSYALIHADAKRKDIGKITDLPTQTMTAWMTLKPWEPLSVTLSEEARSSSYSNSDGSQKAAGFAVTHIRADYTLGHGFSVNASVNNLFDTKYAYSEGFIEEGRNFWAGIEYTF

SEQ ID NO: 18694 - protein, 729 aa, Escherichia coli
MLSTQFNRDNQHQAIIKPSLLAGCIALALLPSAAFAAPVTEETVIVEGSATAPDDGENDYNVTSTSAGTKMQMTQRDIPQSVTIVSQQRMEDQQLQTLGEVMENTLGISKSQADSDRALYYSRGFQIDNYMVDGIPTYFESRWNLGDALSDMALFERVEVVRGATGLMTGTGNPSAAINMVRKHATSREFKGDVSAEYGSWNKERYVADLQSPLTEDGKIRARIVGGYQNNDSWLDRYNSEKAFFSGIVDADLGDLTMLSAGYEYQRIDVNSPTWGGLPRWNTDGSSNSYDRARSTAPDWAYNDKEINKVFMTLKQRFADTWQATLNATHSEVEFDSKMMYVDAYVNKADGMLVGPYSNYGPGFDYVGGTGWNSGKRKVDALDLFADGSYELFGRQHNLMFGGSYSKQNNRYFSSWANIFPDEIGSFYNFNGNFPQTDWSPQSLAQDDTTHMKSLYAATRVTLADPLHLILGARYTNWRVDTLTYSMEKNHTTPYAGLVFDINDNWSTYASYTSIFQPQNDRDSSGKYLTPITGNNYELGLKSDWMNSRLTTTLAIFRIEQDNVAQSTGTPIPGSNGETAYKAVDGTVSKGVEFELNGAITDNWQLTFGATRYIAEDNEGNAVNPNLPRTTVKMFTSYRLPVMPELTVGGGVNWQNRVYTDTVTPYGTFRAEQGSYALVDLFTRYQVTKNFSLQGNVNNLFDKTYDTNVEGSIVYGAPRNFSITGTYQF

SEQ ID NO: 18695 - protein, 407 aa, Escherichia coli
MNERELSIIRALGEEFAAVITDLQRTFEEKMAAQAQQSEEKLASLSAVLQKHVTLDEVRSVLQAMVDDAVGAIPVPRDGRDYDPDVLQKAVNDAVANIPLPADGKSITPDDVRPMLEQMVKEAVSHIPVPRDGRDYDPDVLQKAVNDAVANIPLPADGKSITPDDVRPMLEQMVKEAVSHIPVPRDGRDYDPDVLQKAVNDAVANIPQPADGKSLTPDDVRPMLEQMVKEAVSHIPVPRDGRDYDPDVLQKAVLDAVSALPAPQDGRDATALEILPAIDDQKSFPRGTYATHQGGLWRAYEKTHGMRGWECLVDGVADIDVSMTGERSFTVVVRQSSGQRTEKTFSLPVMLYRGVFRAGETYHPGDTVTWGGSLWHCNSMTEDKPGEAHSSAWTLAAKRGRDAGGGK

SEQ ID NO: 18696 - protein, 246 aa, Escherichia coli; identical to SEQ ID NO: 3838

SEQ ID NO: 18697 - protein, 375 aa, Escherichia coli; identical to SEQ ID NO: 14838

SEQ ID NO: 18698 - protein, 208 aa, Escherichia coli; identical to SEQ ID NO: 1948

SEQ ID NO: 18699 - protein, 191 aa, Escherichia coli
MKKSLLGLTFASLMFSAGSAVAADYKINKEGQHAFVNFRIQHLGYSWLYGTFKDFDGTFTFDEKNPAADKVNVTINTTSVDTNHAERDKHLRSADFLNTAKYPQATFTSTSVKKDGDELDITGDLTLNGVTKPVTLEAKLIGQGDDPWGGKRAGFEAEGKIELKDFNIKTDLGPASQEVDLIISVEGVQQK

SEQ ID NO: 18700 - protein, 760 aa, Escherichia coli; identical to SEQ ID NO: 11949

SEQ ID NO: 18701 - protein, 213 aa, Escherichia coli; identical to SEQ ID NO: 2232

SEQ ID NO: 18702 - protein, 237 aa, Escherichia coli
MRKITQALSAVCLLFALNSSAVALASSPSPLNPGTNVAKLAEQAPIHWVSVAQIENSLAGRPPMAVGFDIDDTVLFSSPGFWRGKKTFSPESEDYLKNPVFWEKMNNGWDEFSIPKEVARQLIDMHVRRGDAIFFVTGRSPTKTETVSKTLADNFHIPATNMNPVIFAGDKPGQNTKSQWLQDKNIRIFYGDSDNDITAARDVGARGIRILRASNSTYKPLPPAGAFGEEVIVNSEY

SEQ ID NO: 18703 - protein, 351 aa, Escherichia coli; identical to SEQ ID NO: 5565

SEQ ID NO: 18704 - protein, 219 aa, Escherichia coli; identical to SEQ ID NO: 3328

SEQ ID NO: 18705 - protein, 814 aa, Escherichia coli; identical to SEQ ID NO: 18102

SEQ ID NO: 18706 - protein, 229 aa, Escherichia coli
MADGNASIKGYNCNVSQGLVITMPLPDFRLIRLLPLAALVLTACSVTTPKGPGKSPDSPQWRQHQQDVRNLNQYQTRGAFAYISDQQKVYARFFWQQTGQDRYRLLLTNPLGSTELELNAQPGNVQLVDNKGQRYTADDAEEMIGKLTGMPIPLNSLRQWILGLPGDATDYKLDDQYRLSEITYSQNGKNWKVVYGGYDTKTQPAMPANMELTDGGQRIKLKMDNWIVK

SEQ ID NO: 18707 - protein, 747 aa, Escherichia coli; identical to SEQ ID NO: 4394

SEQ ID NO: 18708 - protein, 511 aa, Escherichia coli; identical to SEQ ID NO: 2457

SEQ ID NO: 18709 - protein, 700 aa, Escherichia coli; identical to SEQ ID NO: 18118

SEQ ID NO: 18710 - protein, 446 aa, Escherichia coli; identical to SEQ ID NO: 2176

SEQ ID NO: 18711 - protein, 258 aa, Escherichia coli; identical to SEQ ID NO: 18123

SEQ ID NO: 18712 - protein, 551 aa, Escherichia coli; identical to SEQ ID NO: 2446

SEQ ID NO: 18713 - protein, 412 aa, Escherichia coli; identical to SEQ ID NO: 4058

SEQ ID NO: 18714 - protein, 102 aa, Escherichia coli; identical to SEQ ID NO: 1824

SEQ ID NO: 18715 - protein, 857 aa, Escherichia coli; identical to SEQ ID NO: 8889

SEQ ID NO: 18716 - protein, 879 aa, Escherichia coli; identical to SEQ ID NO: 6947

SEQ ID NO: 18717 - protein, 816 aa, Escherichia coli; identical to SEQ ID NO: 4456

SEQ ID NO: 18718 - protein, 266 aa, Escherichia coli; identical to SEQ ID NO: 1894

SEQ ID NO: 18719 - protein, 237 aa, Escherichia coli; identical to SEQ ID NO: 2816

SEQ ID NO: 18720 - protein, 207 aa, Escherichia coli; identical to SEQ ID NO: 2211

SEQ ID NO: 18721 - protein, 878 aa, Escherichia coli; identical to SEQ ID NO: 4404

SEQ ID NO: 18722 - protein, 840 aa, Escherichia coli; identical to SEQ ID NO: 3591

SEQ ID NO: 18723 - protein, 332 aa, Escherichia coli
MMKKPVVIGLAVVVLAAVVAGGYWWYQSRQDNGLTLYGNVDIRTVNLSFRVGGRVESLAVDEGDAIKAGQVLGELDHKPYEIALMQAKAGVSVAQAQYDLMLAGYRDEEIAQAAAAVKQAQAAYDYAQNFYNRQQGLWKSRTISANDLENARSSRDQAQATLKSAQDKLRQYRSGNREQDIAQAKASLEQAQAQLAQAELNLQDSTLIAPSDGTLLTRAVEPGTVLNEGGTVFSVSLTRPVWVRAYVDERNLDQAQPGRKVLLYTDGRPDKPYHGQIGFVSPTAEFTPKTVETPDLRTDLVYRLRIVVTDADDALRQGMPVTVQFGDEAGHE

SEQ ID NO: 18724 - protein, 203 aa, Escherichia coli; identical to SEQ ID NO: 2009

SEQ ID NO: 18725 - protein, 432 aa, Escherichia coli; identical to SEQ ID NO: 2026

SEQ ID NO: 18726 - protein, 274 aa, Escherichia coli; identical to SEQ ID NO: 2891

SEQ ID NO: 18727 - protein, 816 aa, Escherichia coli
MNIYRLSVLSCLAMVTPPALTAEFNLNVLDKSIRDSVDISLLNQKGVVAPGDYFVSVTVNNNKISNGQQIRWQKSGDKIIPCINESLIELFGLKSDFRKKLPAIKECVDFSVFPEIIFTFDQANQQLNITIPQAWLAWHSENWTPPSTWNNGIPGFLMDYNLFASTYRPQSGSSSNNLNAYGTTGLNAGAWRLRSDYQLSQSDSGDNREQSGAISRTYLFRPLPQIGSRLTLGETDFSSNIFDGFSYTGAALASDDRMLPWELRGYAPQISGIAQTNATVTISHSGRVIYQKKVPPGPFIIDDLNQSVQGTLDVKVSEEDGRVNNFQVSAASTPFLTRQGQVRYKLAAGRPRSSMSHHTEDETFISHEVSWGMLSNTSLYGGMLLAGDDYRSGALGIGQNMLWMGALSFDVTWADSHFDTQQDEQGYSYRFNYSKQVDATNSTISLAAYRFSDRHFHSYANYIDHKYNDADTQDEKQTISLSFGQPITLLNLNLYANILHQSWWNADTSTTANITVGFNVDIGDWKDISVSTSFNTTHYEDKDRDNQIYFSISLPIGESGRLGYDMQNNSNTTTHRMSWNDTLDERNSWGMSAGIQSDRPDNGAQVSGNYQHLSSAGEWDLTGTYAANDYTSASASWSGSFTATQHGAAFHRRSSTNEPRLMVSTDGVGDIPIQGNIDYTNRFGIAVVPFVSSYQPTTVAVNMNDLPDGVTVSENVVKETWTEGAIGFKSLASRAGKDLNVIISDANGHFPPLGADVRQAEGGVSVGMVGENGHAWLSGVDENQQFTVHWGDQKTCAIHLPEHLEDVTKRLILPCH

SEQ ID NO: 18728 - protein, 551 aa, Escherichia coli; identical to SEQ ID NO: 2446

SEQ ID NO: 18729 - protein, 231 aa, Escherichia coli; identical to SEQ ID NO: 2868

SEQ ID NO: 18730 - protein, 863 aa, Escherichia coli; identical to SEQ ID NO: 3959

SEQ ID NO: 18731 - protein, 193 aa, Escherichia coli; identical to SEQ ID NO: 2250

SEQ ID NO: 18732 - protein, 883 aa, Escherichia coli; identical to SEQ ID NO: 6952

SEQ ID NO: 18733 - protein, 746 aa, Escherichia coli; identical to SEQ ID NO: 2949

SEQ ID NO: 18734 - protein, 360 aa, Escherichia coli; identical to SEQ ID NO: 3062

SEQ ID NO: 18735 - protein, 366 aa, Escherichia coli; identical to SEQ ID NO: 5499

SEQ ID NO: 18736 - protein, 94 aa, Escherichia coli; identical to SEQ ID NO: 7120

SEQ ID NO: 18737 - protein, 229 aa, Escherichia coli; identical to SEQ ID NO: 5424

SEQ ID NO: 18738 - protein, 240 aa, Escherichia coli; identical to SEQ ID NO: 18629

SEQ ID NO: 18739 - protein, 726 aa, Escherichia coli
MLSTQFNRDNQYQAITKPSLLAGCILLPSAAFAAPATEETVIVEGSATAPDDGENDYSVTSTSAGTKMQMTQRDIPQSVTIVSQQRMEDQQLQTLGEVMENTLGISKSQADSDRALYYSRGFQIDNYMVDGIPTYFESRWNLGDALSDMALFERVEVVRGATGLMTGTGNPSAAINMVRKHATSREFKGDVSAEYGSWNKERYVADLQSPLTEDGKIRARIVGGYQNNDSWLDRYNSEKTFFSGIVDADLGDLTTLSAGYEYQRIDVNSPTWGGLPRWNTDGSSNSYDRARSTAPDWAYNDKEINKVFMTLKQRFADTWQATLNATHSEVEFDSKMMYVDAYVNKADGMLVGPYSNYGPGFDYVGGTGWNSGKRKVDALDLFADGSYELFGRQHNLMFGGSYSKQNNRYFSSWANIFPDEIGSFYNFNGNFPQTDWSPQSLAQDDTTHMKSLYAATRVTLADPLHLILGARYTNWRVDTLTYSMEKNHTTPYAGLVFDINDNWSTYASYTSIFQPQNDRDSSGKYLAPITGNNYELGLKSDWMNSRLTTTLAIFRIEQDNVAQSTGTPIPGSNGETAYKAVDGTVSKGVEFELNGAITDNWQLTFGATRYIAEDNEGNAVNPNLPRTTVKMFTSYRLPVMPELTVGGGVNWQNRVYTDTVTPYGTFRAEQGSYALVDLFTRYQVTKNFSLQGNVNNLFDKTYDTNVEGSIVYGAPRNFSITGTYQF

SEQ ID NO: 18740 - protein, 512 aa, Escherichia coli; identical to SEQ ID NO: 2813

SEQ ID NO: 18741 - protein, 161 aa, Escherichia coli; identical to SEQ ID NO: 2582

SEQ ID NO: 18742 - protein, 204 aa, Escherichia coli; identical to SEQ ID NO: 2957

SEQ ID NO: 18743 - protein, 360 aa, Escherichia coli; identical to SEQ ID NO: 15053

SEQ ID NO: 18744 - protein, 686 aa, Escherichia coli; identical to SEQ ID NO: 3015

SEQ ID NO: 18745 - protein, 719 aa, Escherichia coli
MRDEMLYNIPCRIYILSTLSLCISGIVSTATATSSETKISNEETLVVTTNRSASNLWETPATIQVIDQQTLQNSTNASIADNLQDIPGVEITDNSLAGRKQIRIRGEASSRVLILIDGQEVTYQRAGDNYGVGLLIDESALERVEVVKGPYSVLYGSQAIGGIVNFITKKGGDKLASGVVKAVYNSATAGWEESIAVQGSIGGFDYRINGSYSDQGNRDTPDGRLPNTNYRNNSQGVWLGYNSGNHRFGLSLDRYRLATQTYYEDPDGSYEAFSVKIPKLEREKVGVFYDTDVDGDYLKKIHFDAYEQTIQRQFANEVKTTQPVPSPMIQALTVHNKTDTHDKQYTQAVTLQSHFSLPANNELVTGAQYKQDRVSQRSGGMTSSKSLTGFINKETRTRSYYESEQSTVSLFAQNDWQFADHWTWTMGVRQYWLSSKLTRGDGVSYTAGIISDTSLARESASDHEMVTSTSLRYSGFDNLELRAAFAQGYVFPTLSQLFMQTSAGGSVTYGNPDLKAEHSNNFELGARYNGNQWLIDSAVYYSEAKDYIASLICDGSIVCNGNTNSSRSSYYYYDNIDRAKTWGLEISAEYNGWVFSPYISGNLIRRQYETSTLKTTNTGEPAINGRIGLKHTLVMGQANIISDVFIRAASSAKDDSNGTETNVPGWATLNFAVNTEFGNEDQYRINLALNNLTDKRYRTAHETIPAAGFNAAIGFVWNF

SEQ ID NO: 18746 - protein, 567 aa, Escherichia coli; identical to SEQ ID NO: 6969

SEQ ID NO: 18747 - protein, 760 aa, Escherichia coli; identical to SEQ ID NO: 2078

SEQ ID NO: 18748 - protein, 395 aa, Escherichia coli; identical to SEQ ID NO: 6994

SEQ ID NO: 18749 - protein, 245 aa, Escherichia coli
MPARHLYFIMTNTWNRLALLIFAVLSLLVAGELQAGVVVGGTRFIFPADRESISILLTNTSQESWLINSKINRPTRWAGGEASTVPAPLLAAPPLILLKPGTTGTLRLLRTESDILPVDRETLFELSIASVPSGKVENQSVKVAMRSVFKLFWRPEGLPGDPLEAYQQLRWTRKSQGVQLTNPTPYYINLIQVSVNGKALSNVGVVPPKSQRQTSWCQAIAPCHVAWRAINDYGGLSAKKEQNLP

SEQ ID NO: 18750 - protein, 446 aa, Escherichia coli; identical to SEQ ID NO: 2180

SEQ ID NO: 18751 - protein, 656 aa, Escherichia coli
MFRKWLNGRLSVFVFTTVFLSAIPGWGAEFSASFKDTDIQEFINTVSKNLHKTVIINPDVQGTITVRSYDMLNEEQYYQFFLSVLDVYGFAVVDMHNGILKVVRSKDAKTSAVPVASDASPGTGDEVVTRVVPVSNVAARDLAPLLRQLNDNAGAGSVVHYEPSNVLLMTGRAAVMKRLMEIVERVDKEGNRSVATVPLTYASATDVARLVTELTKESDKTAMPAWMTAKLVADERTNSVLVSGEPISQQRIISMIKQLDRKEDVQGNTKVIYLKYAKAKDLVEVLTGISSNIENDAKKSSSTEALRKGVTIKSHEQTNALILTGAPDVIRDLENVISQLDIRRPQVLVEAIIAEVQDADGLNLGIQWVNKHSGVTQFTSTGLPITTMVQTRQSDISDSDQSNTLSMFNGIAAGFYQGNWAMLLTALSTSSKNDILATPSIVTLDNMEATFNVGQEVPVLSGSQTTSGDNIFNTVERKTVGIKLRVKPQINEGDSVLLEIEQEVSGVADTAVATTTDLGATFNTRTVTNAMLVGNGETVVVGGLLDKSIRGSESKVPLLGDIPVLGHLFSSKSEHAAKRNLMLFIRPTIIRERDGFRHASAEKYLSFNQEQVQSRGKETMALTLNEEQLKLSRDRDDTTFRKVKTAIAAFYARGMQ

SEQ ID NO: 18752 - protein, 747 aa, Escherichia coli
MARSKTAQPKHSLRKIAVVVATAVSGMSVYAQAAVEPKEDTITVTAAPAPQESAWGPAATIAARQSATGTKTDTPIQKVPQSISVVTAEEMALHQPKSVKEALSYTPGVSVGTRGASNTYDHLIIRGFAAEGQSQNNYLNGLKLQGNFYNDAVIDPYMLERAEIMRGPVSVLYGKSSPGGLLNMVSKRPTTEPLKEVQFKAGTDSLFQTGFDFSDALDDDGVYSYRLTGLARSANAQQKGSEEQRYAIAPAFTWRPDDKTNFTFLSYFQNEPETGYYGWLPKEGTVEPLPNGKRLPTDFNEGAKNNTYSRNEKMVGYSFDHEFNDTFTVRQNLRFAENKTSQNSVYGYGVCSDPANVYSKQCAALAPADKGHYLARKYVVDDEKLQNFSVDTQLQSKFATGDIDHTLLTGVDFMRMRNDINAWFGYDDSVPLLDLYNPVNTDFDFNAKDPANSGPYRILNKQKQTGVYVQDQAQWDKVLVTLGGRYDWADQESLNRVAGTTDKRDDKQFTWRGGVNYLFDNGVTPYFSYSESFEPSSQVGKDGNIFAPSKGKQYEVGVKYVPEDRPIVVTGAVYNLTKTNNLMADPEGSFFSVEGGEIRARGVEIEAKAALSASVNVVGSYTYTDAEYTTDTTYKGNTPAQVPKHMASLWADYTFFDGPLSGLTLGTGGRYTGSSYGDPANSFKVGSYTVVDALVRYDLARVGMAGSNVALHVNNLFDREYVASCFNTYGCFWGAERQVVATATFRF

SEQ ID NO: 18753 - protein, 828 aa, Escherichia coli
MKLSRRSFMKANAVAAAAAAAGLSVPGVARAVVGQQEAIKWDKAPCRFCGTGCGVLVGTQQGRVVACQGDPDAPVNRGLNCIKGYFLPKIMYGKDRLTQPLLRMKNGKYDKEGEFTPITWDQAFDVMEEKFKTALKEKGPESIGMFGSGQWTIWEGYAASKLFKAGFRSNNIDPNARHCMASAVVGFMRTFGMDEPMGCYDDIEQADAFVLWGANMAEMHPILWSRITNRRLSNQDVTVAVLSTYQHRSFELADNGIIFTPQSDLVILNYIANYIIQNNAINQDFFSKHVNLRKGATDIGYGLRPTHPLEKAAKNPGSDASEPMSFEDYKAFVAEYTLEKTAEMTGVPKDQVEQLAQLYADPNKKVISYWTMGFNQHTRGVWANNLVYNLHLLTGKISQPGCGPFSLTGQPSACGTAREVGTFAHRLPADMVVTNEKHRDICEKKWNIPSGTIPAKIGLHAVAQDRALKDGKLNVYWTMCTNNMQAGPNINEERMPGWRDPRNFIIVSDPYPTVSALAADLILPTAMWVEKEGAYGNAERRTQFWRQQVQAPGEAKSDLWQLVQFSRRFKTEEVWPEELLAKKPELRGKTLYEVLYATPEVSKFPVSELAEDQLNDESRELGFYLQKGLFEEYAWFGRGHGHDLAPFDDYHKARGLRWPVVNGKETQWRYSEGNDPYVKAGEGYKFYGKPDGKAVIFALPFEPAAEAPDEEYDLWLSTGRVLEHWHTGSMTRRVPELHRAFPEAVLFIHPLDAKARDLRRGDKVKVVSRRGEVISIVETRGRNRPPQGLVYMPFFDAAQLVNKLTLDATDPLSKETDFKKCAVKLEKV

SEQ ID NO: 18754 - protein, 869 aa, Escherichia coli; identical to SEQ ID NO: 6956

SEQ ID NO: 18755 - protein, 200 aa, Escherichia coli; identical to SEQ ID NO: 1788

SEQ ID NO: 18756 - protein, 334 aa, Escherichia coli; identical to SEQ ID NO: 2743

SEQ ID NO: 18757 - protein, 232 aa, Escherichia coli
MDRMMKSKFVALALSLFLSQSVLAGGVGLSSTRVIYDGSKKEASLTVQNKSKTEEFLIQSWVDDAAGSKKTPFIITPPLFKLDPEKNNILRIVNITPGLPQDRESVYWVNVKAIPSKSDDSENKNVLQIAVRTRIKLFYRPAGLKGDVKTAPNELRFTRNGNQLRVDNPTVFNITFNQFFANDKEIEKAGMVPAKGALNITLPAGVGSVSKIKYNTINDFGSSAEMITKNVD

SEQ ID NO: 18758 - protein, 678 aa, Escherichia coli; identical to SEQ ID NO: 2902

SEQ ID NO: 18759 - protein, 230 aa, Escherichia coli; identical to SEQ ID NO: 5433

SEQ ID NO: 18760 - protein, 362 aa, Escherichia coli; identical to SEQ ID NO: 2998

SEQ ID NO: 18761 - protein, 700 aa, Escherichia coli; identical to SEQ ID NO: 2926

SEQ ID NO: 18762 - protein, 104 aa, Escherichia coli
MTMKKVLALVVAAAMGLSSAAFAAETATTPAPTATTTKAAPAKTTHHKKQHKAAPAQKAQAAKKHHKNTKAEQKAPEQKAQAAKKHAKKHSHQQPAKPAAQPAA

SEQ ID NO: 18763 - protein, 782 aa, Escherichia coli; identical to SEQ ID NO: 5513

SEQ ID NO: 18764 - protein, 243 aa, Escherichia coli
MLMFPLVKKTVSALFVSTLLASAPAFADIIISGTRIIYNADKKDVNVRLENKGNRPLLIQNWLDTGDDNADPSQIKVPFTATPPVSRVEPKRGQTVKVMYTGATALPKDRESVYWFNVLEVPPKPKDAEADKNLLQLAFRTRIKLFYRLSGLQGEPAEAPAKITWKLNNAQLQANNPTPYYVSFNEVKLESGGKTYNVNSSMVTPFSQASFGVTGLPGSVSSGKVVFKAINDFGGNIDGSATF

SEQ ID NO: 18765 - protein, 208 aa, Escherichia coli; identical to SEQ ID NO: 1949

SEQ ID NO: 18766 - protein, 162 aa, Escherichia coli; identical to SEQ ID NO: 1969

SEQ ID NO: 18767 - protein, 351 aa, Escherichia coli; identical to SEQ ID NO: 2872

SEQ ID NO: 18768 - protein, 366 aa, Escherichia coli
MVIKFLSALILLLVTTAAQAERIRDLTSVQGVRQNSLIGYGLVVGLDGTGDQTTQTPFTTQTLNNMLSQLGITVPTGTNMQLKNVAAVMVTASLPPFGRQGQTIDVVVSSMGNAKSLRGGTLLMTPLKGVDSQVYALAQGNILVGGAGASAGGSSVQVNQLNGGRITNGAVIERELPSQFGVGNTLNLQLNDEDFSMAQQIADTINRVRGYGSATALDARTIQVRVPSGNSSQVRFLADIQNMQVNVTPQDAKVVINSRTGSVVMNREVTLDSCAIAQGNLSVTVNRQANVSQPDTPFGGGQTVVTPQTQIDLRQSGGSLQSVRSSASLNNVVRALNALGATPMDLMSILQSMQSAGCLRAKLEII

SEQ ID NO: 18769 - protein, 614 aa, Escherichia coli; identical to SEQ ID NO: 4469

SEQ ID NO: 18770 - protein, 518 aa, Escherichia coli; identical to SEQ ID NO: 2349

SEQ ID NO: 18771 - protein, 511 aa, Escherichia coli; identical to SEQ ID NO: 2457

SEQ ID NO: 18772 - protein, 659 aa, Escherichia coli; identical to SEQ ID NO: 2942

SEQ ID NO: 18773 - protein, 412 aa, Escherichia coli; identical to SEQ ID NO: 2908

SEQ ID NO: 18774 - protein, 478 aa, Escherichia coli; identical to SEQ ID NO: 2404

SEQ ID NO: 18775 - protein, 191 aa, Escherichia coli; identical to SEQ ID NO: 2727

SEQ ID NO: 18776 - protein, 122 aa, Escherichia coli; identical to SEQ ID NO: 2915

SEQ ID NO: 18777 - protein, 243 aa, Escherichia coli; identical to SEQ ID NO: 4409

SEQ ID NO: 18778 - protein, 461 aa, Escherichia coli
MTERELSIIRALGEEFSTVLADLQRTFEGKMASQAQAFEEKLTSLSAVLQKHVTVDEVRPVLQAMVDDAVGAIPVPRDGRDYDPDVLQQAVNDAVANIPVPADGKSITPDDVRPMLEQMVKEAVSHIPVPRDGRDYDPDVLQQAVNDAVANIPVPADGKSITPDDVRPMLEQMVKEAVSHIPVPRDGRDYDPEVLKQAVNDAVANIPVPADGKSITPDDVRPMLEQMVKEAVSHIPVPRDGRDYDPEVLQKAVNDAVANIPVPADGKSITPDDVRPMLEQMVKEAVSHIPVPRDGRDYDPDVLQKAVLDAVRALPAPQDGRDATALEIIPAIDDQKSFPRGTYATHQGGLWRAYEKTHGMRGWECLVDGVADIDVSMTGERSFTVVVRQSSGQRTEKTFSLPVMLYRGVFRAGETYHPGDTVTWGGSLWHCNSMTGDKPGEAHSSGWTLAAKRGRDAGGGK

SEQ ID NO: 18779 - protein, 660 aa, Escherichia coli; identical to SEQ ID NO: 4092

SEQ ID NO: 18780 - protein, 431 aa, Escherichia coli
MMKQALRVAFGFLILWASVLHAEVRIVIDSGVDSGRPIGVVPFQWAGPGAAPEDIGGIVAADLRNSGKFNPLDRAHLPQQPGSAQEVQPAAWSALGIDAVVVGQVTPNPDGSYNVAYQLVDTGGAPGTVLAQNSYKVNKQWLRYAGHTASDEVFEKLTGIKGAFRTRIAYVVQTNGGQFPYELRVSDYDGYNQFVVHRSPQPLMSPAWSPDGSKLAYVTFESGRSALVIQTLANGAVRQVASFPRHNGAPAFSPDGSKLAFALSKTGSLNLYVMDLASGQIRQVTDGRSNNTEPTWFPDSQNLAFTSDQAGRPQVYKVNINGGAPQRITWEGSQNQDADVSSDGKFMVMVSSNGGQQHIAKQDLATGGVQVLSSTFLDETPSLAPNGTMVIYSSSQGMGSVLNLVSTDGRFKARLPATDGQVKFPAWSPYL

SEQ ID NO: 18781 - protein, 239 aa, Escherichia coli; identical to SEQ ID NO: 4453

SEQ ID NO: 18782 - protein, 656 aa, Escherichia coli; identical to SEQ ID NO: 6982

SEQ ID NO: 18783 - protein, 213 aa, Escherichia coli; identical to SEQ ID NO: 2232

SEQ ID NO: 18784 - protein, 227 aa, Escherichia coli; identical to SEQ ID NO: 3570

SEQ ID NO: 18785 - protein, 233 aa, Escherichia coli; identical to SEQ ID NO: 2005

SEQ ID NO: 18786 - protein, 127 aa, Escherichia coli; identical to SEQ ID NO: 5431

SEQ ID NO: 18787 - protein, 232 aa, Escherichia coli; identical to SEQ ID NO: 2087

SEQ ID NO: 18788 - protein, 252 aa, Escherichia coli; identical to SEQ ID NO: 5502

SEQ ID NO: 18789 - protein, 241 aa, Escherichia coli; identical to SEQ ID NO: 2887

SEQ ID NO: 18790 - protein, 713 aa, Escherichia coli; identical to SEQ ID NO: 3523

SEQ ID NO: 18791 - protein, 367 aa, Escherichia coli; identical to SEQ ID NO: 2431

SEQ ID NO: 18792 - protein, 816 aa, Escherichia coli
MLRTTRWVAAIIFLYSFPGYAEETFDTHFMIGGMKGEKVSEYHFDNKQPLPGNYELDFYVNNQWRGKQDITIPESPVKPCLPKVLLTKLGVKTGNLNTEDNCILLDKAVHGGQYQWDISEHRLNLTVPQAYINELERGYVPPESWDRGIDAFYTSYNLSQYRSYDSNNNSNTASYGRFNSGLNLFSWQLHSDASYSKPDDMKGKWQSNTLYLERGWSQILSTVQIGENYTSSLIFDSLRFSGIRLFRDMQMLPDSMQSFTPLVQGVAQSNALITVSQNGYTIYQKEVPPGPFTIADLQLSGSGSDLDVSIKEADGSVRSFLVPYSSVPNMLQPGVSNFDFIAGRSQIYGVKNQEDFLEANYIYGLNNLLTLYGGTILSDNYNAITLGNGWNTPLGAISFDATRSSSKLNNDTRHEGTSYQVAYNKYLLQTATHFSVAAWRYASQDYRTFSDHLYENDKINHQSDYDDFYDIGRKNSLSANIMQPLSNNLGNVSLSALWRNYWGRSGNAKDYQFSYSNNWQHISYTFSASQSYDENDKEEERFNLFISIPFYWGDDIAKTRHQINLSNSTSFSKDGYSSNNTGITGIAGEHDQLNYGIYVNQQQQNNDTSLGTNLSWRTPIATIDGSYSHSKNAWQSGGSISSGLVVWPGGINITNQLSDTFAILDAPGLEGAHINGQKYNRTNSKGQVVYDLMIPHRENHLVLDIANSESETELQGNRQIIAPYRGAVSYVQFTTDQRKPWYIQALRPDGSPLTFGYDVLDLQENNIGVVGQGSRLFIRVDEIPTGIKVALNDEQNLFCTITFQHVIDENKTYICQ

SEQ ID NO: 18793 - protein, 840 aa, Escherichia coli
MNNKNTFTGDKLSHAIKIALSGVVCSLLFVLPVHAVEFNVDMIDVEDRENIDISRFEKKGYITPGKYLVRVQINKNMLPQTLILEWVKADNESGSLLCLTKENLTSFGLNTEFIESLQTIAGSECLNLSQRQELTTRLDKATMILSLSVPQAWLKYQATNWTPPEFWDAGIAGFILDYNMYASQYAPHHGDSTQNVSSYGTLGFNLGAWRLRSDYQYNQNFADGRSVNHDSEFARTYLFRPIPSWSSKFTMGQYDLSSNLYDTFHFTGASLESDESMLPPDLQGYAPQITGIAQTNAKVTVAQNGRVLYQTTVAPGPFTISDLGQSFQGQLDVTVEEEDGRTSTFQVGSASIPYLTRKGQVRYKTSLGKPTSVGHNDINNPFFWTAEASWGWLNNVSLYGGGMFTADDYQAITTGIGFNLNQFGSLSFDVTGADASLQQQNSDNLRGYSYRFNYAKHFESTGSQITFAGYRFSDKDYVSMSEYLSSRNGDESIDNEKESYVISLNQYFETLELNSYLNVTRNTYWDSASNTNYSVSVSKNFDIGDFKGISASLAVSRIRWDDDEENQYYFSFSLPLQQNRNISYSMQRTGSSNTSQMISWYDSSDRNNIWNISASATDDNIRDGEPTLRGSYQHYSPWGRLNINGSVQPNQYNSVTAGWYGSLTATRHGVALHDYSYGDNARMMVDTDGISGVEINSNRTVTNGLGIAVIPSLSNYTTSMLRVNNNDLPEGVDVENSVIRTTLTQGAIGYAKLNATTGYQIVGVIRQENGRFPPLGVNVTDQATGKDVGLVAEDGFVYLSGIQENSILHLTWGDNTCEVTPPNQSNISESAIILPCKTVK

SEQ ID NO: 18794 - protein, 840 aa, Escherichia coli
MTCTLLHVEDVIARTYSFNSSLLSGGGKGVDLTLFEEGGQLPGIYQTDIILNGSRVDSLEMPFHTEKDENGRPYLKTCLTQEMLARYGVKTEEYPALFRSLGGGSDTSGERGVCADLSAIPQATENYQFAAQQLVLGIPQVALRPLLRGIAPEVLWDDGIPAFLLNWQANAGRSEYRGYIKDVEDYFWSSLEPGINIGSWRIRNLTTWNKSSGQSGKWESLYIRAERGLNSLKSRLTLGENYTPSDIFDSVPFRGGMLSSDESMVPYNQREFAPVVRGIARTQARIEVRQNGYLIQSQTVAPGAFALTDLPVTGSGSDLQVTVRESDGTVQVFTVPFTTPAIALREGYLKYNVMAGQYRSSDDAVEDSTLGQVMGMYGLPWGLTVFGGLQGAEHYQSAALGLGWSLGKLGAVSLDTIHSRGQQKGYNYETGNTWRIRYNKSFELTGTSFTAASYQYSSSGYHTLSDVLETYRDDGRFAYRSTDSRTSRTTVNLSQSLGRWGYLGLNGSRDEYRDRPHQDYIGASYGASWNRMSLSVNWSRNHSTRGYYGSKSRTEDSISIWMSIPLESWLGRSDNNISATAQMQRSTEQNTRYELGLNGRAFDRRLFWEVHEQMVSGSEYNTGTSRLNLRWSGTYGELAGMYSYSSNMRQINAGMSGSMVAHGEGVTFGQRAGDTVTLIAAPGVSGASVGDWPGVRTDFRGYALAGYASPYQENVITLDPTTFPEDAEVPQTDSRVVPTKGAVVRAGFRTRVGGRALVSLTRQDGSSLPFGAIVTLEGKPGETSGSAGVVDDKGRVYLSGLSETGKLKAQWGENSLCHADYRLPEEKGPAGIFLTRTVCM

SEQ ID NO: 18795 - protein, 207 aa, Escherichia coli; identical to SEQ ID NO: 2211

SEQ ID NO: 18796 - protein, 866 aa, Escherichia coli; identical to SEQ ID NO: 3945

SEQ ID NO: 18797 - protein, 883 aa, Escherichia coli
MTAFRAAFKAYRMHQVLLLPRFARLTIALGLATAVFPVDAEYYFNPRFLSNDLAESVDLSAFTKGREAPPGTYRVDIYLNDEFMTSRDITFIADDNNADLIPCLSTELLVSLGIKKSALLDNKEHSAEKHVPDNSTCTPLQDRLADASTEFDVGQQHLSLSVPQIYVGRMARGYVSPDLWEEGINAGLLNYSFNGNSINNRSNHNAGKSNYAYLNLQSGINIGSWRLRDNSTWSYNSGSSNSSDSNKWQHINTSAERDIIPLRSRLTVGDSYTDGDIFDSVNFRGLKINSTEAMLPDSQHGFAPVIHGIARGTAQVSVKQNGYDVYQTTVPPGPFTIDDINSAANGGDLQVTIKEADGSIQTLYVPYSSVPVLQRAGYTRYALAMGEYRSGNNLQSSPKFIQGSLMHGLEGNWTPYGGMQIAENYQAFNLGIGKDLGLFGAFSFDITQANTTLADDTRHSGQSVKSVYSKSFYQTGTNIQVAGYRYSTQGFYNLSDSAYSRMSGYTVKPPTGDTNEQTQFIDYFNLFYSKRGQEQISISQQLGNYGTTFFSASRQSYWNTSRSDQQISFGLNVPFGDITTSLNYSYSNNIWQNDRDHLLAFTLNVPFSHWMRTDSQSAFRNSNASYSMSNDLKGGMTNLSGVYGTLLPDNNLNYSVQVGNTHGGNTSSGTSGYSSLNYRGAYGNTNVGYSRSGDSSQIYYGMSGGIIAHADGITFGQPLGDTMVLVKAPGADNVKIENQTGIHTDWRGYAILPFATEYRENRVALNANSLADNVELDETVVTVIPTHGAIARATFNAQIGGKVLMTLKYGNKSVPFGAIVTHGENKNGSIVAENGQVYLTGLPQSGKLQVSWGNDKNSNCIVDYKLPEVSPGTLLNQQTAICR

SEQ ID NO: 18798 - protein, 831 aa, Escherichia coli
MQELSMLRMTPLASAIVALLLGIEAYAAEETFDTHFMIGGMKDQQVANIRLDDNQPLPGQYDIDIYVNKQWRGKYEIIVKDNPQETCLSREVIKRLGINSDNFASGKQCLTFEQLVQGGSYSWDIGVFRLDFSVPQAWVEELESGYVPPENWERGINAFYTSYYVSQYYSDYKASGNNKSTYVRFNSGLNLLGWQLHSDASFSKTNNNPGVWKSNTLYLERGFAQLLGTLRVGDMYTSSDIFDSVRFSGVRLFRDMQMLPNSKQNFTPRVQGIAQSNALVTIEQNGFVVYQKEVPPGPFAITDLQLAGGGADLDVSVKEADGSVTTYLVPYAAVPNMLQPGVSKYDFAAGRSHIEGASKQSDFVQAGYQYGFNNLLTLYGGSMVANNYYAFTLGTSWNTRIGAISVDATKSHSKQDNGDVFDGQSYQIAYNKFVSQTSTRFGLAAWRYSSRDYRTFNDHVWANNKDNYRRDENDIYDIADYYQNDFGRKNSFSANMSQSLPEGWGSVSLSTLWRDYWGRSGSSKDYQLSYSNNLRRISYTLAASQAYDENHHEEKRFNIFISIPFDWGDDVTTPRRQIYMSNSTTFDDQGFASNNTGLSGTVGNRDQFNYGVNLSHQHQGNETTAGANLTWNAPVATVNGSYSQSSTYRQAGASVSGGIVAWSGGVNLANRLSETFAVMNAPGIKDAYVNGQKYRTTNRNGVVVYDGMTPYRENHLMLDVSQSDSEAELRGNRKIAAPYRGAVVLVNFDTDQRKPWFIKALRTDGQPLTFGYEVNDIHGHNIGVVGQGSQLFIRTNEVPPSVNVAIDKQQGLSCTITFGKEIDESRNYICQ

SEQ ID NO: 18799 - protein, 819 aa, Escherichia coli
MDTVNIYRLSFISCLVMAMPSALAVEFNLNVLDKSMRDRIDISLLKEKGVIAPGEYFVSVAVNNNQISNGQKINWQKKGDKTIPCINDSLVDKFGLKPDIRQSLPQIDRCIDFSSRPEMLFNFDQANQQLNISIPQAWLAWHSENWAPPSTWKEGVAGVLMDYNLFASSYRPQDGSSSTNLNAYGTAGINAGAWRLRSDYQLNKTDSEDNHDQSGEISRTYLFRPLPQLGSKLTLGETDFSSNIFDSFSYTGAALASDDRMLPWELRGYAPQISGIAQTNATVTISQSGRVIYQKKVPPGPFIIDDLNQSVQGTLDVKVTEEDGRVNNFQVSAASTPFLTRQGQVRYKLTAGQPRPSMSHQTENETFFSNEVSWGMLSNTSLYGGLLISGDNYHSAAMGIGQNMLWLGALSFDVTWASSQFDTQQDERGLSYRFNYSKQVDATNSTISLAAYRFSDRHFHSYANYLDHKYNDNDAQDEKQTISLSVGQPITPLNLNLYANLLHQTWWNADASTTANITAGFNVDIGNWRDISISTSFNTTHYEDKDRDNQIYLSISLPFGNGGRVGYDMQNSGHSTTHRMSWNDTLDERNSWGMSTGLQSDRPDNGAQVSGNYQHLSSAGEWDISGTYAANDYSSVSSSWSGSFTATQYGAAFHRRSSTNEPRLMVSTDGVADIPVQGNLDYTNHFGIAVVPLISSYQPSTVAVNMNDLPDGVTVADNVIKETWIEGAIGYKSLASRSGKDVNVIIRNASGQFPPLGADIRQEDSGISVGMVGEEGHAWLSGVAENQQFTVIWGDSQRCSIHLPEHMEDTANRLILPCH

SEQ ID NO: 18800 - protein, 879 aa, Escherichia coli
MPEHSFLRLRGLSWWIALAISGSPFNALADDIIQFDGRFLDLKGNTKIDLGRFSQKGYVEPGKYNLRVHVNNQPLPDDYDIYWYATENDPNKSYACLSPELVAQFGLKEDIAKNLQWIRDGQCLNTALLAGTEISGDLGQSALLVSVPQAYLEYTDSEWDPPSRWDDGIPGLIADYSINAQTRHENGGDDTNDISGNGTVGVNVGPWRLRADWQSDYQHTRSNDDGDTDDSGTQKNWEWSRYYAWRALPSLKAKLSLGEDYLNSDIFDGFSYIGGSISTDDQMLPPNLRGYAPDISGVAHTTAKVTVTQMGRVIYETQVPAGPFRIQDIGDSVSGTLHVRIEEQNGQVQEYDVSTASMPFLTRPGQVRYKVTMGRPQNWDHQVAGSFFSGGEASWGIANGWSLYGGALADENYQSAALGLGRDLALLGALAFDVTHSRVQLDDNSVYGNKTLDGNSYRVSYAKDFDELNSRVTFAGYRFSEKNYMTMSEYLDANDDDRARTGNDKEMYTVTYNQNFTDARVSVYLNYSHHTYWDRQDQTNYNMMLSHYFNLGSLRNLSVSLTGYRYEYDKSADKGVYLSLSLPWGDNSTISYNGNYGSGADSNQVSLYHRIDDASHYTVSAGTSENHSSVDGYYSHDGTLAKVDLSANYHEGQYTSAGISLQGGATLTAHGGALHRTQNMGGTRLLIDADGVANVAVEGNGSAVYTNMFGKAVVADVNDYYRNQAYIDLNKLPENAEATKSVVQATLTEGAIGYRKFAVISGEKAMAVLRLQDGSHPPFGAEVKNDNQQQVGLVDDEGNVYLAGVKPGEHMTVFWEGESHCDISLPDPLPNDLFNGLLLPCQQKGGSSPVIPHDIQPVIQEQTQQVTPMEPPMSVSSNQ

SEQ ID NO: 18801 - protein, 161 aa, Escherichia coli; identical to SEQ ID NO: 2582

SEQ ID NO: 18802 - protein, 266 aa, Escherichia coli; identical to SEQ ID NO: 1894

SEQ ID NO: 18803 - protein, 869 aa, Escherichia coli
MKIPTTTDIPQRYTWCLAGICYSSLAILPSFLSYAESYFNPAFLLENGTSVADLSRFERGNHQPAGVYRVDLWRNDEFIGSQDIVFESTTVNTGDKSGGLMPCFNQALLERIGLNSSAFPELAQQQNNKCINLLKAVPDATINFDFAAMRLNITIPQIALLSSAHGYIPPEEWDEGIPALLLNYNFTGNRGNGNDSYFFSELSGINIGPWRLRNNGSWNYFRGNGYHSEQWNNIGTWVQRAIIPLKSELVMGDGNTGSDIFDGVGFRGVRLYSSDNMYPDSQQGFAPTVRGIARTAAQLTIRQNGFIIYQSYVSPGAFEITDLHPTSSNGDLDVTIDERDGNQQNYTIPYSTVPILQREGRFKFDLTAGDFRSGNSQQSSPFFFQGTALGGLPQEFTAYGGTQLSANYTAFLLGLGRNLGNWGAVSLDVTHARSQLADDSRHEGDSIRFLYAKSMNTFGTNFQLMGYRYSTQGFYTLDDVAYRRMEGYEYDYDYDGEHRDEPIIVNYHNLRFSRKDRLQLNISQSLNDFGSLYISGTHQKYWNTSDSDTWYQVGYTSSWVGISYSLSFSWNESVGIPDNERIVGLNVSVPFNVLTKRRYTRENALDRAYASFNANRNSNGQNSWLAGVGGTLLEGHNLSYHVSQGDTSNNGYTGSATANWQAAYGTLGVGYNYDRDQHDVNWQLSGGVVGHENGITLSQPLGDTNVLIKAPGAGGVRIENQTGILTDWRGYAVMPYATVYRYNRIALDTNTMGNSIDVEKNISSVVPTQGALVRANFDTRIGVRALITVTQGGKPVPFGSLVRENSTGITSMVGDDGQVYLSGAPLSGELLVQWGDGANSRCIAHYVLPKQRLQQAVTVISAVCTHPGS

SEQ ID NO: 18804 - protein, 368 aa, Escherichia coli; identical to SEQ ID NO: 3933

SEQ ID NO: 18805 - protein, 517 aa, Escherichia coli; identical to SEQ ID NO: 2462

SEQ ID NO: 18806 - protein, 232 aa, Escherichia coli
MQKNAAHTYAISSLLVLSLTGCAWIPSTPLVQGATSAQPVPGPTPVANGSIFQSAQPINYGYQPLFEDRRPRNIGDTLTIVLQENVSASKSSSANASRDGKTNFGFDTVPRYLQGLFGNARADVEASGGNTFNGKGGANASNTFSGTLTVTVDQVLANGNLHVVGEKQIAINQGTEFIRFSGVVNPRTISGSNTVPSTQVADARIEYVGNGYINEAQNMGWLQRFFLNLSPM

SEQ ID NO: 18807 - protein, 200 aa, Escherichia coli; identical to SEQ ID NO: 1801

SEQ ID NO: 18808 - protein, 686 aa, Escherichia coli; identical to SEQ ID NO: 3015

SEQ ID NO: 18809 - protein, 678 aa, Escherichia coli; identical to SEQ ID NO: 15117

SEQ ID NO: 18810 - protein, 686 aa, Escherichia coli
MIVEGSATTPVDDENDYSVTSTSAGTKMQMTQRDIPQSVTIVSQQRMEDQQLQTLGEVMENTLGISKSQADSDRALYYSRGFQIDNYMVDGIPTYFESRWNLGDALSDMALFERVEVVRGATGLMTGTGNPSAAINMVRKHATSREFKGDVSAEYGSWNKERYVADLQSPLTEDGKIRARIVGGYQNNDSWLDRYNSEKTFFSGIVDADLGDLTTLSAGYEYQRIDVNSPTWGGLPRWNTDGSSNSYDRARSTAPDWAYNDKEINKVFMTLKQRFADTWQATLNATHSEVEFDSKMMYVDAYVNKADGMLVGPYSNYGPGFDYVGGTGWNSGKRKVDALDLFADGSYELFGRQHNLMFGGSYSKQNNRYFSSWANIFPNEIGSFYNFNGNFPQTDWSPQSLAQDDTTHMKSLYAATRVTLADPLHLILGARYTNWRVDTLTYSMEKNHTTPYAGLVFDINDNWSTYASYTSIFQPQNDRDSSGKYLAPITGNNYELGLKSDWMNSRLTTTLAIFRIEQDNVAQSTGTPIPGSNGETAYKAVDGTVSKGVEFELNGAITDNWQLTFGATRYIAEDNEGNAVNPNLPRTTVKMFTSYRLPVMPELTVGGGVNWQNRVYTDTVTPYGTFRAEQGSYALVDLFTRYQVTKNFSLQGNVNNLFDKTYDTNVEGSIVYGAPRNFSITGTYQF

SEQ ID NO: 18811 - protein, 213 aa, Escherichia coli; identical to SEQ ID NO: 2232

SEQ ID NO: 18812 - protein, 565 aa, Escherichia coli
MKSPAASRPLKMALIPACIFLCFAALSVQAEETPVTPQPPDILLGPLFNDVQNAKLFPDQKTFADAVPNSDPLMILADYRMQQNQSGFDLRHFVNVNFTLPKEGEKYVPPKGQSLREHIDGLWPVLTRSTESTEKWDSLLPLPEPYVVPGGRFREVYYWDSYFTMLGLAESGHWDKVADMVANFAHEIDTYGHIPNGNRSYYLSRSQPPFFALMVELLAQHEGDAALKQYLPQMQKEYAYWMDGVENLQAGQQEKRVVKLQDGTLLNRYWDDRDTPRPESWVEDIATAKSNPNRPATEIYRDLRSAAASGWDFSSRWMDNPQQLNTLRTTSIVPVDLNSLMFKMEKILARASKASGDNAMANQYETLANARQKGIEKYLWNDQQGWYADYDLKSHKVRNQLTAAALFPLYVNAAAKDRANKMATATKTHLLQPGGLNTTSVKSGQQWDAPNGWAPLQWVATEGLQNYGQNEVAMDISWHFLTNVQHTYDREKKLVEKYDVSTTGTGGGGGEYPLQDGFGWTNGVTLKMLDLICPKEQPCDNVPATRPLSESTTQPVKQKEAEPTP

SEQ ID NO: 18813 - protein, 249 aa, Escherichia coli
MTKYLSAKTLTTVLSLLAATVSFSTQASVTPDRTRLIFNESDKSISVTLRNNDPKLPYLAQSWIEDEKGVKISSPLAVLPPVQRIDAMMNGQVKIQGLPDIHKLPADRESMFYFNVREIPPKSNKSNTLQIALQTRIKLFWRPKALEKNTTQNPWQHKVTLTRNGQEFTVNNPTPYYVIFSNASAQKNGNPAAGFSPIVMSPKTSAPLNVKMGSVPVLTYVNDYGARMPLFFTCNGNSCQVDEEQSRKG

SEQ ID NO: 18814 - protein, 518 aa, Escherichia coli; identical to SEQ ID NO: 2349

SEQ ID NO: 18815 - protein, 230 aa, Escherichia coli; identical to SEQ ID NO: 2580

SEQ ID NO: 18816 - protein, 118 aa, Escherichia coli [sequence omitted]

SEQ ID NO: 18817 - protein, 366 aa, Escherichia coli; identical to SEQ ID NO: 4014

SEQ ID NO: 18818 - protein, 357 aa, Escherichia coli; identical to SEQ ID NO: 2888

SEQ ID NO: 18819 - protein, 221 aa, Escherichia coli; identical to SEQ ID NO: 4116

SEQ ID NO: 18820 - protein, 239 aa, Escherichia coli; identical to SEQ ID NO: 5139

SEQ ID NO: 18821 - protein, 673 aa, Escherichia coli
MKMTRLYPLALGGLLLPAIANAQTSQQDESTLVVTASKQSSRSASANNVSSTVVSAPELSDAGVTASDKLPRVLPGLNIENSGNMLFSTISLRGVSSAQDFYNPAVTLYVDGVPQLSTNTIQALTDVQSVELLRGPQGTLYGKSAQGGIINIVTQQPDSTPRGYIEGGVSSRDSYRSKFNLSGPIQDGLLYGSVTLLRQVDDGDMINPATGSDDLGGTRASIGNVKLRLAPDDQPWEMGFAASRECTRATQDAYVGWNDIKGRKLSISDGSPDPYMRRCTDSQTLSGKYTTDDWVFNLISAWQQQHYSRTFPSGSLIVNMPQRWNQDVQELRAATLGDARTVDMVFGLYRQNTREKLNSAYDMPTMPYLSSTGYTTAETLAAYSDLTWHLTDRFDIGGGVRFSHDKSSTQYHGSMLGNPFGDQGKSNDDQVLGQLSAGYMLTDDWRVYTRVAQGYKPSGYNIVPTAGLDAKPFVAEKSINYELGTRYETADVTLQAATFYTHTKDMQLYSGPVGMKTLSNAGKADATGVELEAKWRFAPGWSWDINGNVIRSEFTNDSELYHGNRVPFVPRYGAGSSVNGVIDTRYGALMPRLAVNLVGPHYFDGDNQLRQGTYATLDSSLGWQATERMNISVYVDNLFDRRYRTYGYMNGSSAVAQVNMGRTVGINTRIDFF

SEQ ID NO: 18822 - protein, 203 aa, Escherichia coli
MKKIAITCALLSSLVASSVWADAASDLKSRLDKVSSFHASFTQKVTDGSGAAVQEGQGDLWVKRPNLFNWHMTQPDESILVSDGKTLWFYNPFVEQATATWLKDATGNTPFMLIARNQSSDWQQYNIKQNGDDFVLTPKASNGNLKQFTINVGRDGTIHQFSAVEQDDQRSSYQLKSQQNGTVDAAKFTFTPPQGVTVDDQRK

SEQ ID NO: 18823 - protein, 250 aa, Escherichia coli; identical to SEQ ID NO: 15254

SEQ ID NO: 18824 - protein, 243 aa, Escherichia coli; identical to SEQ ID NO: 15099

SEQ ID NO: 18825 - protein, 749 aa, Escherichia coli; identical to SEQ ID NO: 17717

SEQ ID NO: 18826 - protein, 237 aa, Escherichia coli; identical to SEQ ID NO: 1814

SEQ ID NO: 18827 - protein, 628 aa, Escherichia coli
MKPAASFFYCGCFTMIKKASLLTACSVTAFSAWAQDTSPDTLVVTANRFEQPRSTVLAPTTVVTRQDIDRWQSTSVNDVLRRLPGVDITQNGGSGQLSSIFIRGTNASHVLVLIDGVRLNLAGVSGSADLSQFPIALVQRVEYIRGPRSAVYGSDAIGGVVNIITTRDEPGTEISAGWGSNSYQNYDVSTQQQLGDKTRVTLLGDYAHTHGYDVVAYGNTGTQAQTDNDGFLSKTLYGALEHNFTDAWSGFVRGYGYDNRTNYDAYYSPGSPLLDTRKLYSQSWDAGLRYNGELIKSQLITSYSHSKDYNYDPHYGRYDSSATLDEMKQYTVQWANNVTVGHGNIGAGVDWQKQTTTPGTGYVEDGYDQRNTGIYLTGLQQVGDFTFEGAARSDDNSQFGRHGTWQTSAGWEFIEGYRFIASYGTSYKAPNLGQLYGFYGNPNLNPEKSKQWEGAFEGLTAGVNWRISGYRNDVSDLIDYDDHTLKYYNEGKARIKGVEATANFDTGPLTHTVSYDYVDARNAITDTPLLRRAKQQVKYQLDWQLYDFDWGITYQYLGTRYDKDYSSYPYQTVKMGGVSLWDLAVAYPVTSHLTVRGKIANLFDKDYETVYGYQTAGREYTLSGSYTF

SEQ ID NO: 18828 - protein, 102 aa, Escherichia coli; identical to SEQ ID NO: 1823

SEQ ID NO: 18829 - protein, 208 aa, Escherichia coli; identical to SEQ ID NO: 1949

SEQ ID NO: 18830 - protein, 243 aa, Escherichia coli; identical to SEQ ID NO: 4001

SEQ ID NO: 18831 - protein, 713 aa, Escherichia coli; identical to SEQ ID NO: 3523

SEQ ID NO: 18832 - protein, 430 aa, Escherichia coli; identical to SEQ ID NO: 2617

SEQ ID NO: 18833 - protein, 368 aa, Escherichia coli; identical to SEQ ID NO: 2962

SEQ ID NO: 18834 - protein, 551 aa, Escherichia coli
MDRRRFIKGSMAMAAVCGTSGIASLFSQAAFAADSDIADGQTQRFDFSILQSMAHDLAQTAWRGAPRPLPDTLATMTPQAYNSIQYDAEKSLWHNVENRQLDAQFFHMGMGFRRRVRMFSVDPATHLAREIHFRPELFKYNDAGVDTKQLEGQSDLGFAGFRVFKAPELARRDVVSFLGASYFRAVDDTYQYGLSARGLAIDTYTDSKEEFPDFTAFWFDTVKPGATTFTVYALLDSASITGAYKFTIHCEKSQVIMDVENHLYARKDIKQLGIAPMTSMFSCGTNERRMCDTIHPQIHDSDRLSMWRGNGEWICRPLNNPQKLQFNAYTDNNPKGFGLLQLDRDFSHYQDIMGWYNKRPSLWVEPRNKWGKGTIGLMEIPTTGETLDNIVCFWQPEKAVKAGDEFAFQYRLYWSAQPPVHCPLARVMATRTGMGGFPEGWAPGEHYPEKWARRFAVDFVGGDLKAAAPKGIEPVITLSSGEAKQIEILYIEPIEGYRIQFDWYPTSDSTDPVDMRMYLRCQGDAISETWLYQYFPPAPDKRQYVDDRVMS

SEQ ID NO: 18835 - protein, 656 aa, Escherichia coli
MRLKKRYLCTALSLAFTQQAVAAQESDTLTVWSSPVSSTTTTVLDQPTMKALDKQNVAQALSVVPGVVLQKSGSRNEEQVKVRGFDSRQVPVYFDGVPIYVPYDGNLDLARILTNNLGAVEVSKGYSSLLQGPNQMGGAINITTQKPTKPLEANLGYRQGWSRSQDNAYDMHASFAASSDLGYLQVSGSQLKQDFLGLPHGVNNDIAGKHGKMINSSADDKRGIVKLGFTPRENDEYTLTYIKQDGEKDNPPYSGNSGQKSRYWQWPEYDKESFYYQGTTQLNDRFTLKSRLYRDTFENTLMMYNSLADLKNKKGSYSHYSDYSDGAGLQLAADVRENDLLSFAVNWKDDVHREKGAPHAAYDRYEDRTWSLASEYQWAAADNVDVVAGISYDWRDSVEAKKHEKDGSITHYDDNNQSAFNWQVMGKYHFANEDTLALSYYDRTRFPTLKERYTTSKPAYNQIAIVNPQLKPERARGVDLTWNGAFTHDWGFEVSVYYNRVSDAILSHNIDADTIQNQNSGTVDYSGLDAGIKGKISNILDVGLSYALIHADAKRKDIGKITDLPTQTMTAWMTLKPWEPLSVTLSEEARSSSYSNSDGSQKAAGFAVTHIRADYTLGHGFSVNASVNNLFDTQYAYSEGFIEEGRNFWAGIEYTF

SEQ ID NO: 18836 - protein, 828 aa, Escherichia coli; identical to SEQ ID NO: 2388

SEQ ID NO: 18837 - protein, 760 aa, Escherichia coli
MENNRNFPARQFHSLTFFAGLCISITPVAQALAAEGQANADDTLVVEASTPSLYAPQQSADPKFSRPVADTTRTMTVISEQVIKDQGATNLTDALKNVPGVGAFFAGENGNSTTGDAIYMRGADTSNSIYIDGIRDIGSVSRDTFNTEQVEVIKGPSGTDYGRSAPTGSINMISKQPRNDSGIDASASIGSAWFRRGTLDVNQVIGDTTAVRLNVMGEKTHDAGRDKVKNERYGVAPSVAFGLGTANRLYLNYLHVTQHNTPDGGIPTIGLPGYSAPSAGTAALNHSGKVDTHNFYGTDSDYDDSTTDTATMRFEHDINDNTTIRNTTRWSRVKQDYLMTAIMGGASNITQPTSDVNSWTWSRTANTKDVSNKILTNQTNLTSTFYTGSIGHDVSTGVEFTRETQTNYGVNPVTLPAVNIYHPDSSIHPGGLTRNGANANGQTDTFAIYAFDTLQITRDFELNGGIRLDNYHTEYDSATACGGSGRGAITCPAGMAKGSPVTTVDTAKSGNLVNWKAGALYHLTENGNVYINYAVSQQPPGGNNFALAQSGSGNSANRTDFKPQKANTSEIGTKWQVLDKRLLLTAALFRTDIENEVEQNDDGTYSQYGKKRVEGYEISVAGNITPAWQVIGGYTQQKATIKNGKDVAQDGSSSLPYTPEHAFTLWSQYQATDDISVGAGARYIGSMHKGSDGAVGTPAFTEGYWVADAKLGYRVNRNLDFQLNVYNLFDTDYVASINKSGYRYHPGEPRTFLLTANMHF

SEQ ID NO: 18838 - protein, 478 aa, Escherichia coli
MTRIKINARRIFSLLIPFFFFTSVHAEQTATPAKPVTVEAKNETFAPQHPDQYLSWKATSEQSERVDALAEDPRLVILWAGYPFSRDYNKPRGHAFAVTDVRETLRTGAPKNAEDGPLPMACWSCKSPDVARLIQKDGEDGYFHGKWARGGPEIVNNLGCADCHNTASPEFAKGKPELTLSRPYAARAMEAIGKPFEKAGRFDQQSMVCGQCHVEYYFDGKNKAVKFPWDDGMKVENMEQYYDKIAFSDWTNSLSKTPMLKAQHPEYETWTAGIHGKNNVTCIDCHMPKVQNAEGKLYTDHKIGNPFDNFAQTCANCHTQDKAALQKVVAERKQSINDLKIKVEDQLVHAHFEAKAALDAGATEAEMKPIQDDIRHAQWRWDLAIASHGIHMHAPEEGLRMLGTAMDKAADARTKLARLLATKGITHEIQIPDISTKEKAQQAIGLNMEQIKAEKQDFIKTVIPQWEEQARKNGLLSQ

SEQ ID NO: 18839 - protein, 274 aa, Escherichia coli; identical to SEQ ID NO: 2317

SEQ ID NO: 18840 - protein, 690 aa, Escherichia coli
MLPYARGRKEDVSDTHFIFVVTSWRYGMFRLNPFVRVGLCLSAISCAWPVLAVDDDSETMVVTASSVEQNLKDAPASISVITQEDLQRKPVQNLKDVLKEVPGVQLTNEGDNRKGVSIRGLDSSYTLILVDGKRVNSRNAVFRHNDFDLNWIPVDSIERIEVVRGPMSSLYGSDALGGVVNIITKKIGQKWSGTVTVDTTIQEHRDRGDTYNGQFFTSGPLIDGVLGMKAYGSLAKREKDDPQNSTTTDTGETPRIEGFSSRDGNVEFAWTPNQNHDFTAGYGFDRQDRDSDSLDKNRLERQNYSVSHNGRWDYGTSELKYYGEKVENKNPGNSSPITSESNTVDGKYTLPLTAINQFLTVGGEWRHDKLSDAVNLTGGTSSKTSASQYALFVEDEWRIFEPLALTTGVRMDDHETYGEHWSPRAYLVYNATDTVTVKGGWATAFKAPSLLQLSPDWTSNSCRGACKIVGSPDLKPETSESWELGLYYMGEEGWLEGVESSVTVFRNDVKDRISISRTSDVNAAPGYQNFVGFETGANGRRIPVFSYYNVNKARIQGVETELKIPFNDEWKLSINYTYNDGRDVSNGENKPLSDLPFHTANGTLDWKPLALEDWSFYVSGHYTGQKRADSATAKTPGGYTIWNTGAAWKVTKDVKLRAGVLNLGDKDLSRDDYSYNEDGRRYFMAVDYRF

SEQ ID NO: 18841 - protein, 660 aa, Escherichia coli
MSRPQFTSLRLSLLALAVSATLPTFAFATETMTVTATGNARSSFEAPMMVSVIDTSAPENQTATSATDLLRHVPGITLDGTGRTNGQDVNMRGYDHRGVLVLVDGVRQGTDTGHLNGTFLDPALIKRVEIVRGPSALLYGSGALGGVISYDTVDAKDLLQEGQSSGFRVFGTGGTGDHSLGLGASAFGRTENLDGIVAWSSRDRGDLRQSNGETAPNDESINNMLAKGTWQIDSAQSLSGLVRYYNNDAREPKNPQTVEASDSSNPMVDRSTIQRDAQLSYKLAPQGNDWLNADAKIYWSEVRINAQNTGSSGEYREQITKGAKLENRSTLFADSFASHLLTYGGEYYRQEQHPGGATTGFPQAKIDFSSGWLQDEITLRDLPITLLGGTRYDSYRGSSDGYKDVDADKWSSRAGMTINPANWLMLFGSYAQAFRAPTMGEMYNDSKHFSIGRFYTNYWVPNPNLRPETNETQEYGFGLRFDDLMLSNDALEFKASYFDTKAKDYISTTVDFAAATTMSYNVPNAKIWGWDVMTKYTTDLFSLDVAYNRTRGKDTDTGEYISSINPDTVTSTLNIPIAHSGFSVGWVGTFADRSTHISSSYSKQPGYGVNDFYVSYQGQQALKGMTTTLVLGNAFDKEYWSPQGIPQDGRNGKIFVSYQW

SEQ ID NO: 18842 - protein, 446 aa, Escherichia coli; identical to SEQ ID NO: 2182

SEQ ID NO: 18843 - protein, 245 aa, Escherichia coli
MKMTFMKGLPLLLLVASLCSHAALQPDRTRIVFNANDKATSLRVDNRSDKLPYLAYSWLENEKGEKSDDLLVALPPIQRLEPKATTQVRIVKQVSTTKLPGDRETLFFYNMREIPPAPEKNSGHAVLQVAIQSRIKVFWRPSALRKKAGEKVELQLQVSQQGNQLNLKNPTGYYLTIAYLGRNEQGILPGFKTVMVAPFSTVITNTGSYSGRQFYLGYMDDYGALRMTTLNCSGQCRLQAVEAKK

SEQ ID NO: 18844 - protein, 170 aa, Escherichia coli; identical to SEQ ID NO: 2565

SEQ ID NO: 18845 - protein, 432 aa, Escherichia coli; identical to SEQ ID NO: 2026

SEQ ID NO: 18846 - protein, 386 aa, Escherichia coli
MVDDVPVAQVLQALAEQEKLNLVVSPDVSGTVSLHLTDVPWKQALQTVVKSAGLITRQEGNILSVHSVAWQNDNIARQEAEQARAQANLPLENRNITLQYADAGELAKAGEKLLSAKGSMTVDKRTNRLLLRDNKTALSALEQWVAQMDLPVGQVELSAHIVTINEKSLRELGVKWTLADAQHAGGVGQVTTLGSDLSVATATTHVGFNIGRINGRLLDLELSALEQKQQLDIIASPRLLASHLQPASIKQGSEIPYQVSSGESGATSVEFKEAVLGMEVTPTVLQKGRIRLKLHISQNVPGQVLQQADGEVLAIDKQEIETQVEVKSGETLALGGIFTRKNKSGQDSVPLLGDIPWFGQLFRHDGKEDERRELVVFITPRLVSSE

SEQ ID NO: 18847 - protein, 567 aa, Escherichia coli; identical to SEQ ID NO: 4028

SEQ ID NO: 18848 - protein, 187 aa, Escherichia coli
MNQSKNASLIQAWIDDGNTTIAPEKIQVPFILTPPVSRVAGGSGQQLKIRKMPNNLPHNKESLFYLNVLDIPPNNPQNAGKNKIKLALQNRIKLLWRPSGIAPVDKKSLSQLNIKKKNNAISINNETANWITVTTIKAQNVKVNNESILLPPFSNNDITLKNNHASEYELTVVDDYGNNIHSKIAAR

SEQ ID NO: 18849 - protein, 351 aa, Escherichia coli; identical to SEQ ID NO: 2872

SEQ ID NO: 18850 - protein, 371 aa, Escherichia coli
MPESAMQNWIKAAAIAVSLALPGVALAQSLESLVNVQGVRENQLVGYSLVVGLDGTGDKNQVKFTNQTITNMLRQFGVQLPNKIDPKVKNVAAVAVSATLPPMYSRGQTIDVTVSSIGDAKSIRGGTLLLTQLHGADGEVYALAQGSVVVGGMNATGASGSSVTVNTPTAGLIPNGATVEREIPSDFQMGDTITLNLKRPSFKDANNIAAAINASFGGIATAQSSTNVTVRAPTSPGARVAFMSQLDDVQVQVEKIRARVVFNSRTGTVVMGDGVALHAAAVSHGSLTVSINETSNVSQPNAFAGGRTAVTPQSNIAVNHARPGVVSLPESSSLKTLVNALNSLGATPDDIMSILQALHEAGALDADLEVI

SEQ ID NO: 18851 - protein, 191 aa, Escherichia coli; identical to SEQ ID NO: 13179

SEQ ID NO: 18852 - protein, 222 aa, Escherichia coli
MSKLGISSLFKTILLTAALAVSFTASAFTEGTDYMVLEKPIPNADKTLIKVFSYACPFCYKYDKAVTGPVSEKVKDVVAFTPFHLETKGEYGKQASEVFAVLINKDKAAGISLFDANSQFKKAKFAYYAAYHDKKERWSDGKDPAAFIKTGLDAAGMSQADFEAALKEPAVQETLEKWKASYEVAKIQGVPAYVVNGKYLIYTKSIKSIDSMADLIRELASK

SEQ ID NO: 18853 - protein, 249 aa, Escherichia coli; identical to SEQ ID NO: 9840

SEQ ID NO: 18854 - protein, 334 aa, Escherichia coli
MKKNQFLKESDVTAESVFFMKRRQVLKALGISAAALSLPHAAHADLLSWFKGNDRPPALAGKALEFSKPAAWQNNLPLTPADKVSGYNNFYEFGLDKADPAANAGSLKTDPWTLKISGEVAKPLTLDHDDLTRRFPLEERIYRMRCVEAWSMVVPWIGSPLHKLLALAEPTSNAKYVAFETIYAPEQMPGQQDRFIGGGLKYPYVEGLRLDEAMHPLTLMTVGVYGKALPPQNGAPVRLIVPWKYGFKGIKSIVSIKLTRERPPTTWNLAAPDEYGFYANVNPHVDHPRWSQATERFIGSGGILDVQRQPTLLFNGYADQVASLYRGLDLRENF

SEQ ID NO: 18855 - protein, 366 aa, Escherichia coli
MVIKFLSALILLLVTTVAQAERIRDLTSVQGVRQNSLIGYGLVVGLDGTGDQTTQTPFTTQTLNNMLSQLGITVPTGTNMQLKNVAAVMVTASLPPFGRQGQTIDVVVSSMGNAKSLRGGTLLMTPLKGVDSQVYALAQGNILVGGAGASAGGSSVQVNQLNGGRITNGAVIERELPSQFGVGNTLNLQLNDEDFSMAQQIADTINRVRGYGSATALDARTIQVRVPSGNSSQVRFLADIQNMQVNVTPQDAKVVINSRTGSVVMNREVTLDSCAVAQGNLSVTVNRQANVSQPDTPFGGGQTVVTPQTQIDLRQSGGSLQSVRSSASLNNVVRALNALGATPMDLMSILQSMQSAGCLRAKLEII

SEQ ID NO: 18856 - protein, 162 aa, Escherichia coli; identical to SEQ ID NO: 1967

SEQ ID NO: 18857 - protein, 224 aa, Escherichia coli
MKGLLALLISSMVLPAHAGIVIYGTRIIYPAEHKEVMVQLMNQGNRSSLLQAWIDDGDTSLPPEKIQVPFMLTPPVAKIGENSGQQVKIKIMPNKLPTNKESIFYLNVLDIPPNSPEQEGKNALKFAMQNRIKLFYRPAGIAPVNKATFKKLLINRSGNGLVIKNDSANWVTISDVKANNVKVNYETIMIAPLESQSVNVKSNNANNWYLTIIDDHGNYISDKI

SEQ ID NO: 18858 - protein, 784 aa, Escherichia coli; identical to SEQ ID NO: 3401

SEQ ID NO: 18859 - protein, 700 aa, Escherichia coli; identical to SEQ ID NO: 13077

SEQ ID NO: 18860 - protein, 193 aa, Escherichia coli; identical to SEQ ID NO: 2246

SEQ ID NO: 18861 - protein, 774 aa, Escherichia coli; identical to SEQ ID NO: 6495

SEQ ID NO: 18862 - protein, 746 aa, Escherichia coli; identical to SEQ ID NO: 4130

SEQ ID NO: 18863 - protein, 121 aa, Escherichia coli
MNTVLSVQGASAPVEKKSFFSKFTRLNMLRLVRAVIPAAVLMMFFPQLAMAAQGAGQDLMQSGNSTVKATFGKDSSVVKWVVLAEVLVGAVMYMMTKNVKFLAGFAIISVFIAVGMAVVGL

SEQ ID NO: 18864 - protein, 203 aa, Escherichia coli; identical to SEQ ID NO: 2009

SEQ ID NO: 18865 - protein, 249 aa, Escherichia coli
MKIRRIRLVLILALVFFMNAQASENTRVFSLHLGATRVVYNQQSSGEALAVINDHNYPMLVQSEVLTEDKKESAPFVITPPLFRLDALQSSRLRVVRIGGTFPADRETLQWICVKGIPPKANDRWAENDSKNVLDNKVALNIHLSVTSCIKLFFRPLVVKGHPEDVAGEVRWQKIGDKLKGINPTPFYINLSELKFGGEEITERHYIAPFSSYEYLIPKTMNRNNIVQWKVVTDYGGISKQFEAKINKL

SEQ ID NO: 18866 - protein, 360 aa, Escherichia coli; identical to SEQ ID NO: 3354

SEQ ID NO: 18867 - protein, 332 aa, Escherichia coli; identical to SEQ ID NO: 2701

SEQ ID NO: 18868 - protein, 819 aa, Escherichia coli; identical to SEQ ID NO: 13562

SEQ ID NO: 18869 - protein, 822 aa, Escherichia coli
MIKNIYCSLSVIIIGCASAYAVEFNKDLIEAEDRENVNLSQFETDGQLPVGKYSLSTLINNKRTPIHLDLQWVLIDNQTAVCVTPEQLTLLGFTDEFIEKTQQNLIDGCYPIEKEKQITTYLDKGKMQLSISAPQAWLKYKDANWTPPELWNHGIAGAFLDYNLYASHYAPHQGDNSQNISSYGQAGVNLGAWRLRTDYQYDQSFNNGKSQATNLDFPRIYLFRPIPAMNAKLTIGQYDTESSIFDSFHFSGISLKSDENMLPPDLRGYAPQITGVAQTNAKVTVSQNNRIIYQENVPPGPFAITNLFNTLQGQLDVKVEEEDGRVTQWQVASNSIPYLTRKGQIRYTTAMGKPTNVGGDSLQQPFFWTGEFSWGWLNNVSLYGGSVLTNRDYQSLAAGVGFNLNSLGSLSFDVTRSDAQLHNQDKETGYSYRANYSKRFESTGSQLTFAGYRFSDKNFVTMNEYINDTNHYTNYQNEKESYIVTFNQYLESLRLNTYVSLARNTYWDASSNVNYSLSLSRDFDIGPLKNVSTSLTFSRINWEEDNQDQLYLNISIPWGTSRTLSYGMQRNQDNEISHTASWYDSSDRNNSWSVSASGDNDEFKDMKASLRASYQHNTENGRLYLSGTSQRDSYYSLNASWNGSFTATRHGAAFHDYSGSADSRFMIDADGTEDIPLNNKRAVTNRYGIGVIPSVSSYITTSLSVDTRNLPENVDIENSVITTTLTEGAIGYAKLDTRKGYQIIGVIRLADGSHPPLGISVKDETSHKELGLVADGGFVYLNGIQDDNKLALRWGDKSCFIQPPNSSNLTTGTAILPCISQN

SEQ ID NO: 18870 - protein, 834 aa, Escherichia coli
MYKKLKLTTISELIKNIYCSLSVIIIGCASAYAVEFNKDLIEAEDRENVNLSQFETDGQLPVGKYSLSTLINNKRTPIHLDLQWVLIDNQTAVCVTPEQLTLLGFTDEFIEKTQQNLIDGCYPIEKEKQITTYLDKGKMQLSISAPQAWLKYKDANWTPPELWNHGIAGAFLDYNLYASHYAPHQGDNSQNISSYGQAGVNLGAWRLRTDYQYDQSFNNGKSQATNLDFPRIYLFRPIPAMNAKLTIGQYDTESSIFDSFHFSGISLKSDENMLPPDLRGYAPQITGVAQTNAKVTVSQNNRIIYQENVPPGPFAITNLFNTLQGQLDVKVEEEDGRVTQWQVASNSIPYLTRKGQIRYTTAMGKPTNVGGDSLQQPFFWTGEFSWGWLNNVSLYGGSVLTNRDYQSLAAGVGFNLNSLGSLSFDVTRSDAQLHNQDKETGYSYRANYSKRFESTGSQLTFAGYRFSDKNFVTMNEYINDTNHYTNYQNEKESYIVTFNQYLESLRLNTYVSLARNTYWDASSNVNYSLSLSRDFDIGPLKNVSTSLTFSRINWEEDNQDQLYLNISIPWGTSRTLSYGMQRNQDNEISHTASWYDSSDRNNSWSVSASGDNDEFKDMKASLRASYQHNTENGRLYLSGTSQRDSYYSLNASWNGSFTATRHGAAFHDYSGSADSRFMIDADGTEDIPLNNKRAVTNRYGIGVIPSVSSYITTSLSVDTRNLPENVDIENSVITTTLTEGAIGYAKLDTRKGYQIIGVIRLADGSHPPLGISVKDETSHKELGLVADGGFVYLNGIQDDNKLALRWGDKSCFIQPPNSSNLTTGTAILPCISQN

SEQ ID NO: 18871 - protein, 837 aa, Escherichia coli
MDQMYKKLKLTTISELIKNIYCSLSVIIIGCASAYAVEFNKDLIEAEDRENVNLSQFETDGQLPVGKYSLSTLINNKRTPIHLDLQWVLIDNQTAVCVTPEQLTLLGFTDEFIEKTQQNLIDGCYPIEKEKQITTYLDKGKMQLSISAPQAWLKYKDANWTPPELWNHGIAGAFLDYNLYASHYAPHQGDNSQNISSYGQAGVNLGAWRLRTDYQYDQSFNNGKSQATNLDFPRIYLFRPIPAMNAKLTIGQYDTESSIFDSFHFSGISLKSDENMLPPDLRGYAPQITGVAQTNAKVTVSQNNRIIYQENVPPGPFAITNLFNTLQGQLDVKVEEEDGRVTQWQVASNSIPYLTRKGQIRYTTAMGKPTNVGGDSLQQPFFWTGEFSWGWLNNVSLYGGSVLTNRDYQSLAAGVGFNLNSLGSLSFDVTRSDAQLHNQDKETGYSYRANYSKRFESTGSQLTFAGYRFSDKNFVTMNEYINDTNHYTNYQNEKESYIVTFNQYLESLRLNTYVSLARNTYWDASSNVNYSLSLSRDFDIGPLKNVSTSLTFSRINWEEDNQDQLYLNISIPWGTSRTLSYGMQRNQDNEISHTASWYDSSDRNNSWSVSASGDNDEFKDMKASLRASYQHNTENGRLYLSGTSQRDSYYSLNASWNGSFTATRHGAAFHDYSGSADSRFMIDADGTEDIPLNNKRAVTNRYGIGVIPSVSSYITTSLSVDTRNLPENVDIENSVITTTLTEGAIGYAKLDTRKGYQIIGVIRLADGSHPPLGISVKDETSHKELGLVADGGFVYLNGIQDDNKLALRWGDKSCFIQPPNSSNLTTGTAILPCISQN

SEQ ID NO: 18872 - protein, 329 aa, Escherichia coli
MGLHYFSDNKDVDGDQTYMRLGFKGETQVTDQLTGYGQWEYQIQGNSAENENNSWTRVAFAGLKFQDVGSFDYGRNYGVVYDVTSWTDVLPEFGGDTYGSDNFMQQRGNGFATYRNTDFFGLVDGLNFAVQYQGKNGNPSGEGFTSGVTNNGRDALRQNGDGVGGSITYDYEGFGIGGAISSSKRTDAQNTAAYIGNGDRAETYTGGLKYDANNIYRAAQYTQTYNATRVGSLGWANKAQNFEAVAQYQFDFGLRPSLAYLQSKGKNLGRGYDDEDILKYVDVGATYYFNKNMSTYVDYKINLLDDNQFTRDAGINTDNIVALGLVYQF

SEQ ID NO: 18873 - protein, 539 aa, Escherichia coli; identical to SEQ ID NO: 3146

SEQ ID NO: 18874 - protein, 235 aa, Escherichia coli; identical to SEQ ID NO: 4365

SEQ ID NO: 18875 - protein, 203 aa, Escherichia coli; identical to SEQ ID NO: 2201

SEQ ID NO: 18876 - protein, 311 aa, Escherichia coli
MRLGFKGETQVTDQLTGYGQWEYQIQGNSAENENNSWTRVAFAGLKFQDVGSFDYGRNYGVVYDVTSWTDVLPEFGGDTYGSDNFMQQRGNGFATYRNTDFFGLVDGLNFAVQYQGKNGNPSGEGFTSGVTNNGRDALRQNGDGVGGSITYDYEGFGIGGAISSSKRTDAQNTAAYIGNGDRAETYTGGLKYDANNIYRAAQYTQTYNATRVGSLGWANKAQNFEAVAQYQFDFGLRPSLAYLQSKGKNLGRGYDDEDILKYVDVGATYYFNKNMSTYVDYKINLLDDNQFTRDAGINTDNIVALGLVYQF

SEQ ID NO: 18877 - protein, 331 aa, Escherichia coli; identical to SEQ ID NO: 2705

SEQ ID NO: 18878 - protein, 104 aa, Escherichia coli
MGKNAEVWAAGLKYDANNIYLATTYSETQNMTVFGNNHIANKAQNFEAVAQYQFDFGLRPSVAYLQSKGKDLGVHGDRDLVKYVDVGATYYFNKNMSTFVDYKI

SEQ ID NO: 18879 - protein, 745 aa, Escherichia coli
MARSKTAQPKHSLRKIAVVVATAVSGMSVYAQAAVEPKEDTITVTAAPAPQESAWGPAATIAARQSATGTKTDTPIQKVPQSISVVTAEEMALHQPKSVKEALSYTPGVSVGTRGASNTYDHLIIRGFAAEGQSQNNYLNGLKLQGNFYNDAAIDPYMLERAEIMRGPVSVLYGKSSPGGLLNMVSKRPTTEPLKEVQFKAGTDSLFQTGFDFSDALDDDGVYSYRLTGLARSANAQQKGSEEQRYAIAPAFTWRPDDKTNFTFLSYFQNEPETGYYGWLPKEGTVEPLPNGKRLPTDFNEGAKNNTYSRNEKMVGYSFDHEFNDTFTVRQNLRFAENKTSQNSVYGYGVCSDPANAYSKQCAALAPADKGHYLARKYVVDDEKLQNFSVDTQLQSKFATGDIDHTLLTGVDFMRNDINAWFGYDDSVPLLNLYNPVNTDFDFNAKDPANSGPYRILNKQKQTGVYVQDQAQWDKVLVTLGGRYDWADQESLNRVAGTTDKRDDKQFTWRGGVNYLFDNGVTPYFSYSESFEPSSQVGKDGNIFAPSKGKQYEVGVKYVPEDRPIVVTGAVYNLTKTNNLMADPEGSFFSVEGGEIRARGVEIEAKAALSASVNVVGSYTYTDAEYTTDTTYKGNTPAQVPKHMASLWADYTFFDGPLSGLTLGTGGRYTGSSYGDPANSFKVGSYTVVDALVRYDLARVGMAGSNVALHVNNLFDREYVASCFNTYGCFWGAERQVVATATFRF

SEQ ID NO: 18880 - protein, 334 aa, Escherichia coli; identical to SEQ ID NO: 2748

SEQ ID NO: 18881 - protein, 360 aa, Escherichia coli; identical to SEQ ID NO: 3354

SEQ ID NO: 18882 - protein, 747 aa, Escherichia coli
MARSKTAQPKHSLRKIAVVVATAVSGMSVYAQAAVEPKEDTITVTAAPAPQESAWGPAATIAARQSATGTKTDTPIQKVPQSISVVTAEEMALHQPKSVKEALSYTPGVSVGTRGASNTYDHLIIRGFAAEGQSQNNYLNGLKLQGNFYNDAAIDPYMLERAEIMRGPVSVLYGKSSPGGLLNMVSKRPTTEPLKEVQFKAGTDSLFQTGFDFSDALDDDGVYSYRLTGLARSANAQQKGSEEQRYAIAPAFTWRPDDKTNFTFLSYFQNEPETGYYGWLPKEGTVEPLPNGKRLPTDFNEGAKNNTYSRNEKMVGYSFDHEFNDTFTVRQNLRFAENKTSQNSVYGYGVCSDPANAYSKQCAALAPADKGHYLARKYVVDDEKLQNFSVDTQLQSKFATGDIDHTLLTGVDFMRMRNDINAWFGYDDSVPLLNLYNPVNTDFDFNAKDPANSGPYRILNKQKQTGVYVQDQAQWDKVLVTLGGRYDWADQESLNRVAGTTDKRDDKQFTWRGGVNYLFDNGVTPYFSYSESFEPSSQVGKDGNIFAPSKGKQYEVGVKYVPEDRPIVVTGAVYNLTKTNNLMADPEGSFFSVEGGEIRARGVEIEAKAALSASVNVVGSYTYTDAEYTTDTTYKGNTPAQVPKHMASLWADYTFFDGPLSGLTLGTGGRYTGSSYGDPANSFKVGSYTVVDALVRYDLARVGMAGSNVALHVNNLFDREYVASCFNTYGCFWGAERQVVATATFRF

SEQ ID NO: 18883 - protein, 237 aa, Escherichia coli; identical to SEQ ID NO: 3793

SEQ ID NO: 18884 - protein, 859 aa, Escherichia coli; identical to SEQ ID NO: 5113

SEQ ID NO: 18885 - protein, 878 aa, Escherichia coli
MSYLNLRIYQRNTQCLHIRKHRLAVFFVRLFVACAFAAQAPLSSAELYFNPRFLADDPQAVADLSRFENGQELPPGTYRVDIYLNNGYMATRDVTFNTGDSEQGIVPCLTRAQLASMGLNTASVSGMNLLADDACVPLTSMIHDATAHLDVGQQRLNLTIPQAFMSNRARGYIPPELWDPGINAGLLNYNFSGNSVQNRIGSNSHYAYLNLQSGLNIGAWRLRDNTTWSYNSSDSSSGSKNKWQHINTWLERDIIPLRSRLTLGDGYTQGDIFDGINFRGAQLASDDNMLPDSQRGFAPVIHGIARGTAQVTIKQNGYDIYNSTVPPGPFTINDIYAAGNSGDLQVTIKEADGSTQIFTVPYSSVPLLQREGHTRYSITAGEYRSGNAQQEKPRFFQSTLLHGLPAGWTIYGGAQLADRYRAFNFGIGKNMGALGALSVDMTQANSTLPDDSQHDGQSVRFLYNKSLNESGTNIQLVGYRYSTSGYFNFADTTYSRMNGYNIETQDGVIQVKPKFTDYYNLAYNKRGKLQLTVTQQLGRTSTLYLSGSHQTYWGTSNVDEQFQAGLNTAFEDINWTLSYSLTKNAWQKGRDQMLALNVNIPFSHWLRSDSKSQWRHASASYSMSHDLNGRMTNLAGVYGTLLEDNNLSYSVQTGYAGGGDGNSGSTGYATLNYRGGYGNANIGYSHSDDIKQLYYGVSGGVLAHANGVTLGQPLNDTVVLVKAPGAKDAKVENQTGVRTDWRGYAVLPYATEYRENRVALDTNTLADNVDLDNAVANVVPTRGAIVRAEFKARVGIKLLMTLTHNNKPLPFGAMVTSESSQSSGIVADNGQVYLSGMPLAGKVQVKWGEEENAHCVANYQLPPESQQQLLTQLSAECR

SEQ ID NO: 18886 - protein, 879 aa, Escherichia coli
MPEHSFLRLRGLSWWIALAISGSPFNALADDTIQFDGRFLDLKGNTKIDLGRFSQKGYVEPGKYNLRVHVNNQPLPDDYDIYWYATENDPNKSYACLSPELVAQFGLKEDIAKNLQWIRDGQCLNTALLAGTEISGDLGQSALLVSVPQAYLEYTDSEWDPPSRWDDGIPGLIADYSINAQTRHENGGDDTNDISGNGTVGVNVGPWRLRADWQSDYQHTRSNDDGDTDDSGTQKNWEWSRYYAWRALPSLKAKLSLGEDYLNSDIFDGFSYIGGSISTDDQMLPPNLRGYAPDISGVAHTTAKVTVTQMGRVIYETQVPAGPFRIQDIGDSVSGTLHVRIEEQNGQVQEYDVSTASMPFLTRPGQVRYKVTMGRPQNWDHQVAGSFFSGGEASWGIANGWSLYGGALADENYQSAALGLGRDLALLGALAFDVTHSRVQLDDNSVYGNKTLDGNSYRVSYAKDFDELNSRVTFAGYRFSEKNYMTMSEYLDANDDDRARTGNDKEMYMVTYNQNFTDARVSVYLNYSHHTYWDRQDQTNYNMMLSHYFNLGSLRNLSVSLTGYRYEYDKSADKGVYLSLSLPWGDNSTISYNGNYGSGADSNQVSLYHRIDDASHYTLSAGTSENHSSVDGYYSHDGTLAKVDLSANYHEGQYTSAGISLQGGATLTAHGGALHRTQNMGGTRLLIDADGVANVPVEGNGSAVYTNMFGKAVVADVNDYYRNQAYIDLNKLPENAEATKSVVQATLTEGAIGYRKFAVISGEKAMAVLRLQDGSHPPFGAEVKNDNQQQVGLVDDEGNVYLAGVKPGEHMTVFWEGESHCDISLPDPLPNDLFNGLLLPCQQKGGSSPVIPHDIQPVIQEQTQQVTPMEPPMSVSSNQ

SEQ ID NO: 18887 - protein, 862 aa, Escherichia coli
MTIKSTNHLTHIATFCALLYSNSALCAELVEYDHTFLMGNDASNIDLSRYTEGNPTLPGIYDVSVYINDQPIMSQSIAFTVIEGKKNAQACITQKNLLQFHISSPDKNSGKAILLKRDDDLGDCLNLAEMISQSSIRYDVNDQRLDIDVPQAWIMKNYQNYVDPSLWENGINAAMLSYNLNGYHSESPGRTNDSIYAAFNGGINLGAWRLRASGNYNWMTNVHSDYDFQNRYLQRDLASLRSQLVIGESYTTGETFDSVSIRGIRLYSDSRMLPPVLASFAPIIHGVANTNAKVTVMQNGYKIYETTVPPGAFAIDDLSPSGYGSDLIVTIEEADGTKRTFSQPFSSVVQMLRPGVGRWDISAGQVLKDSIQDEPNLFQASYYYGLNNYLTGYTGIQLTDNNYTAGLLGLGMNTPVGAFSVDVTHSNVSIPDDKTYQGQSYRISWNKLFENTSTSLNIAAYRYSTQHYLGLNDALTLIDEVEHPEQDLEPKSMRNYSRMKNQVTVSINQPLKFEKKDYGSFYLSGSWSDYWASGQNSTNYSIGYSNSASWGSYSISAQRSLNEDGQTDDSIYLSFTIPIENLLDTDHRSSGFQSIDTQLNSDFKGNNQLNISSSGYSDTNRISYSVNTGYMMNKSSDDLSYIGGHASYESPWGTLSCSASASSDNSRQFSLNTDGGFVLHSGGLTFSNDSFSDSDTLAVIQALGAKGARINYGNSTVDRWSYGVTSALSPYHENRIALDINDLENDVELKSTSTVAIPRQGAVVFADFETVQGQSAIMNIVRSDGKNIPFAEDIYDEQNNIIGNVGQGGQAFVHGIEQEENIRITWIEEGKPVSCFAHYQQNTASEKIAQSIILNGLRCQIQ

SEQ ID NO: 18888 - protein, 368 aa, Escherichia coli
MNKTITALTIIMASFAANASVLPETPVPFKSGTGAIDNGTVYIGLGSAGTAWYKLDTQAKDKKWTALAAFPGGPRDQATSAFIDGNLYVFGGIGKNSEGLTQVFNDVHKYNPKTNSWVKLMSHAPMGMAGHVTFVHNGKAYVTGGVNQNIFNGYFEDLNEAGKDSTTIDKINAHYFDKKAEDYFFNKFLLSFDPSTQQWSYAGESPWYGTAGAAVVNKGDKTWLINGEAKPGLRTDAVFELDFTGNNLKWNKLAPVTSPDGVAGGFAGMSNDSLIFAGGAGFKGSRENYQNGKNYAHEGLKKSYSADIHLWHNGKWDKSGELSQGRAYGVSLPWNNSLLIIGGETAGGKAVTDSVLISVKDNKVTVQN

SEQ ID NO: 18889 - protein, 161 aa, Escherichia coli
MKKWLLAAGLGLALATSAQAADKIAIVNMGSLFQQVAQKTGVSNTLENEFKGRASELQRMETDLQAKMKKLQSMKAGSDRTKLEKDVMAQRQTFAQKAQAFEQDRARRSNEERGKLVTRIQTAVKSVANSQDIDLVVNANAVAYNSSDVKDITADVLKQVK

SEQ ID NO: 18890 - protein, 883 aa, Escherichia coli
MTAFRAAFKAYRMHQVLLLPRFARLTIALGLATAVFPVDAEYYFNPRFLSNDLAESVDLSAFTKGREAPPGTYRVDIYLNDEFMTSRDITFIADDNNADLIPCLSTDLLVSLGIKKSALLDNKEHSADKHAPDNSACTPLQDRLADASSEFDVGQQHLSLSVPQIYVGRMARGYVSPDLWEEGINAGLLNYSFNGNSINNRSNHNAGKSNYAYLNLQSGINIGSWRLRDNSTWSYNSGSSNSSDSNKWQHINTSAERDIIPLRSRLTVGDSYTDGDIFDSVNFRGLKINSTEAMLPDSQHGFAPVIHGIARGTAQVSVKQNGYDVYQITVPPGPFTIDDINSAANGGDLQVTIKEADGSIQTLYVPYSSVPVLQRAGYTCYALAMGEYRSGNNLQSSPKFIQGSLMHGLEGNWTPYGGMQIAENYQAFNLGIGKDLGLFGAFSFDITQANTTLADDTRHSGQSLKSVYSKSFYQTGTNIQVAGYRYSTQGFYNLSDSAYSRMSGYTVKPPTGDTSEQTLFIDYFNLFYSKRGQEQISISQQLGNYGTTFFSASRQSYWNTSRSDQQISFGLNVPFGDITTSLNYSYSNNIWQNDRDHLLAFTLNVPFSHWMRTDSQSAFRNSNASYNMSNDLKGGMTNLSGVYGTLLPDNNLNYSVQVGNTHGGNTSSGTSGYSSLNYRGAYGNTNIGYSRSGDSSQIYYGMSGGIIAHADGITFGQPLGDTMVLVKAPGADNVKIENQTGIHTDWRGYAILPFATEYRENRVALNANSLADNVELDETVVTVIPTHGAIARATFNAQIGGKVLMTLKYGNKSVPFGAIVTHGENKNGSIVAENGQVYLTGLPQSGKLQVSWGNDKNSNCIVDYKLPAVSPGTLLNQQTAICR

SEQ ID NO: 18891 - protein, 266 aa, Escherichia coli; identical to SEQ ID NO: 5141

SEQ ID NO: 18892 - protein, 826 aa, Escherichia coli; identical to SEQ ID NO: 5098

SEQ ID NO: 18893 - protein, 686 aa, Escherichia coli; identical to SEQ ID NO: 9611

SEQ ID NO: 18894 - protein, 729 aa, Escherichia coli; identical to SEQ ID NO: 5131

SEQ ID NO: 18895 - protein, 213 aa, Escherichia coli; identical to SEQ ID NO: 2232

SEQ ID NO: 18896 - protein, 412 aa, Escherichia coli; identical to SEQ ID NO: 13668

SEQ ID NO: 18897 - protein, 746 aa, Escherichia coli; identical to SEQ ID NO: 4597

SEQ ID NO: 18898 - protein, 371 aa, Escherichia coli; identical to SEQ ID NO: 5126

SEQ ID NO: 18899 - protein, 760 aa, Escherichia coli
MENNRNFPARQFHSLTFFAGLCIGITPVAQALAAEGQANADDTLVVEASTPSLYAPQKSADPKFSRPVADTTRTMTVISEQVIKDQGATNLTDALKNVPGVGAFFAGENGNSTTGDAIYMRGADTSNSIYIDGIRDIGSVSRDTFNTEQVEVIKGPSGTDYGRSAPTGSINMISKQPRNDSGIDASASIGSAWFRRGTLDVNQVIGDTTAVRLNVMGEKTHDAGRNKVKNERYGVAPSVAFGLGTANRLYLNYLHVTQHNTPDGGIPTIGLPGYSAPSAGTAALNHSGKVDTHNFYGTDSDYDDSTTDTATMRFEHDINDNTTIRNTTRWSRVKQDYLMTAIMGGASNITQPTSDVNSWTWSRTANTKDVSNKILTNQTNLTSTFYTGAIGHDVSTGVEFTRETQTNYGVNPVTLPAVNIYHPDSSIHPGGLTRNGANANGQTDTFAIYAFDTLQITRDFELNGGIRLDNYHTEYDSATACGGSGRGAITCPASVAKGSPVTTVDTAKSGNLVNWKAGALYHLTENGNVYINYAVSQQPPGGNNFALAQSGSGNSANRTDFKPQKANTSEIGTKWQVLDKRLLLTAALFRTDIENEVEQNDDGTYSQYGKKRVEGYEISVAGNITPAWQMIGGYTQQKATIKNGKDVAQDGSSSLPYTPEHAFTLWSQYQATDDISVGAGARYIGSMHKGSDGAVGTPAFTEGYWVADAKLGYRVNRNLDFQLNVYNLFDTDYVASINKSGYRYHPGEPRTFLLTANMHF

SEQ ID NO: 18900 - protein, 656 aa, Escherichia coli; identical to SEQ ID NO: 5108

SEQ ID NO: 18901 - protein, 241 aa, Escherichia coli
MSNKNVNVRKSQEITFCLLAGILMFMAMVVAGRAEAGVALGATRVIYPAGQKQVQLAVTNNDENSTYLIQSWVENADGVKDGRFIVTPPLFAMKGKKENTLRILDATNNQLPQDRESLFWMNVKAIPSMDKSKLTENTLQLAIISRIKLYYRPAKLALPPDQAAEKLRFRRSANSLTLINPTPYYLTVTELNAGTQVLENALVPPMGESTVKLPSDAGSNITYRTINDYGALTPKMTGVME

SEQ ID NO: 18902 - protein, 731 aa, Escherichia coli; identical to SEQ ID NO: 13690

SEQ ID NO: 18903 - protein, 713 aa, Escherichia coli; identical to SEQ ID NO: 6243

SEQ ID NO: 18904 - protein, 204 aa, Escherichia coli; identical to SEQ ID NO: 2957

SEQ ID NO: 18905 - protein, 700 aa, Escherichia coli; identical to SEQ ID NO: 5110

SEQ ID NO: 18906 - protein, 121 aa, Escherichia coli; identical to SEQ ID NO: 5349

SEQ ID NO: 18907 - protein, 660 aa, Escherichia coli; identical to SEQ ID NO: 6291

SEQ ID NO: 18908 - protein, 472 aa, Escherichia coli; identical to SEQ ID NO: 3900

SEQ ID NO: 18909 - protein, 861 aa, Escherichia coli
MWNLLRRTRKNQKSGRDVREVGWTSLFQAVAEPFSGAWQQGVKADPEAVLSFHAVFACISLISQDIAKMRLRLMQTDAHGIRRETRRGDIARLCRRPNAQQNRIQFFELWLNAKLRHGNTVVLKIRNARGQIKELRILDWSRVEPLVADDGEVFYRITPDRNCGITEAVTVPAREVIHDRFNCFFHPLIGLPPMYAAGLAATQGHHIQENSTSFFRNGGRPSGVIEIPGSITEENAKKLKSNWDSGYTGENAGKTAILSNGAKYNPTTFSPVDAQTVEQLKMTAEIVCSVFRVPAYKIGVGQPPSSDNVEALEQQYYSQCLQTLIESIELLLDEALETGENESTEFDVTTLLRMDSERRMKTLGDAVKNTLLTPNEARKRENLPPLAGGDALYLQQQNYSLEALSRRDAREDPFSSAGKTVSSQLPDGASDGNKAISETEHDAVKAMFRGDTEKMTERELSIIRALGEEFSTVLADLQRTFEGKMASQAQAFEEKLTSLSAVLQKHVTVDEVRPVLQAMVDDAVGAIPVPRDGRDYDPDVLQQAVNDAVANIPQPADGKSLTPDDVRPMLEQMVKEAVSHIPVPRDGRDYDPEVLQKAVNDAVANIPQPADGKSLTPDDVRPMLEQMVKEAVSHIPVPRDGRDYDPDVLQKAVNDAVANIPQPADGKSLTPDDVRPMLEQMVKEAVSHIHVPRDGRDYDPDVLQKAVLDAVSALPAPQDGRDATALEILPAIDDQKSFPRGTYATHQGGLWRAYEKTHGMRGWECLVDGVADIDVSMTGERLFSVVVRQSSGQRTEKTFSLPVMLYRGVFRAGETYHPGDTVTWGGSLWHCNSMTEDKPGEAHSSAWTLAAKRGRDAGGGK

SEQ ID NO: 18910 - protein, 663 aa, Escherichia coli
MFRLNPFVRVGLCLSAISCAWPVLAVDDDGETMVVTASSVEQNLKDAPASISVITQEDLQRKPVQNLEDVLKEVPGVQLTNEGDNRKGVSIRGLDSSYTLILVDGKRVNSRNAVFRHNDFDLNWIPVDSIERIEVVRGPMSSLYGSDALGGVVNIITKKIGQKWSGTVTVDTTVQEHRDRGDTYNGQFFTSGPLIDGVLGMKAYGSLAKREKDDPQNSTTTDTGETPRIEGFSSRDGNVEFAWTPNQNHDFTAGYGFDRQDRDSDSLDKNRLERQNYSVSHNGRWDYGTSELKYYGEKIENKNPGNSSPITSESNTVDGKYTLPLTAINQFLTVGGEWRHDKLSDAVNLTGGTSSKTSASQYALFVEDEWRIFEPLALTTGVRMDDHETYGEHWSPRAYLVYNATDTVTVKGGWATAFKAPSLLQLSPDWTSNSCRGACKIVGSPDLKPETSESWELGLYYMGEEGWLEGVESSVTVFRNDVKDRISISRTSDVNAAPGYQNFVGFETGANGRRIPVFSYYNVNKARIQGVETELKIPFNDEWKLSINYTYNDGRDVSNGENKPLSDLPFHTANGTLDWKPLALEDWSFYVSGHYTGQKRADSATAKTPGGYTIWNTGAAWQVTKDVKLRAGVLNLGDKDLSRDDYSYNEDGRRYFMAVDYRF

SEQ ID NO: 18911 - protein, 222 aa, Escherichia coli; identical to SEQ ID NO: 4712

SEQ ID NO: 18912 - protein, 784 aa, Escherichia coli; identical to SEQ ID NO: 10652

SEQ ID NO: 18913 - protein, 249 aa, Escherichia coli; identical to SEQ ID NO: 5120

SEQ ID NO: 18914 - protein, 678 aa, Escherichia coli; identical to SEQ ID NO: 6376

SEQ ID NO: 18915 - protein, 505 aa, Escherichia coli; identical to SEQ ID NO: 10600

SEQ ID NO: 18916 - protein, 191 aa, Escherichia coli; identical to SEQ ID NO: 2727

SEQ ID NO: 18917 - protein, 118 aa, Escherichia coli [sequence omitted]

SEQ ID NO: 18918 - protein, 356 aa, Escherichia coli
MMKRNILAVVVPALLVAGTANAAEIYNKDGNKLDLYGKAVGLHYFSKGNGENSYGGNGDKTYARLGFKGETQINSDLTGYGQWEYNFQGNNSEGDDAQNGNKTRLAFAGLKFADAGSFDYGRNYGVVYDALGYTDMLPEFGGDTAYSDDFFVGRVGGVATYRNSNFFGLVDGLNFAVQYLGKNERDTARRSNGDGVGGSVSYEFEGFGIVGAYGAADRTNLQEDSTLGKGKKAEQWATGLKYDANNIYLAANYGETRNATPITGGFANKTQDILLVAQYQFDFGLRPSIAYTKSKAKDVEGIGDVDLVNYIEVGATYYFNKNMSTYVDYAINQIDSDNKLGVGSDDTVAVGIVYQF

SEQ ID NO: 18919 - protein, 217 aa, Escherichia coli
MLISQSALASGVGLSSTRVIYDGNKKEASLTVQNKNKSEEFLIQSWVDDATGSKKTPFIITPPLFKLEPGKNNILRIVNVNPSLPQDRESVYWVNVKAIPSQNEENEGKNVLQIAVRTRIKLFYRPAGLKGDIKSSPGELRFTRNGKQIKVDNPTVFNITFSDVFINGHEIEKSGMVPAKGALNIYLPAGVNSASQIKYNTINDFGSSGEYLTREIN

SEQ ID NO: 18920 - protein, 512 aa, Escherichia coli; identical to SEQ ID NO: 2973

SEQ ID NO: 18921 - protein, 236 aa, Escherichia coli
MQTTRTPYSISFMATVLLLLLFACHSTVANAAVALGATRVIYPANQKQVLLPVTNNDPASVYLIQSWIENAGDQKDTQFVITPPLFSMQGKKENTLRIINATNHQLPGDRESLFWVNVKAIPAMEKDQKNENTLQLAIISRIKMFYRPTNLAMAPEEAPAMLRFRRSGSKLTLINPTPYFITVTNMKAGNSNLPNTMVPPKGEVSVDIPHAATGDISFQTINDYGALTPRIKSTMQ

SEQ ID NO: 18922 - protein, 351 aa, Escherichia coli; identical to SEQ ID NO: 4688

SEQ ID NO: 18923 - protein, 883 aa, Escherichia coli; identical to SEQ ID NO: 14706

SEQ ID NO: 18924 - protein, 161 aa, Escherichia coli; identical to SEQ ID NO: 2582

SEQ ID NO: 18925 - protein, 882 aa, Escherichia coli
MPNHSNFRLRGIACYIALAISGGSVNAWADDSIQFDPRFLELKGDTKIDLGKFSKKGYVDAGKYNLRVFINKQPLSDEYDINWYVSENDPTKNYACLTPELVAALGLKEGIAKSLQWTHNDECLKPGQLDGMEVENDLSQSALLLTVPQAYLEYTSSDWDPPSRWDDGIPGLIADYSLNAQTRHQEQGGEDSHDISGNGTVGANLGAWRFRADWQSDYQHTRSNDDDDDSSNSTTSKHWDWSRYYAWRALPSLKAKLSLGEDYLNSDIFDGFNYIGSSVSTDDQMLPPNLRGYAPDVSGVAHSSAKVTISQMGRVLYETQVPAGPFRIQDIGDSVSGTLHVRVEEQNGQVQEYDVTTASVPFLTRQGQVRYKVMMGRPEDWNHKTEGGFFSGGEASWGVADGWSLYGGALADKHYQSAAMGVGRDLAQFGALAFDVTHSHVNLDHDSAYGKGKLDGNSFRVSYAKDFDELNSRVTFAGYRFSEKNFMTMSEYLDANQSDMARTGNDKEMYTITYNQNFAAAGVSIYLNYSHRTYWDRPEQTNYNLMFSHYFNMGSIRNMSISVTGYRYEYDDNADKGMYLSMSIPWSDSSTVTYNGSYGSGSDSSQVGYFKRVDDATHYQVNVGTSEQHGSVDGYLSHDGSLAKVDLSANYHEGEYRSAGIALQGGATLTAHGGALHRTQNMGGTRLLIDADGIANVPVESNGAPVYTNMFGKAVVADINNYYRNQAYIDLNNLPEDAEATQSVVQATLTEGAIGYRKFKVISGQKAMAVLRLRDGSYPPFGAEVKNDEQQQVGIVDDEGNVYLAGVNAGEHMMVFWEGSAQCEIVLPKPLPADLFSGLLLPCEQKGTAAPDSSAPEIKPVIQDQTRQVTPTEAPTSISATQ

SEQ ID NO: 18926 - protein, 900 aa, Escherichia coli; identical to SEQ ID NO: 14707

SEQ ID NO: 18927 - protein, 843 aa, Escherichia coli; identical to SEQ ID NO: 14700

SEQ ID NO: 18928 - protein, 229 aa, Escherichia coli; identical to SEQ ID NO: 6623

SEQ ID NO: 18929 - protein, 826 aa, Escherichia coli; identical to SEQ ID NO: 14744

SEQ ID NO: 18930 - protein, 878 aa, Escherichia coli; identical to SEQ ID NO: 14705

SEQ ID NO: 18931 - protein, 266 aa, Escherichia coli; identical to SEQ ID NO: 1894

SEQ ID NO: 18932 - protein, 862 aa, Escherichia coli; identical to SEQ ID NO: 14738

SEQ ID NO: 18933 - protein, 840 aa, Escherichia coli; identical to SEQ ID NO: 9665

SEQ ID NO: 18934 - protein, 368 aa, Escherichia coli; identical to SEQ ID NO: 14726

SEQ ID NO: 18935 - protein, 446 aa, Escherichia coli; identical to SEQ ID NO: 2177

SEQ ID NO: 18936 - protein, 237 aa, Escherichia coli; identical to SEQ ID NO: 14732

SEQ ID NO: 18937 - protein, 656 aa, Escherichia coli; identical to SEQ ID NO: 14893

SEQ ID NO: 18938 - protein, 274 aa, Escherichia coli; identical to SEQ ID NO: 2301

SEQ ID NO: 18939 - protein, 713 aa, Escherichia coli; identical to SEQ ID NO: 15029

SEQ ID NO: 18940 - protein, 228 aa, Escherichia coli; identical to SEQ ID NO: 6714

SEQ ID NO: 18941 - protein, 121 aa, Escherichia coli; identical to SEQ ID NO: 2522

SEQ ID NO: 18942 - protein, 518 aa, Escherichia coli; identical to SEQ ID NO: 15037

SEQ ID NO: 18943 - protein, 193 aa, Escherichia coli; identical to SEQ ID NO: 2253

SEQ ID NO: 18944 - protein, 265 aa, Escherichia coli
MSNQGMQMRQYRLLSPMIKVVIVLFSLLFSTAQAGLVIGGTRFAYPENQSSISVELKNTSNRDMLVKVAVSPDDARQLTGTVESLPSYSETVFIATPPLFVLKPDKNTKIRINRVGGSLPTDRESLFILNVAALPTLENSHSVKTDNQLQIAVRNRMKIFYRPSNLSEDPNMSYQKLRWARKNEIVTVYNPGPRYVTLYNLHVDGKVIDGGMVAPFSHRQQSWCKSQGVCEIAWQTLDIYNNVLPILKVKLNPSQLDVTGFAFSQ

SEQ ID NO: 18945 - protein, 678 aa, Escherichia coli; identical to SEQ ID NO: 14864

SEQ ID NO: 18946 - protein, 208 aa, Escherichia coli; identical to SEQ ID NO: 1948

SEQ ID NO: 18947 - protein, 111 aa, Escherichia coli; identical to SEQ ID NO: 3419

SEQ ID NO: 18948 - protein, 241 aa, Escherichia coli; identical to SEQ ID NO: 2075

SEQ ID NO: 18949 - protein, 747 aa, Escherichia coli; identical to SEQ ID NO: 3857

SEQ ID NO: 18950 - protein, 200 aa, Escherichia coli; identical to SEQ ID NO: 1785

SEQ ID NO: 18951 - protein, 654 aa, Escherichia coli; identical to SEQ ID NO: 5571

SEQ ID NO: 18952 - protein, 478 aa, Escherichia coli; identical to SEQ ID NO: 15081

SEQ ID NO: 18953 - protein, 749 aa, Escherichia coli; identical to SEQ ID NO: 11957

SEQ ID NO: 18954 - protein, 784 aa, Escherichia coli; identical to SEQ ID NO: 10652

SEQ ID NO: 18955 - protein, 232 aa, Escherichia coli; identical to SEQ ID NO: 2087

SEQ ID NO: 18956 - protein, 686 aa, Escherichia coli; identical to SEQ ID NO: 9611

SEQ ID NO: 18957 - protein, 517 aa, Escherichia coli; identical to SEQ ID NO: 2462

SEQ ID NO: 18958 - protein, 239 aa, Escherichia coli; identical to SEQ ID NO: 14867

SEQ ID NO: 18959 - protein, 246 aa, Escherichia coli; identical to SEQ ID NO: 3838

SEQ ID NO: 18960 - protein, 430 aa, Escherichia coli; identical to SEQ ID NO: 2617

SEQ ID NO: 18961 - protein, 162 aa, Escherichia coli; identical to SEQ ID NO: 1965

SEQ ID NO: 18962 - protein, 565 aa, Escherichia coli; identical to SEQ ID NO: 2673

SEQ ID NO: 18963 - protein, 432 aa, Escherichia coli; identical to SEQ ID NO: 2026

SEQ ID NO: 18964 - protein, 673 aa, Escherichia coli; identical to SEQ ID NO: 2919

SEQ ID NO: 18965 - protein, 360 aa, Escherichia coli; identical to SEQ ID NO: 3862

SEQ ID NO: 18966 - protein, 170 aa, Escherichia coli; identical to SEQ ID NO: 2565

SEQ ID NO: 18967 - protein, 412 aa, Escherichia coli; identical to SEQ ID NO: 7283

SEQ ID NO: 18968 - protein, 332 aa, Escherichia coli; identical to SEQ ID NO: 2702

SEQ ID NO: 18969 - protein, 366 aa, Escherichia coli
MVIKFLSALILLLVTTAAQAERIRDLTSVQGVRQNSLIGYGLVVGLDGTGDQTTQTPFTTQTLNNMLSQLGITVPTGTNMQLKNVAAVMVTASLPPFGRQGQTIDVVVSSMGNAKSLRGGTLLMTPLKGVDSQVYALAQGNILVGGAGASAGGSSVQVNQLNGGRITNGAVIERELPSQFGVGNALNLQLNDEDFSMAQQIADTINRVRGYGSATALDARTIQVRVPSGNSSQVRFLADIQNMQVNVTPQDAKVVINSRTGSVVMNREVTLDSCAVAQGNLSVTVNRQANVSQPDTPFGGGQTVVTPQTQIDLRQSGGSLQSVRSSASLNNVVRALNALGATPMDLMSILQSMQSAGCLRAKLEII

SEQ ID NO: 18970 - protein, 375 aa, Escherichia coli; identical to SEQ ID NO: 14838

SEQ ID NO: 18971 - protein, 203 aa, Escherichia coli; identical to SEQ ID NO: 2008

SEQ ID NO: 18972 - protein, 614 aa, Escherichia coli; identical to SEQ ID NO: 6666

SEQ ID NO: 18973 - protein, 360 aa, Escherichia coli; identical to SEQ ID NO: 4018

SEQ ID NO: 18974 - protein, 222 aa, Escherichia coli; identical to SEQ ID NO: 1956

SEQ ID NO: 18975 - protein, 660 aa, Escherichia coli; identical to SEQ ID NO: 14914

SEQ ID NO: 18976 - protein, 663 aa, Escherichia coli; identical to SEQ ID NO: 9256

SEQ ID NO: 18977 - protein, 359 aa, Escherichia coli; identical to SEQ ID NO: 2329

SEQ ID NO: 18978 - protein, 250 aa, Escherichia coli; identical to SEQ ID NO: 14868

SEQ ID NO: 18979 - protein, 362 aa, Escherichia coli; identical to SEQ ID NO: 4554

SEQ ID NO: 18980 - protein, 760 aa, Escherichia coli; identical to SEQ ID NO: 14835

SEQ ID NO: 18981 - protein, 191 aa, Escherichia coli; identical to SEQ ID NO: 14839

SEQ ID NO: 18982 - protein, 224 aa, Escherichia coli; identical to SEQ ID NO: 3792

SEQ ID NO: 18983 - protein, 259 aa, Escherichia coli; identical to SEQ ID NO: 12016

SEQ ID NO: 18984 - protein, 334 aa, Escherichia coli; identical to SEQ ID NO: 2751

SEQ ID NO: 18985 - protein, 351 aa, Escherichia coli; identical to SEQ ID NO: 15030

SEQ ID NO: 18986 - protein, 725 aa, Escherichia coli; identical to SEQ ID NO: 2986

SEQ ID NO: 18987 - protein, 249 aa, Escherichia coli; identical to SEQ ID NO: 9840

SEQ ID NO: 18988 - protein, 733 aa, Escherichia coli
MMISKKYTLWALNPLLLIMMAPAVAQQTDDETFVVSANRSNRTVAEMAQTTWVIENAELEQQIQGGKELKDALAQLIPGLDVSSRSRTNYGMNVRGRPLVVLVDGVRLNSSRTDSRQLDSIDPFNIDHIEVISGATSLYGGGSTGGLINIVTKKGQPETMMEFEAGTKSGFSSSKDHDERIAGAVSGGNEHISGRLSVAYQKFGGWFDGNGDATLLDNTQTGLQYSDRLDIMGTGTLNIDESRQLQLITQYYKSQGDDDYGLNLGKGFSAIRGTSTPFVSNGLNSDRIPGTERHLISLQYSDSAFLGQELVGQVYYRDESLRFYPFPTVNANKQVTAFSSSQQDTDQYGMKLTLNSKPMDGWQITWGLDADHERFTSNQMFFDLAQASASGGLNNKKIYTTGRYPSYDITNLAVFLQSGYDINNLFTLNGGVRYQYTENKIDDFIGYAQQRQIAAGKATSADAIPGGSVDYDNFLFNAGLLMHITERQQAWLNFSQGVELPDPGKYYGRGIYGAAVNGHLPLTKSVNVSDSKLEGVKVDSYELGWRFTGNNLRTQIAAYYSISDKSVVANKDLTISVVDDKRRIYGVEGAVDYLIPDTDWSTGVNFNVLKTESKVNGTWQKYDVKTASPSKATAYIGWAPDPWSLRVQSTTSFDVSDAQGYKVDGYTTVDLLGSYQLPVGTLSFSIENLFDRDYTTVWGQRAPLYYSPGYGPASLYDYKGRGRTFGLNYSVLF

SEQ ID NO: 18989 - protein, 828 aa, Escherichia coli; identical to SEQ ID NO: 2390

SEQ ID NO: 18990 - protein, 213 aa, Escherichia coli; identical to SEQ ID NO: 2232

SEQ ID NO: 18991 - protein, 551 aa, Escherichia coli; identical to SEQ ID NO: 2452

SEQ ID NO: 18992 - protein, 203 aa, Escherichia coli; identical to SEQ ID NO: 2201

SEQ ID NO: 18993 - protein, 118 aa, Escherichia coli; identical to SEQ ID NO: 15083

SEQ ID NO: 18994 - protein, 729 aa, Escherichia coli; identical to SEQ ID NO: 10713

SEQ ID NO: 18995 - protein, 700 aa, Escherichia coli; identical to SEQ ID NO: 11995

SEQ ID NO: 18996 - protein, 866 aa, Escherichia coli; identical to SEQ ID NO: 4866

SEQ ID NO: 18997 - protein, 883 aa, Escherichia coli
MTAFRAAFKAYRMHQVLIMPRFARLTIALGLATAVFPVDAEYYFNPRFLSNDLAESVDLSAFTKGREAPPGTYRVDIYLNDEFMTSRDITFIADDNNAELIPCLSTDLLVSLGIKKIALLDNKEHSAEKHVPDNSACTPLQDRLADASTEFDVGQQHLSLSVPQIYVGRMARGYVSPDLWEEGINAGLLNYSFNGNSINNRSNHNAGKSNYAYLNLQSGINIGSWRLRDNSTWSYYSGSSNSSDSNKWQHINTSAERDIIPLRSRLTVGDSYTDGDIFDSVNFRGLKINSTEAMLPDSQHGFAPVIHGIARGTAQVSVKQNGYDVYQTTVPPGPFTIDDINSAANGGDLQVTIKEADGSIQTLYVPYSSVPVLQRAGYTRYALAMGEYRSGNNLQSSPKFIQGSLMHGLEGNWTPYGGMQIAEDYQAFNLGIGKDLGLFGAFSFDITQANTTLADGTRHSGQSVKSVYSKSFYQTGTNIQVAGYRYSTQGFYNLSDSAYSRMSGYTVKPPTGDSNEQTQFIDYFNLFYSKRGQEQISISQQLGNYGTTFFSASRQSYWNTSRSDQQISFGLNVPFGDITASLNYSYSNNIWQNDRDHLLAFTLNVPFSHWMRTDSQSAFRNSNASYSMSNDLKGGMTNLSGVYGTLLPDNNLNYSVQVGNTHGGNTSSGTSGYSSLNYRGAYGNTNVGYSRNGDSSQIYYGMSGGIIAHADGITFGQPLGDTMVLVKAPGADNVKIENQTGIHTDWRGYAILPFATEYRENRVALNANSLADNVELDETVVTVIPTHGAIARATFNAQIGGKVLMTLKYGNKSVPFGAIVTHGENKNGSIVAENGQVYLTGLPQSGKLQVSWGNDKNSNCIVDYKLPEVSPGTLLNQQTAICR

SEQ ID NO: 18998 - protein, 866 aa, Escherichia coli
MTIKPTKNYHNHLTRIATFCALLYCKSAFCAELVEYDHTFLMGQNASNIDLSRYSEGNPAIPGMYDVSVYVNDQPIINQSITFIEIEGKKNAQACITLKNLLQFHINSPDINNEKAVLLARDETLGNCLNLTEIIPQASVRYDVNEQRLDIDVPQAWVMKNYQNYVDPSLWENGINAAMLSYNLNGYHSETPGRRNDSIYAAFNGGMNLGAWRLRASGNYNWMTDSGSNYDFKNRYIQRDIASLRSQLILGESYTTGETFDSVSIRGIRLYSDSRMLPPTLASFAPIIHGVANTNAKVTITQGGYKIYETTVPPGAFVIDDLSPSGYGSDLIVTVEESDGSKRTFSQPFSSVVQMLRPGVGRWDISGGQVLKDDIQDEPNLFQASYYYGLNNYLTGYTGIQITDNNYTAGLLGLGLNTSVGAFSFDVTHSNVRIPDDKTYQGQSYRVSWNKLFEETSTSLNIAAYRYSTQNYLGLNDALTLIDEVKHPEQDLEPKSMRNYSRMKNQVTVSINQPLKFEKKDYGSFYLSGSWSDYWASGQNRSNYSIGYSNSASWGSYSVSAQRSWNEDGDTDDSVYLSFTIPIEKLLGTEQRTSGFQSIDTQMSSDFKGNNQLNVSSSGYSDNARVSYSVNTGYTMNKASKDLSYVGGYASYESPWGSLAGSVSANSDNSRQVSLSTDGGFVLHSGGLTFSNDSFSDSDTLAVVQAPGAQGARINYGNSTIDRWGYGVTSALSPYHENRIALDINDLENDVELKSTSAVAVPRQGSVVFADFETVQGQSAIMNITRSDGKNIPFAADIYDEQGNVIGNVGQGGQAFVRGIEQQGNISIKWLEESKPVSCLAHYQQSSEAEKIAQSIILNGIRCQIQ

SEQ ID NO: 18999 - protein, 833 aa, Escherichia coli
MAALSPPFIKYLSGMDTVNIYRLSFVSCLVVAMPCALAVEFNLNVLDKSMRDRIDISLLKEKGVIAPGEYFVSVAVNNNQISNGQKINWHKNDDKTIPCINDLLVDKFGLKPEVRQSLPLINQCVDFSSRPEMLFNFDQANQQLNITIPQAWLAWHSENWTPPSTWKEGVAGVLMDYNLFASSYRPQDGSSSTNLNAYGTAGINTGAWRLRSDYQLNQTDSDDNHEQSGEISRTYLFRPLPQLGSKLTLGETDFSSNIFDGFSYTGAALASDDRMLPWELRGYAPQISGIAQTNATVTISQSGRVIYQKKVPPGPFIIDDLNQSVQGTLDVKVTEEDGRVNNFQVSAASTPFLTRQGQVRYKLAAGQPRPSMSHQTENETFFSNEVSWGMLSNTSLYGGLLLSGDDYHSAAIGIGQNMLWLGALSFDVTWASSHFDTQQDERGLSYRFNYSKQVDATNSTISLAAYRFSDRHFHSYANYLDHKYNDSDAQDEKQTISLSVGQPITPLNLNLYANLLHQTWWNADASTTANITAGFNVDIGDWRDISISTSFNTTHYEDKDRDNQIYLSISLPFGNGGRVGYDMQNSSHSTTHRMSWNDTLDERNSWGMSAGLQSDRPDNGAQVSGNYQHLSSAGEWDISGTYAANDYSSVSSSWSGSFTATQYGAAFHRRSSTNEPRLMVSTDGVADIPVQGNLDYTNHFGIAVVPVISSYQPSTVAVNMNDLPDGVTVAENVIKETWIEGAIGYKSLASRSGKDVNVIIRNASGQFPPLGADIRQDDSGISVGMVGEKGHAWLSGVAENQKFTVVWGDSQHCSLHLPEHMEDTANRLILPCH

SEQ ID NO: 19000 - protein, 826 aa, Escherichia coli; identical to SEQ ID NO: 3772

SEQ ID NO: 19001 - protein, 869 aa, Escherichia coli
MKIPTTTDIPQRYTWCLAGICYSSLAILPSFLSYAESYFNPAFLLENGTSVADLSRFERGNHQPAGVYRVDLWRNDEFIGSQDIVFESTTENTGDKSGGLMPCFNQVLLERIGLNSSAFPELAQQQNNKCINLLKAVPDATINFDFAAMRLNITIPQITLLSSAHGYIPPEEWDEGIPALLLNYNFTGNRGNGNDSYFFSELSGINIGPWRLRNNGSWNYFRGNGYHSEQWNNIGTWVQRAIIPLKSELVMGDGNTGSDIFDGVGFRGVRLYSSDNMYPDSQQGFAPTVRGIARTAAQLTIRQNGFIIYQSYVSPGAFEITDLHPTSSNGDLDVTIDERDGNQQNYTIPYSTVPILQREGRFKFDLTAGDFRSGNSQQSSPFFFQGTALGGLPQEFTAYGGTQLSANYTAFLLGLGRNLGNWGAVSLDVTHARSQLADDSRHEGDSIRFLYAKSMNTFGTNFQLMGYRYSTQGFYTLDDVAYRRMEGYEYDYDYDGEHRDEPIIVNYHNLRFSRKDRLQLNISQSLNDFGSLYISGTHQKYWNTSDSDTWYQVGYTSSWVGISYSLSFSWNESVGIPDNERIVGLNVSVPFNVLTKRRYTRENALDRAYASFNANRNSNGQNSWLAGVGGTLLEGHNLSYHVSQGDTSNNGYTGSATANWQATYGTLGVGYNYDRDQHDVNWQLSGGVVGHENGITLSQPLGDTNVLIKTPGAGGVRIENQTGILTDWRGYAVMPYATVYRYNRIALDTNTMGNSIDVEKNISSVVPTQGALVRANFDTRIGVRALITVTQGGKPVPFGSLVRENSTGITSMVGDDGQVYLSGAPLSGELLVQWGDGANSRCIAHYVLPKQSLQQAVTVISAVCTHPGS

SEQ ID NO: 19002 - protein, 838 aa, Escherichia coli
MPQRHHQGHKRTPKQLALIIKRCLPMVLTGSGMLCTTANAEEYYFDPIMLETTKSGMQTTDLSRFSKKYAQLPGTYQVDIWLNKKKVSQKKITFTANAEQLLQPQFTVEQLRELGIKVDEIPALAEKDDDSVINSLEQIIPGTAAEFDFNHQRLNLSIPQIALYRDARGYVSPSRWDDGIPTLFTNYSFTGSDNRYRQGNRSQRQYLNMQNGANFGPWRLRNYSTWTRNDQASSWNTISSYLQRDIKALKSQLLLGESATSGSIFSSYTFTGVQLASDDNMLPNSQRGFAPTVRGIANSSAIVTIRQNGYVIYQSNVPAGAFEINDLYPSSNSGDLEVTIEESDGTQRRFIQPYSSLPMMQRPGHLKYSATAGRYRADANSDSKEPEFAEATAIYGLNNTFTLYGGLLGSEDYYALGIGIGGTLGALGALSMDINRADTQFDNQHSFHGYQWRTQYIKDIPETNTNIAVSYYRYTNDGYFSFNEANTRNWNYNSRQKSEIQFNISQTIFDGVSLYASGSQQDYWGNNEKNRNISVGVSGQQWGIGYSLNYQYSRYTDQNNDRALSLNLSIPLERWLPRSRVSYQMTSQKDRPTQHEMRLDGSLLDDGRLSYSLEQSLDDDNNHNSSLNASYRSPYGTFSAGYSYGNDSSQYNYGVTGGVVIHPHGVTLSQYLGNAFALIDANGASGVRIQNYPGIATDPFGYAVVPYLTTYQENRLSVDTTQLPDNVDLEQTTQFVVPNRGAMVAARFNANIGYRVLVTVSDRNGKPLPFGALASNDETGQQSIVDEGGILYLSGISSKSQSWTVRWGNQADQQCQFAFGTPDSEPTTSVLQGTAQCH

SEQ ID NO: 19003 - protein, 837 aa, Escherichia coli; identical to SEQ ID NO: 12870

SEQ ID NO: 19004 - protein, 368 aa, Escherichia coli; identical to SEQ ID NO: 3872

SEQ ID NO: 19005 - protein, 161 aa, Escherichia coli; identical to SEQ ID NO: 2582

SEQ ID NO: 19006 - protein, 878 aa, Escherichia coli
MSYLNLRLYQRNTQCLHIRKHRLAGFFVRLFVACAFAAQTPLSSAELYFNPRFLADDPQAVADLSRFENGQELPPGTYRVDIYLNNGYMATRDVTFNTGDSEQGIVPCLTRAQLASMGLNTASVSGMNLLADDACVPLTSIIHDATAHLDVGQQRLNLTIPQAFMSNRARGYIPPELWDPGINAGLLNYNFSGNSVQNRIGGNSHYAYLNLQSGLNIGAWRLRDNTSWSYNSSDRSSGSKNKWQHINTWLERDIIPLRSRLTLGDGYTQGDIFDGINFRGAQLASDDNMLPDSQRGFAPVIHGIARGTAQVTIKQNGYDIYNSTVPPGPFTINDIYAAGNSGDLQVTIKEADGSTQIFTVPYSSVPLLQREGHTRYSITAGEYRSGNAQQEKPRFFQSTLLHGLPAGWTIYGGTQLADRYRAFNFGIGKNMGALGALSVDMTQANSTLPDDSQHDGQSVRFLYNKSLNESGTNIQLVGYRYSTSGYFNFADTTYSRMNGYNIETQDGVIQVKPKFTDYYNLAYNKRGKLQLTVTQQLGRTSTLYLSGSHQTYWGTSNVDEQFQAGLNTAFEDINWTLSYSLTKNAWQKGRDQMLALNVNIPFSHWLRSDSKSQWRHASASYSMSHDLNGRMTNLAGVYGTLLEDNNLSYSVQTGYAGGGDGNSGSTGYATLNYRGGYGNANIGYSHSDDIKQLYYGVSGGVLAHANGVTLGQPLNDTVVLVKAPGAKDAKVENQTGVRTDWRGYAVLPYATEYRENRVALDTNTLADNVDLDNAVANVVPTRGAIVRAEFKARVGIKLLMTLTHNNKPLPFGAMVTSESSQSSGIVADNGQVYLSGMPLAGKVQVKWGEEENAHCIANYQLPPESQQQLLTQLSAECR

SEQ ID NO: 19007 - protein, 843 aa, Escherichia coli; identical to SEQ ID NO: 3163

SEQ ID NO: 19008 - protein, 880 aa, Escherichia coli; identical to SEQ ID NO: 3110

SEQ ID NO: 19009 - protein, 266 aa, Escherichia coli; identical to SEQ ID NO: 1894

SEQ ID NO: 19010 - protein, 747 aa, Escherichia coli; identical to SEQ ID NO: 2072

SEQ ID NO: 19011 - protein, 362 aa, Escherichia coli; identical to SEQ ID NO: 2434

SEQ ID NO: 19012 - protein, 231 aa, Escherichia coli; identical to SEQ ID NO: 3055

SEQ ID NO: 19013 - protein, 686 aa, Escherichia coli; identical to SEQ ID NO: 3015

SEQ ID NO: 19014 - protein, 250 aa, Escherichia coli; identical to SEQ ID NO: 3048

SEQ ID NO: 19015 - protein, 249 aa, Escherichia coli; identical to SEQ ID NO: 3492

SEQ ID NO: 19016 - protein, 784 aa, Escherichia coli; identical to SEQ ID NO: 2244

SEQ ID NO: 19017 - protein, 251 aa, Escherichia coli
MSLIKEMKMTFMKGLPLLLLVASLCSHAALQPDRTRIVFNANDKATSLRVDNRSDKLPYLAYSWLENEKGEKSDDLLVALPPIQRLEPKATTQVRIVKQASTTKLPGDRETLFFYNMREIPPAPEKNSDHAVLQVAIQSRIKVFWRPAALRKKAGEKVELQLQVSQQGNQLTLKNPTAYYLTIAYLGRNEKGVLPGFKTVMVAPFSTVNTNTGNYSGSQFYLGYMDDYGALRMTTLNCSGQCHLQAVEAKK

SEQ ID NO: 19018 - protein, 208 aa, Escherichia coli; identical to SEQ ID NO: 1949

SEQ ID NO: 19019 - protein, 678 aa, Escherichia coli; identical to SEQ ID NO: 3014

SEQ ID NO: 19020 - protein, 541 aa, Escherichia coli; identical to SEQ ID NO: 3377

SEQ ID NO: 19021 - protein, 367 aa, Escherichia coli; identical to SEQ ID NO: 3105

SEQ ID NO: 19022 - protein, 228 aa, Escherichia coli; identical to SEQ ID NO: 11258

SEQ ID NO: 19023 - protein, 230 aa, Escherichia coli; identical to SEQ ID NO: 3019

SEQ ID NO: 19024 - protein, 213 aa, Escherichia coli; identical to SEQ ID NO: 2232

SEQ ID NO: 19025 - protein, 412 aa, Escherichia coli; identical to SEQ ID NO: 2161

SEQ ID NO: 19026 - protein, 746 aa, Escherichia coli; identical to SEQ ID NO: 3031

SEQ ID NO: 19027 - protein, 760 aa, Escherichia coli; identical to SEQ ID NO: 11104

SEQ ID NO: 19028 - protein, 700 aa, Escherichia coli; identical to SEQ ID NO: 3128

SEQ ID NO: 19029 - protein, 614 aa, Escherichia coli; identical to SEQ ID NO: 1888

SEQ ID NO: 19030 - protein, 241 aa, Escherichia coli; identical to SEQ ID NO: 2884

SEQ ID NO: 19031 - protein, 122 aa, Escherichia coli; identical to SEQ ID NO: 2915

SEQ ID NO: 19032 - protein, 663 aa, Escherichia coli
MFRLNPFVRVGLCLSAISCAWPVLAVDDDGETMVVTASSVEQNLKDAPASISVITQEDLQRKPVQNLKDVLKEVPGVQLTNEGDNRKGVSIRGLDSSYTLILVDGKRVNSRNAVFRHNDFDLNWIPVDSIERIEVVRGPMSSLYGSDALGGVVNIITKKIGQKWSGTVTVDTTIQEHRDRGDTYNGQFFTSGPLIGGVLGMKAYGSLAKREKDDPQNSTTTDTGETPRIEGFSSRDGNVEFAWTPNQNHDFTAGYGFDRQDRDSDSLDKNRLERQNYSVSHNGRWDYGTSELKYYGEKVENKNPGNSSPITSESNTVDGKYTLPLTAINQFLTVGGEWRHDKLSDAVNLTGGTSSKTSASQYALFVEDEWRIFEPLALTTGVRMDDHETYGEHWSPRAYLVYNATDTVTVKGGWATAFKAPSLLQLSPDWTSNSCRGACKIVGSPDLKPETSESWELGLYYMGEEGWLEGVESSVTVFRNDVKDRISISRTSDVNAAPGYQNFVGFETRANGRRIPVFSYYNVNKARIQGVETELKIPFNDEWKLSINYTYNDGRDVSNGENKPLSDLPFHTANGTLDWKPLALEDWSFYVSGHYTGQKRADSATAKTPGGYTIWNTGAAWQVTKDVKLRAGVLNLGDKDLSRDDYSYNEDGRRYFMAVDYRF

SEQ ID NO: 19033 - protein, 236 aa, Escherichia coli; identical to SEQ ID NO: 3438

SEQ ID NO: 19034 - protein, 472 aa, Escherichia coli; identical to SEQ ID NO: 3900

SEQ ID NO: 19035 - protein, 233 aa, Escherichia coli; identical to SEQ ID NO: 3276

SEQ ID NO: 19036 - protein, 246 aa, Escherichia coli; identical to SEQ ID NO: 9522

SEQ ID NO: 19037 - protein, 239 aa, Escherichia coli; identical to SEQ ID NO: 11531

SEQ ID NO: 19038 - protein, 224 aa, Escherichia coli; identical to SEQ ID NO: 3115

SEQ ID NO: 19039 - protein, 191 aa, Escherichia coli; identical to SEQ ID NO: 3639

SEQ ID NO: 19040 - protein, 405 aa, Escherichia coli
MKIIITREYIMKRKVLAMLVPALLVAGAANAAEIYNKDGNKLDLYGKVAGLHYFSDDASSDGDMSYARIGFKGETQIADQFTGYGQWEFNIGANGPESDKGNTATRLAFAGFGFGQNGTFDYGRNYGVVYDVEAWTDMLPEFGGDTYAGADNFMNGRANSVATYRNNGFFGQVDGLNFALQYQGNNEKSGLFDQEGSGNGNGRKLAKENGDGYGMSTSYDFDFGLSLGAAYSNSDRTDNQVHKGTHNTRYGDRFDATAGGETAEAWTVGAKYDANNVYLAAMYAETRNMTGYGDADAIANKTQNFEVVAQYQFDFGLRPSIAYLQSKGKDLGGVNSDNFDSQGNHHYTNKDLVKYVDIGMTYYFNKNMSTYVDYKINLLDNDDDFYKENGIATDDIVAVGLVYQF

SEQ ID NO: 19041 - protein, 729 aa, Escherichia coli; identical to SEQ ID NO: 4316

SEQ ID NO: 19042 - protein, 237 aa, Escherichia coli; identical to SEQ ID NO: 3022

SEQ ID NO: 19043 - protein, 365 aa, Escherichia coli; identical to SEQ ID NO: 3084

SEQ ID NO: 19044 - protein, 204 aa, Escherichia coli; identical to SEQ ID NO: 2957

SEQ ID NO: 19045 - protein, 351 aa, Escherichia coli; identical to SEQ ID NO: 2872

SEQ ID NO: 19046 - protein, 331 aa, Escherichia coli
MELLCPAGNLPALKAAIENGADAVYIGLKDDTNARHFAGLNFTEKKLQEAVSFVHQHRRKLHIAINTFAHPDGYARWQRAVDMAAQLGADALILADLAMLEYAAERYPHIERHVSVQASATNEEAINFYHRHFDVARVVLPRVLSIHQVKQLARVTPVPLEVFAFGSLCIMSEGRCYLSSYLTGESPNTVGACSPARFVRWQQTPQGLESRLNEVLIDRYQDGENAGYPTLCKGRYLVDGERYHALEEPTSLNTLELLPELMAANIASVKIEGRQRSPAYVSQVAKVWRQAIDRCKADPQNFIPQSAWMETLGSMSEGTQTTLGAYHRKWQ

SEQ ID NO: 19047 - protein, 243 aa, Escherichia coli; identical to SEQ ID NO: 2910

SEQ ID NO: 19048 - protein, 266 aa, Escherichia coli; identical to SEQ ID NO: 1894

SEQ ID NO: 19049 - protein, 237 aa, Escherichia coli; identical to SEQ ID NO: 3793

SEQ ID NO: 19050 - protein, 840 aa, Escherichia coli; identical to SEQ ID NO: 5442

SEQ ID NO: 19051 - protein, 878 aa, Escherichia coli
MSYLNLRLYQRNTQCLHIRKHRLAGFFVRLFVACAFAAQAPLSSAELYFNPRFLADDPQAVADLSRFENGQELPPGTYRVDIYLNNGYMATRDVTFNTGDSEQGIVPCLTRAQLASMGLNTASISGMNLLADDACVPLTAMIHDATAHLDVGQQRLNLTIPQAFMSNRARGYIPPELWDPGINAGLLNYNFSGNSVQNRIGGNSHYAYLNLQSGLNIGAWRLRDNTTWSYNSSDRSSGSKNKWQHINTWLERDIIPLRSRLTLGDGYTQGDIFDGINFRGAQLASDDNMLPDSQRGFAPVIHGIARGTAQVTIKQNGYDIYNSTVPPGPFTINDIYAAGNSGDLQVTIKEADGSTQIFTVPYSSVPLLQREGHTRYSITAGEYRSGNAQQEKPRFFQSTLLHGLPAGWTIYGGTQLADRYRAFNFGIGKNMGALGALSVDMTQANSTLPDDSQHDGQSVRFLYNKSLNESGTNIQLVGYRYSTSGYFNFADTTYSRMNGYNIETQDGVIQVKPKFTDYYNLAYNKRGKLQLTVTQQLGRTSTLYLSGSHQTYWGTSNVDEQFQAGLNTAFEDINWTLSYSLTKNAWQKGRDQMLALNVNIPFSHWLRSDSKSQWRHASASYSMSHDLNGRMTNLAGIYGTLLEDNDLSYSVQTGYAGGGDGNSGSTGYATLNYRGGYGNANIGYSHSDDIKQLYYGVSGGVLAHANGVTLGQPLNDTVVLVKAPGAKDAKVENQTGVRTDWRGYAVLPYATEYRENRVALDTNTLADNVDLDNAVANVVPTRGAIVRAEFKARVGIKLLMTLTHNNKPLPFGAMVTSESSQSSGIVADNGQVYLSGMPLAGKVQVKWGEEENAHCVANYQLPPESQQQLLTQLSAECR

SEQ ID NO: 19052 - protein, 882 aa, Escherichia coli
MPNHSNFRLRGIACYIALAISGGSVNAWADDSIQFDPRFLELKGDTKIDLGKFSKKGYVDAGKYNLRVFINKQSLSDEYDINWYVSENDPTKTYACLTPELVAALGLKEGIAKSLQWTHNDECLKPGQLDGMEVENDLSQSALLLTVPQAYLEYTSSDWDPPSRWDDGISGLIADYSLNAQTRHQEQGGEDSHDISGNGTVGANLGAWRFRADWQSDYQHTRSNDDEDDSSNSTTSKNWDWSRYYAWRALPSLKAKLSLGEDYLNSDIFDGFNYIGSSVSTDDQMLPPNLRGYAPDVSGVAHSSAKVTISQMGRVLYETQVPAGPFRIQDIGDSVSGTLHVRVEEQNGQVQEYDVTTASMPFLTRQGQVRYKVMMGRPEDWNHKTEGGFFSGGEASWGVADGWSLYGGALADEHYQSAAMGVGRDLAQFGALAFDVTHSHVNLDHDSAYGKGKLDGNSFRVSYAKDFDELNSRVTFAGYRFSEKNFMTMSEYLDASQSDMARTGNDKEMYTITYNQNFAAAGVSVYLNYSHRTYWDRPEQTNYNLMFSHYFNMGSIRNMSISVTGYRYEYDDNTDKGMYLSMSIPWSDSSTVTYNGSYGSGSDSSQVGYFNRIDDATHYQINVGTSEQHGSVDGYLSHDGTLAKVDLSANYHEGEYRSAGIALQGGATLTAHGGALHRTQNMGGTRLLIDADGIANVPVESNGALVYTNMFGKAVVADINNYYRNQAYIDLNNLPEDAEATQSVVQATLTEGAIGYRKFKVISGQKAMAVLRLRDGSYPPFGAEVKNDEQQQVGIVDDEGNVYLAGINAGEHMMVFWEGSAQCEIVLPKPLPADLFRGLLLPCEQKGTTAPDSLAPEIKPVIQDQTRQVTPSEAPTSISATQ

SEQ ID NO: 19053 - protein, 366 aa, Escherichia coli; identical to SEQ ID NO: 2118

SEQ ID NO: 19054 - protein, 729 aa, Escherichia coli
MLSTQFNRDNQHQAIIKPSLLAGCIALALLPSAAFAAPATEETVIVEGSATAPDDGENDYNVTSTSAGTKMQMTQRDIPQSVTIVSQQRMEDQQLQTLGEVMENTLGISKSQADSDRALYYSRGFQIDNYMVDGIPTYFESRWNLGDALSDMALFERVEVVRGATGLMTGTGNPSAAINMVRKHATSREFKGDVSAEYGSWNKERYVADLQSPLTEDGKIRARIVGGYQNNDSWLDRYNSEKTFFSGIVDADLGDLTMLSAGYEYQRIDVNSPTWGGLPRWNTDGSSNSYDRARSTAPDWAYNDKEINKVFMTLKQRFADTWQATLNATHSEVEFDSKMMYVDAYVNKADGMLVGPYSNYGPGFDYVGGTGWNSGKRKVDALDLFADGSYELFGRQHNLMFGGSYSKQNNRYFSSWANIFPDEIGSFYNFNGNFPQTDRSPQSLAQDDTTHMKSLYAATRVTLADPLHLILGARYTKWRVDTLTYSMEKNHTTPYAGLVFDINDNWSTYASYTSIFQPQNDRDSSGKYLAPITGNNYELGLKSDWMNSRLTTTLAIFRIEQDNVAQSTGTPIPGSNGETAYKAVDGTVSKGVEFELNGAITDNWQLTFGATRYIAEDNEGNAVNPNLPRTTVKMFTSYRLPVMPELTVGGGVNWQNRVYTDTVTPYGTFRAEQGSYALVDLFTRYQVTKNFSLQGNVNNLFDKTYDTNVEGSIVYGAPRNLSITGMYQF

SEQ ID NO: 19055 - protein, 654 aa, Escherichia coli; identical to SEQ ID NO: 5571

SEQ ID NO: 19056 - protein, 204 aa, Escherichia coli; identical to SEQ ID NO: 2957

SEQ ID NO: 19057 - protein, 362 aa, Escherichia coli; identical to SEQ ID NO: 5589

SEQ ID NO: 19058 - protein, 659 aa, Escherichia coli
MLAAALCSSPVWAEEATFTANFKDTDLKSFIETVGANLNKTIIMGPGVQGKVSIRTMTPLNERQYYQLFLNLLEAQGYAVVPMENDVLKVVKSSAAKVEPLPLVGEGSDNYAGDEMVTKVVPVRNVSVRELAPILRQMIDSAGSGNVVNYDPSNVIMLTGRASVVERLTEVIQRVDHAGNRTEEVIPLDNASASEIARVLESLTKNSGENQPATLKSQIVADERTNSVIVSGDPATRDKMRRLIRRLDSEMERSGNSQVFYLKYSKAEDLVDVLKQVSGTLTAAKEEAEGTVGSGREVVSIAASKHSNALIVTAPQDIMQSLQSVIEQLDIRRAQVHVEALIVEVAEGSNINFGVQWGSKDAGLMQFANGTQIPIGTLGAAISAAKPQKGSTVISENGATTINPDTNGDLSTLAQLLSGFSGTAVGVVKGDWMALVQAVKNDSSSNVLSTPSITTLDNQEAFFMVGQDVPVLTGSTVGSNNSNPFNTVERKKVGIMLKVTPQINEGNAVQMVIEQEVSKVEGQTSLDVVFGERKLKTTVLANDGELIVLGGLMDDQAGESVAKVPLLGDIPLIGNLFKSTADKKEKRNLMVFIRPTILRDGMAADGVSQRKYNYMRAEQIYRDEQGLSLMPHTAQPILPAQNQALPPEVRAFLNAGRTR

SEQ ID NO: 19059 - protein, 656 aa, Escherichia coli; identical to SEQ ID NO: 5574

SEQ ID NO: 19060 - protein, 760 aa, Escherichia coli; identical to SEQ ID NO: 5697

SEQ ID NO: 19061 - protein, 207 aa, Escherichia coli; identical to SEQ ID NO: 5462

SEQ ID NO: 19062 - protein, 249 aa, Escherichia coli
MNIMKSPLITTGMICLLGICNFAQATVSPDRTRIIFNASNKSATVRLTNQSKIDPYLAQSWIEDASGKKTRGYISTLPPMERIEPDEQVQIRLMALASLNNLPQDRETLFYYNVREIPPRTKEQNVMQIAMQSRLKLFWRPKAIELKEGQMVPLQKVTITRTAAGLTLNNPTPYHITVGYIGTNGKTLMPGADSIMVTPFASATQYLNNLPSTFQLGFVADYGGLEMFKVECNSVQSLCQSSPAKKGKI

SEQ ID NO: 19063 - protein, 505 aa, Escherichia coli; identical to SEQ ID NO: 5681

SEQ ID NO: 19064 - protein, 432 aa, Escherichia coli; identical to SEQ ID NO: 2026

SEQ ID NO: 19065 - protein, 900 aa, Escherichia coli; identical to SEQ ID NO: 5572

SEQ ID NO: 19066 - protein, 368 aa, Escherichia coli; identical to SEQ ID NO: 3332

SEQ ID NO: 19067 - protein, 866 aa, Escherichia coli
MTIKPTKNYHNHLTRIATFCALLYCNGAFCAELVEYDHTFLMGQNASNIDLSRYSEGNPAIPGVYDVSVYVNDQPVINQSITFVAIEGKKNAQACITLKNLLQFHINSPDINSEKAVLLARDEALGNCLNLTEIIPQASVRYDVNDQRLDIDVPQAWVMKNYQNYVDPSLWENGINAAMLSYNLNGYHSETPGRKNDSIYAAFNGGMNLGAWRLRASGNYNWMTDSGGNYDFKNRYIQRDIASLRSQFIIGESYTTGETFDSVSIRGIRLYSDSRMLPPTLASFAPIIHGVANTNAKVTITQGGYKIYETTVPPGAFVIDDLSPSGYGSDLIVTIEESDGSKRTFSQPFSSVVQMLRPGVGRWDISGGQVLKDDIQDEPNLFQASYYYGLNNYLTGYTGIQITDNNYTAGLLGLGLNTSVGAFSFDVTHSNVRIPDDKTYQGQSYRVSWNKLFEETSTSLNIAAYRYSTQNYLGLNDALTLIDEVKHPEQDLEPKSMRNYSRMKNQVTVSINQPLKFEKKDYGSFYLSGSWSDYWASGQNRSNYSIGYSNSASWGSYSISAQRSWNEDGDADDSVYLSFTIPIEKLLGTEQRTSGFQSIDTQMSSDFKGNNQLNVSSSGYNDNARVSYSVNTGYTMNKASKDLSYVGGYASYESPWGTLAGSVSANSDNSRQVSLSTDGGFVLHSGGLTFSNDSFSDSDTLAVVQAPGAQGARINYGNSTIDRWGYGVTSALSPYHENRIALDINDLENDVELKSTSAVAVPRQGSVVFADFETVQGQSAIMNITRSDGKNIPFAADIYDDQGNVIGNVGQGGQAFVRGIEQQGNINIKWLEESKPVSCLAHYQQSSEAEKIAQSIILNGIRCQIQ

SEQ ID NO: 19068 - protein, 246 aa, Escherichia coli; identical to SEQ ID NO: 5640

SEQ ID NO: 19069 - protein, 749 aa, Escherichia coli; identical to SEQ ID NO: 5631

SEQ ID NO: 19070 - protein, 614 aa, Escherichia coli; identical to SEQ ID NO: 5590

SEQ ID NO: 19071 - protein, 373 aa, Escherichia coli; identical to SEQ ID NO: 2969

SEQ ID NO: 19072 - protein, 200 aa, Escherichia coli; identical to SEQ ID NO: 1785

SEQ ID NO: 19073 - protein, 250 aa, Escherichia coli; identical to SEQ ID NO: 5650

SEQ ID NO: 19074 - protein, 700 aa, Escherichia coli
MKIFSVRQTVLPALLVLSPVVFAADEQTMIVSAAPQVVSELDTPAAVSVVDGEEMRLATPRINLSESLTGVPGLQVQNRQNYAQDLQLSIRGFGSRSTYGIRGIRLYVDGIPATMPDGQGQTSNIDLSSVQNVEVLRGPFSALYGNASGDVMNVTTQTGQQPPTIEASSYYGSFGSWRYGLKATGATGDGTQPGDVDYTVATTRFTTHGYRDHSGAQKNLANAKLGVRIDDASKLSLIFNSVDIKADDPGGLTEAEWKANPQQAPRAEQYDMRKTIKQTQAGLRYERSLSAQDDMSVMMYAGERETTQYQSIPMAPQLNPSHAGGVITLQRHYQGIDSRWTHRGELGVPVTFTTGLNYENMSENRKGYNNFRLNRGVPEYGQKGELRRDERNLMWNVDPYLQTQWQLTDKLSLDAGVRYSSVWFDSNDHYVTPGNGDDSGDASYHKWLPAGSLKYAMTDAWNVYLAAGRGFETPTINELSYRADGQSGMNFGLKPSTNDTIEIGSKTRIGDGLLSLALFQTDTDDEIVVDSSSGGRTTYKNAGKTRRQGAELAWDQRFAGDFRVKASWTWLDATYRSNVCNEQDCNGNRMPGIARNMGFASIGYIPEDGWYAGTEARYMGDIMADDENTAKAPSYTLVGLFTGYKYNYHNLTVDLFGRVDNLFDKEYVGSVIVNESNGRYYEPAPGRNYGVGINIAWRFE

SEQ ID NO: 19075 - protein, 715 aa, Escherichia coli; identical to SEQ ID NO: 5610

SEQ ID NO: 19076 - protein, 241 aa, Escherichia coli; identical to SEQ ID NO: 2922

SEQ ID NO: 19077 - protein, 119 aa, Escherichia coli; identical to SEQ ID NO: 5512

SEQ ID NO: 19078 - protein, 679 aa, Escherichia coli
MSDTHFIFVVTSWRYGMFRLNPFVRVGLCLSAISCAWPVLAVDDDGETMVVTASSVEQNLKDAPASISVITQEDLQRKPVQNLKDVLKEVPGVQLTNEGDNRKGVSIRGLDSSYTLILVDGKRVNSRNAVFRHNDFDLNWIPVDSIERIEVVRGPMSSLYGSDALGGVVNIITKKIGQKWSGTVTVDTTVQEHRDRGDTYNGQFFTSGPLIDGVLGMKAYGSLAKREKDDPQNSTTTDTGETPRIEGFSSRDGNVEFAWTPNQNHDFTAGYGFDRQDRDSDSLDKNRLERQNYSVSHNGRWDYGTSELKYYGEKVENKNPGNSSPITSESNTVDGKYTLPLTAINQFLTVGGEWRHDKLSDAVNLTGGTSSKTSASQYALFVEDEWRIFEPLALTTGVRMDDHETYGEHWSPRAYLVYNATDTVTVKGGWATAFKAPSLLQLSPDWTSNSCRGACKIVGSPDLKPETSESWELGLYYMGEEGWLEGVESSVTVFRNDVKDRISISRTSDVNAAPGYQNFVGFETGANGRRIPVFSYYNVNKARIQGVETELKIPFNDEWKLSINYTYNDGRDVSNGENKPLSDLPFHTANGTLDWKPLALEDWSFYVSGHYTGQKRADSATAKTPGGYTIWNTGAAWQVTKDVKLRAGVLNLGDKDLSRDDYSYNEDGRRYFMAVDYRF

SEQ ID NO: 19079 - protein, 656 aa, Escherichia coli; identical to SEQ ID NO: 6715

SEQ ID NO: 19080 - protein, 161 aa, Escherichia coli; identical to SEQ ID NO: 2582

SEQ ID NO: 19081 - protein, 236 aa, Escherichia coli; identical to SEQ ID NO: 15508

SEQ ID NO: 19082 - protein, 193 aa, Escherichia coli; identical to SEQ ID NO: 2246

SEQ ID NO: 19083 - protein, 191 aa, Escherichia coli; identical to SEQ ID NO: 5619

SEQ ID NO: 19084 - protein, 713 aa, Escherichia coli; identical to SEQ ID NO: 11959

SEQ ID NO: 19085 - protein, 826 aa, Escherichia coli
MLRMTPLASAIVALLIGIEAYAAEETFDTHFMIGGMKDQQVANIRLDDNQPLPGQYDIDIYVNKQWRGKYEIIVKDNPQETCLSREMIKRLGINTDNFASGKQCLTFKQLIQGGSYTWDIGVFRLDFSVPQAWVEELEIGYVPPENWERGINAFYTSYYMSQYYSDYKASGNSKSTYVRFNSGLNLLGWQLHSDASFSKTNNNPGVWKSNTLYLERGFAQLLGTLRVGDMYTSSDIFDSVRFSGVRLFRDMQMLPNSKQNFTPRVQGIAQSNALVTIEQNGFVVYQKEVPPGPFAITDLQLAGGGADLDVSVKEADGSVTTYLVPYAAVPNMLQPGVSKYDFAAGRSHIEGASKQSDFVQAGYQYGFNNLLTLYGGSMVANNYYAFTLGTGWNTRFGAISVDATKSHSKQDNGDVFDGQSYQIAYNKFVSQTSTRFGLAAWRYSSRDYRTFNDHVWANNKDNYRRDENDIYDIADYYQNDFGRKNSFSANMSQSLPEGWGSVSLSTLWRDYWGRSGSSKDYQLSYSNNLRRISYTLAASHAYDENHHEEKRFNIFISIPFDWGDDVTTPRRQIYMSNSTTFDDQGVASNNTGLSGTVGSRDQFNYGVNLSYQYQGNETTAGANLTWNAPVATVNGSYSQSSAYRQAGASVSGGIVAWSGGVNLANRLSETFAVMNAPGIKDAYVNGQKYRTTNRNGVVVYDGMTPYRENYLMLDVSQSDSEAELRGNRKIAAPYRGAVVLVNFDTDQRKPWFIKALRADGQPLTFGYEVNDIHGHNIGVVGQGSQLFIRTNEVPPSVNVAIDKQQGLSCTITFGKEIDESKNYICQ

SEQ ID NO: 19086 - protein, 170 aa, Escherichia coli
MSGILTRWRQFGKRYFWPHLLLGMVAASLGLPALSNAAEPNAPAKATTRNHEPSAKVNFGQLALLETNTRRPNSNYSVDYWHQHAIRTVIRHLSFAMAPQTLPVAEESLPLQAQHLALLDTLSALLTQEGTPSEKGYRIDYAHFTPQAKFSTPVWISQAQGIRAGPQRLS

SEQ ID NO: 19087 - protein, 565 aa, Escherichia coli; identical to SEQ ID NO: 5637

SEQ ID NO: 19088 - protein, 351 aa, Escherichia coli; identical to SEQ ID NO: 5565

SEQ ID NO: 19089 - protein, 883 aa, Escherichia coli
MTAFRAAFKAYRMHQVLILPRFARLTFALGLATAVFPVDAEYYFNPRFLSNDLAESVDLSAFTKGREAPPGTYRVDIYLNDEFMASRDITFIADDNNADLIPCLSTDLLVSLGIKKSALLDNKEHSADKHVPDNSACTPLQDRLADASSEFDVGQQHLSLSVPQIYVGRMARGYVSPDLWEEGINAGLLNYSFNGNSINNRSNHNAGKSNYAYLNLQSGINIGSWRLRDNSTWSYNSGSSNSSDSNKWQHINTSAERDIIPLRSRLTVGDSYTDGDIFDSVNFRGLKINSTEAMLPDSQHGFAPVIHGIARGTAQVSVKQNGYDVYQTTVPPGPFTIDDINSAANGGDLQVTIKEADGSIQTLYVPYSSVPVLQRAGYTRYALAMGEYRSGNNLQSSPKFVQASLMHGLKGNWTPYGGMQIAEDYQAFNLGIGKDLGLFGAFSFDITQANTTLADDTRHSGQSVKSVYSKSFYQTGTNIQVAGYRYSTQGFYNLSDSAYSRMSGYTVKPPTGDTSEQTLFIDYFNLFYSKRGQEQISISQQLGHYGTTFFSASRQSYWNTSRSDQQISFGLNVPLGDITTSLNYSYSNNIWQNDRDHLLAFTLNVPFSHWMRTDSQSAFRNSNASYSMSNDLKGGMTNLSGVYGTLLPDNNLNYSVQVGNTQGGNTSSGTSGYSSLNYRGAYGNTNVGYSRSGDSSQIYYGMSGGIIAHADGITFGQPLGDTMVLVKAPGADNVKIENQTGIHTDWRGYAILPFATEYRENRVALNANSLADNVELDETVVTVIPTHGAIARATFNAQIGGKVLMTLKYGNKSVPFGAIVTHGENKNGSIVAENGQVYLTGLPQSGKLQVSWGNDKNSNCIVDYKLPAVSPGTLLNQQTAICR

SEQ ID NO: 19090 - protein, 332 aa, Escherichia coli; identical to SEQ ID NO: 2701

SEQ ID NO: 19091 - protein, 102 aa, Escherichia coli; identical to SEQ ID NO: 1823

SEQ ID NO: 19092 - protein, 274 aa, Escherichia coli
MNKTAIALLALLASSASLAATPWQKITQPVPGNAQSIGSFSNGCIIGADTLPIQSEHYQVMRTDQRRYFGHPDLVMFIQRLSRQVSNLGMGTVLIGDMGMPAGGRFNGGHASHQTGLDVDIFLQLPKTRWTSAQLLRPQALDLVSRDGKHVVPTLWKPEIFSLIKLAAQDKDVTRIFVNPAIKQQLCLDAGTDRDWLRKVRPWFQHRAHMHVRLRCPADSLECEDQPLPPPGDGCGAELQSWFEPPKPGTTKPEKKTPPPLPPSCQALLDEHVI

SEQ ID NO: 19093 - protein, 249 aa, Escherichia coli
MKGLFDHGGLFMSVFSRVCLGFTFLLTALQVQASIVLGGTRIIYPSNQNEVQITLKNKDAYARYLVQSWVSNIDGSKAPFLITPPVYKLEENRQTLLHIVFTGDKNKLPQDRESLFLANIKSVSAMPEELKDKNTLQFAMKARLKLFWRPASLDNSDALTAWEKLKFHKEAGKLIVKNPTPFYISFSDLTVSGKNIVPTESKSEPGALLMMVGPFSEQRFSLPVGAGSIVEWSVITDYGSSSGKRQQKL

SEQ ID NO: 19094 - protein, 746 aa, Escherichia coli; identical to SEQ ID NO: 5579

SEQ ID NO: 19095 - protein, 721 aa, Escherichia coli; identical to SEQ ID NO: 9824

SEQ ID NO: 19096 - protein, 828 aa, Escherichia coli; identical to SEQ ID NO: 2388

SEQ ID NO: 19097 - protein, 673 aa, Escherichia coli; identical to SEQ ID NO: 2919

SEQ ID NO: 19098 - protein, 208 aa, Escherichia coli; identical to SEQ ID NO: 1949

SEQ ID NO: 19099 - protein, 224 aa, Escherichia coli
MKGLLALLISSMVLPAHAGIVIYGTRIIYPAEHKEVMVQLMNQGNRSSLMQAWIDDGDTSLPPEKIQVPFMLTPPVAKIGANSGQQVKIKIMPNKLPTNKESIFYLNVLDIPPNSPEQEGKNALKFAMQNRIKLFYRPAGIAPVNKATFKKLLVNRSGNGLVIKNDSANWVTISDVKANNVKVNYETIMIAPLESQSVNVKSNNANNWHLTIIDDHGNYISDKI

SEQ ID NO: 19100 - protein, 511 aa, Escherichia coli; identical to SEQ ID NO: 2457

SEQ ID NO: 19101 - protein, 753 aa, Escherichia coli; identical to SEQ ID NO: 6655

SEQ ID NO: 19102 - protein, 359 aa, Escherichia coli; identical to SEQ ID NO: 2329

SEQ ID NO: 19103 - protein, 551 aa, Escherichia coli; identical to SEQ ID NO: 2452

SEQ ID NO: 19104 - protein, 232 aa, Escherichia coli; identical to SEQ ID NO: 5564

SEQ ID NO: 19105 - protein, 222 aa, Escherichia coli; identical to SEQ ID NO: 1956

SEQ ID NO: 19106 - protein, 162 aa, Escherichia coli; identical to SEQ ID NO: 1965

SEQ ID NO: 19107 - protein, 518 aa, Escherichia coli; identical to SEQ ID NO: 2350

SEQ ID NO: 19108 - protein, 412 aa, Escherichia coli; identical to SEQ ID NO: 13668

SEQ ID NO: 19109 - protein, 118 aa, Escherichia coli [sequence omitted]

SEQ ID NO: 19110 - protein, 214 aa, Escherichia coli
MMTKMSRYALITALAMFLAGCVGQREPAPVEEVKPAPEQPTEPQQPVPTVPSVPTIPQQPGPIEHEDQTAPPAPHIRHYDWNGAMQPMVSKMLGADGVTAGSVLLVDSVNNRTNGSLNAAEATETLRNALANNGKFTLVSAQQLSMAKQQLGLSPQDSLGTRSKAIGIARNVGAHYVLYSSASGNVNAPTLQMQLMLVQTGEIIWSGKGAVSQQ

SEQ ID NO: 19111 - protein, 784 aa, Escherichia coli; identical to SEQ ID NO: 2242

SEQ ID NO: 19112 - protein, 234 aa, Escherichia coli; identical to SEQ ID NO: 16100

SEQ ID NO: 19113 - protein, 360 aa, Escherichia coli
MKKLTVAISAVAASVLMAMSAQAAEIYNKDSNKLDLYGKVNAKHYFSSNDADDGDTTYARLGFKGETQINDQLTGFGQWEYEFKGNRAESQGSSKDKTRLAFAGLKFGDYGSIDYGRNYGVAYDIGAWTDVLPEFGGDTWTQTDVFMTGRTTGVATYRNNDFFGLVDGLNFAAQYQGKNDRTDVTEVNGDGFGFSTTYEYEGFGVGATYAKSDRTDGQVAYGKSKFNASGKNAEVWAAGLKYDANNIYLATTYSETQNMTVFGNNHIANKAQNFEAVAQYQFDFGLRPSVAYLQSKGKDLGVHGDRDLVKYVDVGATYYFNKNMSTFVDYKINLIDDSKFTKTAGIDTDDIVAVGLVYQF

SEQ ID NO: 19114 - protein, 430 aa, Escherichia coli; identical to SEQ ID NO: 2617

SEQ ID NO: 19115 - protein, 446 aa, Escherichia coli; identical to SEQ ID NO: 2177

SEQ ID NO: 19116 - protein, 334 aa, Escherichia coli
MKKNQFFKESDVTAESVFFMKRRQVLKALGISAAAFSLPHAAHADLLSWFKGNDRPPAPAGKPLEFSKPAAWQNNLPLTPADKVSGYNNFYEFGLDKADPAANAGSLKTEPWTLKISGEVAKPLTLDHDDLTRRFPLEERIYRMRCVEAWSMVVPWIGFPLHKLLALAEPTSNAKYVAFETIYAPEQMPGQQDRFIGGGLKYPYVEGLRLDEAMHPLTLMTVGVYGKALPPQNGAPVRLIVPWKYGFKGIKSIVSIKLTRERPPTTWNLAAPDEYGFYANVNPHVDHPRWSQATERFIGSGGILDVQRQPTLLFNGYADQVASLYRGLDLRENF

SEQ ID NO: 19117 - protein, 678 aa, Escherichia coli
MVPSTFSRLKAARCLPVVLAALIFAGCGTHTPDQSTAYMQGTAQADSAFYLQQMQQSSDDTRINWQLLAIRALVKEGKTGQAVELVNQLPQELNDNQRREKTLLAAEIKLAQKDFAGAQNLLAKITPADLEQNQQARYWQAKIDASQGRPSIDLLRALIAQEPLLGAKEKQQNIDATWQALSSMTQEQANTLVINADENILQGWLDLQRVWFDNRNDPDMMKAGIADWQKRYPNNPGAKMLPTQLVNVKAFKPASTNKIALLLPLNGQAAVFGRTIQQGFEAAKNIGTQPVAAQVAAAPAADVAEQPQPQTVDGVASPAQASVSDLTGEQPAAQPVPVSAPATSTAAVNAPANPSAELKIYDTSSQPLSQILSQVQQDGASIVVGPLLKNNVEELLKSNTPLNVLALNQPENIENRVNICYFALSPEDEARDAARHIRDQGKQAPLVLIPRSSLGDRVANAFAQEWQKLGGGTVLQQKFGSTSELRAGVNGGSGIALTGSPITPRATTDSGMTTNNPTLQTTPTDDQFTNNGGRVDAVYIVATPGEIAFIKPMIAMRNGSQSGATLYASSRSAQGTAGPDFRLEMEGLQYSEIPMLAGGNLPLMQQALSAVNNDYSLARMYAMGVDAWSLANHFSQMRQVQGFEINGNTGSLTASPDCVINRKLSWLQYQQGQVVPAS

SEQ ID NO: 19118 - protein, 478 aa, Escherichia coli; identical to SEQ ID NO: 2405

SEQ ID NO: 19119 - protein, 660 aa, Escherichia coli; identical to SEQ ID NO: 5588

SEQ ID NO: 19120 - protein, 838 aa, Escherichia coli; identical to SEQ ID NO: 18199

SEQ ID NO: 19121 - protein, 822 aa, Escherichia coli; identical to SEQ ID NO: 18869

SEQ ID NO: 19122 - protein, 207 aa, Escherichia coli; identical to SEQ ID NO: 2211

SEQ ID NO: 19123 - protein, 869 aa, Escherichia coli; identical to SEQ ID NO: 4609

SEQ ID NO: 19124 - protein, 866 aa, Escherichia coli; identical to SEQ ID NO: 18217

SEQ ID NO: 19125 - protein, 233 aa, Escherichia coli; identical to SEQ ID NO: 2006

SEQ ID NO: 19126 - protein, 784 aa, Escherichia coli; identical to SEQ ID NO: 2244

SEQ ID NO: 19127 - protein, 700 aa, Escherichia coli; identical to SEQ ID NO: 3991

SEQ ID NO: 19128 - protein, 193 aa, Escherichia coli; identical to SEQ ID NO: 2246

SEQ ID NO: 19129 - protein, 614 aa, Escherichia coli
MIKKASLLTACSVTAFSAWAQDTSPDTLVVTANRFEQPRSTVLAPTTVVTRQDIDRWLSTSVNDVLRRLPGVDITQNGGSGQLSSIFIRGTNASHVLVLIDGVRLNLAGVSGSADLSQFPIALVQRVEYIRGPRSAVYGSDAIGGVVNIITTRDEPGTEISAGWGSNSYQNYDVSTQQQLGDKTRVTLLGDYAHTHGYDVVAYGNTGTQAQTDNDGFLSKTLYGALEHNFTDAWSGFVRGYGYDNRTNYDAYYSPGSPLLDTRKLYSQSWDAGLRYNGELIKSQLITSYSHSKDYNYDPHYGRYDSSATLDEMKQYTVQWANNVIVGHGSIGAGVDWQKQTTTPGTGYVEDGYDQRNTGIYLTGLQQVGDFTFEGAARSDDNSQFGRHGTWQTSAGWEFIEGYRFIASYGTSYKAPNLGQLYGFYGNPNLDPEKSKQWEGAFEGLTAGVNWRISGYRNDVSDLIDYDDHTLKYYNEGKARIKGVEATANFDTGPLTHTVSYDYVDARNAITDTPLLRRAKQQVKYQLDWQLYDFDWGITYQYLGTRYDKDYSSYPYQTVKMGGVSLWDLAVAYPVTSHLTVRGKIANLFDKDYETVYGYQTAGREYTLSGSYTF

SEQ ID NO: 19130 - protein, 249 aa, Escherichia coli; identical to SEQ ID NO: 2793

SEQ ID NO: 19131 - protein, 365 aa, Escherichia coli; identical to SEQ ID NO: 2102

SEQ ID NO: 19132 - protein, 729 aa, Escherichia coli; identical to SEQ ID NO: 3979

SEQ ID NO: 19133 - protein, 432 aa, Escherichia coli; identical to SEQ ID NO: 2026

SEQ ID NO: 19134 - protein, 565 aa, Escherichia coli; identical to SEQ ID NO: 2669

SEQ ID NO: 19135 - protein, 208 aa, Escherichia coli; identical to SEQ ID NO: 1949

SEQ ID NO: 19136 - protein, 250 aa, Escherichia coli; identical to SEQ ID NO: 4023

SEQ ID NO: 19137 - protein, 881 aa, Escherichia coli; identical to SEQ ID NO: 3936

SEQ ID NO: 19138 - protein, 541 aa, Escherichia coli; identical to SEQ ID NO: 4657

SEQ ID NO: 19139 - protein, 230 aa, Escherichia coli; identical to SEQ ID NO: 2580

SEQ ID NO: 19140 - protein, 430 aa, Escherichia coli; identical to SEQ ID NO: 2617

SEQ ID NO: 19141 - protein, 359 aa, Escherichia coli; identical to SEQ ID NO: 2328

SEQ ID NO: 19142 - protein, 334 aa, Escherichia coli; identical to SEQ ID NO: 2746

SEQ ID NO: 19143 - protein, 650 aa, Escherichia coli
MKGLNKITCCLLAALLMPCAGHAENEQYGANFNNADIRQFVEIVGQHLGKTILIDPSVQGTISVRSNDTFSQQEYYQFFLSILDLYGYSVITLDNGFLKVVRSANVKTSPGMIADSSRPGVGDELVTRIVPLENVPARDLAPLLRQMMDAGSVGNVVHYEPSNVLILTGRASTINKLIEVIKRVDVIGTEKQQIIHLEYASAEDLAEILNQLISESHGKSQMPALLSAKIVADKRTNSLIISGPEKARQRITSLLKSLDVEEIEEGNTRVYYLKYAKATNLVEVLTGVSEKLKDEKGNARKPSSSGAMDNVAITADEQTNSLVITADQSVQEKLATVIARLDIRRAQVLVEAIIVEVQDGNGLNLGVQWANKNVGAQQFTNTGLPIFNAAQGVADYKKNGGITSANPAWDMFSAYNGMAAGFFNGDWGVLLTALASNNKNDILATPSIVTLDNKLASFNVGQDVPVLSGSQTTSGDNVFNTVERKTVGTKLKVTPQVNEGDAVLLEIEQEVSSVDSSSNSTLGPTFNTRTIQNAVLVKTGETVVLGGLLDDFSKEQVSKVPLLGDIPLVGQLFRYTSTERAKRNLMVFIRPTIIRDDDVYRSLSKEKYTRYRQEQQQRIDGKSKALVGSEDLPVLDENTFNSHAPAPSSR

SEQ ID NO: 19144 - protein, 897 aa, Escherichia coli; identical to SEQ ID NO: 3934

SEQ ID NO: 19145 - protein, 161 aa, Escherichia coli; identical to SEQ ID NO: 2582

SEQ ID NO: 19146 - protein, 236 aa, Escherichia coli; identical to SEQ ID NO: 2726

SEQ ID NO: 19147 - protein, 774 aa, Escherichia coli; identical to SEQ ID NO: 3426

SEQ ID NO: 19148 - protein, 866 aa, Escherichia coli; identical to SEQ ID NO: 18211

SEQ ID NO: 19149 - protein, 274 aa, Escherichia coli; identical to SEQ ID NO: 18177

SEQ ID NO: 19150 - protein, 243 aa, Escherichia coli; identical to SEQ ID NO: 4043

SEQ ID NO: 19151 - protein, 332 aa, Escherichia coli; identical to SEQ ID NO: 2701

SEQ ID NO: 19152 - protein, 345 aa, Escherichia coli; identical to SEQ ID NO: 18205

SEQ ID NO: 19153 - protein, 878 aa, Escherichia coli; identical to SEQ ID NO: 3957

SEQ ID NO: 19154 - protein, 170 aa, Escherichia coli [sequence omitted]

SEQ ID NO: 19155 - protein, 816 aa, Escherichia coli; identical to SEQ ID NO: 5482

SEQ ID NO: 19156 - protein, 200 aa, Escherichia coli; identical to SEQ ID NO: 18200

SEQ ID NO: 19157 - protein, 663 aa, Escherichia coli; identical to SEQ ID NO: 4631

SEQ ID NO: 19158 - protein, 746 aa, Escherichia coli; identical to SEQ ID NO: 4083

SEQ ID NO: 19159 - protein, 191 aa, Escherichia coli; identical to SEQ ID NO: 2727

SEQ ID NO: 19160 - protein, 362 aa, Escherichia coli; identical to SEQ ID NO: 2434

SEQ ID NO: 19161 - protein, 204 aa, Escherichia coli; identical to SEQ ID NO: 2957

SEQ ID NO: 19162 - protein, 368 aa, Escherichia coli; identical to SEQ ID NO: 2374

SEQ ID NO: 19163 - protein, 231 aa, Escherichia coli; identical to SEQ ID NO: 4031

SEQ ID NO: 19164 - protein, 203 aa, Escherichia coli; identical to SEQ ID NO: 2015

SEQ ID NO: 19165 - protein, 162 aa, Escherichia coli; identical to SEQ ID NO: 1973

SEQ ID NO: 19166 - protein, 311 aa, Escherichia coli; identical to SEQ ID NO: 18876

SEQ ID NO: 19167 - protein, 237 aa, Escherichia coli
MRKITQAISAVCLLFALNSSAVALASSPSPLNPGTNVARLAEQAPIHWVSVAQIENSLAGRPPMAVEVDIDDTVLFSSPGFWRGKKTFSPESEDYLKNPVFWEKMNNGWDEFSIPKEVARQLIDMHVRRGDAIFFVTGRSPTKTETVSKTLADNFHIPATNMNPVIFAGDKPGQNTKSQWLQDKNIRIFYGDSDNDITAARDVGARGIRILRASNSTYKPLPQAGAFGEEVIVNSEY

SEQ ID NO: 19168 - protein, 747 aa, Escherichia coli; identical to SEQ ID NO: 18882

SEQ ID NO: 19169 - protein, 266 aa, Escherichia coli; identical to SEQ ID NO: 18213

SEQ ID NO: 19170 - protein, 246 aa, Escherichia coli; identical to SEQ ID NO: 3021

SEQ ID NO: 19171 - protein, 678 aa, Escherichia coli; identical to SEQ ID NO: 3993

SEQ ID NO: 19172 - protein, 232 aa, Escherichia coli; identical to SEQ ID NO: 2087

SEQ ID NO: 19173 - protein, 213 aa, Escherichia coli; identical to SEQ ID NO: 2232

SEQ ID NO: 19174 - protein, 412 aa, Escherichia coli; identical to SEQ ID NO: 4058

SEQ ID NO: 19175 - protein, 241 aa, Escherichia coli; identical to SEQ ID NO: 2922

SEQ ID NO: 19176 - protein, 446 aa, Escherichia coli [sequence omitted]

SEQ ID NO: 19177 - protein, 122 aa, Escherichia coli; identical to SEQ ID NO: 2915

SEQ ID NO: 19178 - protein, 511 aa, Escherichia coli; identical to SEQ ID NO: 2466

SEQ ID NO: 19179 - protein, 102 aa, Escherichia coli; identical to SEQ ID NO: 18184

SEQ ID NO: 19180 - protein, 828 aa, Escherichia coli; identical to SEQ ID NO: 18201

SEQ ID NO: 19181 - protein, 686 aa, Escherichia coli; identical to SEQ ID NO: 3015

SEQ ID NO: 19182 - protein, 760 aa, Escherichia coli; identical to SEQ ID NO: 3992

SEQ ID NO: 19183 - protein, 478 aa, Escherichia coli; identical to SEQ ID NO: 2404

SEQ ID NO: 19184 - protein, 793 aa, Escherichia coli; identical to SEQ ID NO: 2768

SEQ ID NO: 19185 - protein, 237 aa, Escherichia coli; identical to SEQ ID NO: 1814

SEQ ID NO: 19186 - protein, 368 aa, Escherichia coli; identical to SEQ ID NO: 2374

SEQ ID NO: 19187 - protein, 815 aa, Escherichia coli; identical to SEQ ID NO: 2698

SEQ ID NO: 19188 - protein, 843 aa, Escherichia coli; identical to SEQ ID NO: 3954

SEQ ID NO: 19189 - protein, 831 aa, Escherichia coli; identical to SEQ ID NO: 17626

SEQ ID NO: 19190 - protein, 266 aa, Escherichia coli; identical to SEQ ID NO: 17541

SEQ ID NO: 19191 - protein, 869 aa, Escherichia coli; identical to SEQ ID NO: 17692

SEQ ID NO: 19192 - protein, 161 aa, Escherichia coli; identical to SEQ ID NO: 2582

SEQ ID NO: 19193 - protein, 843 aa, Escherichia coli; identical to SEQ ID NO: 3163

SEQ ID NO: 19194 - protein, 826 aa, Escherichia coli; identical to SEQ ID NO: 3700

SEQ ID NO: 19195 - protein, 866 aa, Escherichia coli; identical to SEQ ID NO: 4866

SEQ ID NO: 19196 - protein, 878 aa, Escherichia coli; identical to SEQ ID NO: 12633

SEQ ID NO: 19197 - protein, 816 aa, Escherichia coli; identical to SEQ ID NO: 12597

SEQ ID NO: 19198 - protein, 368 aa, Escherichia coli
MNKTITALAIMMASFATNASVLPETPVPFKSGTGAIDNDTVYIGLGSAGTAWYKLDTQAKDKKWTALAAFPGGPRDQATSAFIDGNLYVFGGIGKNSEGLTQVFNDVHKYNPKTNSWVKLMSHAPMGMAGHVTFVHNGKAYVTGGVNQNIFNGYFEDLNEAGKDSTAIDKINAHYFDKKAEDYFFNKFLLSFDPSTQQWSYAGESPWYGTAGAAVVNKGDKTWLINGEAKPGLRTDAVFELDFTGNNLKWNKLAPVSSPDGVAGGFAGISNNSLIFAGGAGFKGSRENYQNGKNYAHEGLKKSYSTDIHLWHNGKWDKSGELSQGRAYGVSLPWNNSLLIIGGETAGGKAVTDSVLISVKDNKVTVQN

SEQ ID NO: 19199 - protein, 869 aa, Escherichia coli; identical to SEQ ID NO: 8419

SEQ ID NO: 19200 - protein, 881 aa, Escherichia coli; identical to SEQ ID NO: 3713

SEQ ID NO: 19201 - protein, 865 aa, Escherichia coli; identical to SEQ ID NO: 2167

SEQ ID NO: 19202 - protein, 838 aa, Escherichia coli; identical to SEQ ID NO: 2795

SEQ ID NO: 19203 - protein, 878 aa, Escherichia coli; identical to SEQ ID NO: 17631

SEQ ID NO: 19204 - protein, 866 aa, Escherichia coli; identical to SEQ ID NO: 17629

SEQ ID NO: 19205 - protein, 826 aa, Escherichia coli; identical to SEQ ID NO: 17542

SEQ ID NO: 19206 - protein, 883 aa, Escherichia coli
MTAFRAAFKAYRMHQVLIMPRFARLTIALGLATAVFPVDAEYYFNPRFLSNDLAESVDLSAFTKGREAPPGTYRVDIYLNDEFMTSRDITFIADDNNAELIPCLSTDLLVSLGIKKIALLDNKEHSAEKHVPDNSACTPLQDRLADASTEFDVGQQHLSLSVPQIYVGRMARGYVSPDLWEEGINAGLLNYSFNGNSINNRSNHNAGKSNYAYLNLQSGINIGSWRLRDNSTWSYNSGSSNSSDSNKWQHINTSAERDIIPLRSRLTVGDSYTDGDIFDSVNFRGLKINSTEAMLPDSQHGFAPVIHGIARGTAQVSVKQNGYDVYQTTVPPGPFTIDDINSAANGGDLQVTIKEADGSIQTLYVPYSSVPVLQRAGYTRYALAMGEYRSGNNLQSSPKFIQGSLMHGLEGNWTPYGGMQIAEDYQAFNLGIGKDLGLFGAFSFDITQANTTLADGTRHSGQSVKSVYSKSFYQTGTNIQVAGYRYSTQGFYNLSDSAYSRMSGYTVKPPTGDTNEQTQFIDYFNLFYSKRGQEQISISQQLGNYGTTFFSASRQSYWNTSRSDQQISFGLNVPFGDITTSLNYSYSNNIWQNDRDHLLAFTLNVPFSHWMRTDSQSAFRNSNASYSMSNDLKGGMTNLSGVYGTLLPDNNLNYSVQVGNTHGGNTSSGTSGYSSLNYRGAYGNTNVGYSRSGDSSQIYYGMSGGIIAHADGITFGQPLGDTMVLVKAPGADNVKIENQTGIHTDWRGYAILPFATEYRENRVALNANSLADNVELDETVITVIPTHGAIARATFNAQIGGKVLMTLKYGNKSVPFGAIATHGENKNGSIVAENGQVYLTGLPQSGKLQVSWGKDKNSNCIVEYKLPEVSPGTLLNQQTAICR

SEQ ID NO: 19207 - protein, 266 aa, Escherichia coli; identical to SEQ ID NO: 1894

SEQ ID NO: 19208 - protein, 207 aa, Escherichia coli; identical to SEQ ID NO: 2211

SEQ ID NO: 19209 - protein, 816 aa, Escherichia coli
MLRTTRWVAAIIFLYSFPGYAEETFDTHFMIGGMRGEKVSEYRFDNKQPLPGNYELDFYVNHQWRGKKDITIPESPAKPCLPKVLLTTLGVKTDNLNTEDNCILLDEAVHGGQYQWDISEHRLNLTVPQAYINELERGYVPPESWDRGIDVFYTSYNLSQYRSYDSNNNSNTASYGRFNSGLNLFSWQLHSDASYSKPDDMKGKWQSNTLYLERGWSQILSTVQIGENYTSSLIFDSLRFSGIRLFRDMQMLPDSMQSFTPLVQGVAQSNALITVSQNGYTIYQKEVPPGPFTIADLQLSGSGSDLDVSIKEADGSVRSFLVPYSSVPNMLQPGVSNFDFIAGRSQIYGVKNQEDFLEANYIYGLNNLLTLYGGTILSDNYNAITLGNGWNTPLGAISFDATRSSSKLNNDTRHEGTSYQVAYNKYLLQTATHFSVAAWRYASQDYRTFSDHLYENDKINHQSDYDDFYDIGRKNSLSANIMQPLSNNLGNVSLSALWRNYWGRSGNAKDYQFSYSNSWQRISYTFSASQSYDENDKEEERFNLFISIPFHWGDDIAKTRHQINLSNSTSFSKDGYSSNNTGITGIAGEHDQLNYGIYVNQQQQNNDTSLGTNLSWRTPIATIDGSYSHSKNAWQSGGSISSGLVVWPGGINITNQLCDTFAILDAPGLEGAHINGQKYNRTNSKGQVVYDLMIPHRENHLVLDIANSESETELQGNRQIIAPYRGAVSYVQFTTDQRKPWYIQALRPDGSPLTFGYDVLDLQENNIGVVGQGSRLFIRVDEIPTGIKVALNDEQNLFCTITFQHVIDENKTYICQ

SEQ ID NO: 19210 - protein, 867 aa, Escherichia coli; identical to SEQ ID NO: 2581

SEQ ID NO: 19211 - protein, 821 aa, Escherichia coli; identical to SEQ ID NO: 2792

SEQ ID NO: 19212 - protein, 822 aa, Escherichia coli; identical to SEQ ID NO: 15161

SEQ ID NO: 19213 - protein, 838 aa, Escherichia coli; identical to SEQ ID NO: 7717

SEQ ID NO: 19214 - protein, 161 aa, Escherichia coli; identical to SEQ ID NO: 2582

SEQ ID NO: 19215 - protein, 866 aa, Escherichia coli; identical to SEQ ID NO: 2004

SEQ ID NO: 19216 - protein, 885 aa, Escherichia coli; identical to SEQ ID NO: 17547

SEQ ID NO: 19217 - protein, 161 aa, Escherichia coli; identical to SEQ ID NO: 2582

SEQ ID NO: 19218 - protein, 866 aa, Escherichia coli; identical to SEQ ID NO: 3688

SEQ ID NO: 19219 - protein, 826 aa, Escherichia coli; identical to SEQ ID NO: 2758

SEQ ID NO: 19220 - protein, 237 aa, Escherichia coli; identical to SEQ ID NO: 13595

SEQ ID NO: 19221 - protein, 266 aa, Escherichia coli; identical to SEQ ID NO: 1894

SEQ ID NO: 19222 - protein, 578 aa, Escherichia coli; identical to SEQ ID NO: 5358

SEQ ID NO: 19223 - protein, 412 aa, Escherichia coli; identical to SEQ ID NO: 2161

SEQ ID NO: 19224 - protein, 208 aa, Escherichia coli; identical to SEQ ID NO: 1949

SEQ ID NO: 19225 - protein, 650 aa, Escherichia coli; identical to SEQ ID NO: 2146

SEQ ID NO: 19226 - protein, 446 aa, Escherichia coli; identical to SEQ ID NO: 2176

SEQ ID NO: 19227 - protein, 784 aa, Escherichia coli; identical to SEQ ID NO: 2244

SEQ ID NO: 19228 - protein, 122 aa, Escherichia coli; identical to SEQ ID NO: 17152

SEQ ID NO: 19229 - protein, 239 aa, Escherichia coli; identical to SEQ ID NO: 2759

SEQ ID NO: 19230 - protein, 191 aa, Escherichia coli; identical to SEQ ID NO: 2727

SEQ ID NO: 19231 - protein, 250 aa, Escherichia coli; identical to SEQ ID NO: 2761

SEQ ID NO: 19232 - protein, 246 aa, Escherichia coli; identical to SEQ ID NO: 1985

SEQ ID NO: 19233 - protein, 249 aa, Escherichia coli; identical to SEQ ID NO: 2793

SEQ ID NO: 19234 - protein, 774 aa, Escherichia coli; identical to SEQ ID NO: 2066

SEQ ID NO: 19235 - protein, 233 aa, Escherichia coli; identical to SEQ ID NO: 2006

SEQ ID NO: 19236 - protein, 236 aa, Escherichia coli; identical to SEQ ID NO: 2726

SEQ ID NO: 19237 - protein, 351 aa, Escherichia coli; identical to SEQ ID NO: 17674

SEQ ID NO: 19238 - protein, 204 aa, Escherichia coli; identical to SEQ ID NO: 2957

SEQ ID NO: 19239 - protein, 686 aa, Escherichia coli; identical to SEQ ID NO: 4535

SEQ ID NO: 19240 - protein, 660 aa, Escherichia coli
MSRPQFTSLRLSLLALAVSATLPTFAFATETMTVTATGNARSSFEAPMMVSVIDTSAPENQTATSATDLLRHVPGITLDGTGRTNGQDVNMRGYDHRGVLVLVDGVRQGTDTGHLNGTFLEPALIKRVEIVRGPSALLYGSGALGGVISYDTVDAKDLLREGQSSGFRVFGTGGTGDHSLGLGASAFGRTENLDGIVAWSSRDRGDLRQSNGETAPNDESINNMLAKGTWQIDSAQSLSGLVRYYNNDAREPKNPQTVEASDSSNPMVDRSTIQRDAQLSYKLAPQGNDWLNADAKIYWSEVRINAQNTGSSGEYREQITKGARLENRSTLFADSFASHLLTYGGEYYRQEQHPGGATTGFPQAKIDFSSGWLQDEITLRDLPITLLGGTRYDSYRGSSEGYKDVDADKWSSRAGMTINPTNWLMLFGSYAQAFRAPTMGEMYNDSKHFSIGRFYTNYWVPNPNLRPETNETQEYGFGLRFDDLMLSNDALEFKASYFDTKAKDYISTTVDFAAATTMSYNVPNAKIWGWDVMTKYTTDLFSLDVAYNRTRGKDTDTGEYISSINPDTVTSTLNIPIAHSGFSVGWVGTFADRSTHISSSYSKQPGYGVNDFYVSYQGQQALKGMTTTLVLGNAFDKEYWSPQGIPQDGRNGKIFVSYQW

SEQ ID NO: 19241 - protein, 663 aa, Escherichia coli
MLNGIYSMRLKKRYLCTALSLAFTQQAVAAQESDTLTVWSSPVSSTTTTVLDQPTMKALDKQNVAQALSVVPGVVLQKSGSRNEEQVKVRGFDSRQVPVYFDGVPIYVPYDGNLDLARILTNNLGAVEVSKGYSSLLQGPNQMGGAINITTQKPTKPLEASLGYRQGWSRSQDNAYDMHASFAASSDLGYLQVSGSQLKQDFLGLPHGVNNDIAGKHGKMINSSADDKRGIVKLGFTPRENDEYTLTYIKQDGEKDNPPYSGNSGQKSRYWQWPEYDKESFYYQGTTQLNDRFTLKSRLYRDTFENTLMMYNSLADLKNKKGSYSHYSDYSDGAGLQLAADVRENDLLSFAVNWKDDVHREKGAPHAAYDRYEDRTWSLASEYQWAAADNVDVVAGISYDWRDSVEAKKHEKDGSITHYDDNNQSAFNWQVMGKYHFANEDTLALSYYDRTRFPTLKERYTTSKPAYNQIAIVNPQLKPERARGVDLTWNGAFTHDWGFEVSVYYNRVSDAILSHNIDADTIQNQNSGTVDYSGLDAGIKGKISNILDVGLSYALIHADAKRKDIGKITDLPTQTMTAWMTLKPWEPLSVTLSEEARSSSYSNSDGSQKAAGFAVTHIRADYTLGHGFSVNASVNNLFDTKYAYSEGFIEEGRNFWAGIEYTF

SEQ ID NO: 19242 - protein, 213 aa, Escherichia coli; identical to SEQ ID NO: 2232

SEQ ID NO: 19243 - protein, 678 aa, Escherichia coli; identical to SEQ ID NO: 17638

SEQ ID NO: 19244 - protein, 366 aa, Escherichia coli; identical to SEQ ID NO: 14612

SEQ ID NO: 19245 - protein, 749 aa, Escherichia coli; identical to SEQ ID NO: 17717

SEQ ID NO: 19246 - protein, 237 aa, Escherichia coli; identical to SEQ ID NO: 17555

SEQ ID NO: 19247 - protein, 230 aa, Escherichia coli; identical to SEQ ID NO: 17655

SEQ ID NO: 19248 - protein, 357 aa, Escherichia coli; identical to SEQ ID NO: 2888

SEQ ID NO: 19249 - protein, 472 aa, Escherichia coli
MSTIHTPLTYNEINGKPFGLDYELAKQFADYLGVKLKVTVRQNISQLFDDLDNGNADLLAAGLVYNSERVKNYQPGPTYYSVSQQLVYKVGQYRPRTLGNLTAEQLTVAPGHVVVNDLQTLKETKFPELSWKVDDKKGSAELMEDVIEGKLDYTIADSVAISLFQRVHPELAVALDITDEQPVTWFSPLDGDNTLSAALLDFFNEMNEDGTLARIEEKYLGHGDDFDYVDTRTFLRAVDAVLPQLKPLFEKYAEEIDWRLLAAIAYQESHWDAQATSPTGVRGMMMLTKNTAQSLGITDRTDAEQSISGGVRYLQDMMSKVPESVPENERIWFALAAYNMGYAHMLDARALTAKTKGNPDSWADVKQRLPLLSQKPYYSKLTYGYARGHEAYAYVENIRKYQISLVGYLQEKEKQATEAAMQLAQAYPAVSPTELGKEKFPFLSFLSQSSSNYLTHSPSLLFSRKGSEEKQN

SEQ ID NO: 19250 - protein, 365 aa, Escherichia coli; identical to SEQ ID NO: 2102

SEQ ID NO: 19251 - protein, 696 aa, Escherichia coli; identical to SEQ ID NO: 12641

SEQ ID NO: 19252 - protein, 274 aa, Escherichia coli; identical to SEQ ID NO: 3721

SEQ ID NO: 19253 - protein, 250 aa, Escherichia coli; identical to SEQ ID NO: 3707

SEQ ID NO: 19254 - protein, 102 aa, Escherichia coli; identical to SEQ ID NO: 1824

SEQ ID NO: 19255 - protein, 236 aa, Escherichia coli; identical to SEQ ID NO: 3286

SEQ ID NO: 19256 - protein, 231 aa, Escherichia coli; identical to SEQ ID NO: 3055

SEQ ID NO: 19257 - protein, 678 aa, Escherichia coli; identical to SEQ ID NO: 3014

SEQ ID NO: 19258 - protein, 204 aa, Escherichia coli; identical to SEQ ID NO: 2957

SEQ ID NO: 19259 - protein, 170 aa, Escherichia coli [sequence omitted]

SEQ ID NO: 19260 - protein, 334 aa, Escherichia coli; identical to SEQ ID NO: 2742

SEQ ID NO: 19261 - protein, 828 aa, Escherichia coli; identical to SEQ ID NO: 5894

SEQ ID NO: 19262 - protein, 363 aa, Escherichia coli; identical to SEQ ID NO: 3347

SEQ ID NO: 19263 - protein, 430 aa, Escherichia coli; identical to SEQ ID NO: 2617

SEQ ID NO: 19264 - protein, 243 aa, Escherichia coli; identical to SEQ ID NO: 2910

SEQ ID NO: 19265 - protein, 200 aa, Escherichia coli; identical to SEQ ID NO: 1784

SEQ ID NO: 19266 - protein, 366 aa, Escherichia coli
MQNWIKAAVIAVSLALPGVALAQSLESLVNVQGVRENQLVGYSLVVGLDGTGDKNQVKFTNQTITNMLRQFGVQLPNKIDPKVKNVAAVAVSATLPPMYSRGQTIDVTVSSIGDAKSIRGGTLLLTQLHGADGEVYALAQGSVVVGGMNATGASGSSVTVNTPTAGLIPNGATVEREIPSDFQMGDTITLNLKRPSFKDANNIAAAINASFGGIATAQSSTNVTVRAPTSPGARVAFMSQLDDVQVQAEKIRARVVFNSRTGTVVMGDGVALHAAAVSHGSLTVSINETSNVSQPNAFAGGRTAVTPQSNIAVNHARPGVVSLPESSSLKTLVNALNSLGATPDDIMSILQALHEAGALDADLEVI

SEQ ID NO: 19267 - protein, 774 aa, Escherichia coli; identical to SEQ ID NO: 3122

SEQ ID NO: 19268 - protein, 89 aa, Escherichia coli; identical to SEQ ID NO: 2833

SEQ ID NO: 19269 - protein, 121 aa, Escherichia coli
MDAVLSVQGASAPVKKKSFFSKFTRLNMLRLARAVIPAAVLMMFFPQLAMAASSSGQDLMASGNNTVKATFGKDSSVVKWVVLAEVLVGAVMYMMTKNVKFLAGFAIISVFIAVGMAVVGL

SEQ ID NO: 19270 - protein, 246 aa, Escherichia coli; identical to SEQ ID NO: 3021

SEQ ID NO: 19271 - protein, 231 aa, Escherichia coli; identical to SEQ ID NO: 2794

SEQ ID NO: 19272 - protein, 236 aa, Escherichia coli; identical to SEQ ID NO: 3438

SEQ ID NO: 19273 - protein, 505 aa, Escherichia coli; identical to SEQ ID NO: 17747

SEQ ID NO: 19274 - protein, 614 aa, Escherichia coli; identical to SEQ ID NO: 3301

SEQ ID NO: 19275 - protein, 998 aa, Escherichia coli; identical to SEQ ID NO: 2953

SEQ ID NO: 19276 - protein, 362 aa, Escherichia coli; identical to SEQ ID NO: 2434

SEQ ID NO: 19277 - protein, 362 aa, Escherichia coli; identical to SEQ ID NO: 2434

SEQ ID NO: 19278 - protein, 213 aa, Escherichia coli; identical to SEQ ID NO: 2232

SEQ ID NO: 19279 - protein, 760 aa, Escherichia coli; identical to SEQ ID NO: 2080

SEQ ID NO: 19280 - protein, 227 aa, Escherichia coli; identical to SEQ ID NO: 17715

SEQ ID NO: 19281 - protein, 208 aa, Escherichia coli; identical to SEQ ID NO: 1949

SEQ ID NO: 19282 - protein, 243 aa, Escherichia coli; identical to SEQ ID NO: 14534

SEQ ID NO: 19283 - protein, 412 aa, Escherichia coli; identical to SEQ ID NO: 4058

SEQ ID NO: 19284 - protein, 729 aa, Escherichia coli; identical to SEQ ID NO: 2074

SEQ ID NO: 19285 - protein, 731 aa, Escherichia coli; identical to SEQ ID NO: 15157

SEQ ID NO: 19286 - protein, 241 aa, Escherichia coli; identical to SEQ ID NO: 2906

SEQ ID NO: 19287 - protein, 663 aa, Escherichia coli; identical to SEQ ID NO: 1910

SEQ ID NO: 19288 - protein, 331 aa, Escherichia coli; identical to SEQ ID NO: 2856

SEQ ID NO: 19289 - protein, 747 aa, Escherichia coli; identical to SEQ ID NO: 14675

SEQ ID NO: 19290 - protein, 760 aa, Escherichia coli; identical to SEQ ID NO: 17697

SEQ ID NO: 19291 - protein, 724 aa, Escherichia coli
MYFVLMRDEMLYNIPCRIYILSTLSLCISGIVSTATATSSETKISNEETLVVTTNRSASNLWESPATIQVIDQQTLQNSTNASIADNLQDIPGVEITDNSLAGRKQIRIRGEASSRVLILIDGQEVTYQRAGDNYGVGLLIDESALERVEVVKGPYSVLYGSQAIGGIVNFITKKGGDKLASGVVKAVYNSATAGWEESIAVQGSIGGFDYRINGSYSDQGNRDTPDGRLPNTNYRNNSQGVWLGYNSGNHRFGLSLDRYRLATQTYYEDPDGSYEAFSVKIPKLEREKVGVFYDTDVDGDYLKKIHFDAYEQTIQRQFANEVKTTQPVPSPMIQALTVHNKTDTHDKQYTQAVTLQSHFSLPANNELVTGAQYKQDRVSQRSGGMTSSKSLTGFINKETRTRSYYESEQSTVSLFAQNDWRFADHWTWTMGVRQYWLSSKLTRGDGVSYTAGIISDTSLARESASDHEMVTSTSLRYSGFDNLELRAAFAQGYVFPTLSQLFMQTSAGGSVTYGNPDLKAEHSNNFELGARYNGNQWLIDSAVYYSEAKDYIASLICDGSIVCNGNTNSSRSSYYYYDNIDRAKTWGLEISAEYNGWVFSPYISGNLIRRQYETSTLKTTNTGEPAINGRIGLKHTLVMGQANIISDVFIRAASSAKDDSNGTETNVPGWATLNFAVNTEFGNEDQYRINLALNNLTDKRYRTAHETIPAAGFNAAIGFVWNF

SEQ ID NO: 19292 - protein, 241 aa, Escherichia coli; identical to SEQ ID NO: 2922

SEQ ID NO: 19293 - protein, 746 aa, Escherichia coli; identical to SEQ ID NO: 17632

SEQ ID NO: 19294 - protein, 191 aa, Escherichia coli; identical to SEQ ID NO: 2727

SEQ ID NO: 19295 - protein, 208 aa, Escherichia coli; identical to SEQ ID NO: 1949

SEQ ID NO: 19296 - protein, 478 aa, Escherichia coli; identical to SEQ ID NO: 15182

SEQ ID NO: 19297 - protein, 193 aa, Escherichia coli; identical to SEQ ID NO: 2246

SEQ ID NO: 19298 - protein, 118 aa, Escherichia coli [sequence omitted]

SEQ ID NO: 19299 - protein, 472 aa, Escherichia coli; identical to SEQ ID NO: 7769

SEQ ID NO: 19300 - protein, 224 aa, Escherichia coli; identical to SEQ ID NO: 3115

SEQ ID NO: 19301 - protein, 673 aa, Escherichia coli; identical to SEQ ID NO: 17724

SEQ ID NO: 19302 - protein, 332 aa, Escherichia coli; identical to SEQ ID NO: 2703

SEQ ID NO: 19303 - protein, 249 aa, Escherichia coli; identical to SEQ ID NO: 17635

SEQ ID NO: 19304 - protein, 249 aa, Escherichia coli; identical to SEQ ID NO: 3492

SEQ ID NO: 19305 - protein, 551 aa, Escherichia coli; identical to SEQ ID NO: 2446

SEQ ID NO: 19306 - protein, 351 aa, Escherichia coli; identical to SEQ ID NO: 2519

SEQ ID NO: 19307 - protein, 364 aa, Escherichia coli; identical to SEQ ID NO: 2848

SEQ ID NO: 19308 - protein, 244 aa, Escherichia coli; identical to SEQ ID NO: 4064

SEQ ID NO: 19309 - protein, 774 aa, Escherichia coli; identical to SEQ ID NO: 3978

SEQ ID NO: 19310 - protein, 784 aa, Escherichia coli; identical to SEQ ID NO: 2244

SEQ ID NO: 19311 - protein, 760 aa, Escherichia coli; identical to SEQ ID NO: 3026

SEQ ID NO: 19312 - protein, 351 aa, Escherichia coli; identical to SEQ ID NO: 3691

SEQ ID NO: 19313 - protein, 614 aa, Escherichia coli; identical to SEQ ID NO: 1888

SEQ ID NO: 19314 - protein, 360 aa, Escherichia coli; identical to SEQ ID NO: 3694

SEQ ID NO: 19315 - protein, 243 aa, Escherichia coli; identical to SEQ ID NO: 12586

SEQ ID NO: 19316 - protein, 511 aa, Escherichia coli; identical to SEQ ID NO: 2457

SEQ ID NO: 19317 - protein, 700 aa, Escherichia coli; identical to SEQ ID NO: 15542

SEQ ID NO: 19318 - protein, 565 aa, Escherichia coli; identical to SEQ ID NO: 2678

SEQ ID NO: 19319 - protein, 700 aa, Escherichia coli; identical to SEQ ID NO: 2784

SEQ ID NO: 19320 - protein, 162 aa, Escherichia coli; identical to SEQ ID NO: 1965

SEQ ID NO: 19321 - protein, 250 aa, Escherichia coli; identical to SEQ ID NO: 17735

SEQ ID NO: 19322 - protein, 733 aa, Escherichia coli; identical to SEQ ID NO: 2881

SEQ ID NO: 19323 - protein, 233 aa, Escherichia coli; identical to SEQ ID NO: 4744

SEQ ID NO: 19324 - protein, 729 aa, Escherichia coli; identical to SEQ ID NO: 3720

SEQ ID NO: 19325 - protein, 213 aa, Escherichia coli; identical to SEQ ID NO: 2232

SEQ ID NO: 19326 - protein, 784 aa, Escherichia coli; identical to SEQ ID NO: 2244

SEQ ID NO: 19327 - protein, 746 aa, Escherichia coli; identical to SEQ ID NO: 3695

SEQ ID NO: 19328 - protein, 246 aa, Escherichia coli; identical to SEQ ID NO: 17725

SEQ ID NO: 19329 - protein, 614 aa, Escherichia coli; identical to SEQ ID NO: 17736

SEQ ID NO: 19330 - protein, 359 aa, Escherichia coli; identical to SEQ ID NO: 2329

SEQ ID NO: 19331 - protein, 228 aa, Escherichia coli; identical to SEQ ID NO: 3034

SEQ ID NO: 19332 - protein, 242 aa, Escherichia coli; identical to SEQ ID NO: 2697

SEQ ID NO: 19333 - protein, 224 aa, Escherichia coli; identical to SEQ ID NO: 4745

SEQ ID NO: 19334 - protein, 203 aa, Escherichia coli; identical to SEQ ID NO: 2009

SEQ ID NO: 19335 - protein, 367 aa, Escherichia coli; identical to SEQ ID NO: 2433

SEQ ID NO: 19336 - protein, 432 aa, Escherichia coli; identical to SEQ ID NO: 2026

SEQ ID NO: 19337 - protein, 663 aa, Escherichia coli; identical to SEQ ID NO: 1910

SEQ ID NO: 19338 - protein, 747 aa, Escherichia coli
  MOD_RES (254)..(254): Any amino acid
MARSKTAQPKHSLRKIAVVVATAVSGMSVYAQAAVEPKEDTITVTAAPAPQESAWGPAATIAARQSATGTKTDTPIQKVPQSISVVTAEEMALHQPKSVKEALSYTPGVSVGTRGASNTYDHLIIRGFAAEGQSQNNYLNGLKLQGNFYNDAVIDPYMLERAEIMRGPVSVLYGKSSPGGLLNMVSKRPTTEPLKEVQFKAGTDSLFQTGFDFSDSLDDDGVYSYRLTGLARSANAQQKGSEEQRYAIAPAFTXRPDDKTNFTFLSYFQNEPETGYYGWLPKEGTVEPLPNGKRLPTDFNEGAKNNTYSRNEKMVGYSFDHEFNDTFTVRQNLRFAENKTSQNSVYGYGVCSDPANAYSKQCAALAPADKGHYLARKYVVDDEKLQNFSVDTQLQSKFATGDIDHTLLTGVDFMRMRNDINAWFGYDDSVPLLNLYNPVNTDFDFNAKDPANSGPYRILNKQKQTGVYVQDQAQWDKVLVTLGGRYDWADQESLNRVAGTTDKRDDKQFTWRGGVNYLFDNGVTPYFSYSESFEPSSQVGKDGNIFAPSKGKQYEVGVKYVPEDRPIVVTGAVYNLTKTNNLMADPEGSFFSVEGGEIRARGVEIEAKAALSASVNVVGSYTYTDAEYTTDTTYKGNTPAQVPKHMASLWADYTFFDGPLSGLTLGTGGRYTGSSYGDPANSFKVGSYTVVDALVRYDLARVGMAGSNVALHVNNLFDREYVASCFNTYGCFWGAERQVVATATFRF

SEQ ID NO: 19339 - protein, 233 aa, Escherichia coli; identical to SEQ ID NO: 3276

SEQ ID NO: 19340 - protein, 678 aa, Escherichia coli; identical to SEQ ID NO: 2231

SEQ ID NO: 19341 - protein, 230 aa, Escherichia coli; identical to SEQ ID NO: 2580

SEQ ID NO: 19342 - protein, 191 aa, Escherichia coli; identical to SEQ ID NO: 2727

SEQ ID NO: 19343 - protein, 236 aa, Escherichia coli; identical to SEQ ID NO: 17746

SEQ ID NO: 19344 - protein, 122 aa, Escherichia coli; identical to SEQ ID NO: 2915

SEQ ID NO: 19345 - protein, 696 aa, Escherichia coli; identical to SEQ ID NO: 4038

SEQ ID NO: 19346 - protein, 512 aa, Escherichia coli; identical to SEQ ID NO: 2974

SEQ ID NO: 19347 - protein, 412 aa, Escherichia coli; identical to SEQ ID NO: 15148

SEQ ID NO: 19348 - protein, 673 aa, Escherichia coli; identical to SEQ ID NO: 3719

SEQ ID NO: 19349 - protein, 230 aa, Escherichia coli; identical to SEQ ID NO: 3723

SEQ ID NO: 19350 - protein, 232 aa, Escherichia coli; identical to SEQ ID NO: 2087

SEQ ID NO: 19351 - protein, 844 aa, Escherichia coli; identical to SEQ ID NO: 14455

SEQ ID NO: 19352 - protein, 840 aa, Escherichia coli; identical to SEQ ID NO: 4545

SEQ ID NO: 19353 - protein, 266 aa, Escherichia coli; identical to SEQ ID NO: 3745

SEQ ID NO: 19354 - protein, 882 aa, Escherichia coli
MPNHSNFRLRGIACYIALAISGGSVNAWADDSIQFDPRFLELKGDTKIDLGKFSKKGYVDAGKYNLRVFINKQPLSDEYDINWYVSENDPTKNYACLTPELVAALGLKEGIAKSLQWTHNDECLKPGQLDGMEVENDLSQSALLLTVPQAYLEYTSSDWDPPSRWDDGIPGLIADYSLNAQTRHQEQGGEDSHDISGNGTVGANLGAWRFRADWQSDYQHTRSNDDDDDSSNSTTSKNWDWSRYYAWRALPSLKAKLSLGEDYLNSDIFDGFNYIGSSVSTDDQMLPPNLRGYAPDVSGVAHSSAKVTISQMGRVLYETQVPAGPFRIQDIGDSVSGTLHVRVEEQNGQVQEYDVTTASMPFLTRQGQVRYKVMMGRPEDWNHKTEGGFFSGGEASWGVADGWSLYGGALADKHYQSAAMGVGRDLAQFGALAFDVTHSHVNLDHDSAYGKGKLDGNSFRVSYAKDFDELNSRVTFAGYRFSEKNFMTMSEYLDANQSDMARTGNDKEMYTITYNQNFAAAGVSIYLNYSHRTYWDRPEQTNYNLMFSHYFNMGSIRNMSISVTGYRYEYDDNADKGMYLSMSIPWSDSSTVTYNGSYGSGSDSSQVGYFKRVDDATHYQVNVGTSEQHGSVDGYLSHDGSLAKVDLSANYHEGEYRSAGIALQGGATLTAHGGALHRTQNMGGTRLLIDADGIANVPVESNGAPVYTNMFGKAVVADINNYYRNQAYIDLNNLPEDAEATQSVVQATLTEGAIGYRKFKVISGQKAMAVLRLRDGSYPPFGAEVKNDEQQQVGIVDDEGNVYLAGVNAGEHMMVFWEGSAQCEIVLPKPLPADLFSGLLLPCEQKGTAAPDSSAPEIKPVIQDQTRQVTPTEAPTSISATQ

SEQ ID NO: 19355 - protein, 368 aa, Escherichia coli; identical to SEQ ID NO: 2372

SEQ ID NO: 19356 - protein, 900 aa, Escherichia coli; identical to SEQ ID NO: 4548

SEQ ID NO: 19357 - protein, 161 aa, Escherichia coli; identical to SEQ ID NO: 2582

SEQ ID NO: 19358 - protein, 876 aa, Escherichia coli; identical to SEQ ID NO: 18435

SEQ ID NO: 19359 - protein, 826 aa, Escherichia coli; identical to SEQ ID NO: 3791

SEQ ID NO: 19360 - protein, 883 aa, Escherichia coli
MTAFRAAFKAYRMHQVLILPRFARLTFALGLATAVFPVDAEYYFNPRFLSNDLAESVDLSAFTKGREAPPGTYRVDIYLNDEFMASRDITFIADDNNADLIPCLSTDLLVSLGIKKSALLDNKEHSADKHVPDNSACTPLQDRLADASSEFDVGQQHLSLSVPQIYVGRMAHGYVSPDLWEEGINAGLLNYSFNGNSINNRSNHNAGKSNYAYLNLQSGINIGSWRLRDNSTWSYNSGSSNSSDSNKWQHINTSAERDIIPLRSRLTVGDSYTDGDIFDSVNFRGLKINSTEAMLPDSQHGFAPVIHGIARGTAQVSVKQNGYDVYQTTVPPGPFTIDDINSAANGGNLQVTIKEADGSIQTLYVPYSSVPVLQRAGYTRYALAMGEYRSGNNLQSTPKFVQASLMHGLKGNWTPYGGMQIAEDYQAFNLGIGKDLGLFGAFSFDITQANTTLADDTRHSGQSVKFVYSKSFYQTGTNIQVAGYRYSTQGFYNLSDSAYSRMSGYTVKPPTGDTSEQTLFIDYFNLFYSKRGQEQISISQQLGNYGTTFFSASRQSYWNTSRSDQQISFGLNVPFGDITTSLNYSYSNNIWQNDRDHLLAFTLNVPFSHWMRTDSQSAFHNSNASYSMSNDLKGGMTNLSGVYGTLLPDNNLNYSVQVGNTQGGNTSSGTSGYSSLNYRGAYGNTNVGYSRSGDSSQIYYGMSGGIIAHADGITFGQPLGDTMVLVKAPGADNVKIENQTGIHTDWRGYAILPFATEYRENRVALNANSLADNVELDETVVTVIPTHGAIARATFNAQIGGKVLMTLKYGNKSVPFGAIVTHGENKNGSIVAENGQVYLTGLPQSGKLQVSWGKDKNSNCIVDYKLPVVSPGTLLNQQTAICR

SEQ ID NO: 19361 - protein, 862 aa, Escherichia coli; identical to SEQ ID NO: 7218

SEQ ID NO: 19362 - protein, 836 aa, Escherichia coli
MKDRIPFAVNNITCVILLSLFCNAASAVEFNTDVLDAADKKNIDFTRFSEAGYVLPGQYLLDVIVNGQSISPASLQISFVEPALSGDKAEKKLPQACLTSDMVRLMGLTAESLDKVVYWHDGQCADFHGLPGVDIRPDTGAGVLRINMPQAWLEYSDATWLPPSRWDDGIPGLMLDYNLNGTVSRNYQGGDSHQFSYNGTVGGNLGPWRLRADYQGSQEQSRYNGEKTTNRNFTWSRFYLFRAIPRWRANLTLGENNINSDIFRSWSYTGASLESDDRMLPPRLRGYAPQITGIAETNARVVVSQQGRVLYDSMVPAGPFSIQDLDSSVRGRLDVEVIEQNGRKKTFQVDTASVPYLTRPGQVRYKLVSGRSRGYGHETEGPVFATGEASWGLSNQWSLYGGAVLAGDYNALAAGAGWDLGMPGTLSADITQSVARIEGERTFQGKSWRLSYSKRFDNADADITFAGYRFSERNYMTMEQYLNARYRNDYSSREKEMYTVTLNKNVADWNTSFNLQYSRQTYWDIRKTDYYTVSVNRYFNVFGLQGVAVGLSASRSKYLGRDNDSAYLRISVPLGTGTASYSGSMSNDRYVNMAGYTDTFNDGLDSYSLNAGLNSGGGLTSQRQINAYYSHRSPLANLSANIASLQKGYTSFGVSASGGATITGKGAALHAGGMSGGTRLLVDTDGVGGVPVDGGQVVTNRWGTGVVTDISSYYRNTTSVDLKRLPDDVEATRSVVESALTEGAIGYRKFSVLKGKRLFAILRLADGSQPPFGASVTSEKGRELGMVADEGLAWLSGVTPGETLSVNWDGKIQCQVNVPETAISDQQLLLPCTPQK

SEQ ID NO: 19363 - protein, 878 aa, Escherichia coli
MSYLNLRLYQRNTQCLHIRKHRLAGFFVRLFVACAFAAQAPLSSAELYFNPRFLADDPQAVADLSRFENGQELPPGTYRVDIYLNNGYMATRDVTFNTGDSEQGIVPCLTRAQLASMGLNTASVSGMNLLADDACVPLTSMIHDATAQLDVGQQRLNLTIPQAFMSNRARGYIPPELWDPGINAGLLNYNFSGNSVQNRIGGNSHYAYLNLQSGLNIGAWRLRDNTTWSYNSSDSSSGSKNKWQHINTWLERDIIPLRSRLTLGDGYTQGDIFDGINFRGAQLASDDNMLPDSQRGFAPVIHGIARGTAQVTIKQNGYDIYNSTVPPGPFTINDIYAAGNSGDLQVTIKEADGSTQIFTVPYSSVPLLQREGHTRYSITAGEYRSGNAQQEKPRFFQSTLLHGLPAGWTIYGGTQLADRYRAFNFGIGKNMGALGALSVDMTQANSTLPDDSQHDGQSVRFLYNKSLNESGTNIQLVGYRYSTSGYFNFADTTYSRMNGYNIETQDGVIQVKPKFTDYYNLAYNKRGKLQLTVTQQLGRTSTLYLSGSHQTYWGTSNVDEQFQAGLNTAFEDINWTLSYSLTKNAWQKGRDQMLALNVNIPFSHWLRSDSKSQWRHASASYSMSHDLNGRMTNLAGVYGTLLEDNNLSYSVQTGYAGGGDGNSGSTGYATLNYRGGYGNANIGYSHSDDIKQLYYGVSGGVLAHANGVTLGQPLNDTVVLVKAPGAKDAKVENQTGVRTDWRGYAVLPYATEYRENRVALDTNTLADNVDLDNAVANVVPTRGAIVRAEFKARVGIKLLMTLTHNNKPLPFGAMVTSESSQSSGIVADNGQVYLSGMPLAGKVQVKWGEEENAHCVANYQLPPESQQQLLTQLSAECR

SEQ ID NO: 19364 - protein, 207 aa, Escherichia coli; identical to SEQ ID NO: 2213

SEQ ID NO: 19365 - protein, 360 aa, Escherichia coli; identical to SEQ ID NO: 3862

SEQ ID NO: 19366 - protein, 331 aa, Escherichia coli; identical to SEQ ID NO: 4559

SEQ ID NO: 19367 - protein, 713 aa, Escherichia coli; identical to SEQ ID NO: 4590

SEQ ID NO: 19368 - protein, 430 aa, Escherichia coli; identical to SEQ ID NO: 2617

SEQ ID NO: 19369 - protein, 614 aa, Escherichia coli; identical to SEQ ID NO: 1885

SEQ ID NO: 19370 - protein, 203 aa, Escherichia coli; identical to SEQ ID NO: 2201

SEQ ID NO: 19371 - protein, 351 aa, Escherichia coli; identical to SEQ ID NO: 9084

SEQ ID NO: 19372 - protein, 208 aa, Escherichia coli; identical to SEQ ID NO: 1948

SEQ ID NO: 19373 - protein, 678 aa, Escherichia coli; identical to SEQ ID NO: 2230

SEQ ID NO: 19374 - protein, 421 aa, Escherichia coli
  MOD_RES (402)..(402): Any amino acid
MRSVIVAFLFACSFCVSAETVNLNNSSVRSFVQWYSSKTGKPVIVNPDIKGNVTVFNADVNPTNIDDFFKSVLNANGFVMLSGNPAVVSLPSKLPSQMVSDSDDSDNQSYDTFPSEPSYQPVPVALTVRNFKLTKVRSSDVQQLIKIYLDSNGGGNVVDYPGNNSLIVSAPDELLPVLSDFINSVDVARDQVLIQSLMFETSLSDGVDLSFAAGSASGHKVAGGFNTSALGSALSTAGGSFGIFDGNVLALSLRAVQSNSRSKVISTPRILTQSGQTGYISVGKNVPFITGKVTGESAGVNNPFQTIERHDVGVSLKVTPVVMGNGQLVLTIDTRADSISNDDQASDIITNQRQIQTTVQIKDGQTLLLGGLIDSSFSNAERSVPVISKIPLIGWIFSSKAXSNEQRIMYILLTAHIIRPL

SEQ ID NO: 19375 - protein, 200 aa, Escherichia coli; identical to SEQ ID NO: 1785

SEQ ID NO: 19376 - protein, 334 aa, Escherichia coli; identical to SEQ ID NO: 2741

SEQ ID NO: 19377 - protein, 274 aa, Escherichia coli; identical to SEQ ID NO: 2301

SEQ ID NO: 19378 - protein, 162 aa, Escherichia coli; identical to SEQ ID NO: 1984

SEQ ID NO: 19379 - protein, 213 aa, Escherichia coli; identical to SEQ ID NO: 2232

SEQ ID NO: 19380 - protein, 729 aa, Escherichia coli; identical to SEQ ID NO: 4557

SEQ ID NO: 19381 - protein, 539 aa, Escherichia coli; identical to SEQ ID NO: 3845

SEQ ID NO: 19382 - protein, 386 aa, Escherichia coli; identical to SEQ ID NO: 3810

SEQ ID NO: 19383 - protein, 746 aa, Escherichia coli; identical to SEQ ID NO: 4597

SEQ ID NO: 19384 - protein, 753 aa, Escherichia coli; identical to SEQ ID NO: 6655

SEQ ID NO: 19385 - protein, 565 aa, Escherichia coli; identical to SEQ ID NO: 2664

SEQ ID NO: 19386 - protein, 119 aa, Escherichia coli; identical to SEQ ID NO: 5512

SEQ ID NO: 19387 - protein, 363 aa, Escherichia coli; identical to SEQ ID NO: 3839

SEQ ID NO: 19388 - protein, 663 aa, Escherichia coli; identical to SEQ ID NO: 9256

SEQ ID NO: 19389 - protein, 359 aa, Escherichia coli; identical to SEQ ID NO: 2329

SEQ ID NO: 19390 - protein, 700 aa, Escherichia coli; identical to SEQ ID NO: 4566

SEQ ID NO: 19391 - protein, 828 aa, Escherichia coli; identical to SEQ ID NO: 2379

SEQ ID NO: 19392 - protein, 230 aa, Escherichia coli
MIGGTRFAYPENQSSISVELKNTSDRDMLVKVAVSPDDARQLTGTVESLPSYSETVFIATPPLFVLKPDKNTKIRINRVGGSLSADRESLFILNVAALPTLENSHSVKTDNQLQIAVRNRMKIFYRPSNLSEDPNMSYQKLRWARKNEIVTVYNPGPRYVTLYNLHVDGKVIDGGMVAPFSHRQQSWCKSQGVCEIAWQTLDVYNNVLPAWKVKMNLLQMDVSGLQVKTD

SEQ ID NO: 19393 - protein, 366 aa, Escherichia coli; identical to SEQ ID NO: 2118

SEQ ID NO: 19394 - protein, 191 aa, Escherichia coli; identical to SEQ ID NO: 2727

SEQ ID NO: 19395 - protein, 725 aa, Escherichia coli; identical to SEQ ID NO: 2986

SEQ ID NO: 19396 - protein, 660 aa, Escherichia coli; identical to SEQ ID NO: 7233

SEQ ID NO: 19397 - protein, 517 aa, Escherichia coli; identical to SEQ ID NO: 2462

SEQ ID NO: 19398 - protein, 250 aa, Escherichia coli; identical to SEQ ID NO: 3855

SEQ ID NO: 19399 - protein, 134 aa, Escherichia coli
MFWIFQQSPGQKKDSDNSEQRNNNYLQLAIRSRIKFFFRPAHLKLTPNDAYLKVTWHQEEGRIKAVNPTPYYITYNKIAVDQNKHLTPVEHGGMIPPFSSTVFALKGRTAPASKVSWVIVNDYGGYQQGESVLE

SEQ ID NO: 19400 - protein, 784 aa, Escherichia coli; identical to SEQ ID NO: 2241

SEQ ID NO: 19401 - protein, 224 aa, Escherichia coli; identical to SEQ ID NO: 3792

SEQ ID NO: 19402 - protein, 686 aa, Escherichia coli; identical to SEQ ID NO: 3806

SEQ ID NO: 19403 - protein, 656 aa, Escherichia coli; identical to SEQ ID NO: 4560

SEQ ID NO: 19404 - protein, 170 aa, Escherichia coli; identical to SEQ ID NO: 2565

SEQ ID NO: 19405 - protein, 760 aa, Escherichia coli; identical to SEQ ID NO: 2081

SEQ ID NO: 19406 - protein, 1024 aa, Escherichia coli; identical to SEQ ID NO: 10694

SEQ ID NO: 19407 - protein, 193 aa, Escherichia coli; identical to SEQ ID NO: 2246

SEQ ID NO: 19408 - protein, 138 aa, Escherichia coli
MFLGKTNLPTDRETLYWMNVKAIPPTDEKNTQKNTLQLALQNKIKLFYRPENLPVQPGKARNMLRFKYEGKQLKVINPSPYYLTLTGIKVQGSKLPNMFVPPKSDITVSSPVTLAGEITYQTINDFGATTERQKGIMQ

SEQ ID NO: 19409 - protein, 232 aa, Escherichia coli; identical to SEQ ID NO: 2087

SEQ ID NO: 19410 - protein, 222 aa, Escherichia coli; identical to SEQ ID NO: 4595

SEQ ID NO: 19411 - protein, 241 aa, Escherichia coli; identical to SEQ ID NO: 2075

SEQ ID NO: 19412 - protein, 518 aa, Escherichia coli; identical to SEQ ID NO: 2350

SEQ ID NO: 19413 - protein, 715 aa, Escherichia coli; identical to SEQ ID NO: 5610

SEQ ID NO: 19414 - protein, 656 aa, Escherichia coli
MYMNVIRTVICTLIILPVGLQAATSHSSMVKDTITIVATGNQNTVFETPSMVSVVTNDTPWSQNAVTSAGMLKGVAGLSQTGAGRTNGQTFNLRGYDKSGVLVLVDGVRQLSDMAKSSGTYLDPALVKRIEVVRGPNSSLYGSGGLGGVVDFRTADAADFLPPGETNGLSLWGNIASGDHSTGSGLTWFGKTGKTDALLSVIMRKRGNIYQSDGERAPNKEKPAALFAKGSVGITDSNKAGASLRLYRNNTTEPGNSTQTHGDSGLRDRKTVQNDVQFWYQYAPVDNSLINVKSTLYLSDITIKTNGHNKTAEWRNNRTSGVNVVNRSHTLIFPGAHQLSYGAEYYRQQQKPEGSATLYPEGNIDFTSLYFQDEMTMKSYPVNIIVGSRYDRYKSFNPRAGELKAERLSPRAAISVSPTDWLMMYGSISSAFRAPTMAEMYRDDVHFYRKGKPNYWVPNLNLKPENNITREIGAGIQLDGLLTDNDRLQLKGGYFGTDARNYIATRVDMKRMRSYSYNVSRARIWGWDMQGNYQSDYVDWMLSYNRTESMDASSREWLGSGNPDTLISDISIPFGHRGVYAGWRAELSASATHVKKGDPHQAGYTIHSFSLSYKPVSVKGFEASVTLDNAFNKLAMNGKGVPLSGRTVSLYTRYQW

SEQ ID NO: 19415 - protein, 721 aa, Escherichia coli; identical to SEQ ID NO: 9824

SEQ ID NO: 19416 - protein, 654 aa, Escherichia coli; identical to SEQ ID NO: 3854

SEQ ID NO: 19417 - protein, 118 aa, Escherichia coli [sequence omitted]

SEQ ID NO: 19418 - protein, 237 aa, Escherichia coli; identical to SEQ ID NO: 3793

SEQ ID NO: 19419 - protein, 239 aa, Escherichia coli; identical to SEQ ID NO: 14867

SEQ ID NO: 19420 - protein, 111 aa, Escherichia coli; identical to SEQ ID NO: 3419

SEQ ID NO: 19421 - protein, 203 aa, Escherichia coli; identical to SEQ ID NO: 2008

SEQ ID NO: 19422 - protein, 380 aa, Escherichia coli; identical to SEQ ID NO: 7247

SEQ ID NO: 19423 - protein, 656 aa, Escherichia coli; identical to SEQ ID NO: 6715

SEQ ID NO: 19424 - protein, 747 aa, Escherichia coli; identical to SEQ ID NO: 3857

SEQ ID NO: 19425 - protein, 445 aa, Escherichia coli; identical to SEQ ID NO: 9353

SEQ ID NO: 19426 - protein, 362 aa, Escherichia coli; identical to SEQ ID NO: 4554

SEQ ID NO: 19427 - protein, 249 aa, Escherichia coli; identical to SEQ ID NO: 4602

SEQ ID NO: 19428 - protein, 478 aa, Escherichia coli; identical to SEQ ID NO: 2405

SEQ ID NO: 19429 - protein, 246 aa, Escherichia coli; identical to SEQ ID NO: 3838

SEQ ID NO: 19430 - protein, 231 aa, Escherichia coli; identical to SEQ ID NO: 18534

SEQ ID NO: 19431 - protein, 432 aa, Escherichia coli; identical to SEQ ID NO: 2026

SEQ ID NO: 19432 - protein, 244 aa, Escherichia coli; identical to SEQ ID NO: 2964

SEQ ID NO: 19433 - protein, 673 aa, Escherichia coli
MKMTRLYPLALGGLLLPAIANAQTSQQDESTLVVTASKQSSRSASANNVSSTVVSAPELSDAGVTASDKLPRVLPGLNIENSGNMLFSTISLRGVSSAQDFYNPAVTLYVDGVPQLSTNTIQALTDVQSVELLRGPQGTLYGKSAQGGIINIVTQQPDSTPRGYIEGGVSSRDSYRSKFNLSGPIQDGLLYGSVTLLRQVDDGDMINPATGSDDLGGTRASIGNVKLRLAPDDQPWEMGFAASRECTRATQDAYVGWNDIKGRKLSISDGSPDPYMRRCTDSQTLSGKYTTDDWVFNLISAWQQQHYSRTFPSGSLIVNMSQRWNQDVQELRAATLGDARTVDMVFGLYRQNTREKLNSAYDMPTMPYLSSTGYTTAETLAAYSDLTWHLTDRFDIGGGVRFSHDKSSTQYHGSMLGNPFGDQGKSNDDQVLGQLSAGYMLTDDWRVYTRVAQGYKPSGYNIVPTAGLDAKPFVAEKSINYELGTRYETADVTLQAATFYTHTKDMQLYSGPVGMQTLSNAGKADATGVELEAKWRFAPGWSWDINGNVIRSEFTNDSELYHGNRVPFVPRYGAGSSVNGVIDTRYGALMPRLAVNLVGPHYFDGDNQLRQGTYATLDSSLGWQATERMNISVYVDNLFDRRYRTYGYMNGSSAVAQVNMGRTVGINTRIDFF

SEQ ID NO: 19434 - protein, 878 aa, Escherichia coli; identical to SEQ ID NO: 12145

SEQ ID NO: 19435 - protein, 892 aa, Escherichia coli
MCLAADFIFSLSVGADMFFGDGGQLLSDKSLTGSAGGGNNRMKFNILPLAFFIGIIVSPARAELYFNPRFLSDDPDAVADLSAFTQGQELPPGVYRVDIYLNDTYISTRDVQFQMSQDGKQLAPCLSPEHMSAMGVNRYAVPGMERLPADTCTSLNSMIQGATFRFDVGQQRLYLTVPQLYMSNQARGYIAPEYWDNGITAALLNYDFSGNRVRDSYGGTSDYAYLNLKTGLNIGSWRLRDNTSWSYSAGKGYSQNNWQHINTWLERDIVSLRSRLTMGDSYTRGDIFDGVNFRGIQLASDDNMVPDSQRGYAPTIHGISRGTSRISIRQNGYEIYQSTLPPGPFEINDIYPAGSGGDLQVTLQEADGSVQRFNVPWSSVPVLQREGHLKYALSAGEFRSGGHQQDNPRFAEGTLKYGLPAGWTVYGGAWIAERYRAFNLGVGKNMGWLGAVSLDATRANARLPDESRHDGQSYRFLYNKSLTETGTNIQLIGYRYSTRGYFSFADTAWKKMSGYSVLTQDGVIQIQPKYTDYYNLAYNKRGRVQVSISQQTGESSTLYLSGSHQSYWGTDRTDRQLNAGFNSSVNDISWSLNYSLSRNAWQHETDRILSFDVSIPFSHWMRSDSTSAWRNASARYSQTLEAHGQAASTAGLYGTLLGDNNLGYSIQSGYTRGGYEGSSKTGYASLNYRGGYGNASAGYSHSGGYRQLYYGLSGGILAHANGLTLSQPLGDTLILVRAPGASDTRIENQTGVSTDWRGYAVLPYATDYRENRVALDTNTLADNVDIENTVVSVVPTHGAVVRADYKTRVGVKVLMTLMRNGKAVPFGSVVTARNGGSSIAGENGQVYLSGMPLSGQVSVKWGSQTTDQCTADYKLPKESAGQILSHVTASCR

SEQ ID NO: 19436 - protein, 353 aa, Escherichia coli; identical to SEQ ID NO: 6704

SEQ ID NO: 19437 - protein, 246 aa, Escherichia coli; identical to SEQ ID NO: 3838

SEQ ID NO: 19438 - protein, 342 aa, Escherichia coli
MSAQAAEIYNKDSNKLDLYGKVNAKHYFSSNDADDGDTTYVRLGFKGETQINDQLTGFGQWEYEFKGNRAESQGSSKDKTRLAFAGLKFGDYGSIDYGRNYGVAYDIGAWTDVLPEFGGDTWTQTDVFMTGRTTGVATYRNNDFFGLVDGLNFAAQYQGKNDRTDVTEANGDGFGFSTTYEYEGFGVGATYAKSDRTNDQVIYGNNSLNASGQNAEVWAAGLKYDANNIYLATTYSETQNMTVFGNNHIANKAQNFEVVAQYQFDFGLRPSVAYLQSKGKDLGAWGDQDLVEYIDVGATYYFNKNMSTFVDYKINLIDKSDFTKASGVATDDIVAVGLVYQF

SEQ ID NO: 19439 - protein, 259 aa, Escherichia coli; identical to SEQ ID NO: 12016

SEQ ID NO: 19440 - protein, 696 aa, Escherichia coli; identical to SEQ ID NO: 4065

SEQ ID NO: 19441 - protein, 249 aa, Escherichia coli; identical to SEQ ID NO: 9840

SEQ ID NO: 19442 - protein, 380 aa, Escherichia coli
MNIYRAVTSFFNKSSKKGRTMKKLTVAISAVAASVLMAMSAQAAEIYNKDSNKLDLYGKVNAKHYFSSNDADDGDTTYARLGFKGETQINDQLTGFGQWEYEFKGNRAESQGSSKDKTRLAFAGLKFGDYGSIDYGRNYGVAYDIGAWTDVLPEFGGDTWTQTDVFMTGRTTGVATYRNNDFFGLVDGLNFAAQYQGKNDRTDVTEANGDGFGFSTTYEYEGFGVGATYAKSDRTDGQVAYGKSKFNASGKNAEVWAAGLKYDANNIYLATTYSETQNMTVFGNNHIANKAQNFEAVAQYQFDFGLRPSVAYLQSKGKDLGVHGDRDLVKYVDVGATYYFNKNMSTFVDYKINLIDDSKFTKTAGIDTDDIVAVGLVYQF

SEQ ID NO: 19443 - protein, 682 aa, Escherichia coli; identical to SEQ ID NO: 5938

SEQ ID NO: 19444 - protein, 201 aa, Escherichia coli
MTLDISNDNKQLPYLAQAWIENENQEKIIAGPVIATPPVQRLEPGAKSMVRLSTTPDISKLPQDRESLFYFNLREIPPRSEKANVLQIALQTKIKLFYRPAAIKTRPNEVWQDQLILNKVSGGYRIENPTPYYVTVIGLGGSEKQAEEGEFETVMLSPRSEQTVKSANYNTPYLSYINDYGGRPVLSFICNGSRCSVKKEK

SEQ ID NO: 19445 - protein, 654 aa, Escherichia coli; identical to SEQ ID NO: 3854

SEQ ID NO: 19446 - protein, 362 aa, Escherichia coli; identical to SEQ ID NO: 4554

SEQ ID NO: 19447 - protein, 673 aa, Escherichia coli; identical to SEQ ID NO: 2919

SEQ ID NO: 19448 - protein, 214 aa, Escherichia coli
MMTKMSRYALITALAMFLAGCVGQREPAPVEEVKPAPEQPAEPQQPVPTVPSVPTIPQQPGPIEHEDQTAPLAPHIRHYDWNGAMQPMVSKMLGADGVTAGSVLLVDSVNNRTNGSLNAAEATETLRNALANNGKFTLVSAQQLSMAKQQLGLSPQDSLGTRSKAIGIARNVGAHYVLYSSASGNVNAPTLQMQLMLVQTGEIIWSGKGAVSQQ

SEQ ID NO: 19449 - protein, 843 aa, Escherichia coli
MNLVMRGMKDRIPFAVNNITCVILLSLFCNAASAVEFNTDVLDAADKKNIDFTRFSEAGYVLPGQYLLDVIVNGQSISPASLQISFVEPQSSGDKAEKKLPQACLTSDMVRLMGLTAESLDKVVYWHDGQCADFHGLPGVDIRPDTGAGVLRINMPQAWLEYSDATWLPPSRWDDGIPGLMLDYNLNGTVSRNYQGGDSHQFSYNGTVGGNLGPWRLRADYQGSQEQSRYNGEKTTNRNFTWSRFYLFRAIPRWRANLTLGENNINSDIFRSWSYTGASLESDDRMLPPRLRGYAPQITGIAETNARVVVSQQGRVLYDSMVPAGPFSIQDLDSSVRGRLDVEVIEQNGRKKTFQVDTASVPYLTRPGQVRYKLVSGRSRGYGHETEGPVFATGEASWGLSNQWSLYGGAVLAGDYNALAAGAGWDLGVPGTLSADITQSVARIEGERTFQGKSWRLSYSKRFDNADADITFAGYRFSERNYMTMEQYLNARYRNDYSSREKEMYTVTLNKNVADWNTSFNLQYSRQTYWDIRKTDYYTVSVNRYFNVFGLQGVAVGLSASRSKYLGRDNDSAYLRISVPLGTGTASYSGSMSNDRYVNMAGYTDMFNDGLDSYSLNAGLNSGGGLTSQRQINAYYSHRSPLANLSANIASLQKGYTSFGVSASGGATITGKGAALHAGGMSGGTRLLVDTDGVGGVPVDGGQVVTNRWGTGVVTDISSYYRNTTSVDLKRLPDDVEATRSVVESALTEGAIGYRKFSVLKGKRLFAILRLADGSQPPFGASVTSEKGRELGMVADEGLAWLSGVTPGETLSVNWDGKIQCQVNVPETAISDQQLLLPCTPQK

SEQ ID NO: 19450 - protein, 237 aa, Escherichia coli; identical to SEQ ID NO: 3793

SEQ ID NO: 19451 - protein, 265 aa, Escherichia coli
MSNQGMQMRQYRLLSPMIKVVIVLFSLLFSTAQAGLVIGGTRFAYPENQSSISVELKNTSDRDMLVKVAVSPDDARQLTGTVESLPSYSETVFIATPPLFILKPDKNTKIRINRVGGSLPADRESLFILNVAALPTLENSHSVKTDNQLQIAVRNRMKIFYRPSNLSEDPNMSYQKLRWARKNEIVTVYNPGPRYVTLYNLHVDGKVIDGGMVAPFSHRQQSWCKSQGVCEIAWQTLDIYNNVLPILKVKLNPSQLDVTGFAFSQ

SEQ ID NO: 19452 - protein, 412 aa, Escherichia coli; identical to SEQ ID NO: 9906

SEQ ID NO: 19453 - protein, 840 aa, Escherichia coli; identical to SEQ ID NO: 9665

SEQ ID NO: 19454 - protein, 250 aa, Escherichia coli; identical to SEQ ID NO: 9904

SEQ ID NO: 19455 - protein, 690 aa, Escherichia coli; identical to SEQ ID NO: 12210

SEQ ID NO: 19456 - protein, 236 aa, Escherichia coli; identical to SEQ ID NO: 3821

SEQ ID NO: 19457 - protein, 883 aa, Escherichia coli; identical to SEQ ID NO: 9639

SEQ ID NO: 19458 - protein, 729 aa, Escherichia coli; identical to SEQ ID NO: 4557

SEQ ID NO: 19459 - protein, 713 aa, Escherichia coli; identical to SEQ ID NO: 4590

SEQ ID NO: 19460 - protein, 862 aa, Escherichia coli
MTIKSTNHLTHIATFCALLYSNSALCAELVEYDHTFLMGKDASNIDLSRYTEGNPTLPGIYDVSVYVNDQPIMSQSIAFAVIEGKKNAQACITQKNLLQFHISSPDKNSEKAILLKRDDDLGDCLNLAEMIPQSSIRYDVNDQRLDIDVPQAWIMKNYQNYVDPSLWENGINAAMLSYNLNGYHSESPGRTNDSIYAAFNGGINLGAWRLRASGNYNWMTNVHSDYDFQNRYLQRDLASLRSQLVIGESYTTGETFDSVSIRGIRLYSDSRMLPPVLASFAPIIHGVANTNAKVTVMQNGYKIYETTVPPGAFAIDDLSPSGYGSDLIVTIEEADGTKRTFSQPFSSVVQMLRPGVGRWDISAGQVLKDSIQDEPNLFQASYYYGLNNYLTGYTGIQLTDNNYTAGLLGLGMNTPVGAFSVDVTHSNVSIPDDKTYQGQSYRISWNKLFENTSTSLNIAAYRYSTQHYLGLNDALTLIDEVEHPEQDLEPKSMRNYSRMKNQVTVSINQPLKFEKKDYGSFYLSGSWSDYWASGQNSTNYSIGYSNSASWGSYSISAQRSLNEDGQTDDSIYLSFTIPIENLLGTEHRSSGFQSIDTQLNSDFKGNNQLNISSSGYSDTNRISYSVNTGYMMNKSSDDLSYIGGYASYESPWGTLSGSASASSDNSRQFSLNTDGGFVLHSGGLTFSNDSFSDSDTLAVIQAPGAKGARINYGNSTVDRWGYGVTSALSPYHENRIALDINDLENDVELKSTSTVAVPRQGAVVFADFETVQGQSAIMNIVRSDGKNIPFAADIYDEQNNIIGNVGQGGQAFVRGIEQEGNIRITWIEEGKPVSCFAHYQQNTTSEKIAQSIILNGLRCQIQ

SEQ ID NO: 19461 - protein, 715 aa, Escherichia coli; identical to SEQ ID NO: 5610

SEQ ID NO: 19462 - protein, 831 aa, Escherichia coli
  MOD_RES (520)..(520): Any amino acid
MQELPMLRMTPLASAIVALLIGIEAYAAEETFDTHFMIGGMKDQQVSNIRLEDNQPLPGPYDIDIYVNKQWRGKYEIIVKDNPQETCLSREMIKRLGINTDSFASGKQCLTFKQLIQGGSYTWDIGVFRLDFSVPQAWVEDLESGYVPPENWERGINAFYTSYYVSQYYSDYKASGNSKSTYVRFNSGLNLQGWQLHSDASFSKTNNNPGVWKSNTLYLERGFAQLLGTLRVGDMYTSSDIFDSVRFSGVRLFRDMQMLPNSKQNFTPRVQGIAQSNALVTIEQNGFVVYQKEVPPGPFAITDLQLAGGGADLDVSVKEADGSVTTYLVPYAAVPNMLQPGVSKYDFAAGRSHIEGASKQSDFVQAGYQYGFNNLLTLYGGSMVANNYYAFTLGTGWNTRIGAISVDATKSHSIQDNGDVFDGQSYQIAYNKFVSQTSTRFGLAAWRYSSRDYRTFNDHVWANNKDNYRRDENDIYDIADYYQNDFGRKNSFSANMSQSLPEGWGSVSLSTLWRDYWGRXGSSKDYQLSYSNNLRRISYTLAASHAYDENHHEEKRFNIFISIPFDWGDDVTTPRRQIYMSNSTTFDDQGVASNNTGLSGTVGSRDQFNYGVNLSYQYQGNETTAGANLTWNAPVATVNGSYSQSSAYRQAGASVSGGIVAWSGGVNLANRLSETFAVMNAPGIKDAYVNGQKYRTTNRNGVVVYDGMTPYRENYLMLDVSQSDSEAELRGNRKIAAPYRGAVVLVNFDTDQRKPWFIKALRADGQPLTFGYEVNDIHGHNIGVVGQGSQLFIRTNEVPPSVNVAIDKQQGLSCTITFGKEIDESRNYICQ

SEQ ID NO: 19463 - protein, 900 aa, Escherichia coli; identical to SEQ ID NO: 9699

SEQ ID NO: 19464 - protein, 244 aa, Escherichia coli; identical to SEQ ID NO: 4064

SEQ ID NO: 19465 - protein, 746 aa, Escherichia coli; identical to SEQ ID NO: 4597

SEQ ID NO: 19466 - protein, 663 aa, Escherichia coli
MLNGIYSMRLKKRYLCTVLSLAFTQQSVAAQESDTLTVWSSPVSSTTTTVLDQPTMKALDKQNVAQALSVVPGVVLQKSGSRNEEQVKVRGFDSRQVPVYFDGVPIYVPYDGNLDLARILTNNLGAVEVSKGYSSLLQGPNQMGGAINITTQKPTKPLEASLGYRQGWSRSQNNAYDMHASFAASSDLGYLQVSGSQLKQDFLGLPHGVNNDIAGKHGKMINSSADDKRGIVKLGFTPRENDEYTLTYIKQDGEKDNPPYSGNSGQKSRYWQWPEYDKESFYYQGTTQLNDRFTLKSRLYHDTFENTLMMYNSLADLKNKKGSYSHYSDYSDGAGLQLAADVRENDLLSFAVNWKDDVHREKGAPHAAYDRYEDRTWSLASEYQWAAADNVDVVAGISYDWRDSVEAKKHEKDGSITHYDDNNQSAFNWQVMGKYHFANEDTLALSYYDRTRFPTLKERYTTSKPAYNQIAIVNPQLKPERARGVDLTWNGAFTHDWGFEVSVYYNRVSDAILSHNIDADTIQNQNSGTVDYSGLDAGIKGKISNILDVGLSYALIHADAKRKDIGKITDLPTQTMTAWMTLKPWEPLSVTLSEEARSSSYSNSDGSQKAAGFAVTHIRADYTLGHGFSVNASVNNLFDTKYAYSEGFIEEGRNFWAGIEYTF

SEQ ID NO: 19467 - protein, 840 aa, Escherichia coli
MMRGMKDRIPFAVNNITCVILLSLFCNAASAVEFNTDVLDAADKKNIDFTRFSEAGYVLPGQYLLDVIVNGQSISPASLQISFVEPQSSGDKAEKKLPQACLTSDMVRLMGLTAESLDKVVYWHDGQCADFHGLPGVDIRPDTGAGVLRINMPQAWLEYSDATWLPPSRWDDGIPGLMLDYNLNGTVSRNYQGGDSHQFSYNGTVGGNLGPWRLRADYQGSQEQSRYNGEKTTNRNFTWSRFYLFRAIPRWRANLTLGENNINSDIFRSWSYTGASLESDDRMLPPRLRGYAPQITGIAETNARVVVSQQGRVLYDSMVPAGPFSIQDLDSSVRGRLDVEVIEQNGRKKTFQVDTASVPYLTRPGQVRYKLVSGRSRGYGHETEGPVFATGEASWGLSNQWSLYGGAVLAGDYNALAAGAGWDLGVPGTLSADITQSVARIEGERTFQGKSWRLSYSKRFDNADADITFAGYRFSERNYMTMEQYLNARYRNDYSSREKEMYTVTLNKNVADWNTSFNLQYSRQTYWDIRKTDYYTVSVNRYFNVFGLQGVAVGLSASRSKYLGRDNDSAYLRISVPLGTGTASYSGSMSNDRYVNMAGYTDMFNDGLDSYSLNAGLNSGGGLTSQRQINAYYSHRSPLANLSANIASLQKGYTSFGVSASGGATITGKGAALHAGGMSGGTRLLVDTDGVGGVPVDGGQVVTNRWGTGVVTDISSYYRNTTSVDLKRLPDDVEATRSVVESALTEGAIGYRKFSVLKGKRLFAILRLADGSQPPFGASVTSEKGRELGMVADEGLAWLSGVTPGETLSVNWDGKIQCQVNVPETAISDQQLLLPCTPQK

SEQ ID NO: 19468 - protein, 224 aa, Escherichia coli; identical to SEQ ID NO: 3792

SEQ ID NO: 19469 - protein, 725 aa, Escherichia coli; identical to SEQ ID NO: 2870

SEQ ID NO: 19470 - protein, 759 aa, Escherichia coli; identical to SEQ ID NO: 18497

SEQ ID NO: 19471 - protein, 648 aa, Escherichia coli
MLALAVSATLPTFAFATETMTVTATGNARSSFEAPMMVSVIDTSAPENQTATSATDLLRHVPGITLDGTGRTNGQDVNMRGYDHRGVLVLVDGVRQGTDTGHLNGTFLDPALIKRVEIVRGPSALLYGSGALGGVISYDTVDAKDLLQEGQSSGFRVFGTGGTGDHSLGLGASAFGRTENLDGIVAWSSRDRGDLRQSNGETAPNDESINNMLAKGTWQIDSAQSLSGLVRYYNNDAREPKNPQTVEASDSSNPMVDRSTIQRDAQLSYKLAPQGNDWLNADAKIYWSEVRINAQNTGSSGEYREQITKGARLENRSTLFADSFASHLLTYGGEYYRQEQHPGGATTGFPQAKIDFSSGWLQDEITLRDLPITLLGGTRYDSYRGSSDGYKDVDADKWSSRAGMTINPTNWLMLFGSYAQAFRAPTMGEMYNDSKHFSIGRFYTNYWVPNPNLRPETNETQEYGFGLRFDDLMLSNDALEFKASYFDTKAKDYISTTVDFAAATTMSYNVPNAKIWGWDVMTKYTTDLFSLDVAYNRTRGKDTDTGEYISSINPDTVTSTLNIPIAHSGFSVGWVGTFADRSTHISSSYSKQPGYGVNDFYVSYQGQQALKGMTTTLVLGNAFDKEYWSPQGIPQDGRNGKIFVSYQW

SEQ ID NO: 19472 - protein, 1024 aa, Escherichia coli
MPTITTAQIKSTLQSAKQSSANKLHSAGQSTKDALKKAAEQTRNAGNRLILLIPKDYKGQGSSLNDLVRTADELGIEVQYDEKNGTAITKQVFGTAEKLIGLTERGVTIFAPQLDKLLQKYQKAGNKLGGSAENIGDNLGKAGSVLSTFQNFLGTALSSMKIDELIKRQKSGSNVSSSELAKASIELINQLVDTAASINNNVNSFSQQLNKLGSVLSNTKHLTGVGNKLQNLPNLDNIGAGLDTVSGILSAISASFILSNADADTGTKAAAGVELTTKVLGNVGKGISQYIIAQRAAQGLSTSAAAAGLIASVVTLAISPLSFLSIADKFKRANKIEEYSQRFKKLGYDGDSLLAAFHKETGAIDASLTTISTVLASVSSGISAAATTSLVGAPVSALVGAVTGIISGILEASKQAMFEHVASKMADVIAEWEKKHGKNYFENGYDARHAAFLEDNFKILSQYNKEYSVERSVLITQQHWDTLIGELAGVTRNGDKTLSGKSYIDYYEEGKRLEKKPDEFQKQVFDPLKGNIDLSDSKSSTLLKFVTPLLTPGEEIRERRQSGKYEYITELLVKGVDKWTVKGVQDKGSVYDYSNLIQHASVGNNQYREIRIESHLGDGDDKVFLSAGSANIYAGKGHDVVYYDKTDTGYLTIDGTKATEAGNYTVTRVLGGDVKILQEVVKEQEVSVGKRTEKTQYRSYEFTHINGKNLTETDNLYSVEELIGTTRADKFFGSKFTDIFHGADGDDHIEGNDGNDRLYGDKGNDTLRGGNGDDQLYGGDGNDKLIGGTGNNYLNGGDGDDELQVQGNSLAKNVLSGGKGNDKLYGSEGADLLDGGEGNDLLKGGYGNDIYRYLSGYGHHIIDDDGGKDDKLSLADIDFRDVAFRREGNDLIMYKAEGNVLSIGHKNGITFRNWFEKESGDISNHQIEQIFDKDGRVITPDSLKKALEYQQSNNKASYVYGNDALAYGSQDNLNPLINEISKIISAAGNFDVKEERAAASLLQLSGNASDFSYGRNSITLTASA

SEQ ID NO: 19473 - protein, 656 aa, Escherichia coli; identical to SEQ ID NO: 2901

SEQ ID NO: 19474 - protein, 884 aa, Escherichia coli; identical to SEQ ID NO: 14714

SEQ ID NO: 19475 - protein, 752 aa, Escherichia coli; identical to SEQ ID NO: 9714

SEQ ID NO: 19476 - protein, 835 aa, Escherichia coli; identical to SEQ ID NO: 14717

SEQ ID NO: 19477 - protein, 856 aa, Escherichia coli; identical to SEQ ID NO: 14693

SEQ ID NO: 19478 - protein, 826 aa, Escherichia coli
MLRMTPLASAIVALLIGIEAYAAEETFDTHFMIGGMKDQQVSNIRLEDNQPLPGQYDIDIYVNKQWRGKYEIIVKDNPQETCLSREMIKRLGINTDNFASGKQCLTFKQLIQGGSYTWDIGVFRLDFSVPQAWVEELESGYVPPENWERGINAFYTSYYVSQYYSDYKASGNSKSTYVRFNSGLNLLGWQLHSDASFSKTNNNPGGWKSNTLYLERGFAQLLGTLRVGDMYTSSDIFDSVRFSGVRLFRDMQMLPNSKQNFTPRVQGIAQSNALVTIEQNGFVVYQKEVPPGPFAITDLQLAGGGADLDVSVKEADGSVTTYLVPYAAVPNMLQPGVSKYDFAAGRSHIEGASKQSDFVQAGHQYGFNNLLTLYGGSMVANNYYAFTLGTGWNTRIGAISVDATKSHSKQDNGDVFDGQSYQIAYNKFVSQTSTRFGLAAWRYSSRDYRTFNDHVWANNKDNYRRDENDIYDIADYYQNDFGRKNSFSANMSQSLPEGWGSVSLSTLWRDYWGRSGSSKDYQLSYSNNLRRISYTLAASHAYDENHHEEKRFNIFISIPFDWGDDVTTPRRQIYMSKSTTFDDQGVASNNTGLSGTVGSRDQFNYGVNLSYQYQGNETTAGANLTWNAPVATVNGSYSQSSAYRQAGASVSGGIVAWSGGVNLANRLSETFAVMNAPGIKDAYVNGQKYRTTNRNGVVVYDGMTPYRENYLMLDVSQSDSEAELRGNRKIAAPYRGAVVLVNFDTDQRKPWFIKALRADGQPLTFGYEVNDIHGHNIGVVGQGSQLFIRTNEVPPSVNVAIDKQQGLSCTITFGKEIDESKNYICQ

SEQ ID NO: 19479 - protein, 840 aa, Escherichia coli
MMRVMKDRIPFAVNNITCVILLSLFCNAASAVEFNTDVLDAADKKNIDFTRFSEAGYVLPGQYLLDVIVNGQSISPASLQISFVEPQSSGDKAEKKLPQACLTSDMVRLMGLTAESLDKVVYWHDGQCADFHGLPGVDIRPDTGAGVLRINMPQAWLEYSDATWLPPSRWDDGIPGLMLDYNLNGTVSRNYQGGDSHQFSYNGTVGGNLGPWRLRADYQGSQEQSRYNGEKTTNRNFTWSRFYLFRAIPRWRANLTLGENNINSDIFRSWSYTGASLESDDRMLPPRLRGYAPQITGIAETNARVVVSQQGRVLYDSMVPAGPFSIQDLDSSVRGRLDVEVIEQNGRKKTFQVDTASVPYLTRPGQVRYKLVSGRSRGYGHETEGPVFATGEASWGLSNQWSLYGGAVLAGDYNALAAGAGWDLGVPGTLSADITQSVARIEGERTFQGKSWRLSYSKRFDNADADITFAGYRFSERNYMTMEQYLNARYRNDYSSREKEMYTVTLNKNVADWNTSFNLQYSRQTYWDIRKTDYYTVSVNRYFNVFGLQGVAVGLSASRSKYLGRDNDSAYLRISVPLGTGTASYSGSMSNDRYVNMAGYTDTFNDGLDSYSLNAGLNSGGGLTSQRQINAYYSHRSPLANLSANIASLQKGYTSFGVSASGGATITGKGAALHAGGMSGGTRLLVDTDGVGGVPVDGGQVVTNRWGTGVVTDISSYYRNTTSVDLKRLPDDVEATRSVVESALTEGAIGYRKFSVLKGKRLFAILRLADGSQPPFGASVTSEKGRELGMVADEGLAWLSGVTPGETLSVNWDGKIQCQVNVPETAISDQQLLLPCTPQK

SEQ ID NO: 19480 - protein, 884 aa, Escherichia coli
MCMPNHSNFRLRGIACYIALAISGGSVNAWADDSIQFDPRFLELKGDTKIDLGKFSKKGYVDAGKYNLRVFINKQPLSDEYDINWYVSENDPTKNYACLTPELVAALGLKEGIAKSLQWTHNDECLKPGQLDGMEVENDLSQSALLLTVPQAYLEYTSSDWDPPSRWDDGIPGLIADYSLNAQTRHQEQGGEDSHDISGNGTVGANLGAWRFRADWQSDYQHTRSNDDDDDSSNSTTSKHWDWSRYYAWRALPSLKAKLSLGEDYLNSDIFDGFNYIGSSVSTDDQMLPPNLRGYAPDVSGVAHSSAKVTISQMGRVLYETQVPAGPFRIQDIGDSVSGTLHVRVEEQNGQVQEYDVTTASMPFLTRQGQVRYKVMMGRPEDWNHKTEGGFFSGGEASWGVADGWSLYGGALADKHYQSAAMGVGRDLAQFGALAFDVTHSHVNLDHDSAYGKGKLDGNSFRVSYAKDFDELNSRVTFAGYRFSEKNFMTMSEYLDANQSDMARTGNDKEMYTITYNQNFAAAGVSIYLNYSHRTYWDRPEQTNYNLMFSHYFNMGSIRNMSISVTGYRYEYDDNADKGMYLSMSIPWSDSSTVTYNGSYGSGSDSSQVGYFKRVDDATHYQVNVGTSEQHGSVDGYLSHDGSLAKVDLSANYHEGEYRSAGIALQGGATLTAHGGALHRTQNMGGTRLLIDADGIANVPVESNGAPVYTNMFGKAVVADINNYYRNQAYIDLNNLPEDAEATQSVVQATLTEGAIGYRKFKVISGQKAMAVLRLRDGSYPPFGAEVKNDEQQQVGIVDDEGNVYLAGVNAGEHMMVFWEGSAQCEIVLPKPLPADLFSGLLLPCEQKGTAAPDSSAPEIKPVIQDQTRQVTPTEAPTSISATQ

SEQ ID NO: 19481 - protein, 866 aa, Escherichia coli; identical to SEQ ID NO: 4866

SEQ ID NO: 19482 - protein, 838 aa, Escherichia coli; identical to SEQ ID NO: 3041

SEQ ID NO: 19483 - protein, 826 aa, Escherichia coli; identical to SEQ ID NO: 3256

SEQ ID NO: 19484 - protein, 883 aa, Escherichia coli
MTAIRAAFKAYRMHQVLIMPRFARLTIALGLATAVFPVDAEYYFNPRFLSNDLAESVDLSAFTKGREAPPGTYRVDIYLNDEFMTSRDITFIADDNNAELIPCLSTDLLVSLGIKKSELLDNKEHSAEKHVPDNSACTPLQDRLADASTEFDVGQQHLSLSVPQIYVGRMARGYVSPELWEEGINAGLLNYSFNGNSINNRSNHNAGKSNYAYLNLQSGINIGSWRLRDNSTWSYNSGSSNSSNSNKWQHINTSAERDIIPLRSRLTVGDSYTDGDIFDSVNFRGLKINSTEAMLPDSQHGFAPVIHGIARGTAQVSVKQNGYDVYQTTVPPGPFTIDDINSAANGGDLQVTIKEADGSIQTLYVPYSSVPVLQRAGYTRYALAMGEYRSGNNLQSSPKFIQGSLMHGLEGNWTPYGGMQIAEDYQAFNLGIGKDLGLFGAFSFDITQANTTLADGTRHSGQSVKSVYSKSFYQTGTNIQVAGYRYSTQGFYNLSDSAYSRMSGYTVKPPTGDTNEQTQFIDYFNLFYSKRGQEQISISQQLGNYGTTFFSASRQSYWNTSRSDQQISFGLNVPFGDITTSLNYSYSNNIWQNDRDHLLAFTLNVPFSHWMRTDSQSAFRNSNASYSMSNDLKGGMTNLSGVYGTLLPDNNLNYSVQVGNTHGGNTSSGTSGYSSLNYRGAYGNTNVGYSRNGDSSQIYYGMSGGIIAHADGITFGQPLGDTMVLVKAPGADNVKIENQTGIHTDWRGYAILPFATEYRENRVALNANSLADNVELDETVVTVIPTHGAIARATFNAQIGGKVLMTLKYGNKSVPFGAIVTHGENKNGRIVAENGQVYLTGLPQSGKLQVSWGKDKNSNCIVEYKLPEVSPGTLLNQQTAICR

SEQ ID NO: 19485 - protein, 849 aa, Escherichia coli; identical to SEQ ID NO: 13478

SEQ ID NO: 19486 - protein, 161 aa, Escherichia coli; identical to SEQ ID NO: 2582

SEQ ID NO: 19487 - protein, 833 aa, Escherichia coli
MAALSPPFIKYLSGMDTVNIYRLSFVSCLVVAMPCALAVEFNLNVLDKSMRDRIDISLLKEKGVIAPGEYFVSVAVNNNQISNGQKINWHKNDDKTIPCINDLLVDKFGLKPEVRQSLPLINQCVDFSSRPEMLFNFDQANQQLNITIPQAWLAWHSENWTPPSTWKEGVAGVLMDYNLFASSYRPQDGSSSTNLNAYGTAGINTGAWRLRSDYQLNQTDSDDNHEQSGEISRTYLFRPLPQLGSKLTLGETDFSSNIFDGFSYTGAALASDDRMLPWELRGYAPQISGIAKTNATVTISQSGRVIYQKKVPPGPFIIDDLNQSVQGTLDVKVTEEDGRVNNFQVSAASTPFLTRQGQVRYKLAAGQPRPSMSHQTENETFFSNEVSWGMLSNTSLYGGLLLSGDDYHSAAIGIGQNMLWLGALSFDVTWASSHFDTQQDERGLSYRFNYSKQVDATNSTISLAAYRFSDRHFHSYANYLDHKYNDSDAQDEKQTISLSVGQPITPLNLNLYANLLHQTWWNADASTTANITAGFNVDIGDWRDISISTSFNTTHYEDKDRDNQIYLSISLPFGNGGRVGYDMQNSSHSTTHRMSWNDTLDERNSWGMSAGLQSDRPDNGAQVSGNYQHLSSAGEWDISGTYAANDYSSVSSSWSGSFTATQYGAAFHRRSSTNEPRLMVSTDGVADIPIQGNLDYTNHFGIAVVPLISSYQPSTVAVNMNDLPDGVTVAENVIKETWIEGAIGYKSLASRSGKDVNVIIRNASGQFPPLGADIRQDDSGISVGMVGEEGHAWLSGVAENQKFTVVWGDSQHCSLHLPEHMEDTANRLILPCH

SEQ ID NO: 19488 - protein, 837 aa, Escherichia coli; identical to SEQ ID NO: 4687

SEQ ID NO: 19489 - protein, 161 aa, Escherichia coli; identical to SEQ ID NO: 2582

SEQ ID NO: 19490 - protein, 266 aa, Escherichia coli; identical to SEQ ID NO: 1894

SEQ ID NO: 19491 - protein, 843 aa, Escherichia coli; identical to SEQ ID NO: 3042

SEQ ID NO: 19492 - protein, 862 aa, Escherichia coli; identical to SEQ ID NO: 14738

SEQ ID NO: 19493 - protein, 878 aa, Escherichia coli; identical to SEQ ID NO: 10560

SEQ ID NO: 19494 - protein, 866 aa, Escherichia coli
MTIKPTKNYHNHLTRIATFCALLYCNSAFCAELVEYDHTFLMGQNASNIDLSRYSEGNPAIPGMYDVSVYVNDQPIINQSITFIEIEGKKNAQACITLKNLLQFHINSPDINNEKAVLLARDETLGNCLNLTEIIPQASVRYDVNEQRLDIDVPQAWVMKNYQNYVDPSLWENGINAAMLSYNLNGYHSETPGRRNDSIYAAFNGGMNLGAWRLRASGNYNWMTDSGSNYDFKNRYIQRDIASLRSQLILGESYTTGETFDSVSIRGIRLYSDSRMLPPTLASFAPIIHGVANTNAKVTIMQGGYKIYETTVPPGAFVIDDLSPSGYGSDLIVTVEESDGSKRTFSQPFSSVVQMLRPGVGRWDISGGQVLKDDIQDEPNLFQASYYYGLNNYLTGYTGIQITDNNYTAGLLGLGLNTSAGAFSFDVTHSNVRIPDDKTYQGQSYRVSWNKLFEETSTSLNIAAYRYSTQNYLGLNDTLTLIDEVKHPEQDLEPKSMRNYSRMKNQVTVSINQPLKFEKKDYGSFYLSGSWSDYWASGQNRSNYSIGYSNSASWGSYSVSAQRSWNEDGDTDDSVYLSFTIPIEKLLGTEQRTSGFQSIDTQMSSDFKGNNQLNVSSSGYSDNARVSYSVNTGYTMNKASKDLSYVGGYASYESPWGTLAGSVSANSDNSRQVSLSTDGGFVLHSGGLTFSNDSFSDSDTLAVVQAPGAQGARINYGNSTIDRWGYGVTSALSPYHENRIALDINDLENDVELKSTSAVAVPRQGSVVFADFETVQGQSAIMNITRSDGKNIPFAADIYDEKGNVIGNVGQGGQAFVRGIEQQGNISIKWLEESKPVSCLAHYQQSSEAEKIAQSIILNGIRCQIQ

SEQ ID NO: 19495 - protein, 869 aa, Escherichia coli
MKIPTTTDIPQRYTWCLAGICYSSLAILPSFLSYAESYFNPAFLLENGTSVADLSRFERGNHQPAGVYRVDLWRNDEFIGSQDIVFESTTENTGDKSGGLMPCFNQVLLERIGLNSSAFPELAQQQNNKCINLLKAVPDATINFDFAAMRLNITIPQIALLSSAHGYIPPEEWDEGIPALLLNYNFTGNRGNGNDSYFFSELSGINIGPWRLRNNGSWNYFRGNGYHSEQWNNIGTWVQRAIIPLKSELVMGDGNTGSDIFDGVGFRGIRLYSSDNMYPDSQQGFAPTVRGIARTAAQLTIRQNGLIIYQSYVSPGAFEITDLHPTSSNGDLDVTIDERDGNQQNYTIPYSTVPILQREGRFKFDLTAGDFRSGNSQQSSPFFFQGTALGGLPQEFTAYGGTQLSANYTAFLLGLGRNLGNWGAVSLDVTHARSQLADDSRHEGDSIRFLYAKSLNTFGTNFQLMGYRYSTQGFYTLDDVAYRRMEGYEYDYDYDGEHRDEPIIVNYHNLRFSRKDRLQLNISQSLNDFGSLYISGTHQKYWNTSDSDTWYQVGYTSSWVGISYSLSFSWNESVGIPDNERIVGLNVSVPFNVLTKRRYTRENALDRAYASFNANRNSNGQNSWLAGVGGTLLEGHNLSYHVSQGDTSNNGYTGSATANWQATYGTLGVGYNYDRDQHDVNWQLSGGVVGHENGITLSQPLGDTNVLIKAPGAGGVRIENQTGILTDWRGYAVMPYATVYRYNRIALDTNTMGNSIDVEKNISSVVPTQGALVRANFDTRIGVRALITVTQGGKPVPFGSLVRENSTGITSMVGDDGQVYLSGAPLSGELLVQWGDGANSRCIAHYVLPKQSLQQAVTVISAVCTHPGS

SEQ ID NO: 19496 - protein, 880 aa, Escherichia coli; identical to SEQ ID NO: 3456

SEQ ID NO: 19497 - protein, 844 aa, Escherichia coli
MNANNLSCLIYCRCSLLLFAALGLTVTNHSFAAEEAEFDSEFLHLDKGINAIDIRRFSHGNPVPEGRYYSDIYVNNVWKGKADLQYLRTANTGAPTLCLTPELLSLIDLVKDTMSGNTSCFPASTGLSSASINFDLSTLRLNIEIPQALLNTRPRGYISPSQWQSGVPAAFINYDANYYQYSSSGTSNEQTYLGLKAGFNLWGWALRHRGSESWNNSYPAGYQNIETSIMHDLAPLRAQFTLGDFYTNGELMDSLSLRGVRLASDERMLPGSLRGYAPAVRGIANSNAKVTIYQNAHILYETTVPAGPFVINDLYPSGYAGDLIVKITESNGQTRMFTVPFAAVAQLIRPGFSRWQMSVGKYRYANKTYNDLIAQGTYQYGLTNDITLNSGLTTASGYTAGLAGLAFNTPLGAIASDITLSRTAFRYSGVTRKGYSLHSSYSINIPASNTNITLAAYRYSSKDFYHLKDALSANHNAFIDDVSVKSTAFYRPRNQFQISINQELGEKWGGMYLTGTTYNYWGHKGSRNEYQMGYSNFWKQLGYQIGLSQSRDNEQQRRDDRFYINFTLPLGESVQSPVFSTVLNYSKEEKNSIQTSISGTGGEDNQFSYGLSGNSQENGPSGYAMNGGYRSPYVNITTTVGHDTQNNNQRSFGASGAVVAHPYGVTLSNDLSDTFAIIHAEGAQGAAINNASGSRLDFWGNGIVPYVTPYEKNQISIDPSNLDLNVELSATEQEIIPRANSATLVKFDTKTGRSLLFDIRMSTGNPPPMASEVLDEHGQLAGYVAQAGKVFTRGLPEKGHLSVVWGPDNKDRCSFVYHVAHNKDDMQSQLVPVLCIQHPNQEKT

SEQ ID NO: 19498 - protein, 876 aa, Escherichia coli; identical to SEQ ID NO: 10563

SEQ ID NO: 19499 - protein, 900 aa, Escherichia coli; identical to SEQ ID NO: 14707

SEQ ID NO: 19500 - protein, 235 aa, Escherichia coli; identical to SEQ ID NO: 4365

SEQ ID NO: 19501 - protein, 222 aa, Escherichia coli; identical to SEQ ID NO: 4712

SEQ ID NO: 19502 - protein, 191 aa, Escherichia coli; identical to SEQ ID NO: 6650

SEQ ID NO: 19503 - protein, 204 aa, Escherichia coli
MMKKIAITCALLSSLVASSVWADAASDLKSRLDKVSSFHASFTQKVTDGSGAAVQEGQGDLWVKRPNLFNWHMTQPDESILVSDGKTLWFYNPFVEQATATWLKDATGNTPFMLIARNQSSDWQQYNIKQNGDDFVLTPKASNGNLKQFTINVGRDGTIHQFSAVEQDDQRSSYQLKSQQNGAVDAAKFTFTPAQGVTVDDQRK

SEQ ID NO: 19504 - protein, 539 aa, Escherichia coli; identical to SEQ ID NO: 3845

SEQ ID NO: 19505 - protein, 259 aa, Escherichia coli; identical to SEQ ID NO: 14472

SEQ ID NO: 19506 - protein, 351 aa, Escherichia coli
MKKSTLALVVMGIVASVSVQAAEIYNKDGNKLDVYGKVKAMHYMSDNDSKDGDQSYIRFGFKGETQINDQLTGYGRWEAEFAGNKAESDTAQQKTRLAFAGLKYKDLGSFDYGRNLGALYDVEAWTDMFPEFGGDSSAQTDNFMTKRASGLATYRNTDFFGVIDGLNLNLQYQGKNENRDVKKQNGDGFGTSLTYDFGGSDFAISGAYTNSDRTNEQNLQSRGTGKRAEAWATGLKYDANNIYLATFYSETRKMTPISGGFANKTQNFEAVAQYQFDFGLRPSLGYVLSKGKDIEGIGDEDLVNYVDVGATYYFNKNMSAFVDYKINQLESDNKLNINNDDIVAVGMTYQF

SEQ ID NO: 19507 - protein, 663 aa, Escherichia coli
MFRLNPFVRVGLCLSAISCAWPVLAVDDDGETMVVTASSVEQNLKDAPASISVITQEDLQRKPVQNLKDVLKEVPGVQLTNEGDNRKGVSIRGLDSSYTLILVDGKRVNSRNAVFRHNDFDLNWIPVDSIERIEVVRGPMSSLYGSDALGGVVNIITKKIGQKWSGTVTVDTTVQEHRDRGDTYNGQFFTSGPLIDGVLGMKAYGSLAKREKDDPQNSTTTDTGETPRIEGFSSRDGNVEFAWTPNQNHDFTAGYGFDRQERDSDSLDKNRLERQNYSVSHNGRWDYGTSELKYYGEKVENKNPGNSSPITSESNTVDGKYTLPLTAINQFLTVGGEWRHDKLSDAVNLTGGTSSKTSASQYALFVEDEWRIFEPLALTTGVRMDDHETYGEHWSPRAYLVYNATDTVTVKGGWATAFKAPSLLQLSPDWTSNSCRGACKIVGSPDLKPETSESWELGLYYMGEEGWLEGVESSVTVFRNDVKDRISISRTSDVNAAPGYQNFVGFETGANGRRIPVFSYYNVNKARIQGVETELKIPFNDEWKLSINYTYNDGRDVSNGENKPLSDLPFHTANGTLDWKPLALEDWSFYVSGHYTGQKRADSATAKTPGGYTIWNTGAAWQVTKDVKLRAGVLNLGDKDLSRDDYSYNEDGRRYFMAVDYRF

SEQ ID NO: 19508 - protein, 715 aa, Escherichia coli; identical to SEQ ID NO: 5610

SEQ ID NO: 19509 - protein, 673 aa, Escherichia coli; identical to SEQ ID NO: 2919

SEQ ID NO: 19510 - protein, 654 aa, Escherichia coli
MNVIRTVICTLIILPVGLQAATSHSSMVKDTITIVATGNQNTVFETPSMVSVVTNDTPWSQNAVTSAGMLKGVAGLSQTGAGRTNGQTFNLRGYDKSGVLVLVDGVRQLSDMAKSSGTYLDPALVKRIEVVRGPNSSLYGSGGLGGVVDFRTADAADFLPPGETNGLSLWGNIASGDHSTGSGLTWFGKTGKTDALLSVIMRKRGNIYQSDGEHAPNKEKPAALFAKGSVGITDSNKAGASLRLYRNNTTEPGNSTQTHGDSGLRDRKTVQNDVQFWYQYAPVDNSLINVKSTLYLSDITIKTNGHNKTAEWRNNRTSGVNVVNRSHTLIFPGAHQLSYGAEYYRQQQKPEGSATLYPEGNIDFTSLYFQDEMTMKSYPVNIIVGSRYDRYKSFNPRAGELKAERLSPRAAISVSPTDWLMMYGSISSAFRAPTMAEMYRDDVHFYRKGKPNYWVPNLNLKPENNITREIGAGIQLDGLLTDNDRLQLKGGYFGTDARNYIATRVDMKRMRSYSYNVSRARIWGWDMQGNYQSDYVDWMLSYNRTESMDASSREWLGSGNPDTLISDISIPVGHRGVYAGWRAELSASATHVKKGDPHQAGYTIHSFSLSYKPVSVKGFEASVTLDNAFNKLAMNGKGVPLSGRTVSLYTRYQW

SEQ ID NO: 19511 - protein, 725 aa, Escherichia coli; identical to SEQ ID NO: 10741

SEQ ID NO: 19512 - protein, 375 aa, Escherichia coli
MKVKVLSLLVPALLVAGAANAAEVYNKDGNKLDLYGKVDGLHYFSDDKSVDGDQTYMRLGFKGETQVTDQLTGYGQWEYQIQGNAPESENNSWTRVAFAGLKFQDIGSFDYGRNYGVVYDVTSWTDVLPEFGGDTYGSDNFMQQRGNGFATYRNTDFFGLVDGLNFAVQYQGQNGSVSGENDPDFTGHGITNNGRKALRQNGDGVGGSITYDYEGFGVGAAVSSSKRTDAQNTAAYIGNGDRAETYTGGLKYDANNIYLAAQYTQTYNATRVGSLGWANKAQNFEAVAQYQFDFGLRPSVAYLQSKGKNLGTIGTRNYDDEDILKYVDVGATYYFNKNMSTYVDYKINLLDDNQFTRDAGINTDNIVALGLVYQF

SEQ ID NO: 19513 - protein, 290 aa, Escherichia coli
MCGGHPGTSGPGTTVAAALSSGEVTLYTPAIVCISRQKNVKKQRAENMQKMKPALKKTLMAVACLSAVPAAQAAVSLDRTRAIFNGDEKSMTLNIANDNKQLPYLAQAWVENEKKEKITTGPIIATPPVQRLEPGSKSMVRLTSTPDISRLPQDRESLFYFSLREIPPKSDKANVLQIALQTKIKLFYRPESIKAKPNAVWQDQLVLNKTSGGYRIDNPTPYYVTVIGIGGSEKQAREGEFDAVMLAPKSTQMVKSGTYNTPYLSYINDYGGRPVLQFSCGGSRCTAVKK

SEQ ID NO: 19514 - protein, 659 aa, Escherichia coli
MQMTQRDIPQSVTIVSQQRMEDQQLQTLGEVMENTLGISKSQADSDRALYYSRGFQIDNYMVDGIPTYFESRWNLGDALSDMALFERVEVVRGATGLMTGTGNPSAAINMVRKHATSREFKGDVSAEYGSWNKERYVADLQSPLTEDGKIRARIVGGYQNNDSWLDRYNSEKTFFSGIVDADLGDLTMLSAGYEYQRIDVNSPTWGGLPRWNTDGSSNSYDRARSTAPDWAYNDKEINKVFMTLKQRFADTWQATLNATHSEVEFDSKMMYVDAYVNKADGMLVGPYSNYGPGFDYVGGTGWNSGKRKVDALDLFADGSYELFGRQHNLMFGGSYSKQNNRYFSSWANIFPDEIGSFYNFNGNFPQTDWSPQSLAQNDTTHMKSLYAATRVTLADPLHLILGARYTNWRVDTLTYSMEKNHTTPYAGLVFDINDNWSTYASYTSIFQPQNDRDSSGKYLTPITGNNYELGLKSDWMNSRLTTTLAIFRIEQDNVAQSTGTPIPGSNGETAYKAVDGTVSKGVEFELNGAITDNWQLTFGATRYIAEDNEGNAVNPNLPRTTFKMFTSYRLPVMPELTVGGGVNWQNRVYTDTVTPYGTFRAEQGSYALVDLFTRYQVTKNFSLQGNVNNLFDKTYDTNVEGSIVYGAPRNFSITGTYQF

SEQ ID NO: 19515 - protein, 231 aa, Escherichia coli; identical to SEQ ID NO: 10692

SEQ ID NO: 19516 - protein, 118 aa, Escherichia coli [sequence omitted]

SEQ ID NO: 19517 - protein, 360 aa, Escherichia coli; identical to SEQ ID NO: 4018

SEQ ID NO: 19518 - protein, 746 aa, Escherichia coli; identical to SEQ ID NO: 3031

SEQ ID NO: 19519 - protein, 191 aa, Escherichia coli; identical to SEQ ID NO: 2727

SEQ ID NO: 19520 - protein, 614 aa, Escherichia coli; identical to SEQ ID NO: 3301

SEQ ID NO: 19521 - protein, 251 aa, Escherichia coli; identical to SEQ ID NO: 19017

SEQ ID NO: 19522 - protein, 362 aa, Escherichia coli; identical to SEQ ID NO: 2434

SEQ ID NO: 19523 - protein, 233 aa, Escherichia coli; identical to SEQ ID NO: 3276

SEQ ID NO: 19524 - protein, 747 aa, Escherichia coli; identical to SEQ ID NO: 2072

SEQ ID NO: 19525 - protein, 236 aa, Escherichia coli; identical to SEQ ID NO: 3438

SEQ ID NO: 19526 - protein, 367 aa, Escherichia coli; identical to SEQ ID NO: 3016

SEQ ID NO: 19527 - protein, 729 aa, Escherichia coli; identical to SEQ ID NO: 3052

SEQ ID NO: 19528 - protein, 231 aa, Escherichia coli; identical to SEQ ID NO: 3055

SEQ ID NO: 19529 - protein, 663 aa, Escherichia coli; identical to SEQ ID NO: 1910

SEQ ID NO: 19530 - protein, 250 aa, Escherichia coli; identical to SEQ ID NO: 3048

SEQ ID NO: 19531 - protein, 224 aa, Escherichia coli; identical to SEQ ID NO: 3035

SEQ ID NO: 19532 - protein, 360 aa, Escherichia coli; identical to SEQ ID NO: 3032

SEQ ID NO: 19533 - protein, 759 aa, Escherichia coli; identical to SEQ ID NO: 18675

SEQ ID NO: 19534 - protein, 696 aa, Escherichia coli; identical to SEQ ID NO: 4038

SEQ ID NO: 19535 - protein, 700 aa, Escherichia coli; identical to SEQ ID NO: 3047

SEQ ID NO: 19536 - protein, 239 aa, Escherichia coli; identical to SEQ ID NO: 11531

SEQ ID NO: 19537 - protein, 774 aa, Escherichia coli; identical to SEQ ID NO: 4771

SEQ ID NO: 19538 - protein, 249 aa, Escherichia coli; identical to SEQ ID NO: 3028

SEQ ID NO: 19539 - protein, 250 aa, Escherichia coli; identical to SEQ ID NO: 2808

SEQ ID NO: 19540 - protein, 237 aa, Escherichia coli; identical to SEQ ID NO: 3793

SEQ ID NO: 19541 - protein, 1024 aa, Escherichia coli
MPTITTAQIKSTLQSAKQSAANKLHSAGQSTKDALKKAAEQTRNAGNRLILLIPKDYKGQGSSLNDLVRTADELGIEVQYDEKNGTAITKQVFGTAEKLIGLTERGVTIFAPQLDKLLQKYQKAGNKLGGSAENIGDNLGKAGSVLSTFQNFLGTALSSMKIDELIKKQKSGSNVSSSELAKASIELINQLVDTAASINNNVNSFSQQLNKLGSVLSNTKHLNGVGNKLQNLPNLDNIGAGLDTVSGILSVISASFILSNADADTGTKAAAGVELTTKVLGNVGKGISQYIIAQRAAQGLSTSAAAAGLIASAVTLAISPLSFLSIADKFKRANKIEEYSQRFKKLGYDGDSLLAAFHKETGAIDASLTTISTVLASVSSGISAAATTSLVGAPVSALVGAVTGIISGILEASKQAMFEHVASKMADVIAEWEKKHGKNYFENGYDARHAAFLEDNFKILSQYNKEYSVERSVLITQQHWDTLIGELAGVTRNGDKTLSGKSYIDYYEEGKRLEKKPDEFQKQVFDPLKGNIDLSDSKSSTLLKFVTPLLTPGEEIRERRQSGKYEYITELLVKGVDKWTVKGVQDKGSVYDYSNLIQHASVGNNQYREIRIESHLGDGDDKVFLAAGSANIYAGKGHDVVYYDKTDTGYLTIDGTKATEAGNYTVTRVLGGDVKVLQEVVKEQEVSVGKRTEKTQYRSYEFTHINGTDLTETDNLYSVEELIGTNRADKFFGSKFTDIFHGADGDDHIEGNDGNDRLYGDKGNDTLRGGNGDDQLYGGDGNDKLTGGVGNNYLNGGDGDDELQVQGNSLAKNVLSGGKGNDKLYGSEGADLLDGGEGNDLLKGGYGNDIYRYLSGYGHHIIDDDGGKDDKLSLADIDFRDVAFKREGNDLIMYKAEGNVLSIGHKNGITFRNWFEKESGDISNHQIEQIFDKDGRVITPDSLKKAFEYQQSNNQANYVYGEYASTYADLDNLNPLINEISKIISAAGNFDVKEERSAASLLQLSGNASDFSYGRNSITLTASA

SEQ ID NO: 19542 - protein, 250 aa, Escherichia coli; identical to SEQ ID NO: 9497

SEQ ID NO: 19543 - protein, 673 aa, Escherichia coli; identical to SEQ ID NO: 3295

SEQ ID NO: 19544 - protein, 678 aa, Escherichia coli; identical to SEQ ID NO: 14460

SEQ ID NO: 19545 - protein, 412 aa, Escherichia coli; identical to SEQ ID NO: 3323

SEQ ID NO: 19546 - protein, 541 aa, Escherichia coli; identical to SEQ ID NO: 3377

SEQ ID NO: 19547 - protein, 721 aa, Escherichia coli; identical to SEQ ID NO: 9824

SEQ ID NO: 19548 - protein, 244 aa, Escherichia coli; identical to SEQ ID NO: 2964

SEQ ID NO: 19549 - protein, 122 aa, Escherichia coli; identical to SEQ ID NO: 2915

SEQ ID NO: 19550 - protein, 213 aa, Escherichia coli; identical to SEQ ID NO: 2232

SEQ ID NO: 19551 - protein, 246 aa, Escherichia coli; identical to SEQ ID NO: 3021

SEQ ID NO: 19552 - protein, 678 aa, Escherichia coli; identical to SEQ ID NO: 3014

SEQ ID NO: 19553 - protein, 784 aa, Escherichia coli; identical to SEQ ID NO: 2244

SEQ ID NO: 19554 - protein, 243 aa, Escherichia coli; identical to SEQ ID NO: 2910

SEQ ID NO: 19555 - protein, 250 aa, Escherichia coli; identical to SEQ ID NO: 15034

SEQ ID NO: 19556 - protein, 713 aa, Escherichia coli
MAKFTPSFSGIKGRALFSLLFAAPMIHATDTATTKDGETITVTADANTATEATDGYQPLSTSTATLTDMPMLDIPQVVNTVSDQVLENQNATTLDEALYNVSNVVQTNTLGGTQDAFVRRGFGANRDGSIMTNGLRTVLPRSFNAATERVEVLKGPASTLYGILDPGGLINVVTKRPEKTFHGSVSATSSSFGGGTGQLDITGPIEGTQLAYRLTGEVQDEDYWRNFGKERSTFIAPSLTWFGDNATVTMLYSHRDYKTPFDRGTIFDLTTKQPVNVDRKIRFDEPFNITDGQSDLAQLNAEYHLNSQWTARFDYSYSQDKYSDNQARVTAYDATTGTLTRRVDATQGSTQRMHATRADLQGNVDIAGFYNEILGGVSYEYYDLLRTDMIRCKKAKDFNIYNPVYGNTSKCTTVSASDSDQTIKQESYSAYAQDALYLTDNWIAVAGIRYQYYTQYAGKGRPFNVNTDSRDEQWTPKLGLVYKLTPSVSLFANYSQTFMPQSSIASYIGDLPPESSNAYEVGAKFELFDGITADIALFDIHKRNVLYTESVGDETIAKTAGRVRSRGVEVDLAGALTENINIIASYGYTDAKVLEDPDYAGKPLPNVPRHTGSLFLTYDIHNMPGNNTLTFGGGGHGVSRRSATNGADYYLPGYFVADAFAAYKMKLQYPVTLQLNVKNLFDKTYYTSSIATNNLGNQIGDPREVQFTVKMEF

SEQ ID NO: 19557 - protein, 686 aa, Escherichia coli; identical to SEQ ID NO: 3015

SEQ ID NO: 19558 - protein, 360 aa, Escherichia coli; identical to SEQ ID NO: 3862

SEQ ID NO: 19559 - protein, 331 aa, Escherichia coli; identical to SEQ ID NO: 2856

SEQ ID NO: 19560 - protein, 1024 aa, Escherichia coli
MPTITTAQIKSTLQSAKQSAANKLHSAGQSTKDALKKAAEQTRNAGNRLILLIPKDYKGQGSSLNDLVRTADELGIEVQYDEKNGTAITKQVFGTAEKLIGLTERGVTIFAPQLDKLLQKYQKAGNKLGGSAENIGDNLGKAGSVLSTFQNFLGTALSSMKIDELIKKQKSGGNVSSSELAKASIELINQLVDTAASLNNNVNSFSQQLNKLGSVLSNTKHLNGVGNKLQNLPNLDNIGAGLDTVSGILSAISASFILSNADADTGTKAAAGVELTTKVLGNVGKGISQYIIAQRAAQGLSTSAAAAGLIASVVTLAISPLSFLSIADKFKRANKIEEYSQRFKKLGYDGDSLLAAFHKETGAIDASLTTISTVLASVSSGISAAATTSLVGAPVSALVGAVTGIISGILEASKQAMFEHVASKMADVIAEWEKKHGKNYFENGYDARHAAFLEDNFEILSQYNKEYSVERSVLITQQHWDTLIGELAGVTRNGDKTLSGKSYIDYYEEGKRLEKEPDEFQKQVFDPLKGNIDLSVIKSSTLLKFITPLLTPGKEIRERRQSGKYEYITELLVKGVDKWTVKGVQDKGSVYDYSNLIQHASVGNNQYREIRIESHLGDGDDKVFLSAGSANIYAGKGHDVVYYDKTDTGYLTIDGTKATEAGNYTVTRVLGGDVKVLQEVVKEQEVSVGKRTEKTQYRSYEFTHINGTDLTETDNLYSVEELIGTNRADKFFGSKFTDIFHGADGDDHIEGNDGNDRLYGDKGNDTLRGGNGDDQLYGGDGNDKLTGGVGNNYLNGGDGDDELQVQGNSLAKNVLSGGKGNDKLYGSEGADLLDGGEGNDLLKGGYGNDIYRYLSGYGHHIIDDDGGKDDKLSLADIDFRDVAFKREGNDLIMYKAEGNVLSIGHKNGITFRNWFEKESGDISNHQIEQIFDKDGRVITPDSLKKAFEYQQSNNQANYVYGEYASTYADLDNLNPLINEISKIISAAGNFDVKEERSAASLLQLSGNASDFSYGRNSITLTASA

SEQ ID NO: 19561 - protein, 237 aa, Escherichia coli; identical to SEQ ID NO: 3022

SEQ ID NO: 19562 - protein, 204 aa, Escherichia coli; identical to SEQ ID NO: 2957

SEQ ID NO: 19563 - protein, 233 aa, Escherichia coli; identical to SEQ ID NO: 14935

SEQ ID NO: 19564 - protein, 228 aa, Escherichia coli; identical to SEQ ID NO: 3034

SEQ ID NO: 19565 - protein, 218 aa, Escherichia coli
MFMAMMVAGRAEAGVALGATRVIYPAGQKQVQLAVTNNDENSTYLIQSWVENADGVKDGRFIVTPPLFAMKGKKENTLRILDATNNQLPQDRESLFWMNVKAIPSMDKSKLTENTLQLAIISRIKLYYRPAKLALPPDQAAEKLRFRRSANSLTLINPTPYYLTVTELNAGTRVLENALVPPMGESAVKLPSDAGSNITYRTINDYGALTPKMTGVME

SEQ ID NO: 19566 - protein, 208 aa, Escherichia coli; identical to SEQ ID NO: 10749

SEQ ID NO: 19567 - protein, 351 aa, Escherichia coli; identical to SEQ ID NO: 3010

SEQ ID NO: 19568 - protein, 120 aa, Escherichia coli; identical to SEQ ID NO: 3383

SEQ ID NO: 19569 - protein, 246 aa, Escherichia coli; identical to SEQ ID NO: 14465

SEQ ID NO: 19570 - protein, 362 aa, Escherichia coli; identical to SEQ ID NO: 4554

SEQ ID NO: 19571 - protein, 747 aa, Escherichia coli; identical to SEQ ID NO: 3857

SEQ ID NO: 19572 - protein, 660 aa, Escherichia coli; identical to SEQ ID NO: 14467

SEQ ID NO: 19573 - protein, 208 aa, Escherichia coli; identical to SEQ ID NO: 1949

SEQ ID NO: 19574 - protein, 654 aa, Escherichia coli; identical to SEQ ID NO: 5571

SEQ ID NO: 19575 - protein, 656 aa, Escherichia coli; identical to SEQ ID NO: 10750

SEQ ID NO: 19576 - protein, 230 aa, Escherichia coli; identical to SEQ ID NO: 3019

SEQ ID NO: 19577 - protein, 412 aa, Escherichia coli; identical to SEQ ID NO: 13668

SEQ ID NO: 19578 - protein, 700 aa, Escherichia coli; identical to SEQ ID NO: 10597

SEQ ID NO: 19579 - protein, 472 aa, Escherichia coli; identical to SEQ ID NO: 7769

SEQ ID NO: 19580 - protein, 224 aa, Escherichia coli; identical to SEQ ID NO: 3792

SEQ ID NO: 19581 - protein, 760 aa, Escherichia coli
MENNRNFPARQFHSLTFFAGLCIGITPVAQALAAEGQANADDTLVVEASTPSLYAPQQSADPKFSRPVADTTRTMTVISEQVIKDQGATNLTDALKNVPGVGAFFAGENGNSTTGDAIYMRGADTSNSIYIDGIRDIGSVSRDTFNTEQVEVIKGPSGTDYGRSAPTGSINMISKQPRNDSGIDASASIGSAWFRRGTLDVNQVIGDTTAVRLNVMGEKTHDAGRDKVKNERYGVAPSVAFGLGTANRLYLNYLHVTQHNTPDGGIPTIGLPGYSAPSAGTAALNHSGKVDTHNFYGTDSDYDDSTTDTATMRFEHDINDNTTIRNTTRWSRVKQDYLMTAIMGGASNITQPTSDVNSWTWSRTANTKDVSNKILTNQTNLTSTFYTGAIGHDVSTGVEFTRETQTNYGVNPVTLPAVNIYHPDSSIHPGGLTRNGANANGQTDTFAIYAFDTLQITRDFELNGGIRLDNYHTEYDSATAYGGSGRGAITCPAGVAKGSPVTTVDTAKSGNLVNWKAGALYHLTENGNVYINYAVSQQPPGGNNFALAQSGSGNSANRTDFKPQKANTSEIGTKWQVLDKRLLLTAALFRTDIENEVEQNDDGTYSQYGKKRVEGYEISVAGNITPAWQMIGGYTQQKATIKNGKDVAQDGSSSLPYTPEHAFTLWSQYQATDDISVGAGARYIGSMHKGSDGAVGTPAFTEDYWVADAKLGYRVNRNLDFQLNVYNLFDTDYVASINKSGYRYHPGEPRTFLLTANMHF

SEQ ID NO: 19582 - protein, 749 aa, Escherichia coli; identical to SEQ ID NO: 11957

SEQ ID NO: 19583 - protein, 241 aa, Escherichia coli; identical to SEQ ID NO: 14776

SEQ ID NO: 19584 - protein, 686 aa, Escherichia coli; identical to SEQ ID NO: 3015

SEQ ID NO: 19585 - protein, 760 aa, Escherichia coli; identical to SEQ ID NO: 3026

SEQ ID NO: 19586 - protein, 213 aa, Escherichia coli; identical to SEQ ID NO: 2232

SEQ ID NO: 19587 - protein, 838 aa, Escherichia coli; identical to SEQ ID NO: 2795

SEQ ID NO: 19588 - protein, 862 aa, Escherichia coli; identical to SEQ ID NO: 19460

SEQ ID NO: 19589 - protein, 334 aa, Escherichia coli; identical to SEQ ID NO: 2751

SEQ ID NO: 19590 - protein, 840 aa, Escherichia coli; identical to SEQ ID NO: 9665

SEQ ID NO: 19591 - protein, 134 aa, Escherichia coli
MYLAAMYAETRNMTPYGGGEFDNGESRSAIANKTQNFEVVAQYQFDFGLRPSIAYLQSKGKDLGGWAHDGNGDPRYTNKDLVKYVDIGATYYFNKNMSTYVDYKINLLDNDDDFYEANGIATDDIVAVGLVYQF

SEQ ID NO: 19592 - protein, 654 aa, Escherichia coli; identical to SEQ ID NO: 4042

SEQ ID NO: 19593 - protein, 239 aa, Escherichia coli; identical to SEQ ID NO: 2759

SEQ ID NO: 19594 - protein, 204 aa, Escherichia coli; identical to SEQ ID NO: 2957

SEQ ID NO: 19595 - protein, 559 aa, Escherichia coli; identical to SEQ ID NO: 17336

SEQ ID NO: 19596 - protein, 260 aa, Escherichia coli; identical to SEQ ID NO: 4546

SEQ ID NO: 19597 - protein, 892 aa, Escherichia coli; identical to SEQ ID NO: 19435

SEQ ID NO: 19598 - protein, 831 aa, Escherichia coli; identical to SEQ ID NO: 12096

SEQ ID NO: 19599 - protein, 828 aa, Escherichia coli; identical to SEQ ID NO: 2388

SEQ ID NO: 19600 - protein, 161 aa, Escherichia coli; identical to SEQ ID NO: 2582

SEQ ID NO: 19601 - protein, 884 aa, Escherichia coli; identical to SEQ ID NO: 14714

SEQ ID NO: 19602 - protein, 878 aa, Escherichia coli; identical to SEQ ID NO: 12145

SEQ ID NO: 19603 - protein, 631 aa, Escherichia coli; identical to SEQ ID NO: 3058

SEQ ID NO: 19604 - protein, 818 aa, Escherichia coli; identical to SEQ ID NO: 8238

SEQ ID NO: 19605 - protein, 266 aa, Escherichia coli; identical to SEQ ID NO: 1893

SEQ ID NO: 19606 - protein, 672 aa, Escherichia coli
MIVSAAPQVVSELDTPAAVSVVDGEEMRLATPRINLSESLTGVPGLQVQNRQNYAQDLQLSIRGFGSRSTYGIRGIRLYVDGIPATMPDGQGQTSNIDLSSVQNVEVLRGPFSALYGNASGGVMNVTTQTGQQPPTIEASSYYGSFGSWRYGLKATGATGDGTQPGDVDYTVSTTRFTTHGYRDHSGAQKNLANAKLGVRIDEASKLSLIFNSVDIKADDPGGLTKAEWKANPQQAPRAEQYDTRKTIKQTQAGLRYERSLSSRDDMSVMMYAGERETTQYQSIPMAPQLNPSHAGGVITLQRHYQGIDSRWTHRGELGVPVTFTTGLNYENMSENRKGYNNFRLNSGMPEYGQKGELRRDERNLMWNIDPYLQTQWQLSEKLSLDAGVRYSSVWFDSNDHYVTPGNGDDSGDASYHKWLPAGSLKYAMTDAWNIYLAAGRGFETPTINELSYRADGQSGMNLGLKPSTNDTIEIGSKTRIGDGLLSLALFQTDTDDEIVVDSSSGGRTTYKNAGKTRRQGAELAWDQRFAGDFRVNASWTWLDATYRSNVCNEQDCNGNRMPGIARNMGFASIGYVPEDGWYAGTEARYMGDIMADDENTAKAPSYTLVGLFTGYKYNYHNLTVDLFGRVDNLFDKEYVGSVIVNESNGRYYEPSPGRNYGVGMNIAWRFE

SEQ ID NO: 19607 - protein, 883 aa, Escherichia coli; identical to SEQ ID NO: 9639

SEQ ID NO: 19608 - protein, 900 aa, Escherichia coli; identical to SEQ ID NO: 9699

SEQ ID NO: 19609 - protein, 226 aa, Escherichia coli; identical to SEQ ID NO: 9889

SEQ ID NO: 19610 - protein, 813 aa, Escherichia coli; identical to SEQ ID NO: 15302

SEQ ID NO: 19611 - protein, 796 aa, Escherichia coli
MAVEFNLNVLDKSMRDRIDISLLKEKGVIAPGEYFVSVAVNNNKISNGQKINWQKKGDKTIPCINDSLVDKFGLKPDIRQSLPQIDRCIDFSSRPEMLFNFDQANQQLNISIPQAWLAWHSENWAPPSTWKEGVAGVLMDYNLFASSYRPQDGSSSTNLNAYGTAGINAGAWRLRSDYQLNKTDSEDNHDQSGGISRTYLFRPLPQLGSKLTLGETDFSSNIFDGFSYTGAALASDDRMLPWELRGYAPQISGIAQTNATVTISQSGRVIYQKKVPPGPFIIDDLNQSVQGTLDVKVTEEDGRVNNFQVSAASTPFLTRQGQVRYKLAAGQPRPSMSHQTENETFFSNEVSWGMLSNTSLYGGLLISDDDYHSAAMGIGQNMLWLGALSFDVTWASSHFDTQQDERGLSYRFNYSKQVDATNSTISLAAYRFSDRHFHSYANYLDHKYNDSDAQDEKQTISLSVGQPITPLNLNLYANLLHQTWWNADASTTANITAGFNVDIGDWRDISISTSFNTTHYEDKDRDNQIYLSISLPFGNGGRVGYDMQNSSHSTIHRMSWNDTLDERNSWGMSAGLQSDRPDNGAQVSGNYQHLSSAGEWDISGTYAASDYSSVSSSWSGSFTATQYGAAFHRRSSTNEPRLMVSTDGVADIPVQGNLDYTNHFGIAVVPLISSYQPSTVAVNMNDLPDGVTVAENVIKETWIEGAIGYKSLASRSGKDVNVIIRNASGQFPPLGADIRQDDSGISVGMVGEEGHAWLSGVAENQLFTVVWGEQSCIIHLPERLEDTTKRLILPCH

SEQ ID NO: 19612 - protein, 332 aa, Escherichia coli; identical to SEQ ID NO: 2709

SEQ ID NO: 19613 - protein, 229 aa, Escherichia coli; identical to SEQ ID NO: 9651

SEQ ID NO: 19614 - protein, 203 aa, Escherichia coli; identical to SEQ ID NO: 2201

SEQ ID NO: 19615 - protein, 663 aa, Escherichia coli; identical to SEQ ID NO: 1910

SEQ ID NO: 19616 - protein, 729 aa, Escherichia coli; identical to SEQ ID NO: 4557

SEQ ID NO: 19617 - protein, 663 aa, Escherichia coli
MLNGIYSMRLKKRYLCTVLSLAFTQQSVAAQESDTLTVWSSPVSSTTTTVLDQPTMKALDKQNVAQALSVVPGVVLQKSGSRNEEQVKVRGFDSRQVPVYFDGVPIYVPYDGNLDLARILTNNLGAVEVSKGYSSLLQGPNQMGGAINITTQKPTKPLEASLGYRQGWSRSQDNAYDMHASFAASSDLGYLQVSGSQLKQDFLGLPHGVNNDIAGKHGKMINSSADDKRGIVKLGFTPRENDEYTLTYIKQDGEKDNPPYSGNSGQKSRYWQWPEYDKESFYYQGTTQLNDRFTLKSRLYHDTFENTLMMYNSLADLKNKKGSYSHYSDYSDGAGLQLAADVRENDLLSFAVNWKDDVHREKGAPHAAYDRYEDRTWSLASEYQWAAADNVDVVAGISYDWRDSVEAKKHEKDGSITHYDDNNQSAFNWQVMGKYHFANEDTLALSYYDRTRFPTLKERYTTSKPAYNQIAIVNPQLKPERARGVDLTWNGAFTHDWGFEVSVYYNRVSDAILSHNIDADTIQNQNSGTVDYSGLDAGIKGKISNILDVGLSYALIHADAKRKDIGKITDLPTQTMTAWMTLKPWEPLSVTLSEEARSSSYSNSDGSQKAAGFAVTHIRADYTLGHGFSVNASVNNLFDTKYAYSEGFIEEGRNFWAGIEYTF

SEQ ID NO: 19618 - protein, 274 aa, Escherichia coli; identical to SEQ ID NO: 2301

SEQ ID NO: 19619 - protein, 478 aa, Escherichia coli; identical to SEQ ID NO: 2405

SEQ ID NO: 19620 - protein, 332 aa, Escherichia coli; identical to SEQ ID NO: 2714

SEQ ID NO: 19621 - protein, 204 aa, Escherichia coli; identical to SEQ ID NO: 2957

SEQ ID NO: 19622 - protein, 673 aa, Escherichia coli; identical to SEQ ID NO: 2919

SEQ ID NO: 19623 - protein, 102 aa, Escherichia coli; identical to SEQ ID NO: 1829

SEQ ID NO: 19624 - protein, 235 aa, Escherichia coli; identical to SEQ ID NO: 4365

SEQ ID NO: 19625 - protein, 239 aa, Escherichia coli; identical to SEQ ID NO: 14867

SEQ ID NO: 19626 - protein, 191 aa, Escherichia coli; identical to SEQ ID NO: 2728

SEQ ID NO: 19627 - protein, 654 aa, Escherichia coli; identical to SEQ ID NO: 3854

SEQ ID NO: 19628 - protein, 656 aa, Escherichia coli; identical to SEQ ID NO: 2901

SEQ ID NO: 19629 - protein, 551 aa, Escherichia coli; identical to SEQ ID NO: 2452

SEQ ID NO: 19630 - protein, 362 aa, Escherichia coli; identical to SEQ ID NO: 4554

SEQ ID NO: 19631 - protein, 663 aa, Escherichia coli; identical to SEQ ID NO: 9256

SEQ ID NO: 19632 - protein, 193 aa, Escherichia coli; identical to SEQ ID NO: 2246

SEQ ID NO: 19633 - protein, 237 aa, Escherichia coli
MKMIAMQKNAAHTYAISSLLVLSLTGCAWIPSTPLVQGATSAQPVPGPTPVANGSIFQSAQPINYGYQPLFEDRRPRNIGDTLTIVLQENVSASKSSSANASRDGKTNFGFDTVPRYLQGVFGNARADVEASGGNTFNGKGGANASNTFSGTLTVTVDQVLVNGNLHVVGEKQIAINQGTEFIRFSGVVNPRTISGSNTVPSTQVADARIEYVGNGYINEAQNMGWLQRFFLNLSPM

SEQ ID NO: 19634 - protein, 366 aa, Escherichia coli; identical to SEQ ID NO: 2115

SEQ ID NO: 19635 - protein, 375 aa, Escherichia coli; identical to SEQ ID NO: 2432

SEQ ID NO: 19636 - protein, 209 aa, Escherichia coli
MRLSTGGVYVLAFCRSSLKSKKYFIILLALAAIAGLGTHAAWSSNGLPRIDNKTLARLAQQHPVVVLFRHAERCDRSTNQCLSDKTGITVKGTQDARELGNAFSADIPDFDLYSSNTVRTIQSATWFSAGKKLTVDKRFLQCGNEIYSAIKDLQRKAPDKNIVIFTHNHCLTYIAKDKRDATFKPDYLDGLVMHVEKGKVYLDGEFVNH

SEQ ID NO: 19637 - protein, 733 aa, Escherichia coli; identical to SEQ ID NO: 9713

SEQ ID NO: 19638 - protein, 660 aa, Escherichia coli; identical to SEQ ID NO: 5588

SEQ ID NO: 19639 - protein, 565 aa, Escherichia coli; identical to SEQ ID NO: 2674

SEQ ID NO: 19640 - protein, 686 aa, Escherichia coli; identical to SEQ ID NO: 4535

SEQ ID NO: 19641 - protein, 614 aa, Escherichia coli; identical to SEQ ID NO: 6666

SEQ ID NO: 19642 - protein, 259 aa, Escherichia coli; identical to SEQ ID NO: 12016

SEQ ID NO: 19643 - protein, 446 aa, Escherichia coli; identical to SEQ ID NO: 2177

SEQ ID NO: 19644 - protein, 122 aa, Escherichia coli; identical to SEQ ID NO: 2915

SEQ ID NO: 19645 - protein, 746 aa, Escherichia coli; identical to SEQ ID NO: 4597

SEQ ID NO: 19646 - protein, 696 aa, Escherichia coli; identical to SEQ ID NO: 5576

SEQ ID NO: 19647 - protein, 431 aa, Escherichia coli; identical to SEQ ID NO: 3408

SEQ ID NO: 19648 - protein, 713 aa, Escherichia coli; identical to SEQ ID NO: 4590

SEQ ID NO: 19649 - protein, 249 aa, Escherichia coli; identical to SEQ ID NO: 9840

SEQ ID NO: 19650 - protein, 214 aa, Escherichia coli; identical to SEQ ID NO: 19448

SEQ ID NO: 19651 - protein, 250 aa, Escherichia coli; identical to SEQ ID NO: 9904

SEQ ID NO: 19652 - protein, 700 aa, Escherichia coli; identical to SEQ ID NO: 12225

SEQ ID NO: 19653 - protein, 650 aa, Escherichia coli; identical to SEQ ID NO: 2146

SEQ ID NO: 19654 - protein, 360 aa, Escherichia coli; identical to SEQ ID NO: 3862

SEQ ID NO: 19655 - protein, 162 aa, Escherichia coli; identical to SEQ ID NO: 1965

SEQ ID NO: 19656 - protein, 208 aa, Escherichia coli; identical to SEQ ID NO: 1948

SEQ ID NO: 19657 - protein, 224 aa, Escherichia coli; identical to SEQ ID NO: 3792

SEQ ID NO: 19658 - protein, 236 aa, Escherichia coli; identical to SEQ ID NO: 2726

SEQ ID NO: 19659 - protein, 700 aa, Escherichia coli; identical to SEQ ID NO: 2784

SEQ ID NO: 19660 - protein, 331 aa, Escherichia coli; identical to SEQ ID NO: 5381

SEQ ID NO: 19661 - protein, 265 aa, Escherichia coli; identical to SEQ ID NO: 19451

SEQ ID NO: 19662 - protein, 231 aa, Escherichia coli; identical to SEQ ID NO: 2864

SEQ ID NO: 19663 - protein, 224 aa, Escherichia coli; identical to SEQ ID NO: 4515

SEQ ID NO: 19664 - protein, 241 aa, Escherichia coli; identical to SEQ ID NO: 2075

SEQ ID NO: 19665 - protein, 784 aa, Escherichia coli; identical to SEQ ID NO: 2241

SEQ ID NO: 19666 - protein, 715 aa, Escherichia coli; identical to SEQ ID NO: 5610

SEQ ID NO: 19667 - protein, 432 aa, Escherichia coli; identical to SEQ ID NO: 2026

SEQ ID NO: 19668 - protein, 246 aa, Escherichia coli; identical to SEQ ID NO: 3838

SEQ ID NO: 19669 - protein, 353 aa, Escherichia coli; identical to SEQ ID NO: 6704

SEQ ID NO: 19670 - protein, 360 aa, Escherichia coli; identical to SEQ ID NO: 3354

SEQ ID NO: 19671 - protein, 760 aa, Escherichia coli; identical to SEQ ID NO: 9855

SEQ ID NO: 19672 - protein, 222 aa, Escherichia coli; identical to SEQ ID NO: 1956

SEQ ID NO: 19673 - protein, 412 aa, Escherichia coli; identical to SEQ ID NO: 9906

SEQ ID NO: 19674 - protein, 517 aa, Escherichia coli; identical to SEQ ID NO: 2462

SEQ ID NO: 19675 - protein, 725 aa, Escherichia coli; identical to SEQ ID NO: 2870

SEQ ID NO: 19676 - protein, 539 aa, Escherichia coli; identical to SEQ ID NO: 3146

SEQ ID NO: 19677 - protein, 752 aa, Escherichia coli
MAPSKTAQPKHSLRKIAVVVATAVSGMSVYAQAAVEPKEDTITVTAAPAPQESAWGPAATIAARQSATGTKTDTPIQKVPQSISVVTAEEMALHQPKSVKEALSYTPGVAVGTRGASNTYDYLIIRGFAADGQSQNNYLNGLKLQGNFYNDAVIDPYMLERAEIMRGPVSVLYGKSSPGGLLNMVSKRPTTEPLKEVQFKAGTDSLFQTGFDFSDALDDDGVYSYRLTGLARSANAQQKGSEEQRYAIAPAFTWRPDDKTNFTFLSYFQNEPETGYYGWLPKEGTVEPLPNGKRLPTDFNEGAKNNTYSRNEKMIGYSFDHEFNDTFTVRQNLRFAQNKVSQKSIYGYGMCSDPLYTKDQEALKASPCLSIPQSQWGHTLTRQYVIDNEKLENFSVDTQLQSKFATGSVDHTLLTGVDFMRMRNDIDSWFGYAGSVAPSDIYNLDRSDFDFGAHPNPSGPYRVLLKQKQTGLYVQDQAQWDKVLVTLGGRYDWADQSSFNRDYGNKSERDDKEFTWRGGVNYLFDNGVTPYFSYSESFEPASQTDANGDLFAPSKGKQYEVGVKYVPEDRPIVVTGALYQLTKTNNLMADPNGSLFSVEGGEIRARGVELEAKAALSASVNVVGSYTYTDAEYTTDTTYKGNTPAQVPKHMASLWADYTFFDGPLSGLTLGTGGRYTGSSYGDPANSFKVGSYTVVDALVRYDLARVGMAGSNVALHVNNLFDREYVASCFNTYGCFWGAERQVVATATFRF

SEQ ID NO: 19678 - protein, 380 aa, Escherichia coli
MNICSAVTSFFNKSSKKGRTMKKLTVAISAVAASVLMAMSAQAAEIYNKDSNKLDLYGKVNAKHYFSSNDADDGDTTYARLGFKGETQINDQLTGFGQWEYEFKGNRAESQGSSKDKTRLAFAGLKFGDYGSIDYGRNYGVAYDIGAWTDVLPEFGGDTWTQTDVFMTGRTTGVATYRNNDFFGLVDGLNFAAQYQGKNDRTDVTEANGDGFGFSTTYEYEGFGVGATYAKSDRTDGQVAYGKSKFNASGKNAEVWAAGLKYDANNIYLATTYSETQNMTVFDNNHIANKAQNFEAVAQYQFDFGLRPSVAYLQSKGKDLGVHGDRDLVKYVDVGATYYFNKNMSTFVDYKINLIDDSKFTKTAGIDTDDIVAVGLVYQF

SEQ ID NO: 19679 - protein, 869 aa, Escherichia coli; identical to SEQ ID NO: 4869

SEQ ID NO: 19680 - protein, 838 aa, Escherichia coli
MPQRHHQGHKRTPKQLALIIKRCLPMVLTGSGMLCTTANAEEYYFDPIMLETTKSGMQTTDLSRFSKKYAQLPGTYQVDIWLNKKKVSQKKITFTANAEQLLQPQFTVEQLRELGIKVDEIPALAEKDDDSVINSLEQIIPGTAAEFDFNHQRLNLSIPQIALYRDARGYVSPSRWDDGIPTLFTNYSFTGSDNRYRQGNRSQRQYLNMQNGANFGPWRLRNYSTWTRNDQASSWNTISSYLQRDIKALKSQLLLGESATSGSIFSSYTFTGVQLASDDNMLPNSQRGFAPTVRGIANSSAIVTIRQNGYVIYQSNVPAGAFEINDLYPSSNSGDLEVTIEESDGTQRRFIQPYSSLPMMQRPGHLKYSATAGRYRADANSDSKEPEFAEATAIYGLNNTFTLYGGLLGSEDYYALGIGIGGTLGALGALSMDINRADTQFDNQHSFHGYQWRTQYIKDIPETNTNIAVSYYRYTNDGYFSFDEANTRNWNYNSRQKSEIQFNISQTIFDGVSLYASGSQQDYWGNNDKNRNISVGVSGQQWGVGYSLNYQYSRYTDQNNDRALSLNLSIPLERWLPRSRVSYQMTSQKDRPTQHEMRLDGSLLDDGRLSYSLEQSLDDDNNHNSSVNASYRSPYGTFSAGYSYGNDSSQYNYGVTGGVVIHPHGVTLSQYLGNAFALIDANGASGVRIQNYPGIATDPFGYAVVPYLTTYQENRLSVDTTQLPDNVDLEQTTQFVVPNRGAMVAARFNANIGYRVLVTVSDRNGKPLPFGALASNDETGQQSIVDEGGILYLSGISSKSQSWTVRWGNQADQQCQFAFSTPDSEPTTSVLQGTAQCH

SEQ ID NO: 19681 - protein, 897 aa, Escherichia coli
MKLNIFTKSMIGMGLVCSALPALAMEAWNNQQGGNKYQVIFDGKIYENAWWVSSTNCPGKAKANDATNPWRLKRTATAAEISQFGNTLSCEKSGSSSSSNSNTPASNTPANGGSATPAQGTVPSNSSVVAWNKQQGGQTWYVVFNGAVYKNAWWVASSNCPGDAKGNDASNPWRYVRAATATEISETSNPQSCTSAPQPAPDVKPAPDVKPAPDVQPAPADKSNDNYAVVAWKGQEGSSTWYVIYNGGIYKNAWWVGAANCPGDAKENDASNPWRYVRAATATEISQYGNPGSCSVKPDNNGGAVTPVDPTPETPVTPTPDNSEPSTPADSGNDYSLQAWSGQEGSEIYHVIFNGNVYKNAWWVGSKDCPRGTSAENSNNPWRLERTATAAELSQYGNPTTCEIDNGGVIVADGFQASKAYSANSIVDYNDAHYKTSVDQDAWGFVPGGDNPWKKYEPAKAWSASTVYVKGDRVVVDGQAYEALFWTQSDNPALVANQNATGSNSRPWKPLGKAQSYSNEELNNAPQFNPETLYASDTLIRFNGVNYISQSKVQKVSPSDSNPWRVFVDWTGTKERVGTPKKAWPKHVYAPYVDFTLNTIPDLAALAKNHNVNHFTLAFVVSKDANTCLPTWGTAYGMQNYAQYSKIKALRKAGGDVMLSIGGANNAPLAASCKNVDDLMQHYYDIVDNLNLRVLDFDIEGTWVADQASIERRNLAVKKVQDKWKSEGKDIAIWYTLPILPTGLTPEGMNVLSDAKAKGVELAGVNVMTMDYGNAICQSANTEGQNIHGKCATSAIANLHSQLKGLHPNKSDAEIDAMMGTTPMVGVNDVQGEVFYLSDARLVMQDAQKRNLGMVGIWSIARDLPGGTNLSPEFHGLTKEQAPKYAFSEIFAPFTKQ

SEQ ID NO: 19682 - protein, 366 aa, Escherichia coli
MQNWIKTVVVAVSLALPGVVLAQSLESLVNVQGVRENQLVGYSLVVGLDGTGDKNQVKFTNQTITNMLRQFGVQLPNKIDPKVKNVAAVAVSAMLPPMYSRGQTIDVTVSSIGDAKSIRGGTLLLTQLHGADGEVYALAQGSVVVGGMNATGASGSSVTVNTPTAGLIPNGATVEREIPSDFQMGDTITLNLKRPSFKDANNIAAAINASFGGIATAQSSTNVTVRAPTSPGARVAFMSQLDDVQVQAEKIRARVVFNSRTGTVVMGDGVALHAAAVSHGSLTVSINETSNVSQPNAFAGGRTAVTPQSNIAVNHARPGVVSLPESSSLKTLVNALNSLGATPDDIMSILQALHEAGALDADLEVI

SEQ ID NO: 19683 - protein, 881 aa, Escherichia coli
MPDHSLFRLRILPWCIALAISGSYSSVWAEDDIQFDSRFLELKGDTKIDLKRFSSQGYVEPGKYNLQVQLNKQPLAEEYDIYWYAGEDDASKSYACLTPELVAQFGLKEDVAKNLQWSHDAKCLKSGQLEGMEIKADLSQSALVISLPQAYLEYTYPDWDPPSRWDDGISGIVADYSINAQTRHEENGGDDSNEISGNGTVGVNLGPWRMRADWQTNYQHTRSNDDDEEFSGDDTQKKWEWSRYYAWRALPSLKAKLALGEDYLNSDIFDGFNYVGGSVSTDDQMLPPNLRGYAPDISGVAHTTAKVTVSQMGRVIYETQVPAGPFRIQDLGDSVSGTLHIRIEEQNGQVQEYDISTASMPYLTRPGQVRYKIMMGRPQEWGHHVEGEFFSGAEASWGIANGWSLYGGALGDENYQSAALGVGRDLSTFGAVAFDVTHSHTKLDKDTAYGKGSLDGNSFRVSYSKDFDQLNSRVTFAGYRFSEENFMTMSEYLDASDSGMVRTGNDKEMYTATYNQNFRDAGVSVYLNYTRHTYWDREEQTNYNIMLSHYFNMGSIRNMSVSLTGYRYEYDNRADKGMYISLSMPWGDNSTVSYNGNYGSGTDSSQVGYFSRVDDATHYQLNVGTSDKHTSVDGYYSHDGSLAQVDLCANYHEGQYTSAGLSLQGGATLTAHGGALHRTQNMGGTRLLIDADGVADVPVEGNGAAVYTNMFGKAVVSDVNNYYRNQAYIDLNKLPENAEATQSVVQATLTEGAIGYRKFAVISGQKAMAVLRLQDGSHPPFGAEVKNDNEQTVGLVDDDGNVYLAGVKPGEHMRVFWSGVAHCDINLPDPLPADLFNGLLLPCQHKGNVAPVTSPAVKPAIQEQTQRVTPTEPPTSISVNQ

SEQ ID NO: 19684 - protein, 700 aa, Escherichia coli
MKIFSVRQTVLPALLALSPVVFAADEQTMIVSAAPQVVSELDTPAAVSVVDGEEMRLATPRINLSESLTSVPGLQVQNRQNYAQDLQLSIRGFGSRSTYGIRGIRLYVDGIPATMPDGQGQTSNIDLSSVQNVEVLRGPFSALYGNASGGVMNVTTQTGQQPPTIEASSYYGSFGSWRYGLKATGATGDGTQPGDVDYTVSTTRFTTHGYRDHSGAQKNLANAKLGVRIDDASKLSLIFNSVDIKADDPGGLTKAEWKANPQQAPRAEQYDTRKTIKQTQAGLRYERSLSSRDDMSVMMYAGERETTQYQSIPMAPQLNPSHAGGVITLQRHYQGIDSRWTHRGELGVPVTFTTGLNYENMSENRKGYNNFRLNSGMPEYGQKGELRRDERNLMWNIDPYLQTQWQLSEKLSLDAGVRYSSVWFDSNDHYITPGNGDDSGDASYHKWLPAGSLKYAMTDAWNIYLAAGRGFETPTINELSYRADGQSGMNFGLKPSTNDTIEIGSKTRIGDGLLSLALFQTDTDDEIVVDSSSGGRTTYKNAGKTRRQGAELAWDQRFAGDFRVNASWTWLDATYRSNVCNEQDCNGNRMPGIARNMGFASIGYVPEDGWYAGTEARYMGDIMADDENTAKAPSYTLIGLFTGYKYNYHNLTVDLFGRVDNLFDKEYVGSVIVNESNGRYYEPAPGRNYGVGVNIAWRFE

SEQ ID NO: 19685 - protein, 386 aa, Escherichia coli
MVDDVPVAQVLQALAEQEKLNLVVSPDVSGTVSLHLTDVPWKQALQTVVKSAGLITRQEGNILSVHSIAWQNNNIARQEAEQARAQANLPLENRSITLQYADAGELAKAGEKLLSAKGSMTVDKRTNRLLLRDNKTALSALEQWVAQMDLPVGQVELSAHIVTINEKSLRELGVKWTLADAQHAGGVGQVTTLGSDLSVATATTHVGFNIGRINGRLLDLELSALEQKQQLDIIASPRLLASHLQPASIKQGSEIPYQVSSGESGATSVEFKEAVLGMEVTPTVLQKGRIRLKLHISQNVPGQVLQQADGEVLAIDKQEIETQVEVKSGETLALGGIFTRKNKSGQDSVPLLGDIPLFGQLFRHDGKEDERRELVVFITPRLVSSE

SEQ ID NO: 19686 - protein, 266 aa, Escherichia coli; identical to SEQ ID NO: 1894

SEQ ID NO: 19687 - protein, 760 aa, Escherichia coli; identical to SEQ ID NO: 2080

SEQ ID NO: 19688 - protein, 819 aa, Escherichia coli
MDTVNIYRLSFVSCLVVAMPCALAVEFNLNVLDKSMRDRIDISLLKEKGVIAPGEYFVSVAVNNNQISNGQKINWHKNDDKTIPCINDLLVDKFGLKPEVRQSLPLINQCVDFSSRPEMLFNFDQANQQLNITIPQAWLAWHSENWTPPSTWKEGVAGILMDYNLFASSYRPQDGSSSTNLNAYGTTGINAGAWRLRSDYQLNQTDSDDNHEQSGGISRTYLFRPLPQLGSKLTLGETDFSSNIFDGFSYTGAALASDERMLPWELRGYAPQISGIAQTNATVTISQSGRVIYQKKVPPGPFIIDDLNQSVQGTLDVKVTEEDGRVNNFQVSAASTPFLTRQGQVRYKLAAGQPRPSMSHQTENETFFSNEVSWGMLSNTSLYGGLLLSGDDYHSAAMGIGQNMLWLGALSFDVTWASSHFDTQQDERGLSYRFNYSKQVDATNSTISLAAYRFSDRHFHSYANYLDHKYNDSDAQDEKQTISLSVGQPITPLNLNLYANLLHQTWWNADASTTANITAGFNVDIGDWRDISISTSFNTTHYEDKDRDNQIYLSISLPFGNGGRVGYDMQNSSHSTTHRMSWNDTLDERNSWGMSAGLQSDRPDNGAQVSGNYQHLSSAGEWDISGTYAANDYSSVSSSWSGSFTATQYGAAFHRRSSTNEPRLMVSTDGVADIPVQGNLDYTNHFGIAVVPLISSYQPSTVAVNMNDLPDGVTVTENVIKETWIEGAIGYKSLASRSGKDVNVIIRNASGQFPPLGADIRQDDSGISVGMVGEEGHAWLSGVAENQKFTVVWGDSQHCSLHLPEHMEDTANRLILPCH

SEQ ID NO: 19689 - protein, 243 aa, Escherichia coli; identical to SEQ ID NO: 5793

SEQ ID NO: 19690 - protein, 663 aa, Escherichia coli; identical to SEQ ID NO: 1910

SEQ ID NO: 19691 - protein, 365 aa, Escherichia coli; identical to SEQ ID NO: 2112

SEQ ID NO: 19692 - protein, 235 aa, Escherichia coli; identical to SEQ ID NO: 4365

SEQ ID NO: 19693 - protein, 233 aa, Escherichia coli; identical to SEQ ID NO: 2006

SEQ ID NO: 19694 - protein, 362 aa, Escherichia coli; identical to SEQ ID NO: 5812

SEQ ID NO: 19695 - protein, 826 aa, Escherichia coli
MLRMTPLASAIVALLLGIEAYAAEETFDTHFMIGGMKDQQVANIRLDDNQPLPGQYDIDIYVNKQWRGKYEIIVKDNPQETCLSREVIKRLGINSDNFASGKQCLTFEQLVQGGSYTWDIGVFRLDFSVPQAWVEELESGYVPPENWERGINAFYTSYYLSQYYSDYKASGNNKSTYVRFNSGLNLLGWQLHSDASFSKTNNNPGGWKSNTLYLERGFAQLLGTLRVGDMYTSSDIFDSVRFRGVRLFRDMQMLPNSKQNFTPRVQGIAQSNALVTIEQNGFVVYQKEVPPGPFAITDLQLAGGGADLDVSVKEADGSVTTYLVPYAAVPNMLQPGVSKYDLAAGRSHIEGASKQSDFVQAGYQYGFNNLLTLYGGSMVANNYYAFTLGAGWNTRIGAISVDATKSHSKQDNGDVFDGQSYQIAYNKFVSQTSTRFGLAAWRYSSRDYRTFNDHVWANNKDNYRRDENDVYDIADYYQNDFGRKNSFSANMSQSLPEGWGSVSLSTLWRDYWGRSGSSKDYQLSYSNNLRRISYTLAASQAYDENHHEEKRFNIFISIPFDWGDDVSTPRRQIYMSNSTTFDDQGFASNNTGLSGTVGSRDQFNYGVNLSHQHQGNETTAGANLTWNAPVATVNGSYSQSSTYRQAGASVSGGIVAWSGGVNLANRLSETFAVMNAPGIKDAYVNGQKYRTTNRNGVVIYDGMTPYRENHLMLDVSQSDSEAELRGNRKIAAPYRGAVVLVNFDTDQRKPWFIKALRADGQSLTFGYEVNDIHGHNIGVVGQGSQLFIRTNEVPPSVNVAIDKQQGLSCTITFGKEIDESRNYICQ

SEQ ID NO: 19696 - protein, 614 aa, Escherichia coli; identical to SEQ ID NO: 1888

SEQ ID NO: 19697 - protein, 729 aa, Escherichia coli; identical to SEQ ID NO: 3979

SEQ ID NO: 19698 - protein, 161 aa, Escherichia coli; identical to SEQ ID NO: 2582
